United States Patent Application Publication US 2005/0228172 A9 - sequence listing, part 21

SEQ ID NO: 68346 - DNA, 773 bp, Homo sapiens
gccaccacgcccagctaatttttgtatttttagtagagatggggtttcaccatgttagccaagatggtctccatctcttgacctcgtgatctgcccgcctcggcctcccaaagtgctgggattacaagcgtgagctaccgcgcctggccagcaatacattttcttaaaaattgctctactgtgtattgctttttctattgaaataagaagtttagagttgaagcaaaatattaggacaatttgtgagatgttatcattgaattcttgcaaaaagtgtgttgaacagtagtaatcttcctggccctgttgtatctctagacatagtgacagattctcattccccttacttccacttcaagttatctagacttcatgatgattttgttatatatgtttttgctgctataatatttttttctcaacatgtcagtgtactttcataagttgttatatttaatttgtcttttaccagtgactggaagaragcaacctaatgtcaacatgatctcaaatcgcatgtctataatgtatttctgcatatgtccttgttgttacagaagataatcacagaaaaaaaatgtattgaaaggaaaactgagagccagaaataagagcttccagttaatgaggaagagtgactagacttcaagtagttgactttaaccagaagaagtaagcttgtaaaaggggaatgagatgtaatctttaacattttaaaaatattttaattaaaaacaacatgttctcagtataatcaattaaacaatgtaaag

SEQ ID NO: 68347 - DNA, 1081 bp, Homo sapiens
  misc_feature (1)...(1081): n = A,T,C or G
ctgtacgacagtcctgtgagataagtaagcattgatctctggttcagaaaagtgatttcttcaaagtgaaatgatgaacggaagagtatcctgaccttaaacttggctttttaaattgcccgttcaccttgaagagtggttccaatcacaagtgttaccttccaaggacagtgtcattctggttataatcagcttgctcccctgccctgagccttctgtccaagtttgtgcaggtgtgggtctggggcaggggacagctcatccatttcccactgcacggaacagaggctgtgtccagggccccagcaacaaagatttctcctttgggtttctgtttccctctttcagttcagagtctgtcatctgaaccatgaggatctggtggyttctgcttgccattgaaatctgcacagggaacataaactcacaggacacctgcaggcaagggcaccctggaatccctgggaaccccggtcacaatggtctgcctggaagagatggacgagacggagcgaagggtgacaaaggcgatgcaggtactcacctgacggcttcggctgcctttcaacttctctcttcattcctttcatctcattcactcatcatctgtgtgattttccacctacccactcacaccccatccatccatacatacatcaacccagcaacactcactggagcctgaccccattcatccatccacccatctgcccagcaacactcacggggtctgctccatgccagactctgtgccaggtgctggtggagagcacagggcaagatcgccatgacccctgccctcctgggttctctcatctctgacaccgcagaacattttcagtagtatacgatgtcatggatcctcccatctcaggtgacaggtatgatggatttttggcaacaaaaggctaatagagagatctgatcacgaattatttggcagcaagcacccagctgcagtgcaggtgagagctaataccgcatcatgccatgaagcaggagatgcggagtgacagatgacacanaaggagacgagaatctgaaaccatacagctgctgcttatgcatctatatgacctag

SEQ ID NO: 68348 - DNA, 865 bp, Homo sapiens
cttcctctttaaaatcctgccacttgcttcagactctccctattatatttccacttcctggctgcagtcatcagaattcgggttttattgcatccccttaaagacaagggtcatctgttgtatagctttctgtccccagcacctgacagtcattccgttggaaaaaatactgatagattgcttcttggacttttggctaagatcaagtagagaaacagggatggagacattcctgaacttgcacaggaggactgaggccatgagtctgaaagaagagactgctcagtgacagattgttggctttgccaagggtggctcattttcccaagaaagaaaatctgactagcagggtggccaatctaaaaagctgctaccatccttaaaagatctttctctctcttttctggtaaaagtctatataattcctcattctcatattttgagttccaagcctttcaatatgtacagagagtaagaatgatggcacttttctactcaggacactagggcgatgtactggttttagtaatactgtggccttgcagataaaggayggaagcagaatattggatcatatttttcatcttttttacctcctcagctatccagcacattgcttggcagcattgttatctatatttatgttgtcaatatccagtttggagcacagacttccaactaaattacacataatatcctgatggtcttcactctgcaaatggtattgtgttggcaatacactctttaacattccacctctcacttaatgtcacacttaactgcagctcttaactttggagtaatgtagacattttctaatagtttcttattctgagtaagatgcagatgattaccttcccttggg

SEQ ID NO: 68349 - DNA, 1516 bp, Homo sapiens
tatgaaggctgccaagtggctactgcccactttttgtttactcttaatatccacctgcttcccaaagtgatctgctcctcccaaccttgggctgcactggggaagggcggtcgctagggtggggagggggcgagccccagaacccatagggcagagcatagtggctccatgtataggasacagtgaaagagatgggggtggcattttcttccaggagagttgtggggagatgaccgttaggtcataagcgcgcccctactctgcactggcgagaccagcaaagctggagtgaacccagctgaacctgggccgcagcagccccggaggctggaggcgctgcagtcgggaaacaccaggaggatggagcccttttccctgtaagcaggaggccaggatcctgattcctgagccggcttcccacggaccccaggccccggcagggtcctggcgggaggaataacccactgagtgagtggggtgtcagcaaagcggggccgcagggcaggttctggaagcctctccgcgtggctgggctggagtgtgcagacgtgggagagcccggaatggggagcgcgtggccggtgaaggcccgaggctgtgcttccgtcgctggctctgaggcagaggtccaggccggcaggctgcccaggtggtcctgtctcagagctctccggggcgcagaggcgcgggaagcggggaagggccgggcagcgagacgggtgtccccagcaggaggtcggggacccgtcgcgcgttccgtcggggccgcctgcggtgcaggggtcagagaccagccacgcgagcaagagggagcccggccacaactgctgagagcccccagcggagctgggactcaggggctccttgcgtttagccaccaagagtgggggcaggctgcggggtgccggggagaagccagatctcactcattttacaccgactaattagatcccgccgcccacctgggaccacggcattgtcatgtccgctgcactgacggggaaattgaggcacgggggcgagtaaggcgggagagggagtcggcgccgccgagctggggcgagccccgcacccacccgtacactcggcctctgcccctgctctgtgcgtgggctcctgctctgtgcgtggcctcgccgccgagctggggtgagccccgcacccacccgtacaaccggcctctgctcctgctctttgcgtggcctcctgctctgtgcgtggcctctgctcctgctgcgtgcactgcggcatctcgggaaaccgggctgggctcctctgtcctctggaagctactgtaagttttagataaatgttactactagacacgaggaaagtgagtccatgattactggcattgaacaaatggttgcaccgcgttctccgtggtaggtggagtgtgtgattgtgagaggggaatggacactgaatcctaacctacacaaatgcctaaactcgtaaggcattacgacacacccatctgaaaatctaattaagcggtaggaattctaatggtccg

SEQ ID NO: 68350 - DNA, 618 bp, Homo sapiens
atgaacatcctttgccttcaaattgaatttgaggatcaacctcagctattttcataaaataaatttaaaaatgtataaaaagatgaaaaatatgagggaaacattaagtgaaatggaatttgaattcataagttgtgatatccatctaaatgagtcaccaagagataaaagatgaaaaatgaaaacaaatacagaaataatagaagaaaactttaaaaggtagagaataaagaaacacatgctgtaatgtcactacccactcagtgttaatttaaatggatttgttgrgaagactccaaaagcaggtataaatgtcgagtatgtgtgtgcacatgtgtgtgtgtatgtgtgcaaccctatataaaatattttaaaatcacttttattgaaatattgcatatgcacatctaagaacaaattttaagcttgatgaatttttacattgttgacacagccatttaactatcagctaagagaggaaataaaacataaccagcaactctcacctcgttttatattcgctatcaatccttactcttttttttaatttgagacagagtctcattctgttgctcaggctggagtgcagtggcatgatctcagctcactgaaacttta

SEQ ID NO: 68351 - DNA, 471 bp, Homo sapiens
ttatttttacataaaaatactttctgggttgagcatggtgactcatacctataatcccaacactttgggaggctgaggtgggaagatcacttgaggccaagagatcaagaccaacctgggcaagagagtgagaccctatctctacaaaaactttaaaaaattaaccaggcatggtggtggatgcctgtagacccagctactcaggaggcagaggtgggaggatagtttgaggccaggagttcaaggctgcaatgagctataatcatgctactgggctccagcctgggcaatggagtgagaacctgtctcaggaagaargaaaagagaaggaaggaaggaaggaaaaaaagaaagaaaaaagagaaagagaaaagaaagaaaggaagaaaggaaggaaggaaggaaggaaggaaggaaggaagaaagaaagaaagaaagaaagaaagaaagaaagaaagaaagaaagagaga

SEQ ID NO: 68352 - DNA, 471 bp, Homo sapiens
ttatttttacataaaaatactttctgggttgagcatggtgactcatacctataatcccaacactttgggaggctgaggtgggaagatcacttgaggccaagagatcaagaccaacctgggcaagagagtgagaccctatctctacaaaaactttaaaaaattaaccaggcatggtggtggatgcctgtagacccagctactcaggaggcagaggtgggaggatagtttgaggccaggagttcaaggctgcaatgagctataatcatgctactgggctccagcctgggcaatggagtgagaacctgtctcaggaagaaggaaaagagaaggaaggaaggaaggaaaaaaagaaagaaaaaagagaaagagaaaagaaagaaaggaagaaaggaaggaaggaaggaaggaaggaaggaaggaagaaagaaagaaagaaagaaagaaagaaagaaagaaagaaagaaagaraga

SEQ ID NO: 68353 - DNA, 785 bp, Homo sapiens
aagtgttacacttagaactgacaaattcaacatattttgtcagacaagcattgggctcattctgtccattccacagtctattggctgaactctgctaaacctatstgattaaataaagacatctgtaaaagtcttaataatggtcacactacaaagctctttgagtaactaatcccagtgttagccagcaatgagtcttagggaagttcttcacattgacctggattccaaatacctaataaaaaagagcaagtgtcaaactcagagtgtgtgtctctctcttcctgtttatttgtgaatggcttttagtgaataggaaaagaacaaaaagtataaatgcagcttgtccaccacaacaatgtgctttttcaacttttagctgactaagacataaaaagttataatttcactactttttatataaacataactgcatattttcacatctttgctttaagacttaagctcctccagctgatcataaattgccaggaaatgtctgcccagtctatcacagtgtcttaattaagcaaaggcatagaaattatatgggggccttggcccgtgggactcactaggtgtaatgaattctgaagaagcagtagacacagatttcccataataaatactagtggaaggacaacagaaataaaaaaagttttttctcttttctaccaatctcttccttttgaaaaagatagcaacaaagatagcttaaagatagatctttaagcctcaattttgaggccatttctttctagagaatttttggtttctcctttcca

SEQ ID NO: 68354 - DNA, 785 bp, Homo sapiens
aagtgttacacttagaactgacaaattcaacatattttgtcagacaagcattgggctcattctgtccattccacagtctattggctgaactctgctaaacctatctgattaaataaagacatctgtaaaagtcytaataatggtcacactacaaagctctttgagtaactaatcccagtgttagccagcaatgagtcttagggaagttcttcacattgacctggattccaaatacctaataaaaaagagcaagtgtcaaactcagagtgtgtgtctctctcttcctgtttatttgtgaatggcttttagtgaataggaaaagaacaaaaagtataaatgcagcttgtccaccacaacaatgtgctttttcaacttttagctgactaagacataaaaagttataatttcactactttttatataaacataactgcatattttcacatctttgctttaagacttaagctcctccagctgatcataaattgccaggaaatgtctgcccagtctatcacagtgtcttaattaagcaaaggcatagaaattatatgggggccttggcccgtgggactcactaggtgtaatgaattctgaagaagcagtagacacagatttcccataataaatactagtggaaggacaacagaaataaaaaaagttttttctcttttctaccaatctcttccttttgaaaaagatagcaacaaagatagcttaaagatagatctttaagcctcaattttgaggccatttctttctagagaatttttggtttctcctttcca

SEQ ID NO: 68355 - DNA, 785 bp, Homo sapiens
aagtgttacacttagaactgacaaattcaacatattttgtcagacaagcattgggctcattctgtccattccacagtctattggctgaactctgctaaacctatctgattaaataaagacatctgtaaaagtcttaatratggtcacactacaaagctctttgagtaactaatcccagtgttagccagcaatgagtcttagggaagttcttcacattgacctggattccaaatacctaataaaaaagagcaagtgtcaaactcagagtgtgtgtctctctcttcctgtttatttgtgaatggcttttagtgaataggaaaagaacaaaaagtataaatgcagcttgtccaccacaacaatgtgctttttcaacttttagctgactaagacataaaaagttataatttcactactttttatataaacataactgcatattttcacatctttgctttaagacttaagctcctccagctgatcataaattgccaggaaatgtctgcccagtctatcacagtgtcttaattaagcaaaggcatagaaattatatgggggccttggcccgtgggactcactaggtgtaatgaattctgaagaagcagtagacacagatttcccataataaatactagtggaaggacaacagaaataaaaaaagttttttctcttttctaccaatctcttccttttgaaaaagatagcaacaaagatagcttaaagatagatctttaagcctcaattttgaggccatttctttctagagaatttttggtttctcctttcca

SEQ ID NO: 68356 - DNA, 785 bp, Homo sapiens
aagtgttacacttagaactgacaaattcaacatattttgtcagacaagcattgggctcattctgtccattccacagtctattggctgaactctgctaaacctatctgattaaataaagacatctgtaaaagtcttaataatggtcacactacaaagctctttgagtaactaatcccagtgttagccagcaatgagtcttagggaagttcttcacattsacctggattccaaatacctaataaaaaagagcaagtgtcaaactcagagtgtgtgtctctctcttcctgtttatttgtgaatggcttttagtgaataggaaaagaacaaaaagtataaatgcagcttgtccaccacaacaatgtgctttttcaacttttagctgactaagacataaaaagttataatttcactactttttatataaacataactgcatattttcacatctttgctttaagacttaagctcctccagctgatcataaattgccaggaaatgtctgcccagtctatcacagtgtcttaattaagcaaaggcatagaaattatatgggggccttggcccgtgggactcactaggtgtaatgaattctgaagaagcagtagacacagatttcccataataaatactagtggaaggacaacagaaataaaaaaagttttttctcttttctaccaatctcttccttttgaaaaagatagcaacaaagatagcttaaagatagatctttaagcctcaattttgaggccatttctttctagagaatttttggtttctcctttcca

SEQ ID NO: 68357 - DNA, 550 bp, Homo sapiens
gttctcagtgcccagcaacgggtctcaggaaaggctcgttaaattaatgggctgtcaggttatccaaatatggaattatgatttcagcaaaactcttccccacccattgtttgatcaaaccctagcaaccatcctgtgcagtgcagatctcagactctatttagggggctcaggtgcagcccagagaagagaagcgacttgcacaagagctgagagctccccgttaaggcagaattttcctcccccggcagcctccccagctgaggaggctgagccctatgctcatggaatagggtgggggcactggggtcacctgttcccacctctgggtagtggcttgccttgatcaggggccttccagagacagcatcttcacccagaatcagccatcaggaattgtagcccagtgccaggaagcaccctggggggagtaatgggaagttagttccgatgttgaatgcactttggcatgtttcaagcacctcaagtaagggcttgacttaattattcaytcgtccttttagaagtgtttgtttattaactgtagaca

SEQ ID NO: 68358 - DNA, 809 bp, Homo sapiens
ttcattacattagtaaattaaaggagaaaaaccatatgattatttcaatagatttttaaggagcatttaattaatttttctttataaaaattctaggtgaaattggaatagaagtaaccttcctattcataacaaaaaagaatatttatcagaagccagcaggaagtatcatatgcaatgttaaaattataaatgcattcctatgaaaactaggaataagacagggaaaccyttttttacaagcattctggaaattttagacaatggaataaggcaagaaattataatcagttcaataagtatagccctaccaatatttatatagcgtcaggcactgtcctaagttcattacatgagatgaggaaactggagcacagagaggttaagtaacttgttaaaagtcacacagcttctaagtggcaatgctggaatttgaatccaagtgatctggttccaggatatacatttttctaccttaaaaatgctgtctctcaggcattgagaggagaagtattattattattattatttgcagataatattttcacatcataatgcaaaagatcaaaataaaaaaaatctattagcactgataagtgtcagtaagatgtctgcatagaagatcaatgtgcaattaccagtttcctttattccaccagggcaggggcctctgtggcagcatccagcaccaggcctgagacacagagggctctcaataactatttgctgaaagatgaagcaacaggctctacgtatggcacagtttggaaaggccacataggtcagcaatgcagctggacttgtgcaag

SEQ ID NO: 68359 - DNA, 915 bp, Homo sapiens
cagctgtctgagccgtttcctcttcagctggggaaagtagggagagaatgagactgagaagattaccaagaattggctgagagcaatttcgcgggtagcctagaggagccccaaggactcctggagctttttgtcccactgatggggccctggagggatggaagtcgggtggatcatcaggacttctgcccccagggggtgcaggtgtgtatccctggttgtatgaccttggacagatcactgcctctctggatagagcgtcccagaggcacatctatcaaatgcttttctaggtcttagccccagagcccagaactcccaggttggaattgacaagaatgtattccctccaaggctatttagttgagcacctactaggaccttggcttggtggaaggtgcccagggatacagggggaatgagaaaagcacggctttgcaatctagtcggagagacatggcaaaatgtagatgaatacatcattccacattctgcaaagaagtgattctaaaccatgggygtgtaatgaaggggcaagtggggtgcagtaccgggaaggaatgagatgctgggtgccatttagatgggtggtcaggcagggccatcgaggaaggtggcacttgggtggagaactgagggcaggaaggagccctctgtgaaagggaggaggcagatgtggccgacagttatcccaccctgcccacttcctcttacccctcgctcttcctggcagtgccagcatccttggtgcttccacagggctttctcagggcactggagaccactcagcctgcacatgagaaaggtgagaagtgccggggagttgacgccaccccgggagcagccttgaccaatgactgtttattgggtgcatacccagccccctcgtccctccagggggacagttcagatgca

SEQ ID NO: 68360 - DNA, 799 bp, Homo sapiens
cgtttccctcctacctccctgccagccagtcccacagctaaatcagccaccttacagccctgaacaagctgcctgccccaccggacattctctcatgtcgctgcctcaaaattcctgcagattttgatgaggtatggacattcagaagcctgagaaactgctgcttcatcaaaattgtatctcctactttagtttgctattgtagactagagtgaaaatgacagaatttatatacctgagtcatcaagctgggacagttggtctggaagggctgttgctctaattgttggcctctatagacagcccaagctgaatgggacataaaaacgtgtgaccagccagaaagtgaaggctaaaggccaggggaaacatgggggcatggtttgtagttcrtgtaattgacagggcataaaaagaagagaaggttggaaactagagtgaatagtggtaactatagttgtcgcctgttcaacgagctttcctatcctcttctcctgcttcctttgttgaactcctcctgtactccacatagtctgagtaaggctattaatcagagtatatctcttccatactccatccccactctgcaaaactacaaagctcacagggatgggcacatggctgtgcacctaggtcaggccaatgttctctttggaatgtctctgtgggagctagcacagaaggctgctaggaaaacatcatgaacagcagagacaaatggaagaaagagaaataggcgggtgggaagagggagagaggagacaaagactgaattgatattgacattgttagagcttct

SEQ ID NO: 68361 - DNA, 799 bp, Homo sapiens
cgtttccctcctacctccctgccagccagtcccacagctaaatcagccaccttacagccctgaacaagctgcctgccccaccggacattctctcatgtcgctgcctcaaaattcctgcagattttgatgaggtatggacattcagaagcctgagaaactgctgcttcatcaaaattgtatctcctactttagtttgctattgtagactagagtgaaaatgacagaatttatatacctgagtcatcaagctgggacagttggtctggaagggctgttgctctaattgttggcctctatagacagcccaagctgaatgggacataaaaacgtgtgaccagccagaaagtgaaggctaaaggccaggggaaacatgggggcatggtttgtagttcatgtaattgacagggcataaaaagaagagaaggttggaaactagagtgaatagtggtaactatagttgtcgcctgttcaacgagctttcctatcctcttctcctgcttcctttgttgaactcctcctgtactccacatagtctgagtaaggctattaatcagagtatatctcttccatactccatccccactctgcaaaactacaaagctcacagggatgggcacatggctgtgcacctaggtcaggccaatgttctctttggaatgtctctgtgggagctagcacagaaggctgctaggaaaacatcatgaacagcagagacaaatggaagaaagagaaataggcgggtgggaagagrgagagaggagacaaagactgaattgatattgacattgttagagcttct

SEQ ID NO: 68362 - DNA, 667 bp, Homo sapiens
gatccagattaatgaccgagtggaacagaaacaataaaacaccacattgtcaagtacctgattcttcccacaaaacaaaccaacaaacaaaacacagcccctgtgctcttgagtttatcctccttttacagaagggtgttatctgactctgtgcttaactatacttggcagtcttttaccagctctcattgaagattggctaggtctctatccagtatctacatgcccttgagggaggtgttggaggaatgagcagtaatgcgttgtggacagttaacgtcaatttttttaataaacaaatatttatggagtccttaccatgcacaagaattcattccagctcttgactgaactgccagctgtttgagaagatgaggaaatcatgtctcatggtgrttatgatcattgtttccttaacctggaaaaactcaccccctcctaaacactccccacactacaatagaaaataaagactatgccagtgggtagtttcctggcagtatactcacagatggttgattacaccaccagctggatgccagtggatttgctggaataaaataggttaggctgctgtaacaccaacacacacacacacacacacccctcagtgacttaacacaacacttattcaaggctcacagaccacatgcagtgtgaattacag

SEQ ID NO: 68363 - DNA, 673 bp, Homo sapiens
aattagctgggtgtggtggtgcacgcctgtaatcccagctactcgggaggctgaggcaggagaatcacttgaacctgggaggcagaggttgcagtgagctgagatcgcgccattgcactccagcctgggcaacaagagtgaaagtccgtctcaaaaaataataataataataattaattaggaggccattaagttggggttgctcccatgccctgggttcctaggtgagcaatccagaacccaactcaatgtcaatggttgggttaaccaatcagaaaccaccaaccaacctctaaccagggacttttcactggaataatccaaatgasgctattactgtacttcaacaaatcaagtattttttttttgtcttgcttctgagtgaactggtcttgtaaaagacttctcccccacctctgacccctacccctttgccagagccccaaactgcaagagccccacaaacagggagctccctgtttatgaataagacaaatacaccctttaagattttaaagcgcctcaatttatcttttcacattggtaatgttttagtaggtatatgtgcacatggggaaagggccagatggaactggcagtgagtggccaatgactacagagacaaggacaacagaaacctgccatgctgtttccagtttaagaacttgcaact

SEQ ID NO: 68364 - DNA, 676 bp, Homo sapiens
agcaaatcctacaaagatggtccaatacctccatttatatggatttatgtgtggggatacctatctgtgtggtggcatggagggaggtgatcccctgagatcttggaagcttgagcaactgacagccttcagctgtcacacatttggatccaccacagagctcataccaaggtcacacattccccagctgtttccagctcacaacggaacatggtgagagcgctagagctatgccctttctgcctctagtgggcagtctttgctctggaattcctaccaccctaccagggctttctcagaatgtgctgcagtctggagctcttcctacccaatcttcttcccttccctctctccattcacaagtgtcagacctgtattgcagtcagaaggcactcctcacctgcatgccaggctccttctccctcctgcactatcctgcacaggtgttttctttaaaatattttggcacatctaatcctatcttgacatctgcttttcagaggtcccaaactgtcatagttatctattggcccacctggcagcattccaagatragtcttattttaacagttggttatgctgtatttagaaactgtgaaaagaacaatggcaaaatcatggagccaacctgaatgtcaatgaacagttgactggataaagaagatgtggtccatat

SEQ ID NO: 68365 - DNA, 601 bp, Homo sapiens
aaggaccgggccatctagaagctgaggcaaaaatccctcctctagttggtctaagcggggtgttcagagactgtgtgtgccaacacagtccacttcagcaccagagaaaaatgaacscaagcattgtgtttttattacaggtgccatcaagcatttccacttctgaaatggacaccggtaataagtcttctaaaagttcacgctacaagggtttagaaaaacagagctcctctctagattaaggagaggaaacaaacaaacaaacaaacaaaaaagaacttttggtaagaccctcaaaaataaatttgtacgccaagctgaggtgctggcttggaaggctgccttgcaaacaaggtgcattatctacacgtgaaacgcccaaaggttctcaaaggaccaccagcagcaatgtccgggaacttgttagaaaagtgaattattgggcgccagccacctgtgttttaacaagctttccaggagatcctaacacacatggaagtttgggaccgctgctctcaggatgagaggttaagatgcttgaggaaggcctgaccctgttaccttaatgtcagttttgagcttctcatagttgacatcgatg

SEQ ID NO: 68366 - DNA, 920 bp, Homo sapiens
gcattgaatctataaattaccttgggcagtatggccattttcacgatattgattcttcctatccatgagcatggaatgttcttccatttgtttgtatcctcttttatttcgttgagcagtggtttgtagttctccttgaagaggtccttcacatcccttgtaagttgaattcctaggtattttattctctttgaagcaatggagaacgcacacatttattgattacattcaccattttatatggatgaggttcatggtgccccaaaataaccagaacagtaacagcaaaaatcactgagcacagattaccctaagagatataataataataaacaagtttgaaatattttgagaattaccaaaatgtgacacagacatgaagtgagcacatgctactggagaaatggaaccattagacttggttgccataaatctgtgatttgtacaaaatacaaaatctgcaaagtacactaaagcgaagtgcaataaaatgaggtatgtctatatacaatacattattattgactatagttaccatgttgtgtaaaagaattattcayttttaagtggccaaaacaaagtaatatcttgactgagcttccaagaataacccccagaaatacacaactaaactggtacaccaagaagcaatggcttctgccaccattggagggctatggggcttggaaatcaacaccacctctactgccatcacaactagtaaaagggatgtccaatgtccagcttctcaatgccaccatgttagaaacggacactagaacctttgctacatcttccaaaaaataaattgcagcaatttaaagtctttgtgattacgcatactagcaaaaacagcagaagcagcaaaggcaaggtctccgcctcatgataatcacttgcactttccaaacatcacatgc

SEQ ID NO: 68367 - DNA, 920 bp, Homo sapiens
gcattgaatctataaattaccttgggcagtatggccattttcacgatattgattcttcctatccatgagcatggaatgttcttccatttgtttgtatcctcttttatttcgttgagcagtggtttgtagttctccttgaagaggtccttcacatcccttgtaagttgaattcctaggtattttattctctttgaagcaatggagaacgcacacatttattgattacattcaccattttatatggatgaggttcatggtgccccaaaataaccagaacagtaacagcaaaaatcactgagcacagattaccctaagagatataataataataaacaagtttgaaatattttgagaattaccaaaatgtgacacagacatgaagtgagcacatgctactggagaaatggaaccattagacttggttgccataaatctgtgatttgtacaaaatacaaaatctgcaaagtacactaaagcgaagtgcaataaaatgaggtatgtctatatacaatacattattattgactatagttaccatgttgtgtaaaagaattattcatttttaagtggccaaaacaaagtaatatcttgactgagcttccaagaataacccccagaaatacacaactaaactggtacaccaagaagcaatggcttctgccaccattggagggctatggggcttggaaatcaacaccacctctactgccatcacaactagtaaaagggatgtccaatgtccagcttctcaatgccaccatgttagaaacggacactagaacctttgctacatcttccaaaawataaattgcagcaatttaaagtctttgtgattacgcatactagcaaaaacagcagaagcagcaaaggcaaggtctccgcctcatgataatcacttgcactttccaaacatcacatgc

SEQ ID NO: 68368 - DNA, 1474 bp, Homo sapiens
caccattctttcattcagataatattaaatgacaacagtatactacacactttgatatggaattcctactcaatattctaaattgtgaagcaaaaacaaagccaacaatctaaacttcaaacacaaggaaataagaacctttatatttatcaagatatcacacagatgaccatttcagacttacatgactcagagtactaaactttagtaaaactttcaagaaagcaagtaatctcaattcagaagtaaagctgaggggctgagacttccaacacaggtccccaggtgcttcctttctccaggacagaccctgcctagacaatgtgtatggttacaccattacacaggagttgttttagtcatgaaacatccccattttatctcagatagttacaaagcttatatgacattttctagggagacaatatatagatgtctggtttgttaactccataaataagaactttcttactaggaagtaagtcttttattagcatgtttaaaggaagaattaactttatttcttctccagggtgttccccaaatgtctccagatgtaatgatttagagtgtgtgctggggggaacagggggtgggaattggttacaacacaatctactgactggaaggaacttgcttctatatgcgtagaaaactctagacagatagagtttatattcgtaatacactatgcataagactcatctggagatgcttgtttaaaatactgattcctggatcccactccctaggattcagggcactggtgagggccaagaatctgcattttataaacatttcaagagattcttgaagttccttatctctttcttgaaataaacccatgttaccctgggtacctccacattccaaaaacccatttactatcaaatccctgaaaatctgatttccacctcatcactattcaaactgaccccccgaagatctccaaggagtccttaattgataatccaaagggcacatttatcgtacatatattccataccayaaacaagaaagaccaggtgtctattgcataaagcttattttaatgagataaacagaccaatacataaacaacagtaaaaatagtcaagagggctccgaagaaaacatgatatagatttggagggaaagcctacttaaaactgggtggttagggaagatctcattaaggctgtaacatttaagccaaaatctgataggacaaagtcagttatgccaagatttagggaaagaaaacagttgtaagtgtaaaggtcctgaggtagaaacacatttggatatttatagaatgcatacatcagaatgtctggagcaagctgcccaaggaaacatggcaggagatgaggttgaggaggcaagaagggcctacaccttagagatcagggtcaggaatcaagattaattctaagtgtgatgggaagcagtgagaaagtcttatacaggatgagaactttgaggccattctgag

SEQ ID NO: 68369 - DNA, 754 bp, Homo sapiens
tttggacattcactgaggggttaagtgaacttagctggccatgcttcctgggctgggtgttggctctggggtactgtcctgccttgcttctgagctggagaagactttgatatctgcaaattacatctttcccagcttgaggctccaagcgtgtcacgtgcttgggaaaggacaccaatcagtgttcatacacaggatagcattataaccttagaagccatgtgtctactattctcttgctccaataaatcttggaattgatgatatatgtattctcaactctagttcacacatgccaggctccagctccctcaggaggccctgggccctcctttcctttgcatgctctggaaaattctcatgccactgtaccccagctttagtagygaaatcaaatgagcccattcccctacacttcatgtctactaccagctacattatcctcttgcagtgttccaacacagttgacatttgttttcatccttctctcaccaggtctggctgactctcttgtacctaaggacaatggtaaagtcttccctctagcgtctgaggctaaggatgctgatgggggagctgagagaacagccaagcaggggagaaagaacaggctgtgatggggacccgcttctgtgtttacactgagatctctggatttccacccactcgctgggttttaggaggttgggaaaaagcccctttgcacccaggctccctttcttcaacttacctccatacaaagacccagatagat

SEQ ID NO: 68370 - DNA, 754 bp, Homo sapiens
tttggacattcactgaggggttaagtgaacttagctggccatgcttcctgggctgggtgttggctctggggtactgtcctgccttgcttctgagctggagaagactttgatatctgcaaattacatctttcccagcttgaggctccaagcgtgtcacgtgcttgggaaaggacaccaatcagtgttcatacacaggatagcattataaccttagaagccatgtgtctactattctcttgctccaataaatcttggaattgatgatatatgtattctcaactctagttcacacatgccaggctccagctccctcaggaggccctgggccctcctttcctttgcatgctctggaaaattctcatgccactgtaccccagctttagtagcgaaatcaaatgagcccattcccctayacttcatgtctactaccagctacattatcctcttgcagtgttccaacacagttgacatttgttttcatccttctctcaccaggtctggctgactctcttgtacctaaggacaatggtaaagtcttccctctagcgtctgaggctaaggatgctgatgggggagctgagagaacagccaagcaggggagaaagaacaggctgtgatggggacccgcttctgtgtttacactgagatctctggatttccacccactcgctgggttttaggaggttgggaaaaagcccctttgcacccaggctccctttcttcaacttacctccatacaaagacccagatagat

SEQ ID NO: 68371 - DNA, 895 bp, Homo sapiens
agctatgtcgccccaaagtcatgggacgctgcctgatcttcaacattccctatggccactgtggcactatccagcaggtaggacacttcccaggtggtgctacccttctgcagatgaggcccaggtgaaaaatttgggaaattcaaccacctattaaaaatctgtgtaaggacagaggaaaagtgcaaaccataacttcatttctgagtttggtaagacagagagcagctcattagtttgtctgaaactttccttcctttggggaatttgggatacacaataacaagtattgagtgctgatgggctgatggatgtgtggatggatggatggatggatggatggtatattcttttcactccagaggcaatgtattttccacacatgcctcttgattgagcattggtgtacacctaccatgtgcaagctatggtgacaggcatgagggaagacagattgtccacttgcccatctgactgctaggtttctaagcaggtaactgcattccatgatcaagaaagcaaacctttaggacatttataaatcatgacatatatatgtttatttagttttccttgactactggtttatttcacaaaacaatggtattgaaattaaggaaacaagtacaygagagatatagggagagtgtataaccacagaatatttttttctcagtatttaaacaggataacctgttcccaagcaagatccccatactgcttctccattcttgtacatcccctgattagacacaaacatgaggccaggaaacccttggcattgttagaggttgaagtcattcacattttatctatttcattgtacagatcgtagtcattcctatcctttttgctttgacaattctactttttaacctcagaagtttctgcccca

SEQ ID NO: 68372 - DNA, 895 bp, Homo sapiens
agctatgtcgccccaaagtcatgggacgctgcctgatcttcaacattccctatggccactgtggcactatccagcaggtaggacacttcccaggtggtgctacccttctgcagatgaggcccaggtgaaaaatttgggaaattcaaccacctattaaaaatctgtgtaaggacagaggaaaagtgcaaaccataacttcatttctgagtttggtaagacagagagcagctcattagtttgtctgaaactttccttcctttggggaatttgggatacacaataacaagtattgagtgctgatgggctgatggatgtgtggatggatggatggatggatggatggtatattcttttcactccagaggcaatgtattttccacacatgcctcttgattgagcattggtgtacacctaccatgtgcaagctatggtgacaggcatgagggaagacagattgtccacttgcccatctgactgctaggtttctaagcaggtaactgcattccatgatcaagaaagcaaacctttaggacatttataaatcatgacatatatatgtttatttagttttccttgactactggtttatttcacaaaacaatggtattgaaattaaggaaacaagtacacgagagatatagggagagtgtataaccacagaatatttttttctcagtatttaaacaggataacctgttcccaagcaagatccccatactgctyctccattcttgtacatcccctgattagacacaaacatgaggccaggaaacccttggcattgttagaggttgaagtcattcacattttatctatttcattgtacagatcgtagtcattcctatcctttttgctttgacaattctactttttaacctcagaagtttctgcccca

SEQ ID NO: 68373 - DNA, 612 bp, Homo sapiens
gatatatgaactatatatgtcatgcttggctactctgttgctgtaaacattcttakttgatctttgttccgtgtaccatttcatttatgggcatgaaactcatttaggaaactcattatggcagagtagattgttacactctattttgttaatattccttataaactactagtttatgtggaccattatgttatttccaatttttaatcacaacttcctgtgctcttttaaatgaatgaatggagtttttcaagctcccaaggctgggcaaggctgcattgcaggggcttattcttgtctcgagtgttgactgaacatgtgcttttttacaatctgtttcagtcatcactgttaagtgccgtgctcggggaattggccccaagtcacgggctggtcagcgtgcatggaagaattgcctatgtgtctcagcagccctgggtgttctcgggaactctgaggagtaatattttatttgggaagaaatatgaaaaggaacgatatgaaaaagtcataaaggcttgtgctctgaaaaagggagtgatgacttttggatttcatgtactcgaatgtccagtaatactagtgttcacttgaacaacaaaggttattaac

SEQ ID NO: 68374 - DNA, 612 bp, Homo sapiens
gatatatgaactatatatgtcatgcttggctactctgttgctgtaaacattcttatttgatctttgttccgtgtaccatttcatttakgggcatgaaactcatttaggaaactcattatggcagagtagattgttacactctattttgttaatattccttataaactactagtttatgtggaccattatgttatttccaatttttaatcacaacttcctgtgctcttttaaatgaatgaatggagtttttcaagctcccaaggctgggcaaggctgcattgcaggggcttattcttgtctcgagtgttgactgaacatgtgcttttttacaatctgtttcagtcatcactgttaagtgccgtgctcggggaattggccccaagtcacgggctggtcagcgtgcatggaagaattgcctatgtgtctcagcagccctgggtgttctcgggaactctgaggagtaatattttatttgggaagaaatatgaaaaggaacgatatgaaaaagtcataaaggcttgtgctctgaaaaagggagtgatgacttttggatttcatgtactcgaatgtccagtaatactagtgttcacttgaacaacaaaggttattaac

SEQ ID NO: 68375 - DNA, 612 bp, Homo sapiens
gatatatgaactatatatgtcatgcttggctactctgttgctgtaaacattcttatttgatctttgttccgtgtaccatttcatttatgggcatgaaactcatttaggaaactcattatggcagagtagattgttacactctattttgttaatattccttataaactactagtttatgtggaccattatgttrtttccaatttttaatcacaacttcctgtgctcttttaaatgaatgaatggagtttttcaagctcccaaggctgggcaaggctgcattgcaggggcttattcttgtctcgagtgttgactgaacatgtgcttttttacaatctgtttcagtcatcactgttaagtgccgtgctcggggaattggccccaagtcacgggctggtcagcgtgcatggaagaattgcctatgtgtctcagcagccctgggtgttctcgggaactctgaggagtaatattttatttgggaagaaatatgaaaaggaacgatatgaaaaagtcataaaggcttgtgctctgaaaaagggagtgatgacttttggatttcatgtactcgaatgtccagtaatactagtgttcacttgaacaacaaaggttattaac

SEQ ID NO: 68376 - DNA, 612 bp, Homo sapiens
gatatatgaactatatatgtcatgcttggctactctgttgctgtaaacattcttatttgatctttgttccgtgtaccatttcatttatgggcatgaaactcatttaggaaactcattatggcagagtagattgttacactctattttgttaatattccttataaactactagtttatgtggaccattatgttatttccaatttttaatcacaacttcctgtgctcttttaaatgaatgaatggagtttttcaagctcccaaggctgggcaaggctgcattgcaggggcttattcttgtctcgagtgttgactgaacatgtgcttttttacaatctgtttcagtcatcactgttaagtgccgtgctcggggaattggccccaagtcacgggctggtcagcgtgcatggaagaattgcctatgtgtctcagcagccctgggtgttctcgggaactctgaggagtaatattttatttgggaagaaataygaaaaggaacgatatgaaaaagtcataaaggcttgtgctctgaaaaagggagtgatgacttttggatttcatgtactcgaatgtccagtaatactagtgttcacttgaacaacaaaggttattaac

SEQ ID NO: 68377 - DNA, 573 bp, Homo sapiens
tgccattctctgtgattatttatgcaaaatcacataccttagtatttcygtgatgaggccagatacattttaaaggcaacttgccattaaataatgggacaaaatatagatttttttgtaaaaaagcagaaagttaaaatgaaaacaaaagacaaaagcaaggccttgtggccttcaagtgagcttttagagtgcctttagctcctattgctataaaaagtgaaaagaaacagattctgtttctatggctcacacaccttttattcttacccattttcccatcaggatgtaaaatatgaacattatactgttctcaacttgaaactctatcagggaaaatggagacttgtatgaagcctcccactccttttgttaatctgacaagtgccacatgttgcagctaatatgctattctgttcttatctccccaaattcacatgtctgagaaaaccagcacacagtagaaaaacaacctgaattctggccacatctcaagagttaagataggcattagttcctgccttagaatttcctgacctgggagtaaaaattcctcacttaagccatgctgtc

SEQ ID NO: 68378 - DNA, 639 bp, Homo sapiens
atgaatgcagagccttggagggcactatcagcattacacattatctttcatcttgaaatctcacaaagctttattaaactgttcaaaaaggaagtgttattgttcccagatacctctctcttcccaaaagatagctcaagtggatttatcaggtggctaaatgggagtactaaagaggttaaatttaattcaggaaaggatctttcccttaggaacacagaagcttttgcagtgttggtgctaaaatggttcycttgtcagaggagttacgttttatgagatcctctaagcaaatttagaaaaggagaggaacttgaccacagaaactgtgtttgatacatttgagcaacaaagtaagttttcattccatggcatgctgtaatgtgggaaggtaaaaatatctcagattgataaattccgctaaattaatcaaaggctgtatttatgaaggcaaaataaagaaacacttagtaataatctgggtgatttagggtgaagaatattacattatgaatctttaaggcaatttgaaatccaatcatttttatttaaaaagtttaatatggaaatactctcaattaatttaagacaaagtaagatgttggtagtgtctttattggaatatctatttacagaact

SEQ ID NO: 68379 - DNA, 666 bp, Homo sapiens
ttggctgacccagaataaaagtaagactctcaaaccatttagaatactggtttaatgttttctagatgcagtttacaatctattagcatctccaatagagatctctagtacctagtataggtcagtttttaaaactcggattgaggtytcaatatctggggaggaaatagtgggagaaaattatttatgtattctattgggctattagaggagggctaattattgcgttacttagagcctcaaggcttctttagtaatattttatgagtgcttaaatcatgatattcaaaaggagggttgagttatatgaaacagcaagaatgtagacatgacataatgagtgtgagaatttgcacaaaatattcaaatgacctgaatagctatcctagttcattcctttaaatattaaaagctagatgtcaagttgtctcaatttaaaaaccacttaaaaagctgtatcagccatttcaaaaataggacctattatacatataaagcagtgtagttctatattggttcatgtaaacttcctaattaataaaatcaacaacagccgtgacttgagtttccaggaaactctagataagttccttaatatgttgagtacttgtaaaataattaaaacatatttttgctctttacaggagaattcagttacattgttat

SEQ ID NO: 68380 - DNA, 665 bp, Homo sapiens
taaagaatgcccataaaattcttatctaaagaatgtttagaaagttgttgaacaagggacatcatcatttaaagtgatatgaagaaaccttctcagctaagcatacgggctagattagacagaaaagtaaaggacccatctctgccctggaaaaactaccggtagcatctttcaaaaagctcyctgtgtttgagtacataccttgatccataggctcacatttgatcccaactggcggctgcttcttggcattaacaatggattcccaaccagtaaatcttagcaagatctgagtttctccaggtatgatattattttgtttgaccatccttatcttcaagggctaccaagaaggaacaaagaatttatttgctttcccatgagaaaaggttttaccaatgagacactttcttaccatgaccccagggcaccctataccttgttcacttgagtgccctgtgtggcctggcagaagctcatgctggtcacagggttctttatatgattaacctcctttctgaatcccaacttcatggtggtggtgatgacaggtgtcctgtatcccatgctcatgtccctgaaggcatcagccatgtctccagttagaaaaaattacatgtatctagagaggcctctttggaagtagtaaaagctttctcaccttc

SEQ ID NO: 68381 - DNA, 729 bp, Homo sapiens
caaattaaaaggaataaagtgtggaaatgatatgtaaaacaatctgtattcacaacaaacatgtatgtagaaaatcctaagaaacattcttaaaattactagtattaatctgtgaattcagcagggtcacaggattaaatggacaaaagctagaaagcctcaacaaataaagagatataacatgtgaaaaaatgggaaggtattaatgctatcacagatgtcatttttactttgcatctcctgggtttccagtgttagttggaaaatttatccccattgccaatattatgtatatactttaagttatcttgaaagctttttaaattaaattaaaattttattttacgttttaggcttaaattcatttagaaattacttttgagtgtgatgaggtccaacattattttcttccagatggacactaaattttgccagcatagactattttttaaaatttattttcttcactgatttgacatatcattactaagtattaaatttttatagacaatgatctataatgagttatctatactttttcacttatctatttattttttggtttatgtactgatactatacaattgttcctaatcaacttgtggaggctgaggcaggaggatcacttgagccagaagttggaggctgcagtgagctaggatcgcaccactgctctccagcctgggtgacagagcaagactctgtagcaaaaaaaaaaaaamaaacaaa

SEQ ID NO: 68382 - DNA, 602 bp, Homo sapiens
ccatcaagcgtggagagcacaaaagatgaccattaggtttggccagatcaccagtaactttagacacaaactcattagggcgggtgcggtggctcatgcctgtaatcccaacactttgggaggccgaggcaggcggatcacctgaggtctggagtttgagaccagtctgaccaacatggtgaaaccccgtctctactaaaaatacaaaaattagctggatgtggtggcacatccctgtaatcccagctacttgggaggctgaggcaggagaatcacttgaacccaggagatgaaggttgcagtgagccgaggttgcaccactgcaatccagcctgggcaacagagcgagactcagtctcaaaaaaggagaaaaaaaaaaaaaagaaacaaacwaacttattagtggaatggtgatgacagaagtccacttgtatacgagaacagatggtggtaaatttaaaaacagcatgggaggctgggagaaatctggttatggaaatctggttaagaaatgtcaggccctcattacctcacctcattccaaaagcttcctagctggcttcctggactctgatgtctcaaccactcctccctactaatca

SEQ ID NO: 68383 - DNA, 854 bp, Homo sapiens
caatctgtaagatgatgtctctttagagtggagggtagctcccacaacaatccgggggaaggggaaagggggagactgttggcccaagacagcagaaccttgagcatgaaaaagccgatctcttagctgctgaactggtggctataagttttaatgaggaagagctgtgtcaagaaattaaaacaatcaaggccccaggtagcagtcaaatttcagctgaccctctacaccaagcttgtccaacctgtgttattttgttgttgttgttgttctgttctgttttgttttgttttaggtttttagcagcctgaagccatggtttttggtttgtctctagtgataagtggaaaacagggatgaggaaggggctttactggcccaacccggatatgtactaagcacccacgactgtattctgacccttggacacccccgctctatactctagcccccttagagatgactcaaggttcctgaatccctgccaaacacttgcatgcctccctccttgctattctttctgcttagaatgctctatatctgctggtgagctacttgtctttaaaggtcagctcagctgttttaaccattgagaagccttgcttgacttctgcaggcaaaaatcagtcycttgcctggactcccacagtgctcagtataagcttctgttatggcactataagtcatcaacatctgatcttcccccagtagattgtgaggtgcttaagggattccatcttatctatcctaggagcttcagcattagcatagtgcctggaatatggaagtgctcaatcaatgttagatgactgaatgaaatggtttgctctctccacatggccccacttacctga

SEQ ID NO: 68384 - DNA, 613 bp, Homo sapiens
tgtccttttaggacatattacagtctggcttatcttaaaactaattgtgttatgtgggtgtggagtaggggcagggaagtagccttccctttgtgagctccatgaggttagaagctgtgtcttactcatatcttccatttccaagaccttacacggaaccaggcacagagtaagtgttcartgaatatttattgagtaaaattatcttgggtttgtaatagtaataataagtatttagaattttaaggagagtcttcctactcctgtctctggttaggcaacagcattataggaatgtaagtatttcttaatttactaaaagtttaatattccgaaagctttatttttaattttcaaaatatttaatctagcacaaaattactaagacaacattggaagcatggtaacgccattgtggataaatgcaatgctttcaacataactttctaacttcatttgtggttaaacatgtataaggaaaagccatttgcattaaaaaaaactgtctacgtatttaaatatggcatttgtctgtgaggacacctatcattagcatggctgatatcctggtaataattctatgtacctgggccaagtctatacaattagaaaa

SEQ ID NO: 68385 - DNA, 681 bp, Homo sapiens
gtatgtgtaggtgtgaatatgtaatgctgtactgaaaaatagcaacacagaagataaagtatggtgtctaagaaaatctctcaccttagtttatatagaaaaaaagatatttctgggtagaaaagaagatttggtgaagaacattgattatctgaagggaaatacaatttaacaggaaagcaaaattggatgtaaaagattagatctttttactaatgtaaataatttccctggtaaacaaacaaaatatatatttgaatttttatataaataaaaaaatcaactttggaaaataaactcaagaataatcataattcttgctctgtcacccaggctggagtgcagtggtgagttctcagctcattgcaacctccgcctcccaggttcaagagattctcctgcytcagcctcctgagtagctggtattacaggtgcacaccacaatgcccagttaattttggatttttagtagagatggtgttttgccatgttggccaggctgtgttgccaactcctgatctcaggtgatccacctgccttggcctcccaaagtgttgggattacaggcgtgagccagcacacctggccttgtcatggtttctaatagttagatgcatgttagctgaagtcattattctgaatgaaaatgacatatgctcttgttggatgacagatattgag

SEQ ID NO: 68386 - DNA, 893 bp, Homo sapiens
tgcatgaggaaatttacacttaactacatggattgagttgctaaagatcaatttcctaacaaaatgtcagtatgaaaaaacatccttttgagaaataatgaactcttatctatgctcttttcttgtcatcaacttttaatgatattctcattatatgagatccttagggtgagaagaaatacatttaatttataaagtttatgatttaccttcacattactgctatttcaaagacagccatttttatacttcacgaaaatttgctttgtcctaaaccaatatagatagattgatgtgtagctggatagatagctaatagatcgatagatcaataaacagatgactgatagattcttttgcttttttttttcccccttgagacggagtcttgctctgtcgcccaggctggagtgcagtggcgtgacctcggctcacggcaagctccgcctcccgggttcacgccattctcctgcctcagcctcccgagcagctgggactacaggcgcccgccacyacgcccggctaatgttttgcattatttagtagagacggggtttcacgatggtctcgatctactgacctcgagatccgcccgcctcggcctcccaaagtgctgggattgcaagcgtgagccaccacacctggccaactgatagattctttcacattcactacaagaaacaagttccctaacaaattttgatatacttagatccataaagacacaatgacaaatcccattacatttaacaaatgcttatttgatgcaggatcgagcaaaacattatatttgcactgtaataaataaggaaatgattatgatctgctatctaacttacgcacttttagtaataattcaaattacagtaattgattgagttttttctaagtgc

SEQ ID NO: 68387 - DNA, 610 bp, Homo sapiens
actcttaagtgtatatacccaaaataaatgaaaacacatgtccacaattttacatgcaaattttcatagcagcactattcataatagacaaaaattgaaataacttaaatattcatcaaccaataaatgaataaataaaatgcattatatcactacaaagaaatattatttggcaatgaaaaggaaataaaatactgacacattccacaaaatgttgacagggatgaaccttgaaaacacactargtgcaagaagttggtaacaaagagccacatattataggattgcatttgtaatgaagtgtttaaaacaggccaatccatagagacagaaaatggattagaatttgcttagagctgggaagtgggcagagaggaatatgagtgactgttaatggataaaggttttcttttatgagaaacaaaaatgttctaaagttagattatgatgatggttgcacaaccctgtgaatatactgaaacacatcaatttgtacactttaggtgactcacatggtatgcaaattatatctccatgatactgtttctttttaaaaaaaacatcaccaggtttaaacaggtcaaagctggctttctttacataatagtaa

SEQ ID NO: 68388 - DNA, 589 bp, Homo sapiens
ggggctgaagtcttaatatgattagagcatgctccacactgaccctccaggcccagccctggggtagaagtatcctcaccaccatacagattaacccctacaatcagttccttgcattaaattccctctgcttgaaagatctagagagatttccagtttccaggtcagagcctgactaatacaatccctrtggaaaaaaatgataaaatcttatttaaagacacaaaacagacacatttttctggataagaactttcaatttaaaaatgttaattttcctgaaatttatctttaagtcgaatgccatttcattagattcccaataaagttttgggggttttggtgtggtcttggtgggtagaattaatgttgacatttttaagggaggataaatactcatgcaagatgagacaaccctgccactgttcacacattgacaacaccccatgggttgggacagaaaaccacaaaatggcctcaggataagcaagaaggtacgaccaagcttcatttgtttcagggtaaaaggaagcaccatttaattaatgggactagcacacccagcggcaagctagaagaaaataaaagt

SEQ ID NO: 68389 - DNA, 589 bp, Homo sapiens
ggggctgaagtcttaatatgattagagcatgctccacactgaccctccaggcccagccctggggtagaagtatcctcaccaccatacagattaacccctacaatcagttccttgcattaaattccctctgcttgaaagatctagagagatttccagtttccaggtcagagcctgactaatacaatccctatggaaaaaaatgataaaatcttatttaaagacacaaaacagacacatttttctggataagaactttcaatttaaaaatgttaattttcctgaaatttatctttaagtcgaatgccatttcattagattcccaataaagttttgggggttttggtgtggtcttggtgggtagaattaatgttgacatttttaagggaggataaatactcatgcaagatgagacaaccctgccactgttcacacattgacaacacmccatgggttgggacagaaaaccacaaaatggcctcaggataagcaagaaggtacgaccaagcttcatttgtttcagggtaaaaggaagcaccatttaattaatgggactagcacacccagcggcaagctagaagaaaataaaagt

SEQ ID NO: 68390 - DNA, 1568 bp, Homo sapiens
cttgagcctgggaggtagaagttgcagtcagccgagatagtaccactgcactccagcctgggcaakggagccagatcttgtctcaaaacaaacaaacaaacaacagctcctgtcctagggctagcatttgaccttcaaaccacttgctgggtcaaggatgctcaggacttcctcatctatccccttgttgtcatgataggaaacaggtccagaggttgaacaactgcctctggcagaggctggctaggagctcatcagagctcttttctcctcctggacacgcagcttaacagtacatttctcaggccttcgtacatggatggggctatgtgactagtattcttcctcttgtctagcagggggatgatgccagggtaatctttgttcttctctcttaccaggataattttaaagacatatattgaagatggtggagccacagtatggaaggagtcaaggtctctaaatgaccacataagtggaactttcttcctgaccaatacttgactgtgatacggacaaaaaagtaatctttgattaccatgttaagcttctgagattttttttacagcacttggtgctatttatgctaataaatttgctcagataataccctaattagtggtaaaaatatgactagaaacccatctcccatttcctttaatggttaaatataattccattcgaatataactttcataattattacattaatacactagcttacaaaacagtttacaacaattaggagcatgcttattaatgaatgaaaataatgacttaataaatggaaacatagtgccttacctagagattgaatgcctttttgtttaagaaagctgtgcaaaccatttgtattaagatttaatataagtcccagttctggtgtaagtttccagaagccatcctacaaaattaaggaaacaaaaataagttatgttattcacattttatcacataagaagttacgtagtgggggaaggagtggggcaagggttgaaaaacatattttcactacttgggcaacaagacaattagaagcccaaacctcagcaccacacggtatgcccatgtaataaacctgtacgtgtacctctgcatctaaaataaaactttaacaaattaaatgaaaaaagaagttatgtgataaatgtttccatttatttcagttaattaaggcatttctaacatttttattactgtaaaataaagttcttcatacactagtgacatagtattgtttggaacctcataaatgctatgaacactacatatctggtggcacttataaaaagtgtggaaagaggctcatgggtagagattttttaatttttattttagtagagacggggtttcaccatgtcagccagaatggtctcaatctcctgacctcatgatccacccgcctcggcctcccaaagtgctgggattacaggcgtgagccaccatacccggccgagatttttttaaatggtacttttttccttctagcaatgctttatttcattttttattgatacataatacttgtatgtattttgacatacgcatgatattttgatacatgc

SEQ ID NO: 68391 - DNA, 1568 bp, Homo sapiens
cttgagcctgggaggtagaagttgcagtcagccgagatagtaccactgcactccagcctgggcaagggagccagaycttgtctcaaaacaaacaaacaaacaacagctcctgtcctagggctagcatttgaccttcaaaccacttgctgggtcaaggatgctcaggacttcctcatctatccccttgttgtcatgataggaaacaggtccagaggttgaacaactgcctctggcagaggctggctaggagctcatcagagctcttttctcctcctggacacgcagcttaacagtacatttctcaggccttcgtacatggatggggctatgtgactagtattcttcctcttgtctagcagggggatgatgccagggtaatctttgttcttctctcttaccaggataattttaaagacatatattgaagatggtggagccacagtatggaaggagtcaaggtctctaaatgaccacataagtggaactttcttcctgaccaatacttgactgtgatacggacaaaaaagtaatctttgattaccatgttaagcttctgagattttttttacagcacttggtgctatttatgctaataaatttgctcagataataccctaattagtggtaaaaatatgactagaaacccatctcccatttcctttaatggttaaatataattccattcgaatataactttcataattattacattaatacactagcttacaaaacagtttacaacaattaggagcatgcttattaatgaatgaaaataatgacttaataaatggaaacatagtgccttacctagagattgaatgcctttttgtttaagaaagctgtgcaaaccatttgtattaagatttaatataagtcccagttctggtgtaagtttccagaagccatcctacaaaattaaggaaacaaaaataagttatgttattcacattttatcacataagaagttacgtagtgggggaaggagtggggcaagggttgaaaaacatattttcactacttgggcaacaagacaattagaagcccaaacctcagcaccacacggtatgcccatgtaataaacctgtacgtgtacctctgcatctaaaataaaactttaacaaattaaatgaaaaaagaagttatgtgataaatgtttccatttatttcagttaattaaggcatttctaacatttttattactgtaaaataaagttcttcatacactagtgacatagtattgtttggaacctcataaatgctatgaacactacatatctggtggcacttataaaaagtgtggaaagaggctcatgggtagagattttttaatttttattttagtagagacggggtttcaccatgtcagccagaatggtctcaatctcctgacctcatgatccacccgcctcggcctcccaaagtgctgggattacaggcgtgagccaccatacccggccgagatttttttaaatggtacttttttccttctagcaatgctttatttcattttttattgatacataatacttgtatgtattttgacatacgcatgatattttgatacatgc

SEQ ID NO: 68392 - DNA, 1568 bp, Homo sapiens
cttgagcctgggaggtagaagttgcagtcagccgagatagtaccactgcactccagcctgggcaagggagccagatcttgtctcaaaacaaacaaacaaacaacagctcctgtcctagggctagcatttgaccttcaaaccacttgctgggtyaaggatgctcaggacttcctcatctatccccttgttgtcatgataggaaacaggtccagaggttgaacaactgcctctggcagaggctggctaggagctcatcagagctcttttctcctcctggacacgcagcttaacagtacatttctcaggccttcgtacatggatggggctatgtgactagtattcttcctcttgtctagcagggggatgatgccagggtaatctttgttcttctctcttaccaggataattttaaagacatatattgaagatggtggagccacagtatggaaggagtcaaggtctctaaatgaccacataagtggaactttcttcctgaccaatacttgactgtgatacggacaaaaaagtaatctttgattaccatgttaagcttctgagattttttttacagcacttggtgctatttatgctaataaatttgctcagataataccctaattagtggtaaaaatatgactagaaacccatctcccatttcctttaatggttaaatataattccattcgaatataactttcataattattacattaatacactagcttacaaaacagtttacaacaattaggagcatgcttattaatgaatgaaaataatgacttaataaatggaaacatagtgccttacctagagattgaatgcctttttgtttaagaaagctgtgcaaaccatttgtattaagatttaatataagtcccagttctggtgtaagtttccagaagccatcctacaaaattaaggaaacaaaaataagttatgttattcacattttatcacataagaagttacgtagtgggggaaggagtggggcaagggttgaaaaacatattttcactacttgggcaacaagacaattagaagcccaaacctcagcaccacacggtatgcccatgtaataaacctgtacgtgtacctctgcatctaaaataaaactttaacaaattaaatgaaaaaagaagttatgtgataaatgtttccatttatttcagttaattaaggcatttctaacatttttattactgtaaaataaagttcttcatacactagtgacatagtattgtttggaacctcataaatgctatgaacactacatatctggtggcacttataaaaagtgtggaaagaggctcatgggtagagattttttaatttttattttagtagagacggggtttcaccatgtcagccagaatggtctcaatctcctgacctcatgatccacccgcctcggcctcccaaagtgctgggattacaggcgtgagccaccatacccggccgagatttttttaaatggtacttttttccttctagcaatgctttatttcattttttattgatacataatacttgtatgtattttgacatacgcatgatattttgatacatgc

SEQ ID NO: 68393 - DNA, 1568 bp, Homo sapiens
cttgagcctgggaggtagaagttgcagtcagccgagatagtaccactgcactccagcctgggcaagggagccagatcttgtctcaaaacaaacaaacaaacaacagctcctgtcctagggctagcatttgaccttcaaaccacttgctgggtcaaggatgctcaggacttcctcatctatccccttgttgtcatgataggaaacaggtccagaggttgaacaaytgcctctggcagaggctggctaggagctcatcagagctcttttctcctcctggacacgcagcttaacagtacatttctcaggccttcgtacatggatggggctatgtgactagtattcttcctcttgtctagcagggggatgatgccagggtaatctttgttcttctctcttaccaggataattttaaagacatatattgaagatggtggagccacagtatggaaggagtcaaggtctctaaatgaccacataagtggaactttcttcctgaccaatacttgactgtgatacggacaaaaaagtaatctttgattaccatgttaagcttctgagattttttttacagcacttggtgctatttatgctaataaatttgctcagataataccctaattagtggtaaaaatatgactagaaacccatctcccatttcctttaatggttaaatataattccattcgaatataactttcataattattacattaatacactagcttacaaaacagtttacaacaattaggagcatgcttattaatgaatgaaaataatgacttaataaatggaaacatagtgccttacctagagattgaatgcctttttgtttaagaaagctgtgcaaaccatttgtattaagatttaatataagtcccagttctggtgtaagtttccagaagccatcctacaaaattaaggaaacaaaaataagttatgttattcacattttatcacataagaagttacgtagtgggggaaggagtggggcaagggttgaaaaacatattttcactacttgggcaacaagacaattagaagcccaaacctcagcaccacacggtatgcccatgtaataaacctgtacgtgtacctctgcatctaaaataaaactttaacaaattaaatgaaaaaagaagttatgtgataaatgtttccatttatttcagttaattaaggcatttctaacatttttattactgtaaaataaagttcttcatacactagtgacatagtattgtttggaacctcataaatgctatgaacactacatatctggtggcacttataaaaagtgtggaaagaggctcatgggtagagattttttaatttttattttagtagagacggggtttcaccatgtcagccagaatggtctcaatctcctgacctcatgatccacccgcctcggcctcccaaagtgctgggattacaggcgtgagccaccatacccggccgagatttttttaaatggtacttttttccttctagcaatgctttatttcattttttattgatacataatacttgtatgtattttgacatacgcatgatattttgatacatgc

SEQ ID NO: 68394 - DNA, 692 bp, Homo sapiens
agggaaaccaacacagggagtagaaagcagggtgtggtcctaggcaggtgcacaggttgaagaatctatggcaataccttgaaaaatgaccgcagtgataatatgtaccaacccatagagaastggtaccaggtgctgttctttgatatgtttagccacttcctgtggagtactattgttgggaaaaagctgagtgttgggagggaaactgaggcagggcttgcgtaacgtcctctggaatgtgtctagacttgctggctccttgcttctagccttcctaggctcctgttcccattatctcaagtagcagaatatgttccatataaatgctaaaccatcgcagctgtaaatcatgtacttaatgcaacgtgtccttttgacctccacattctcaccatctgtttctttgttggattatcaataaataccgtgggctcccagagctcggggccttcgcagcctccaccatagtgatggcatactggtgtcccacctttctctctcaaactgtctttttctcaatcctttgactccactggactttgtcacccccatgacctggtgttgggtctgatcaccccaacaactattatcacacccacactggagatgagaacatggaggcacagaaaggtaaagcaatttgtctaaagtctcacagctaacaagcagcagagccaggagtggccgtg

SEQ ID NO: 68395 - DNA, 692 bp, Homo sapiens
agggaaaccaacacagggagtagaaagcagggtgtggtcctaggcaggtgcacaggttgaagaatctatggcaataccttgaaaaatgaccgcagtgataatatgtaccaacccatagagaagtggtaccaggtgctgttctttgatatgtttagccacttcctgtggagtactattgttgggaaaaarctgagtgttgggagggaaactgaggcagggcttgcgtaacgtcctctggaatgtgtctagacttgctggctccttgcttctagccttcctaggctcctgttcccattatctcaagtagcagaatatgttccatataaatgctaaaccatcgcagctgtaaatcatgtacttaatgcaacgtgtccttttgacctccacattctcaccatctgtttctttgttggattatcaataaataccgtgggctcccagagctcggggccttcgcagcctccaccatagtgatggcatactggtgtcccacctttctctctcaaactgtctttttctcaatcctttgactccactggactttgtcacccccatgacctggtgttgggtctgatcaccccaacaactattatcacacccacactggagatgagaacatggaggcacagaaaggtaaagcaatttgtctaaagtctcacagctaacaagcagcagagccaggagtggccgtg

SEQ ID NO: 68396 - DNA, 692 bp, Homo sapiens
agggaaaccaacacagggagtagaaagcagggtgtggtcctaggcaggtgcacaggttgaagaatctatggcaataccttgaaaaatgaccgcagtgataatatgtaccaacccatagagaagtggtaccaggtgctgttctttgatatgtttagccacttcctgtggagtactattgttgggaaaaagctgagtgttgggagggaaactgaggcagggcttgcgtaacgtcctctggaatgtgtctagacttgctggctccttgcttctagccttcctaggctcctgttcccattatctcaagtagcagaatatgttccatataaatgctaaaccatcgcagctgtaaatcatgtacttaatgcaacgtgtccttttgacctccacattctcaccatctgtttctttgttggattatcaataaataccgtgggctcccagagctcggggccttcgcagcctccaccatagtgatggcatactrgtgtcccacctttctctctcaaactgtctttttctcaatcctttgactccactggactttgtcacccccatgacctggtgttgggtctgatcaccccaacaactattatcacacccacactggagatgagaacatggaggcacagaaaggtaaagcaatttgtctaaagtctcacagctaacaagcagcagagccaggagtggccgtg

SEQ ID NO: 68397 - DNA, 648 bp, Homo sapiens
tggtattttctctccttcctgctacagggtactttcccgaaaatagtttaaacagaattttattttattttatttattttattttgagatggagttttgctctgtcgcccaggcgggagtgcagtggcacaatcttggctgactgcaacctccccctcccaggttcaagtgattttcctgcctcagcctcccaagtagctgggactacaggcgtacaccaccacacccagctaatttttgtatwtttagtagagatggggtttcaccatgttgcccaggctggtctcgaactcctgacctcaggtgagccatctgcctcagcctcccaaagtgctggggttataggcatgagccaccacgcccagctagaattttaaataatagcatgatcatatccttttcatttacaaagcatcctgaaattatgcctttagctaattactaatatgcagccttggtatgagtagattccagtacttgaatagatatttctccaaagaagatacacaaaagccagcaagtgcatgcaaagatgcttgatgtcattagtcattagggaagtgcaaatcagaaccacggtgagatcccatttcacacccagtgggatggctgttattaaaaaacaagtggtggctgggcagagtggct

SEQ ID NO: 68398 - DNA, 648 bp, Homo sapiens
tggtattttctctccttcctgctacagggtactttcccgaaaatagtttaaacagaattttattttattttatttattttattttgagatggagttttgctctgtcgcccaggcgggagtgcagtggcacaatcttggctgactgcaacctccccctcccaggttcaagtgattttcctgcctcagcctcccaagtagctgggactacaggcgtacaccaccacacccagctaatttttgtatttttagtagagatggggtttcaccatgttgcccaggctggtctygaactcctgacctcaggtgagccatctgcctcagcctcccaaagtgctggggttataggcatgagccaccacgcccagctagaattttaaataatagcatgatcatatccttttcatttacaaagcatcctgaaattatgcctttagctaattactaatatgcagccttggtatgagtagattccagtacttgaatagatatttctccaaagaagatacacaaaagccagcaagtgcatgcaaagatgcttgatgtcattagtcattagggaagtgcaaatcagaaccacggtgagatcccatttcacacccagtgggatggctgttattaaaaaacaagtggtggctgggcagagtggct

SEQ ID NO: 68399 - DNA, 1269 bp, Homo sapiens
cctcrggtgcaggaaggacatttatactagctctggtttgtgaaaggcaatctttgattgtcttaaacaaagggtttttttgtgttgttgttttttgttttgtaagattcttggaatctgcaactctaagcaaaatgacatgtgatgaccttggctatatgttgttggtaagacctccttggtaagaatttaatagaattagcctttgtgcaaggtattcatctgttcgtctgttgctttgcttatttgttcaaccaaccaacaatttccaggccatgcagggttctatgctgagaacacaacagctgataagctagaccagggccctgctgttgaggcacttatatcccactgggagacagaaaacaagcagaggcatataaagacaatatatcagctgcaaagttcagggggaaataaagcaagggagggtggatactatctcagacactgttcagggagatcacatattatcttgtgttcattatcacttaggccagcagtatgagctaaaacgtggcaaataacattttttccaagggtcagaaagaaagaaagcactgtagatgactggagttggtttctctaaagaagtaaatatgaaaatttcctttctgggctacagaggtgtggcagcttttaagaaccttttctctagcttccctcagagatcacttaaagaagctaaatgaggtatctagtctttgtcattcctattaaagatccttcatcaccgaaggacccctgacacatctttcaaaagtgatccagtcataatgccctacaggagggcagtgctgccaaatggggagagcatcagtctagccacccagagaccccagtcctattccagattgatgccagatacttatttttatccttatatgatgtgtctggtccacctgaagtctcagtatcagtctcaagtagatgagatcagggagttcaatgctgtgctttgtgtgaacttcaatacagtgaatgcaaaaccacttctggggttgtaatgcagctgatttcatgcatgcctgcttcatacatgtctgcttaacaagtaagatcaaatcaaatcaaattatttagtaacagcactgacttccttgtccttgataggcttctctttgaagcaaacaaagtggaagaaatggtgatatgatttctgttgtaaactgtctcgtactctatttggtgaaagtgaactgctttttataaaataaatggctagggttggggagtttcgatataactcttaaaggtaaaggttttgcg

SEQ ID NO: 68400 - DNA, 953 bp, Homo sapiens
cttcacttctgggagttaaatgctaaacatggtctctgactttccagaaacctatcacacccattgatagaaaggaagccagttccatgccagcatcttccactctcaagcctggcctcagaagaaagcaccaccaaggtttggaaagaccctggttcctcccctccttcgccagcacattcttgattgccttggtgaaaggagcctccagactttccttgggaaactgccaagtggtaggttttgggttttacatacaaatccatcctaacactccacattcatgagccatctgactctttcctcaatcttaggccaaggagattctggcatctccatcctattaattctagcccattgccatgtccatgcttcaagttgttccaacaaaatttaagacccagtttcaggcaggtgttctagcttaatttcataaatatgccaggctcatgaatcttcaccaggtttatatcctacacacgtgtctttccagagcaaaatattaaatcccaagccatgggtgagtccttcccgtgtcaataaactcatctctattcatcatgctccagcatgctcaccacccaagtctaacactctcagtattccctttcacacatattctcccactttctamtggtccatgttagtcttgccctgcaattcctttggcatattttggctactttttttcctgaaacagaggttgtatttccttgctcaggctgtgctaaagtctgaccccgtttattggcctgaagtcaatgagatgtcgagagagtggagcttgggacctaacatcatattgcaagtgacctcatttatatcaggttttgtacagtttccagtcaaggaaaatctattcttctttggcaaggggaagaaagttgcttttcctgccagaacgacttggagttaatttataggtatgagattataggtatggtataaggaga

SEQ ID NO: 68401 - DNA, 953 bp, Homo sapiens
cttcacttctgggagttaaatgctaaacatggtctctgactttccagaaacctatcacacccattgatagaaaggaagccagttccatgccagcatcttccactctcaagcctggcctcagaagaaagcaccaccaaggtttggaaagaccctggttcctcccctccttcgccagcacattcttgattgccttggtgaaaggagcctccagactttccttgggaaactgccaagtggtaggttttgggttttacatacaaatccatcctaacactccacattcatgagccatctgactctttcctcaatcttaggccaaggagattctggcatctccatcctattaattctagcccattgccatgtccatgcttcaagttgttccaacaaaatttaagacccagtttcaggcaggtgttctagcttaatttcataaatatgccaggctcatgaatcttcaccaggtttatatcctacacacgtgtctttccagagcaaaatattaaatcccaagccatgggtgagtccttcccgtgtcaataaactcatctctattcatcatgctccagcatgctcaccacccaagtctaacactctcagtattccctttcacacatattctcccactttctactggtccatgttagtcttgccctgcaattcctttggcatattttggctactttttttcctgaaacagaggttgtatttccttgctcaggctgtgctaaagtctgacccygtttattggcctgaagtcaatgagatgtcgagagagtggagcttgggacctaacatcatattgcaagtgacctcatttatatcaggttttgtacagtttccagtcaaggaaaatctattcttctttggcaaggggaagaaagttgcttttcctgccagaacgacttggagttaatttataggtatgagattataggtatggtataaggaga

SEQ ID NO: 68402 - DNA, 1096 bp, Homo sapiens
gcttgagaaccagagagctatttcctccggctattctttacatttcagtatctcctgtctccattttgtttctgctccgtaaatcttctcacaaactcttaggaacttgctctccatggctttaccctgtctgtatacaaacatgctcacttcttccccacctgtaacaaaattaacaaagcaaacaaacaaactaaaaaaatgttagccttctgccgtgagagcgcctctagctagcctgtctttattcttaatagccaagtgctttggcttgaatgtttctcccctccaaaactcaagtagaaatttagttttcattccaacagtattaaaaggtggaacctttaagtgatcagcccatgagggctctgctgtcttaataccctttaaaaagtgtgagttcagccctgtgagtttagccccctttctctgtttgcattttcatcttctgccatgtgaaagcgaagctttcctcccctctggaggatgtagcattggaggcactatcttggaatcagagttggcagacctgctggtgccttgatctcagacttcccagcctccagaactgtaagccaacaagattttgttcactataaattacccagtctgtgatattctgttatagcagcacaaaagggactaagacaccaagcttctggaaaagtcaacctacacacaccctttgttcatcttttattcattcctcaatccacctggcttttaaaatgtatcttcctatccatgctgaaaactatttcaatcatcaaggtactgaatctaaaaactacttcttgtttttattttacttcacttctctgcaactgttgacattattgtcccacactctcctgtctaaaacacttcctcctcttgtctttaaaatgctactctttttacctgcctgtctttcccattggtctgctttgcccaataaygttcaaaatgttggtgtaccccaggcaccatgctagtctccctctaaaatttctaaacactctccctgagtaatcccaatctcctcctttcttcagtcttcttgttgatgtgttataaatctatatatctcagctccagcttcctgagtttcagatcc

SEQ ID NO: 68403 - DNA, 739 bp, Homo sapiens
tgcattcagctgcagctactaagtaaatctgccggaatacagtgccctataacgcagctcacagaaaggtgtttgaatgcagatttgccactgataattccatcatttcttacactccaatcatgatattgtccatgaagaatagcttgggtacatgatctaatttattcctcacaatattgatatgggacacaactatgatatacatgggtatatgataagatatgggtatattatcatccccattttactgatgagtaaattgaggctcagagcctaggtactttgctcaggttctcacatttgctaagttgtggagctgagatttgaacctagatccgagtgacacagaagttggttctttttattatttaatcactttaatcatttaatctattattgaggtaaaactgcaccacagaggaccaaaaggagaactacagtgcaagtccaggtgcctgtagccatggcacagctgtggcatagttgttccaatgtggtaaccagatgtgtccttctggttgtcttggtacggagccacagctccagtactgagtcacagccacatgcagatgccaccacagaacatgtgatattttagatctgagtygacagtttaacatgtaaacattatcagaaaataatgagtcaggctctcccgagccatatgcttcatctcagagccaaggctgtgtcatcactgtcaaatgctccttcaggccactaaatcaccacagta

SEQ ID NO: 68404 - DNA, 1047 bp, Homo sapiens
actgaagtaaatgaggcctcctcacgtgttccctgctggttttgaatagattattctgtcctgagcaatgacagcacgtttgggcattccagatattttggttgttatacacatgatttagtagcatccgtaataattttagaagctttttcttataccccctttaaacatttaggttataataatgaaataaaaatatcacattttagaaataaaartagaccactttgcaattttgtggcaagagagactgtgtctgtgtaaatgtatgtggtttactaatttcgttcttgactaaacaattctagtctttttttgtcttagcctaaattattttttactttctgttacttttatgacttggggtatttatgggtatttatattctagtgccgtatgcctattaaatcattaaataatatttatcttgcagagttgcttttttttggccacaaatagatttgacagccttatacatttaatagcaatgctactggcaacaaacttttagacactgagcaaccataataaagatgcgtttaactattacatgtgcttttgagtgattgcttaggcagcttcactctggttatcatcaacaatcttactaaaattaaggatgcagtgttcttctgccccaatcatttttattgcattttatagatgattttttgagtatattatctggagtgcttattgggcaatatttctttagttaacactaacaatggtaaaaaggaagtcatgctttgaaacaccccaaaattgttaaaggctttaattagagaaaagcccattgaagagttcaagatgtttgcatttctttctttttcagcaaggggatcagagctgattatgaataaagatgaaagactatgtgctactttaacctgcactaaatcaaaacttttcatccgtgtagcccagaatcattaaaaggtagtgatgaatatgtgtttgagggaatattgctatggctttaatggaaagatgcacaggcgtcctggtacaatgctagctgttttattctctagcctgggcgaacag

SEQ ID NO: 68405 - DNA, 1703 bp, Homo sapiens
  misc_feature (1)...(1703): n = A,T,C or G
tgctttttaaagggagtgaaaattgtccttctgatatgtgcaattctaatccttgggcctggcaaccaagaaggtggttcatgagaagtattgctttcagatacatattgatgacaagaaacatcccttgggaagcatatgatgttgatgtgaaaattatggctttgcctgtrgaaggctttcacccagtcatctcctctgccactttcttctcactggaactagaagtggagtgtggcacctgaactgtaggtgtacccgatactccagatggggaaaaggtacagctgatgtgggaggtgttttagagccagcccctcttcagccacatagactaggcaagcaggtggttctatctgtgtctctaatgtggtgtttgtcactgcttgccttgtgttcttgttctcggtgatgtgtctagattccttctgtaaagcaaaagttgtgtccagcaaatctctgtattcccccaaacacataggacagaagcactatggaatatgttcaggtctatagaaatggaagaaaggaaaggaggaagagagagaaagaacggtggggagggagggagggaggaagagagagaaggaaggattctattgctgatagagctacagttccactttggtgcccatacaaacaaatatttcccagatttttctaagctgtcatagtnctgggttcctagcncnncccngaaagcggttttancccccaattnnnnnnnnnnnnnnnnnnnnnnnnnnnnnnnnnnnnnnnnnnnnnnnnnnnnnnnnnnnnnnnnnnnnnnnnnnnnnnnnnnnnnnnnnnnnnnnnnnnntcctttttcttgggctgtgagcattcagccacttgttaattttgttaggcacaatgttggtgcttaataagtaaaggtttgattgattcataaaaaatactgttatttctggggcacatgctttggaatcagcaggagctcttatagacaacttccctggcctctctctctctctctgcagtggctcaacggggagatgtcaggtcctcttcccttaagtatatcctggcctaaatgttctgcttgtggtcaaggtagaattgtgtcatccatgtttgggagtccatatcatgcttgtaaggggtggggaattgggtattcaacaggactgcatctggtacacatcacatacaagtcccatgagggagaggcagcctcaggccaggacaaatctgaaggccttgaatatcatatccctcgcccagggcagggattgttaatcagtctcaatattccttctgctgatctttcgggtgctttcagctctttctcaacacaaagtattctggttggctgaaccaaaacaaaagcaaaagcttttttgtcaatcagggaatagacagatgttggatttaagagctggggtgtttgggagagttcagtggtatgtgtttagctgctcaaaatgatcaaaagatatacctccagggttttggtgtgctgcagggttgaatcccaggctagcctaagaaccttgaaaaaatcttgagaagatatcttgtcttccaaatgtcttgttaatgggttggttctattggtcaaagataaataacactgatttttataccttgaaaaattagccctggaattactcatgataagaaaaaaaagtattttctgaaagtctaatatttaaggatattggaaaacaccacctgtgtca

SEQ ID NO: 68406 - DNA, 620 bp, Homo sapiens
tccagggcttcatattaacctcatacttactgattatataaacttgggtaacaatttttctataattaattttcctcacatgtaagatgaaaagaagaaaaataagaaggtggaggggragaaggaggtggagaagaaaaggaagagaactgggttaatttaaagaataaataaattaaaaatcttagaataataatgatatggagaagtaagtaaatgttttattttatttcacagtgggaataaaagtttcaacaagattcaacaggaacaataaaatatcttcactcctagcttctcaatgtcacactagactaatttttagtgtttgtttaaataatcaatccaagatcctgatttatgtttttagtatggcagttaacataatgagtcttatcaaaggatttccatgacacaacaaaacttctcaaaagtacttcccaaatgttatttgagcataacattttacaaggaaaaaaacaggaaaagacattaaataattcgcttatttttcaaaaaatatctacattatagtttgccactaagttggaaaacatctggttccaactaactaaattcagttccatatttcattcctaaagataaatttataaataatg

SEQ ID NO: 68407 - DNA, 899 bp, Homo sapiens
gagaaataagctgttttgtttctcttttttcccttcaattagatttcctatttgcagtttctttcctaaacattatgacctaatggctttattgggaaatttatcttagtacattctgagaaagttccctcccttccttccttccttccttccttttctctctgtctcatgtttctgtgaaagaaactgtgatatagaagaatttattggtatcctcattgatttgacaagatatgtaactagtgagatgtatataaatatagatatatctatatatatatttttatttttttgaaatggagttcagctcttgttgctcaggctggagtgcagtggtgccatctctgctcactacaacttctgcctactgggttcaagcaattctccatcctcagcctcccgagaagctgggattacaggcacccgacaccgcccccagtcaatttttgtatttttagtagagacagggtttcaccattttggccaggctgctctcgagctactgacctcaggtgatccacctgccttggcctcccaaagactagtcatatttttaaggctaaataacatttagttattaaatcatgtctgtatagttaaagaaaatatgtatttttaaaaatcattgtgcgagtactatattctgtgtgagtaaaatgaggcaataatgacagttctgtgaattagagcttcgtttrtggaaaatacttttttctaatattttaaatgcttttcactttctattttgtatagctcaattaatcacatgtaattgtagtatttcagatttttggaaataattatgcctttatataatattttataaaagttgctgaataatcatatcaaacaagtattattgaaacaaactaattacattcaaacatgtatgtttatgc

SEQ ID NO: 68408 - DNA, 976 bp, Homo sapiens
tccagctctgactgttaatcacagccactagacctcacgacataggattttagaggcagataaagaaaatggcagttgatgtcttagcctgttgctatgccagtctatgatgaactagcactacctgaactcaagagtaagaaacaaatgaaactggttataaggtttaggaaaaagcaaataagctgttactgagagtggtgaccatatggtacctatagggtacacgggccctctgtgaaacccgtaatattgggctgcgtctcctctttcctctacaacctgaccccatcgcctcatttgatggattccagtcaattgtaattttgagaattgtaagactagtatactagtatgccaatgtcttgttcttttttttttttttttgagatggagtctcactctgttatccaggctggagtgcagtggtgtaatctcagctcactgcaacctctgcctcctgggttcaagcaattctcctgcctcagactcctgagtagctgggactacaggcgtgcgccaccacgcctggctaatctttgtatttttaagtagagatggggtttcaccatattggccaggctggtctcgaactcctgacctcgtgatcagcctgccttggcctcccaaagtgctgggattataggcgtgagccaccgcacccggccgccaatgtcttgttctttaaaggaagaataaatacacatttagaagatggctacaacctcatgcaaaggtctcgaagcagcaagttgagggacagggcttactggtccaagagtaacttcaggcagggaagccttttcccatgtccttcaaattgaccacatcacttggatcatgaatgctgttgatctggtttcaaaacataagaacaagcatcttcgacaatgcggttgataaacatcatcaacaacaacccmccgaagcatcagttgttttgtcttgtccgtggcagtcctgcattcagatctgt

SEQ ID NO: 68409 - DNA, 753 bp, Homo sapiens
aaagggccaagcccaccacccaggacagccccaccacacttctggtgccctgaaaaggttgggctctccaggagagtggccagtaataataattacaagcactttatagcaactctatgaggtgggtacattatctctcattttgcagatgagagaaaaagacaggaccctctcaccacccctccagctggttaacagttgagaatcaccctaggaaggcatctggccacctgtgcttggtctccccctctgcccaaccattcctgagtctgaccctgatgttttgttggtctgtttccattgtatagatggggtcttgctctgtcgccagggctggaatgcagtggtaccatcatggctcactgtagcctggaacttctggctcaagtgatcctcccacctcagcctcctgagtgcctgagactataggtstgagccactgcagtgggctgggtttttaatttttttgtaaagatgagggctcactttgctgcccaggctggtctcgaacccctggcttcaagtgttcctcccacctcagcctaccaaagtgctgggattacagacatgaaccactgagcctgggctgaccctgctgttttgcagagtatggaactctcttgagatcttcccaccctggactggtggaaggcctgtgttcttatccctgatctgctgctcacggccttattggctgactttgaggtcgtgttttcacctctccaagcctcagtttgccctgctggcaattgg

SEQ ID NO: 68410 - DNA, 753 bp, Homo sapiens
aaagggccaagcccaccacccaggacagccccaccacacttctggtgccctgaaaaggttgggctctccaggagagtggccagtaataataattacaagcactttatagcaactctatgaggtgggtacattatctctcattttgcagatgagagaaaaagacaggaccctctcaccacccctccagctggttaacagttgagaatcaccctaggaaggcatctggccacctgtgcttggtctccccctctgcccaaccattcctgagtctgaccctgatgttttgttggtctgtttccattgtatagatggggtcttgctctgtcgccagggctggaatgcagtggtaccatcatggctcactgtagcctggaacttctggctcaagtgatcctcccacctcagcctcctgagtgcctgagactataggtgtgagccactgcagtgggctgggtttttaatttttttgtaaagatgagggctcactttgctgcccaggctggtctcgaacccctggcttcaagtgttcctcccacctcagcctaccaaagtgctgggattacagrcatgaaccactgagcctgggctgaccctgctgttttgcagagtatggaactctcttgagatcttcccaccctggactggtggaaggcctgtgttcttatccctgatctgctgctcacggccttattggctgactttgaggtcgtgttttcacctctccaagcctcagtttgccctgctggcaattgg

SEQ ID NO: 68411 - DNA, 753 bp, Homo sapiens
aaagggccaagcccaccacccaggacagccccaccacacttctggtgccctgaaaaggttgggctctccaggagagtggccagtaataataattacaagcactttatagcaactctatgaggtgggtacattatctctcattttgcagatgagagaaaaagacaggaccctctcaccacccctccagctggttaacagttgagaatcaccctaggaaggcatctggccacctgtgcttggtctccccctctgcccaaccattcctgagtctgaccctgatgttttgttggtctgtttccattgtatagatggggtcttgctctgtcgccagggctggaatgcagtggtaccatcatggctcactgtagcctggaacttctggctcaagtgatcctcccacctcagcctcctgagtgcctgagactataggtgtgagccactgcagtgggctgggtttttaatttttttgtaaagatgagggctcactttgctgcccaggctggtctcgaacccctggcttcaagtgttcctcccacctcagcctaccaaagtgctgggattacagacatgaaccactgagcctgggctgaccctgctgttttgcagagtatggaactctcttgagatcttcccaccctggactggtggaaggcctgtgttcttatccctgatctgctgctcamggccttattggctgactttgaggtcgtgttttcacctctccaagcctcagtttgccctgctggcaattgg

SEQ ID NO: 68412 - DNA, 753 bp, Homo sapiens
aaagggccaagcccaccacccaggacagccccaccacacttctggtgccctgaaaaggttgggctctccaggagagtggccagtaataataattacaagcactttatagcaactctatgaggtgggtacattatctctcattttgcagatgagagaaaaagacaggaccctctcaccacccctccagctggttaacagttgagaatcaccctaggaaggcatctggccacctgtgcttggtctccccctctgcccaaccattcctgagtctgaccctgatgttttgttggtctgtttccattgtatagatggggtcttgctctgtcgccagggctggaatgcagtggtaccatcatggctcactgtagcctggaacttctggctcaagtgatcctcccacctcagcctcctgagtgcctgagactataggtgtgagccactgcagtgggctgggtttttaatttttttgtaaagatgagggctcactttgctgcccaggctggtctcgaacccctggcttcaagtgttcctcccacctcagcctaccaaagtgctgggattacagacatgaaccactgagcctgggctgaccctgctgttttgcagagtatggaactctcttgagatcttcccaccctggactggtggaaggcctgtgttcttatccctgatctgctgctcacggccttattggctgactttgaggtcgtgttttcacctctccaagcctcagtttgcccygctggcaattgg

SEQ ID NO: 68413 - DNA, 672 bp, Homo sapiens
atttttaaattcctcgtgtcagaagaaacctcttctgtctttaatataaacaggggacaaaattaaatgcaaaagagtctgctaatgcaggattgagattctcagaggaacatcaattttcccacattctacacattctgaatattaaggtatcacatttaagagactagctagctctgaaaagcacaatatttgaagcataatagatacaaatgaaaggaatgacagtaagtctcactttttggtatgtatgaccacagtggagtcaactgttttkttttttgttttttttttttttattattattatatgagatggagtctcaccgtgttgcccaggctggagtgcagtggcgtgatctcggctcactgcaaactctgcctcccaggttcaaccctttctcctgcctcagcctcccgagtagctaggattacaggtacccaccaccactcccgtctaattgttgtatttttagtagaaaaatacaatacatataatttttgtatttttagtagagatggagtttcaccatactggccagctgatctcaaactcctgaccttgtgatcttcccaaagtggatccccctcagcctcccaaagtgctgggattacaggcatcagccactgcgcccggccggagtcaactcttgattattcaaggttgactctg

SEQ ID NO: 68414 - DNA, 672 bp, Homo sapiens
atttttaaattcctcgtgtcagaagaaacctcttctgtctttaatataaacaggggacaaaattaaatgcaaaagagtctgctaatgcaggattgagattctcagaggaacatcaattttcccacattctacacattctgaatattaaggtatcacatttaagagactagctagctctgaaaagcacaatatttgaagcataatagatacaaatgaaaggaatgacagtaagtctcactttttggtatgtatgaccacagtggagtcaactgttttgttttttkttttttttttttttattattattatatgagatggagtctcaccgtgttgcccaggctggagtgcagtggcgtgatctcggctcactgcaaactctgcctcccaggttcaaccctttctcctgcctcagcctcccgagtagctaggattacaggtacccaccaccactcccgtctaattgttgtatttttagtagaaaaatacaatacatataatttttgtatttttagtagagatggagtttcaccatactggccagctgatctcaaactcctgaccttgtgatcttcccaaagtggatccccctcagcctcccaaagtgctgggattacaggcatcagccactgcgcccggccggagtcaactcttgattattcaaggttgactctg

SEQ ID NO: 68415 - DNA, 810 bp, Homo sapiens
agggtgaaatgatctatggacgaccttgagggctttggagatggtctctttcagggcaggtcactttaaaaccaataatatggaagcagggaagatgcctctggtggctaaggaagtctgtctcctgcatttttatgctgggcacttttcattagataagtaagtatatgtcagaaaaacgtgaaaaaaaacccatctgtgtctataactaattaaaaagatgtgtgatcaacaaacaccctcttctcctacaaccagggaacaaacagctcattactttccttaaaagccatcctggaaacctttcccggggaaaatgcgctgagcattgattatctatctacacccatcatagccacacggcacattattccatttgttgggagaccttactttaccggttgcagaccaagtttccagagtagaaagcatggtcttagtctcaccccaactaatggttcttcagaggtctcccaaaactcctgccgcctcttctgcacgttaatgaaaataaatggcaccaatctcaatgttctttgcctcagaccaaatggggccaggagcttagaagcaagaagctgaggcatcagcagggtactcccaggacagggcttcctttggctgtgatcattacgtgattccctgacaggctgctgttttcgtcgacggtgtccgtaactcactgactgaaatctttgacctctgtagtacaratgggatccatttgctgccagtaatgatgtgtgacctcttggtgaaggcaggggaagaaaagaagctgaagagatcttcaatatttttgagaatgca

SEQ ID NO: 68416 - DNA, 997 bp, Homo sapiens
tttagatagccggagggccagagcatttaggtgggatagattttcccccctaatttttacacggcttggcatagagtcccagaaaggaattcttaaagcacatagggtctaggccaccaaattagcacagttcctatccctggggagttgactttaaatttatcctgtcttggtttcaggaaggaaaattctttttctgcaaaacctgcccccactcccgccatcagatttcctcgatttgtagaaactgtatcagcattttgtgaaggaaaaagagctctgaaacaaagggctacgtttgctttgaaggtctggcagggacaaagcaggattcttttcctccctggaggatcaaatggcagcaatataagatggaaccatgkgagtgaggagcacaaaggataaatttaaaggacacagttcagcctttctcaagaggaagaaggtcttatttttagttttgtattctccaggtcagcaaaacatgcttctcctactgattttgtccttttccatccaagtggttttgatttacaacaccaacttggatacttgcttgctctgcctacgtatctcttcgtgctagattcatctactcttgttgctaccactttagaaacagaagcagtggcaggtttgctcttcttgtttcagcgatgtggaatattggatttttgtttgtttgttttcttagggtgtaacctcccaaacatcctggtaaatttaaagagaaaataaaaggtatgcaaactgtggctatgctccaatcttggccatattgctttgaggcacagtctgctcagcccacctccataccttacattcccttccactgacaccaaattactctttacacattaatcagcaatgctgccaaaataagagtccaattagagcattctttcttgattgttttattctttaaattaacactaagccaaaagaccaaccctcagatgagcaaataaagatctatctgctttaagcaaacctgatg

SEQ ID NO: 68417 - DNA, 622 bp, Homo sapiens
tccattcaaatgcaaacactcgggagtgggaggcaagtgggctgaggaggtggaggagctggcccaggtccttaaagcactgcaaagtcacactctaggcccagggatgaggtggattttagggggaagcttagaagcctggctcactggagagtgccccagatctggctcttatgggcaaggcagctgctgtgtcagcttggctctgggtggtctgaggatgaagagmatcttccctaaagcccaaggagcctggggttctcccaaagcaaatctttgaaggcctcactttgcccctcctttttctttgaccttgtctttgcattagaaatacattctaaagccttcccaactcaagacacattggcccctttgttcctattttgggtgcatagctcatactttttgttgtttgcacttttcagagggttgcaatctgaccttatgtctcatgcccattctgtccctgtaaccatcctgttataaaagctatatgttgtgtgggaatgaagccatgagctcagctctgtgccctgggagcagggaagctgtgagaagtcagctctctgaagcccctctacctgcagaagatagggacggggcagggttggggctgtctatg

SEQ ID NO: 68418 - DNA, 734 bp, Homo sapiens
gacatactgaagatcacctggtctctgtgtatgtcctgaattgcaattcttgcttcctaaataaaatgtttcaaatttcaatatttatctctatatcttatttaacttcaatggtactcatacatttttagacttttgaactttttgatgagagagaaactaaccttagctttagataacatttacaaagctcatttgcaagatgttctcatcttctacaccatgcttacaactattaaccacaggtgtgaacaggtagatggtgatcacttgactcagactgggtctttggaaatttaccaaacctttctgtgtctgtttcatatctaatgcgataggagtagtattacttatctcacagtttkttttttttttttttttttttgagattaagtctcactctgtcaccaggctggagtgcaatggtgcgatcccggctgactgcaacctctgcctcccaggttcaagcaattcttctgcctaagcctcctgagtaacttggattacaggcgggcaccaccatgccagactaattttttgtatttttagtaaagaaggggtttcaccatgttggccaggatggtctcgatctcttgacctcttgatccgcccacctcaggttcccaaagtgctgggattacaggcgtgagccaccatgcctggctttctctcacaatttttattaaagagaattacaggagttgtcttctataggcacctaggagggttcccca

SEQ ID NO: 68419 - DNA, 734 bp, Homo sapiens
gacatactgaagatcacctggtctctgtgtatgtcctgaattgcaattcttgcttcctaaataaaatgtttcaaatttcaatatttatctctatatcttatttaacttcaatggtactcatacatttttagacttttgaactttttgatgagagagaaactaaccttagctttagataacatttacaaagctcatttgcaagatgttctcatcttctacaccatgcttacaactattaaccacaggtgtgaacaggtagatggtgatcacttgactcagactgggtctttggaaatttaccaaacctttctgtgtctgtttcatatctaatgcgataggagtagtattacttatctcacagtttgttttttttttttttttttttgagattaagtctcactctgtcaccaggctggagtgcaatggtgcgatcccggctgactgcaacctctgcctcccagrttcaagcaattcttctgcctaagcctcctgagtaacttggattacaggcgggcaccaccatgccagactaattttttgtatttttagtaaagaaggggtttcaccatgttggccaggatggtctcgatctcttgacctcttgatccgcccacctcaggttcccaaagtgctgggattacaggcgtgagccaccatgcctggctttctctcacaatttttattaaagagaattacaggagttgtcttctataggcacctaggagggttcccca

SEQ ID NO: 68420 - DNA, 734 bp, Homo sapiens
gacatactgaagatcacctggtctctgtgtatgtcctgaattgcaattcttgcttcctaaataaaatgtttcaaatttcaatatttatctctatatcttatttaacttcaatggtactcatacatttttagacttttgaactttttgatgagagagaaactaaccttagctttagataacatttacaaagctcatttgcaagatgttctcatcttctacaccatgcttacaactattaaccacaggtgtgaacaggtagatggtgatcacttgactcagactgggtctttggaaatttaccaaacctttctgtgtctgtttcatatctaatgcgataggagtagtattacttatctcacagtttgttttttttttttttttttttgagattaagtctcactctgtcaccaggctggagtgcaatggtgcgatcccggctgactgcaacctctgcctcccaggttcaagcaattcttctgcctmagcctcctgagtaacttggattacaggcgggcaccaccatgccagactaattttttgtatttttagtaaagaaggggtttcaccatgttggccaggatggtctcgatctcttgacctcttgatccgcccacctcaggttcccaaagtgctgggattacaggcgtgagccaccatgcctggctttctctcacaatttttattaaagagaattacaggagttgtcttctataggcacctaggagggttcccca

SEQ ID NO: 68421 - DNA, 734 bp, Homo sapiens
gacatactgaagatcacctggtctctgtgtatgtcctgaattgcaattcttgcttcctaaataaaatgtttcaaatttcaatatttatctctatatcttatttaacttcaatggtactcatacatttttagacttttgaactttttgatgagagagaaactaaccttagctttagataacatttacaaagctcatttgcaagatgttctcatcttctacaccatgcttacaactattaaccacaggtgtgaacaggtagatggtgatcacttgactcagactgggtctttggaaatttaccaaacctttctgtgtctgtttcatatctaatgcgataggagtagtattacttatctcacagtttgttttttttttttttttttttgagattaagtctcactctgtcaccaggctggagtgcaatggtgcgatcccggctgactgcaacctctgcctcccaggttcaagcaattcttctgcctaagcctcctgagtaacttggattacaggcgggcaccaycatgccagactaattttttgtatttttagtaaagaaggggtttcaccatgttggccaggatggtctcgatctcttgacctcttgatccgcccacctcaggttcccaaagtgctgggattacaggcgtgagccaccatgcctggctttctctcacaatttttattaaagagaattacaggagttgtcttctataggcacctaggagggttcccca

SEQ ID NO: 68422 - DNA, 771 bp, Homo sapiens
aaatgtcaattgtctgtcttctgaagagccacattctagagacagaagggaagcacaatacatttaacataagaaaccaaggcaaatttaccaagctctcgggtagccatttctgcaccaataactctggatttgtatcatatatgtatgaccataaaagtgattcatagataattttattatttaaatcctgatctgctattcaaagatccatttctgaaaataattcataatatagttgtcgtttccaccatatgagcttatttcaacagatgtctaacatttatccacaattaaatgaaatgtgaaataacaacaacatacttaacttctaatagtactgtactgctgttccttgagttgtcagtgtctttgggattattaggataattatgcactcaaatagagaaaataaaattaagacacatgactgtttacartacatgatatctgtgaagagctaggtatctgtaacaatttttaaaagttctactggagaatgaaaaagctttccacttctgaatatcaaataaagggctactgatggaggaagaacgttttctataggaaaaacctaaagattagcctcactcaaggggcacaccatgtggtctcagtcaaatggcaaggactgaactttgaacatctattttggagttctaatgaataaaatgcttataacttatattcagtaaagcttttataagttacattccgtataatttcctcagagagaaatatcattgcataatttaagtgagaactggacat

SEQ ID NO: 68423 - DNA, 771 bp, Homo sapiens
aaatgtcaattgtctgtcttctgaagagccacattctagagacagaagggaagcacaatacatttaacataagaaaccaaggcaaatttaccaagctctcgggtagccatttctgcaccaataactctggatttgtatcatatatgtatgaccataaaagtgattcatagataattttattatttaaatcctgatctgctattcaaagatccatttctgaaaataattcataatatagttgtcgtttccaccatatgagcttatttcaacagatgtctaacatttatccacaattaaatgaaatgtgaaataacaacaacatacttaacttctaatagtactgtactgctgttccttgagttgtcagtgtctttgggattattaggataattatgcactcaaatagagaaaataaaattaagacacatgactgtttacaatacatgatatctgtgaagagctaggtatctgtaacaatttttaaaagttctactggagaatgaaaaagctttccacttctgaatatcaaataaagggctactgatggaggaagaaygttttctataggaaaaacctaaagattagcctcactcaaggggcacaccatgtggtctcagtcaaatggcaaggactgaactttgaacatctattttggagttctaatgaataaaatgcttataacttatattcagtaaagcttttataagttacattccgtataatttcctcagagagaaatatcattgcataatttaagtgagaactggacat

SEQ ID NO: 68424 - DNA, 1717 bp, Homo sapiens
agttgtgggagaggctctggagcacctgcctggggggcccagtcattctcactttggacttccggcctctaaaactttaagagaggcttctgttgtttaagccacctggttagtgacactctggtacatcagccccaggaaagggatgtagctgcctcctgtagcagctgggaccctggggcccttacctgactccaggtgaattacctgcccctcttcccccaggctgaagccgccctcccctctcaccgggacacctggagtgccgtccccctcccgcctggcccggctgggtccccaccccttgttagaccccgctggcttttccagtgttcctgccatcccccagcgacmctctctcggagccgcctggtcggggcgctggttgatgctcccagcccagtgttggaacccagagtcctcaccgtctcctcctgaggtgtcgtcttagtgcccctgcccacggcatgcagcagggtgcatggcaagggggtcacggtggctgccgggggcgggatggggcgcatgtgctcttccccaccccaagcaggcgttctggaagcaggcgccaagcttgttccccacaggacaccaggaggcatgtgggccccacagagcaagctcgcacagggccccccgcttgtccctgcccctgaggtgttggcggaggggagcagctgggttccaggcagaacattcctggggaggaagaccagcaggccccagccgtgccacccacccacgtcggcactttctggtgtgctggccaacggggtgctcccgggcccacctgttcccagaagttggacctctgagcacagcggggtgagaggctgcccacccctcctgaaggggtgactttccagtgcagggccccctgtgaagcccccgatgcctgccgctgccctgcctctcctctggagccactcgtggtggactccgggccagctggttttcgtcagtgctcctggctgaggttttgggaccagccctgacctgcctgggtgacaccagtactgcaggctgggaagattcgtggcctcccgggcaggcagggcctcgtaaatcctgctcctgccatagcctgaggcccagtgggcggacttggctcagggatcaccatctctgaggacagctcccctgcctggggtgtggggaggcctctctcccgtggctccagcctctatcctgcatggtgaggctccccctcctcgtcagctcttcctcctggggctggtggggggcgggagggtctcttgcctgtgtccccgtcccgcctgttcctgaagactctcaggaaaagacccagcacgcccaggggtaggcagcgggggtcctgctggaggcgccaggctcacagggtacccggagtaccctggggtggggggagctgggcaggctgggcccctggtgggaaagccgatcggccgtggatccccatcctcaggctggagccagggagggaaggaagaggatttggggggtcagtggggggcggggcttgtgatggggcagcctggctccaaggccctggtagttaggcggagcttggggcctccctgtaccctcagaacagggctgtgcgttacctttgaggcccctggccaccagccctagtggcagctaggtctgtctggaggggattaggggctgggcacctctcaagatgtccttggggcctggccgggccctgggccttggactgagcctgaactct

SEQ ID NO: 68425 - DNA, 620 bp, Homo sapiens
cggagggaaggagcggctctcccacggctcttcgcctcttcttaggccactgctgattcgcatttttaacctccgtttacaccagtctcggcattttycccccagtttatcatttttctaagtgttttccaagttattggtacatagctgctcataatttttataccttcttctctattgtgtttgtagttaactcttgtgtatttttttctctcgtgtttaaaaaatcagtcttgcaaggtgctttcttgcttcttagtcttcaaagaaggaaatttcggttttcttaagcgttccattattctgcacctgctgaatgtaaagtttatacacagaaatgtaagtgtgagtatcacttatcatcagagaaatgtgaattaaagccacgaggccgagtgcagtggttcgcacctgtaatcccagcactttggaaagctgaggcagtcagatcacatgagctcaggagttcgagaccagcctgggcaacatggcaaaatcccatctctacaaaaagaaaatacaaaaattagctgggcgtggtggcttgcacctgtagttagcttcctgggaggctaaagtgggaggattgcttgaaccctggaagcggaggttgcagtgag

SEQ ID NO: 68426 - DNA, 428 bp, Homo sapiens
aggtatgtcaggaattctctaggtcggggctgggggtctctcagggcaccatgccactgctgatccctacttccttgcactccaaagtagcttgcctacttctgcccacaggtgagcctgagacctgattagcctcttcctgcacggaacaagaggtagcttcctcctgaaagatgtcctgagtcgcagaagcwttctctgacttgcacaagaatgagtctccaaaaccccagtcacctggggggcctggacttgtctgagcagggagtggggaaaaccaggcggccatccactcggcctccaaccttgcagccccaggggaagaagggccaggtgcagtttgctgggcagttatgaaacttgagaagctggagtgactttgggctggtgctttgagaacagggaggtattgtgtgatgaggcgcaga

SEQ ID NO: 68427 - DNA, 428 bp, Homo sapiens
aggtatgtcaggaattctctaggtcggggctgggggtctctcagggcaccatgccactgctgatccctacttccttgcactccaaagtagcttgcctacttctgcccacaggtgagcctgagacctgattagcctcttcctgcacggaacaagaggtagcttcctcctgaaagatgtcctgagtcgcagaagcaytctctgacttgcacaagaatgagtctccaaaaccccagtcacctggggggcctggacttgtctgagcagggagtggggaaaaccaggcggccatccactcggcctccaaccttgcagccccaggggaagaagggccaggtgcagtttgctgggcagttatgaaacttgagaagctggagtgactttgggctggtgctttgagaacagggaggtattgtgtgatgaggcgcaga

SEQ ID NO: 68428 - DNA, 1570 bp, Homo sapiens
cacacacacacacacacacacacacacaagaatttgccggccgggcgtggtgtctcatgcctgtaatcccagcactttgggaggccaaggagggtggatcaccaagagatccagaccatcctggccaacatggtgaaacctcatttctactaaaaatacaaaaattagccgcatgtggtggcctgtgccttgtagtcctagctactcaatgggctgaggtaggagaatcacttgaacctgggaggcggaggttgcagtgaacagagatagcgccactgcactctaatctgggcaacagagtgagactccatctggaaaaaaaaaaaaaaaaagaatttgcctttacatagcataagatccagaaacacataagaggcagtactttcacaaaactttaaaaatgtctgaatatacatgagggcaagagcctttctttacatcacatagcttcatgttgaatttgaacaccttagtatcatgtatctagtgtgaactcggtttattcaaataaaaggaattttttatttggttttgtgagacagcataatataatttacttggcttcaaggacataaatattccatcacagattaagaagaaaaatgagaagagatgctgaaatgtaagtcccacttcatcttgtttctggctaacctatttccccaatatgaaaggacccatttctcttgtcactactggtaaaataaaaaacataagagagttgcatttttgcacatcaaaaagataaagatgaagaaaaactaatagaatgaaatgaaaattgtcaatttttgtgtctttgtattaattatcactaagactgaataactggcagtaagccctagatgacagagaaataggtcatagggagagagagacagagatgaggccacatgcaggcacacccatccaccccacttagtaggtgcatggatccaccaggtggtcacagaaagcgaaaaatgtctactcaattgtcactgctctttcttcaacaccaaagtctttatgatcaaagaaacacccagctgaatgggtttttcctgggatactcrgcaatatgaaaaaaaattacaaaaccaaaacggttgaatttccttgtaatctggaactttatggccactcatatcaggttaaacaaaaaaatgtatccactgctttattttttgtctaccgaatacaatcacgttctagggctgcaatatgtcagtgagttgaattaaggcagttcagttcactttttttttttttttttgagagacagagtcttgctctgtcacctaagctagagtgcactggcgtgatcttgactcactgcaacctccacttccctggttcaagtagctgggactacaggcgtgcgcctctgcgcccaggtaatttttgtattttttagtagaaacagggtttcactatattttggccaggctggtctcgaactcctgacttcaggtgatctgcccacctcggtctcccaaagtgttgggattacaggtgtgagccactgcgcccagccctacttcactttttctactcttagcaattgtccatcttggcaagaataaaaatt

SEQ ID NO: 68429 - DNA, 579 bp, Homo sapiens
aaagcctttctccctcactgtcctaggagagatgtaggcaaccgttttcagaaggagcgtggtagtgttgctaggggcccgctagggaggcactggcaggagaggctgcactcctgtgccattcccagtcagggtggcactgcttccattcctgtgcccagaacacccaagacaaggtggccagagcagtgcaggaagtacctgaggctcctcattttcagtgacatgaaccatcaatcatccagttttcttggtgataaaataattataactttcatttctggaatagatatcaaggattrcgactgctctgtgtatcatgcaccaaattctatgaaatgaagttaacacatgtgaaaaggatctaggttctcagagtttctcccttaaagaagggagaaacttaggtttctccttgttttctttaatttggattctgaatacagaaaggatatgagtgacgcatactgctttttcctttatgataagaccatgtgttctaaggtagatttaccgaacttttaacctgctcccctttctctccctccctcctcctttctggatttaggtcattttctg

SEQ ID NO: 68430 - DNA, 903 bp, Homo sapiens
agttccattgaaagtattcttaggtcaagaatagaaaaataacaaaaagtatggttcacatttgttattcaaatataagattgattctttggattgataaaatttttttttttacttttattctttttatcttccccaaaattagatatttgaaaataaattaaatgaaatttatcttcaaatataaaatctgaaaatcaacaatattttagcttgtgagtttcattcattcttcaaccagactggaacgtccatgaagatgtgttgtgttcattgataaagccccagtgcccagaacactgactcatgtatcgtacattcttagtaaatatttgtggattacttactaagcaaatgtttatacagactggggttgaaaaacaggaggtgggccgggcgcggtggctcacgcctgtaatcccagcactttgggaggctgaagcaggcggatcatgaggtcaggagatcgagaccatcctggccaacacggtgaaaccccctctctactaaaaatacgaaaaaaaaattagccgggcatggtggtgggcgcctgtattcccagttactggggaggctgaggcaggagaatggcatgaacccgggaagcagagctcgcagtgagctaagattgygccactgcactccagcctgggtgacagagcgagactccgtctcaaaagacaaagaaaagaaaagaaaaatgggaggtgatgaggaatagaaatgtaaaaataaaaaaacaaaacgccatgctcacctgtcagagtcaagggagcaaggggatctggtggaaggaaacacgatcacctcctggctcagaaagctttttggtggccatgatctttgaaacaaacatggggttcatgagcagctggagtacatttcaggttgtgaagggcatgc

SEQ ID NO: 68431 - DNA, 856 bp, Homo sapiens
gagttttattctaaagtagattttcttatcatatttatttcttcatgtctaatctgcctgttcttcaccacctagaactgttctcaatgcaaatttaaatttggcattaaatgcagtctatttcatttggtaacttaaaagcaggatcagtcttgaacaaagcactgtcgctcagagaaataaaagattggatttyttaaatagaatgtaagccaaatccccactcacataaagtaggctgtactagaatgaatggatatacacagactggctcaatgattggctatactgattcaattcttcaactgtaaacatcctgctttcaaacttaaaataccagtaagaaaatgttttctgttaataattctaacttcattcatagttgaatacaactgcttaattgttgaaaacatatggggagagggttatgtccgccagtttttaaatcaagggcattcttttttttttttttttttttttgagacggagtctcgctctgtcgcccaggctggagtgcagtggcgtgatctcggctcactgcaagctccgcctcccgggttcacgccattctcctgcctcagcctcccaagtagctgggactacaggcgcccgccactacgcccggctaattttttgtatttttagtagagacggggtttcaccgttttagccgggatggtctcgatctcctgacctcgtgatccgcccgcctcggcctcccaaagtgctgggattacaggcgtgagccaccgcgcccggccaagggcattcttatgatattatgtcactagacatttcaggtaggctgaaataaatccaataatctggaagactttattttccttcttgagtcata

SEQ ID NO: 68432 - DNA, 856 bp, Homo sapiens
gagttttattctaaagtagattttcttatcatatttatttcttcatgtctaatctgcctgttcttcaccacctagaactgttctcaatgcaaatttaaatttggcattaaatgcagtctatttcatttggtaacttaaaagcaggatcagtcttgaacaaagcactgtcgctcagagaaataaaagattggattttttaaatagaatgtaagccaaatccccactcacataaagtaggctgtactagaatgaatggatatacacagactggctcaatgattggctatactgattcaattcttcaactgtaaacatcctgctttcaaacttaaaataccagtaagaaaatgttttctgttaataattctaacttcattcatagttgaatacaactgcttaattgttgaaaacatatggggagagggttatgtccgccagtttttaaatcaagggcattcttttttttttttttttttttttgagacggagtctcgctctgtcgcccaggctggagtgcartggcgtgatctcggctcactgcaagctccgcctcccgggttcacgccattctcctgcctcagcctcccaagtagctgggactacaggcgcccgccactacgcccggctaattttttgtatttttagtagagacggggtttcaccgttttagccgggatggtctcgatctcctgacctcgtgatccgcccgcctcggcctcccaaagtgctgggattacaggcgtgagccaccgcgcccggccaagggcattcttatgatattatgtcactagacatttcaggtaggctgaaataaatccaataatctggaagactttattttccttcttgagtcata

SEQ ID NO: 68433 - DNA, 856 bp, Homo sapiens
gagttttattctaaagtagattttcttatcatatttatttcttcatgtctaatctgcctgttcttcaccacctagaactgttctcaatgcaaatttaaatttggcattaaatgcagtctatttcatttggtaacttaaaagcaggatcagtcttgaacaaagcactgtcgctcagagaaataaaagattggattttttaaatagaatgtaagccaaatccccactcacataaagtaggctgtactagaatgaatggatatacacagactggctcaatgattggctatactgattcaattcttcaactgtaaacatcctgctttcaaacttaaaataccagtaagaaaatgttttctgttaataattctaacttcattcatagttgaatacaactgcttaattgttgaaaacatatggggagagggttatgtccgccagtttttaaatcaagggcattcttttttttttttttttttttttgagacggagtctcgctctgtcgcccaggctggagtgcagtggcgygatctcggctcactgcaagctccgcctcccgggttcacgccattctcctgcctcagcctcccaagtagctgggactacaggcgcccgccactacgcccggctaattttttgtatttttagtagagacggggtttcaccgttttagccgggatggtctcgatctcctgacctcgtgatccgcccgcctcggcctcccaaagtgctgggattacaggcgtgagccaccgcgcccggccaagggcattcttatgatattatgtcactagacatttcaggtaggctgaaataaatccaataatctggaagactttattttccttcttgagtcata

SEQ ID NO: 68434 - DNA, 856 bp, Homo sapiens
gagttttattctaaagtagattttcttatcatatttatttcttcatgtctaatctgcctgttcttcaccacctagaactgttctcaatgcaaatttaaatttggcattaaatgcagtctatttcatttggtaacttaaaagcaggatcagtcttgaacaaagcactgtcgctcagagaaataaaagattggattttttaaatagaatgtaagccaaatccccactcacataaagtaggctgtactagaatgaatggatatacacagactggctcaatgattggctatactgattcaattcttcaactgtaaacatcctgctttcaaacttaaaataccagtaagaaaatgttttctgttaataattctaacttcattcatagttgaatacaactgcttaattgttgaaaacatatggggagagggttatgtccgccagtttttaaatcaagggcattcttttttttttttttttttttttgagacggagtctcgctctgtcgcccaggctggagtgcagtggcgtgatctcggctcactgcaagctccgcctcccgggttcacgccattctcctgcctcagcctcccaagtagctgggactacaggcrcccgccactacgcccggctaattttttgtatttttagtagagacggggtttcaccgttttagccgggatggtctcgatctcctgacctcgtgatccgcccgcctcggcctcccaaagtgctgggattacaggcgtgagccaccgcgcccggccaagggcattcttatgatattatgtcactagacatttcaggtaggctgaaataaatccaataatctggaagactttattttccttcttgagtcata

SEQ ID NO: 68435 - DNA, 856 bp, Homo sapiens
gagttttattctaaagtagattttcttatcatatttatttcttcatgtctaatctgcctgttcttcaccacctagaactgttctcaatgcaaatttaaatttggcattaaatgcagtctatttcatttggtaacttaaaagcaggatcagtcttgaacaaagcactgtcgctcagagaaataaaagattggattttttaaatagaatgtaagccaaatccccactcacataaagtaggctgtactagaatgaatggatatacacagactggctcaatgattggctatactgattcaattcttcaactgtaaacatcctgctttcaaacttaaaataccagtaagaaaatgttttctgttaataattctaacttcattcatagttgaatacaactgcttaattgttgaaaacatatggggagagggttatgtccgccagtttttaaatcaagggcattcttttttttttttttttttttttgagacggagtctcgctctgtcgcccaggctggagtgcagtggcgtgatctcggctcactgcaagctccgcctcccgggttcacgccattctcctgcctcagcctcccaagtagctgggactacaggcgcccgccactacgcccggctaattttttgtatttttagtagagacggggtktcaccgttttagccgggatggtctcgatctcctgacctcgtgatccgcccgcctcggcctcccaaagtgctgggattacaggcgtgagccaccgcgcccggccaagggcattcttatgatattatgtcactagacatttcaggtaggctgaaataaatccaataatctggaagactttattttccttcttgagtcata

SEQ ID NO: 68436 - DNA, 856 bp, Homo sapiens
gagttttattctaaagtagattttcttatcatatttatttcttcatgtctaatctgcctgttcttcaccacctagaactgttctcaatgcaaatttaaatttggcattaaatgcagtctatttcatttggtaacttaaaagcaggatcagtcttgaacaaagcactgtcgctcagagaaataaaagattggattttttaaatagaatgtaagccaaatccccactcacataaagtaggctgtactagaatgaatggatatacacagactggctcaatgattggctatactgattcaattcttcaactgtaaacatcctgctttcaaacttaaaataccagtaagaaaatgttttctgttaataattctaacttcattcatagttgaatacaactgcttaattgttgaaaacatatggggagagggttatgtccgccagtttttaaatcaagggcattcttttttttttttttttttttttgagacggagtctcgctctgtcgcccaggctggagtgcagtggcgtgatctcggctcactgcaagctccgcctcccgggttcacgccattctcctgcctcagcctcccaagtagctgggactacaggcgcccgccactacgcccggctaattttttgtatttttagtagagacggggtttcaccgttttagccgggatggtctcgatctcctgacctcgtgatccgcccgcctcggcctcccaaagtgctgggattacaggcgtgagccaccgcgcccggccaagggcattcttatgatattatgtcactagacayttcaggtaggctgaaataaatccaataatctggaagactttattttccttcttgagtcata

SEQ ID NO: 68437 - DNA, 744 bp, Homo sapiens
gctttcatatccctacagagctgttaaaatcactacaggaaatgtctgacgccacactcattttttcraggcttcccttgatctactgtgtgtggattaggtactaagtagaagacagtggatatacagtgtttaagggcagaggctttggggaatgagcaagccgatgtggactactaagtctgcaatttccgggtcacaggacttgtattatatagggctctctaaggctcagtatttctctaaaatgagactaattataaggcacttgtgagcttaaaagagaaaacataatattcctgacatatataggtgctcaaaaggctacgatgtatgtgtttactgttatttctattttgaaaaagttgcgttttgttctacaatatttgggggcagtttgtttttccttattgccaggatttcatggactacagactgtattcaaagtaggacttagctagaaagacttagcctgcaaatgaagtattgtcttatctcatagtggcaaactctatttagaaatgcttaagacaaaactgtaaatacattccaaactgatagaatttttggtctgaattccttggggttgttttctaataaattaaattgtaatcacttgttaatctgcttcttaaatatatttcaaaattcagaagaaaaggtgaggaacacaaacacgagaactgaagtaaaggaaggatatataagatgatagggaaagaaagaagagattgataagggaag

SEQ ID NO: 68438 - DNA, 616 bp, Homo sapiens
ccataagtgtttataggatctattgtgccaaactgcccaggatagttcatgagttggttgaaatataatttttaaaaaatttttatcattgtcatcaattttttttttaactaccactcctgccaaagcatrgggaatgcaattatgaaaaaggccttaaaaagctcctgacttagtcaaggagacaaatctgatagattatgtggcccatggcaaaaaataataataataataataataataataataataataataatatgcattgagcattaaatgaatggcctgaaaaacaaatgcctcaaatatcacagatggcagctattcctgtgggtggagctattgtagacatttcctgggaggacatagcaatgctttttttcagttagactccaaaactcagtggcttaagaaagataatttattattttttgtgatcctgtagattggctgtgacgcccttctgctgatcttctccgggctcacttctgaagttgcactcaactggagggtctgctggtctagaagttgccgatggctactgactagggggccttgattctcttctaggtgaccttatatcctccattaagtcaccctgatgtccttacatgga

SEQ ID NO: 68439 - DNA, 644 bp, Homo sapiens
agtcagataacacctccttgccagttgactagcaataaaacttttcttttctcaaaagcttgtgccatagtattggcttctgtgtgcatcgggcaccgagcccattgattgcttagtaacacatggactcatgaacccatcctttcagcacctatgaactaagtgttaaaatgggattttgtcctggcatgttgggaagacagaggaggaacactgggtccaacctgatatttgggaagatttcctgaagaaaatgatacctgggccgatctttggtaaaagacttatccaagtaaagtaagcattgggtaaatgagtatcaacagagggaatcctgagagcaaagcacagaggtgtgaagcaatgtagtgtgtgagacaattaaatgtaattttgtgcccaggtgatatggtttggctctgtgtccccacccaaatctcaacttgaattgtatctcccagaattcccacttgttgtgggagggacccagggggaagcaatcgaatcatgagggccagtctttctcatgctattcttgtgatagtgaatragtctcacgagatctgatgggtttatcaggggtttccgctttttcttcctcattttttctcttgctgccaccatgtgagaagtgccttttgcct

SEQ ID NO: 68440 - DNA, 498 bp, Homo sapiens
tgcctcccggattcaagcgattctcctgcctcagccccctgagtagctgggattacaggcgcacaacaccacacctggctgattttttgtatctttagtagaggcggggtttcaccatgttggccaggctggtcttgaacttctgacctcaagtgatccacctgcctcggcttcccaaagtgctgggattacaggtgtgagccaccacacccagcctgaaatggtaaacttttaatggaaggggtgctgtcttagctgtggtgatctggaaaggtctttgagaaggtgggaggtgacamcgagctgagaatgaaatgggggaagaaagcagccaagtcatctttaggtagggtgttcccgggaagccaggctggaacaagctcaggaaggagtttggcatgagaaagaccagtgtggctggagcagataagggtgaggagtgggggcagcagtggggagtccagatggagagggctttgtagatcagggtaaggagtt

SEQ ID NO: 68441 - DNA, 709 bp, Homo sapiens
ggatcctggtctgacaaaggaattatcattctaaaagaaatgtgttaagaatttgcaacaaccaaattacgccacattttggaacaaaaacaatgtgtaaatcaggtccagaataccatcggcacgctaaggcatggattacatagcttctggttatactgawccttactgatttcccaagcatagccaactctgggtggcatgggcctgcttccagctcagattcgtgacaaacgtgctgggaaatgatagaaacacagaagataaaacacactttttttcccttccccaaaattaccacttttttttttttttttttttttttttgagacacgttccactctgtcacttaggctggagtgcagtgataccatctcagctcactgtagcctcaacctcctgggctcaagggatcttgccacctcagcctcccgagtagctgggactacaggtgtgtgccaccatgctcagctaatttttaaattttttatagagatgggggtcttactatgttgcccatgttggtcttgaacccctgggctcaagcaattcttccacattggccttgcaaagtgctgggcttacagcctgagccactgcccccagcctgccacagctttgactgtgctcctgttggttatatccattcagaaataatctcgttagtatcactgtatcataaatgcttccttgctttcattttattgaa

SEQ ID NO: 68442 - DNA, 1310 bp, Homo sapiens
tgcatgtataaccaaaagtgaatggctacataatcatggtacatcctaaactattaggaacaactaaaaacaatcggttataaaaaatccatcagtggctgccctttatataagtgtggagtattggttttgtgtgtgtatacatgtgtgttttaatgactgtacattagttataaatctttttataaaatatggagtgttgtttgtgtatcgtgtgtatatgtgttacaggttataagtatgtatatatgttatatgttataagttatatgtccataactttttatccaagtttgcctttttgctctccagattagctttactttcaaggagtgaattattctaygctgtacatgttcgtctctgtttgattaagcatagagcaacttgtggaataatatatatcaaatcgttaatgttgcttacttctggtagaggaatttcacaggtttgtaaaaaaggttttactttttttctaaaaccatctcttaactctaatttgtcgtgaaaagcaagtgttacattggcaaatttataaaataaaaagtttaagacctcaagaagcaaatggaaaaaaaaacaaaaaaccaaaaaactgttccctgagggacctacatgttaaagttagtgtgaaggtagaaggcacacagtgttattctagatcagaaagcggtgaggtgaggcggccctgcagcagctccattttgatgtttttctctcttctaggttagagtatgcaaacttttgtgtaaagggccaggttgtaaatattttaggcttggcagccatacatacggtctctgtcacaactacagactctgcagctgtaatgcaaatgtagcttcaggcaacgcaaaaacaaatgaccattagctatgttccaataaaactttatttgtagacactgaaatataaattttatataactttcatgctttgcaaaatatcattcttcttttgatatttttctccactattgaaaaatgttaaaaccattatcagctcatgggctggcccaaaacaggctttgggccatagtttccaatccctgttctaagcagtgcaagtataagtggaaatatacctactacaggtgggtcgtgttgtccaagccaatgccattggaatccaagttaacccagtacagaggttggagcttgtcactcctctatggtctgatacattgattctgaaaaatatctccccaggttctttcctgataaaatctgcttgattatctttctagctctaattctaaacttagaagtcttggtctttgcaaaaaaaaaaaaggaagtaaaaagctaccg

SEQ ID NO: 68443 - DNA, 1310 bp, Homo sapiens
tgcatgtataaccaaaagtgaatggctacataatcatggtacatcctaaactattaggaacaactaaaaacaatcggttataaaaaatccatcagtggctgccctttatataagtgtggagtattggttttgtgtgtgtatacatgtgtgttttaatgactgtacattagttataaatctttttataaaatatggagtgttgtttgtgtatcgtgtgtatatgtgttacaggttataagtatgtatatatgttatatgttataagttatatgtccataactttttatccaagtttgcctttttgctctccagattagctttactttcaaggagtgaattattctacgctgtacatgttcgtctctgtttgattaagcatagagcaacttgtggaataatatatatcaaatcgttaatgttgcttacttctggtagaggaatttcacaggtttgtaaaaaaggttttactttttttctaaaaccatctcttaactctaatttgtcgtgaaaagcaagtgttacattggcaaatttataaaataaaaagtttaagacctcaagaagcaaatggaaaaaaaaacaaaaaaccaaaaaactgttccctgagggacctacatgttaaagttagtgtgaaggtagaaggcacacagtgttattctagatcagaaagcggtgaggtgaggcggccctgcagcagctccattttgatgtttttctctcttctaggttagagtatgcaaacttttgtgtaaagggccaggttgtaaatattttaggcttggcagccatacatacggtctctgtcacaactacagactctgcagctgtaatgcaaatgyagcttcaggcaacgcaaaaacaaatgaccattagctatgttccaataaaactttatttgtagacactgaaatataaattttatataactttcatgctttgcaaaatatcattcttcttttgatatttttctccactattgaaaaatgttaaaaccattatcagctcatgggctggcccaaaacaggctttgggccatagtttccaatccctgttctaagcagtgcaagtataagtggaaatatacctactacaggtgggtcgtgttgtccaagccaatgccattggaatccaagttaacccagtacagaggttggagcttgtcactcctctatggtctgatacattgattctgaaaaatatctccccaggttctttcctgataaaatctgcttgattatctttctagctctaattctaaacttagaagtcttggtctttgcaaaaaaaaaaaaggaagtaaaaagctaccg

SEQ ID NO: 68444 - DNA, 1310 bp, Homo sapiens
tgcatgtataaccaaaagtgaatggctacataatcatggtacatcctaaactattaggaacaactaaaaacaatcggttataaaaaatccatcagtggctgccctttatataagtgtggagtattggttttgtgtgtgtatacatgtgtgttttaatgactgtacattagttataaatctttttataaaatatggagtgttgtttgtgtatcgtgtgtatatgtgttacaggttataagtatgtatatatgttatatgttataagttatatgtccataactttttatccaagtttgcctttttgctctccagattagctttactttcaaggagtgaattattctacgctgtacatgttcgtctctgtttgattaagcatagagcaacttgtggaataatatatatcaaatcgttaatgttgcttacttctggtagaggaatttcacaggtttgtaaaaaaggttttactttttttctaaaaccatctcttaactctaatttgtcgtgaaaagcaagtgttacattggcaaatttataaaataaaaagtttaagacctcaagaagcaaatggaaaaaaaaacaaaaaaccaaaaaactgttccctgagggacctacatgttaaagttagtgtgaaggtagaaggcacacagtgttattctagatcagaaagcggtgaggtgaggcggccctgcagcagctccattttgatgtttttctctcttctaggttagagtatgcaaacttttgtgtaaagggccaggttgtaaatattttaggcttggcagccatacatacggtctctgtcacaactacagactctgcagctgtaatgcaaatgtagcttcaggcaacgcaaaaacaaatgaccattagctatgttccaataaaactttatttgtagacactgaaatataaattttatataactttcatgctttgcaaaatatcattcttcttttgatatttttctccactattgaaaaatgttaaaaccattatcagctcatgggctggcccaaaacaggctttgggccatagtttccaatccctgttctaagcagtgcaagtmtaagtggaaatatacctactacaggtgggtcgtgttgtccaagccaatgccattggaatccaagttaacccagtacagaggttggagcttgtcactcctctatggtctgatacattgattctgaaaaatatctccccaggttctttcctgataaaatctgcttgattatctttctagctctaattctaaacttagaagtcttggtctttgcaaaaaaaaaaaaggaagtaaaaagctaccg

SEQ ID NO: 68445 - DNA, 1310 bp, Homo sapiens
tgcatgtataaccaaaagtgaatggctacataatcatggtacatcctaaactattaggaacaactaaaaacaatcggttataaaaaatccatcagtggctgccctttatataagtgtggagtattggttttgtgtgtgtatacatgtgtgttttaatgactgtacattagttataaatctttttataaaatatggagtgttgtttgtgtatcgtgtgtatatgtgttacaggttataagtatgtatatatgttatatgttataagttatatgtccataactttttatccaagtttgcctttttgctctccagattagctttactttcaaggagtgaattattctacgctgtacatgttcgtctctgtttgattaagcatagagcaacttgtggaataatatatatcaaatcgttaatgttgcttacttctggtagaggaatttcacaggtttgtaaaaaaggttttactttttttctaaaaccatctcttaactctaatttgtcgtgaaaagcaagtgttacattggcaaatttataaaataaaaagtttaagacctcaagaagcaaatggaaaaaaaaacaaaaaaccaaaaaactgttccctgagggacctacatgttaaagttagtgtgaaggtagaaggcacacagtgttattctagatcagaaagcggtgaggtgaggcggccctgcagcagctccattttgatgtttttctctcttctaggttagagtatgcaaacttttgtgtaaagggccaggttgtaaatattttaggcttggcagccatacatacggtctctgtcacaactacagactctgcagctgtaatgcaaatgtagcttcaggcaacgcaaaaacaaatgaccattagctatgttccaataaaactttatttgtagacactgaaatataaattttatataactttcatgctttgcaaaatatcattcttcttttgatatttttctccactattgaaaaatgttaaaaccattatcagctcatgggctggcccaaaacaggctttgggccatagtttccaatccctgttctaagcagtgcaagtataagtggaaatatacctactacaggtgggtcgtgttgtccaagccaatgccattggaatccaagttaacccagtacagaggttggagcttgtcactcctctatggtctgatacatygattctgaaaaatatctccccaggttctttcctgataaaatctgcttgattatctttctagctctaattctaaacttagaagtcttggtctttgcaaaaaaaaaaaaggaagtaaaaagctaccg

SEQ ID NO: 68446 - DNA, 650 bp, Homo sapiens
cagattcaatagaaatggcccttagggtaaaacacatcttggattttattaaaacaaaaaatattatctatgaacatggagatagtaatgtctattataaaatgtttttattttaaaacatttagacactaaatcttacatttttccatggattcacaagggatttaacatttttcccaatttctgcagaaggaacaattttcttgcatcgaatctggtcaaataaattctgtgtttcagagctgggtggaaatatgatctcagctccccaggggatgttttcatgaggtttctctcaaaagctattttaggcttctcagttacacaccctgaagggctgatgatggtgtagtctagggtatctctgggactggttagcaatattttaaatatggttaktcctcatagattcaatatttatttcttctaacatttaaaataagattttcatttaggcatggaacttgtgtgatacaagcatttctaaatgggttaataagtggcttcaccctccactgatataaaggaaaagggagtcaacaaattgcttttctctcctcactctcccctactgactgaaacaggaaaattctatcatgtttctgggctgcaggctcctcatctgtaaatgagagtgtttaatctctggg

SEQ ID NO: 68447 - DNA, 1046 bp, Homo sapiens
atctagcaaataacagttctagtacccaagaagggccttcatgttcctcccaagtaaataccttccacagaggtaaccactgtcctgacaccatggattagtattgcctcttcatataaatggaatcctacatggaaaggagccattatgtctgggaatgtcatctatgctgattcacgaaaaatagcccacctctctgagctacaattcaccaatcagtgaaatgaggataataatagtacttttctcatatggtggttgtggagataaatgagttagtgcaagtaattatgttataagcaaatattaatttaatgaagtaataaaattctagaacagtgtttggcctgtggtaaatagtaatacttcattaagtgttagctactagtattatgctactgggttacctttgctaattttttatttagagtttttgtattgataattgtaaatgagttttgtatcgataattgtaaatgagtttagtcatgctgtgtgtgtgtgtgtgtgtgtgtgtgtgcgtgtactagtcttgtcttgttttgatattgagttatgctcataaatgacacctttatctatgttcatgttcattccagaagttktggaatgaccctttactgcttgcatccacctgagaacactaccaaatatgtcacccagatacctctcagatctgctgacttcttcatcactgtcttcttcactcttgtttctgcctccatcatcattctgcttgtccagtgtaataagtgatctccccatttctaaacatgtaccccttcctgtggtacttaggttaaaactctaagatccttatcatggtctaccaggctcttcatattatggccctgcttctccatccctggcttgcaccagggttcctcttaccccctgctctggacatactccctgcccagaaacacactcccctgtccctagcctggccaatccctccacattctttctcactgaagcctttcctaatgtggaactatccaacagacttccctgggtaatcattcatctcacccttcactctctta

SEQ ID NO: 68448 - DNA, 645 bp, Homo sapiens
  misc_feature (1)...(645): n = A,T,C or G
ggatccaatcaggagatagaaaccccacaatagcctaaacatggaactttaatatcagacttaatacctatgattaaatagcaactataaaatatgaggaaagagtaccctaggacaaacaaacgtgaaagagtttcagatcttcattggagaacgtgtgtttggccactagatagcaaaaaaaaaatctgctgatgtagccagaccacaggtggtctggagtttctgagcaaacaatagggaaccctctagtgtacaggtagggaagcaggcaatcagcaatacctagtgtggcctgcaataggaagctggggatgaannnnnnnnnnnnnnnnnnnnnnnnnnnnnnnnnnnnnnnnnnnnnnnnnnnnnnnnnnnnnnnnnnnnnnnnnnnnnnnnnnnnnnnnnnnnnnnnnnnnctgaaaaattgcaagaagyttctttatcctgcaatgtcccttcaacatcctcacttgaaaaaaagttaacataatgctcactttaaaagagaagtacttgagagaattctattattagttgtagaccatatattgcagggtacatttagagctgaaaagtgatcaattgctaatggaaataccctgtaatttgaaatgcatgaatttgtgttggatacaccaacac

SEQ ID NO: 68449 - DNA, 954 bp, Homo sapiens
atgttatacctcatatatacatttatcatttgtcaattaaaattaaaaaacaaaaactcacaatgaaaagcttaacacaggctgggtgcagtggctcacgcctgtaatcccagcactttgcgctttgggaggcggaggcgggtgatctcctgattcaagaccagcctgaccaatatgacgaaactccatctctactaaaaatacaaaaattagctgggcattgtggcatgtgcctgtagtcccagctactcgggaggctaagacagaagcattgcttgaacctgggaggcggaggtttcagtgagctgagttcatgccactgcactccagcctgggagacagagtgaggctccgtctccaaaaaaaaaaaaaaaaaaaaaaaaaaagcaagcragtctgtggcactgccctcccagttgccctgccggttcccacgcgtcgtccatttgagctgaaaatgaccagctacaatagcctaaagcattttgtatgactgcttacctgtcaatgaactgatcaataatgacaatatcgccgggctgaatctcctccctcaaggagccacaagctgtggtcactatgacatgtgtacagccctcttccttcaaagcccagatgttcgcctggtagttgacctttgaaggcatgatggtgtgctgccttccatgcctatggaaggagagaagaaattgttaacccgtgatgagtacaccaccaactgttttctcctagagtctagaaaaaattaagtgattctctagcaatgaccacagactaacacagggggtctcctagaacccagtccagtgagcaactaaaactaaaatttaggttcactggattctgagaagccactcctgtttcaaatatgtagagtggcagacagaccctagtgaggaccccactgtcatgctctgtataaaggatcagtgaacctgggacttgcattcagcc

SEQ ID NO: 68450 - DNA, 639 bp, Homo sapiens
attccatattatccaaacttagaagctattttttccctgtcactcattttttattgttaaatatttaaaacgtataaaaagccaaagaaaaatcatgtgagggacgtttgcctcagactcaaacctcttgtgcctcttcagatttcattggtgccacctgcttcctgggcctccagccactggttccacctctgcttcctgcaccagacatttttcatggttcttccgcctggggctgcccagtctcttgtccttggcatgttgggccctttggatccccttatatagctaggttgaccagctgcacccagggtttctggctcttctgctactaccagccttggctataactgcctaccacagggtatggatccagtatccagaatgaactcctagaggtcagatgattccatctagccattggatggggacttgctgtgccttagggtgacctttgaccaayaagaaacaagagatgaaagacaagtagcagattcattctcattctttatccctccaatggacgactccaagacactatttctctttacagaatgccttgtgaagctccagcgtgccgactggaggtccctgctgaacagctctgttgctcttcctggctcgtggtagaacagcagc

SEQ ID NO: 68451 - DNA, 639 bp, Homo sapiens
attccatattatccaaacttagaagctattttttccctgtcactcattttttattgttaaatatttaaaacgtataaaaagccaaagaaaaatcatgtgagggacgtttgcctcagactcaaacctcttgtgcctcttcagatttcattggtgccacctgcttcctgggcctccagccactggttccacctctgcttcctgcaccagacatttttcatggttcttccgcctggggctgcccagtctcttgtccttggcatgttgggccctttggatccccttatatagctaggttgaccagctgcacccagggtttctggctcttctgctactaccagccttggctataactgcctaccacagggtatggatccagtatccagaatgaactcctagaggtcagatgattccatctagccattggatggggacttgctgtgccttagggtgacctttgaccaacaagaaacaagagatgraagacaagtagcagattcattctcattctttatccctccaatggacgactccaagacactatttctctttacagaatgccttgtgaagctccagcgtgccgactggaggtccctgctgaacagctctgttgctcttcctggctcgtggtagaacagcagc

SEQ ID NO: 68452 - DNA, 1291 bp, Homo sapiens
ccctgtccacccctccaactccacctggcctcctctccctacttcatttttttggatttgggtccgaagtccttctcctttgccctccaggccgtggtgatgccaggcctaaattcctaggcctggaaagcttgccaacagtccacaacatctcaaggctcgctggtacctgcagcagagctctttccccaccaatttttctgacagcccccagcagacatccacttctcacttgtgccagcatagattatggtaaccccatcctaatccaagtgtgtggctggtaaactctctccagctgaaatacaaaattttagtagtgtttactcttgggaagtttttttttgtttttttttttttgagagtcttgcttggtcacccaggttggagcgcagtagcacgatctcggctcactgcaacctctgcctcccaggttcaagygattctcctgcctcagcctcccgagtagctgagattacaggcatctgccaccacgcccggctaagttttgtatttttcataaagttggggtttcactatgttggccaggctggtctccaactcctgacctcagtgatctgcctgccttggcctcccaaagtgctgggattacagacatgagtcactgtgcccgggcgagggaagttcttacatattgaggaaaatctccattattctacaactagctcctctctgctacccactttggggccagctggagcatgtccagaaaatgcaaactaattctaagctccaaaaggagtctcctgcaattaaaaaagagagaccaggagagagcaagaaggaatttctccttcaacatatgtacatggtacggtaactgacatttttatgaccattataataggagactggcattgcctcttgcctgaagatgagaacgcttgctgtgtgggcgtttcttcactctcttgcctgcgatcagcaaagcctctgtcagactaattgaaggaaaaggaggattgctatgcaaacaaaatagacggcatacagacacagagcctttgtatttcaggtagactgcggaccttgctgctctatacctcctttccctcctagccatcactgtttttcctttatgtctcgctctctctcatgctgggcctctccaagcagagagggtttgatggagttggtttagtaagatctgatactcaatgcctacttaggttccaacctgaccctgtctcctgccaccaagggagccagtcatctgcattttgcagcttggagaaccagaggtccgtgggactagcaggcctgccctgtg

SEQ ID NO: 68453 - DNA, 1291 bp, Homo sapiens
ccctgtccacccctccaactccacctggcctcctctccctacttcatttttttggatttgggtccgaagtccttctcctttgccctccaggccgtggtgatgccaggcctaaattcctaggcctggaaagcttgccaacagtccacaacatctcaaggctcgctggtacctgcagcagagctctttccccaccaatttttctgacagcccccagcagacatccacttctcacttgtgccagcatagattatggtaaccccatcctaatccaagtgtgtggctggtaaactctctccagctgaaatacaaaattttagtagtgtttactcttgggaagtttttttttgtttttttttttttgagagtcttgcttggtcacccaggttggagcgcagtagcacgatctcggctcactgcaacctctgcctcccaggttcaagtgattctcctgcctcagcctcccgagtagctgagattacaggcatctgccaccacgcccggctaagttttgtatttttcataaagttggggtttcactatgttggccaggctggtctccaactcctgacctcagtgatctgcctgccttggcctcccaaagtgctgggattacagacatgagtcactgtgcccgggcgagggaagttcttacatattgaggaaaatctccattattctacaactagctcctctctgctacccactttggggccagctggagcatgtccagaaaatgcaaactaattctaagctccaaaaggagtctcctgcaattaaaaaagagagaccaggagagagcaagaaggaatttctccttcaacatatgtacatggtacggtaactgacatttttatgaccattataataggagactggcattgcctcttgccygaagatgagaacgcttgctgtgtgggcgtttcttcactctcttgcctgcgatcagcaaagcctctgtcagactaattgaaggaaaaggaggattgctatgcaaacaaaatagacggcatacagacacagagcctttgtatttcaggtagactgcggaccttgctgctctatacctcctttccctcctagccatcactgtttttcctttatgtctcgctctctctcatgctgggcctctccaagcagagagggtttgatggagttggtttagtaagatctgatactcaatgcctacttaggttccaacctgaccctgtctcctgccaccaagggagccagtcatctgcattttgcagcttggagaaccagaggtccgtgggactagcaggcctgccctgtg

SEQ ID NO: 68454 - DNA, 682 bp, Homo sapiens
cttaagcccaggagttcaagaccagcctgggcaacatagggagacctcgtcgctactgaaaaaatgtaaaaattagccaggcatgatggtgtgcacctgtggtctcagctcaattgatctcaggaagctgagcagtgagtcgtgaccrtgccactgccctttcacctgggtaacagagatcctgtctcaaaaaaaaaaaagaagaagaagaagctgtttcttcatgacatccatgagccactgctgctaccttgaaggtcagcccaacctctggattttctcctttataagctcatacatttcttcatttttccatttttttaaaaccaggttgagccaaaagcatccaaggaatgactttgagattcctgagaactacagcttcatattcctcatttatccactgtaggctgtgtctcttagaagatgcattcttcattaattttattttatgttattttgagacagggtctcactctgtcacccaggctggagtgcagtgacatgatcacagctcactgtagcctcaacctcttgggctcaagcaatcctcccacctcagtctcccaagtagctgagaccacaggtgcatgccaccaccccagctaattttttgtattttttcggtggagacagggttttaccatgttgcccaggctggtctccaactcttgggctcaag

SEQ ID NO: 68455 - DNA, 682 bp, Homo sapiens
cttaagcccaggagttcaagaccagcctgggcaacatagggagacctcgtcgctactgaaaaaatgtaaaaattagccaggcatgatggtgtgcacctgtggtctcagctcaattgatctcaggaagctgagcagtgagtcgtgaccgtgccactgccctttcacctggrtaacagagatcctgtctcaaaaaaaaaaaagaagaagaagaagctgtttcttcatgacatccatgagccactgctgctaccttgaaggtcagcccaacctctggattttctcctttataagctcatacatttcttcatttttccatttttttaaaaccaggttgagccaaaagcatccaaggaatgactttgagattcctgagaactacagcttcatattcctcatttatccactgtaggctgtgtctcttagaagatgcattcttcattaattttattttatgttattttgagacagggtctcactctgtcacccaggctggagtgcagtgacatgatcacagctcactgtagcctcaacctcttgggctcaagcaatcctcccacctcagtctcccaagtagctgagaccacaggtgcatgccaccaccccagctaattttttgtattttttcggtggagacagggttttaccatgttgcccaggctggtctccaactcttgggctcaag

SEQ ID NO: 68456 - DNA, 682 bp, Homo sapiens
cttaagcccaggagttcaagaccagcctgggcaacatagggagacctcgtcgctactgaaaaaatgtaaaaattagccaggcatgatggtgtgcacctgtggtctcagctcaattgatctcaggaagctgagcagtgagtcgtgaccgtgccactgccctttcacctgggtaacagagatcctgtctcaaaaaaaaaaaagaagaagaagaagctgtttcttcatgacatccatgagccactgctgctaccttgaaggtcagcccaacctctggattttctcctttataagctcatacatttcttcatttttccatttttttaaaaccaggttgagccaaaagcatccaaggaatgactttgagattcctgagaactacagcttcatattcctcatttatccacygtaggctgtgtctcttagaagatgcattcttcattaattttattttatgttattttgagacagggtctcactctgtcacccaggctggagtgcagtgacatgatcacagctcactgtagcctcaacctcttgggctcaagcaatcctcccacctcagtctcccaagtagctgagaccacaggtgcatgccaccaccccagctaattttttgtattttttcggtggagacagggttttaccatgttgcccaggctggtctccaactcttgggctcaag

SEQ ID NO: 68457 - DNA, 682 bp, Homo sapiens
cttaagcccaggagttcaagaccagcctgggcaacatagggagacctcgtcgctactgaaaaaatgtaaaaattagccaggcatgatggtgtgcacctgtggtctcagctcaattgatctcaggaagctgagcagtgagtcgtgaccgtgccactgccctttcacctgggtaacagagatcctgtctcaaaaaaaaaaaagaagaagaagaagctgtttcttcatgacatccatgagccactgctgctaccttgaaggtcagcccaacctctggattttctcctttataagctcatacatttcttcatttttccatttttttaaaaccaggttgagccaaaagcatccaaggaatgactttgagattcctgagaactacagcttcatattcctcatttatccactgtaggctgtgtctcttagaagatgcattcttcattaattttattttatgttattttgagacagggtctcactctgtcacccaggctggagtgcagtgacatgatcacagctcactgyagcctcaacctcttgggctcaagcaatcctcccacctcagtctcccaagtagctgagaccacaggtgcatgccaccaccccagctaattttttgtattttttcggtggagacagggttttaccatgttgcccaggctggtctccaactcttgggctcaag

SEQ ID NO: 68458 - DNA, 682 bp, Homo sapiens
cttaagcccaggagttcaagaccagcctgggcaacatagggagacctcgtcgctactgaaaaaatgtaaaaattagccaggcatgatggtgtgcacctgtggtctcagctcaattgatctcaggaagctgagcagtgagtcgtgaccgtgccactgccctttcacctgggtaacagagatcctgtctcaaaaaaaaaaaagaagaagaagaagctgtttcttcatgacatccatgagccactgctgctaccttgaaggtcagcccaacctctggattttctcctttataagctcatacatttcttcatttttccatttttttaaaaccaggttgagccaaaagcatccaaggaatgactttgagattcctgagaactacagcttcatattcctcatttatccactgtaggctgtgtctcttagaagatgcattcttcattaattttattttatgttattttgagacagggtctcactctgtcacccaggctggagtgcagtgacatgatcacagctcactgtagcctcaacctcttgggctcaagcaatcctcccacctcagtctcccaagtagctgagaccacaggtgcatgccaccaccccagctaattttttgtattttttcrgtggagacagggttttaccatgttgcccaggctggtctccaactcttgggctcaag

SEQ ID NO: 68459 - DNA, 800 bp, Homo sapiens
cctgcctgcagtgttcgctccttaattcagtccccactgctcagtctgagcacttaggttccacccgtggttgcacgattggttcacctgggcatgctcacsttacttgaacttcaatctgggggtccacagcaactgaaaaacaactcgtaactttgttcactaaaaactgaacaaggttggtctgatatggctacagctcctctctccagtgcttccatcttgctttatttctcacttgcccaccctctgctctttcctctcattcagggctgagtcttccagcctccatctttctcccatgctggatgcttcctgccttcaaacactggactccaagttcttcagcttttggactcagtaggcacagcagggatggaggtggggcagcctgttgcctcaagatggccaggcctcctcaccattcccataaggacataggctttgggaagaataaagccaaagaaacttacttctgctttgagtcatgttctacccacctgcccccatacgcacacctcccaaggcaatagacacagaattgtcctgattaaatagaataacttggctgggcgcggtggctcactcctgtaatcccagcactttgggaggccgaggcgggtggatcacctgatgtcaggagtttgacaccagcccagccaacatggtgaaaccctgtttctaccaaaaatacaaaaaaattagctgggcatggtggcaggcgtctgtaatcccagctactcaggaggctgaggcaggagaatcgcttgaacctgggaggcggaggttgcagtgagcca

SEQ ID NO: 68460 - DNA, 800 bp, Homo sapiens
cctgcctgcagtgttcgctccttaattcagtccccactgctcagtctgagcacttaggttccacccgtggttgcacgattggttcacctgggcatgctcacgttacttgaacttcaatctgggggtccacagcaactgaaaaacaactcgtaactttgttcactaaaaactgaacaaggttggtctgatatggctacagctcctctctccagtgcttccatcttgctttatttctcacttgcccaccctctgctctttcctctcattcagggctgagtcttccagcctccatctttctcccatgctggatgcttcctgccttcaaacactggactccaagttcttcagcttttggactcagtaggcacagcagggatggaggtggggcagcctgttgcctcaagatggccaggcctcctcaccattcccataaggacataggctttgggaagaataaagccaaagaaacttacttctgctttgagtcatgttctacccacctgcccccatacgcacacctcccaaggcaatagacacagaattgtcctgattaaatagaayaacttggctgggcgcggtggctcactcctgtaatcccagcactttgggaggccgaggcgggtggatcacctgatgtcaggagtttgacaccagcccagccaacatggtgaaaccctgtttctaccaaaaatacaaaaaaattagctgggcatggtggcaggcgtctgtaatcccagctactcaggaggctgaggcaggagaatcgcttgaacctgggaggcggaggttgcagtgagcca

SEQ ID NO: 68461 - DNA, 654 bp, Homo sapiens
gtaatcccagcactttgggaggcagaggtgggcagatcatgaggtcaggagttcgacaccagcctggccaatatggtgaaactctgtcactattgaaaatacaaaaaaattagccgagcatagtggtgggtgcctgtaatcccagctacttgggaggctgaggcagtagaatcacttgaaacyggaaggcagaggttgaagtgagccaagatcgtgccactgcactccagcctgggtgaaagagcgaaactctgtcaaaaaaaaaaaaaaaaaaaccaacacttacttcataaggttgctgtaaatatcaacatttaaacaagattctggataactccactggtagaccacgtgacttgtaactgaccaataaatgcaaatgacatgggagcagagtctctgttttgttccctgctaggtcccaggagaagggcaatacctggtcagtatttgttgagtgaagatgtgaacaagcttgcgacctaggacccaggtgtttagctggttgctcgcttttcttcctggtcaaatggttccagggcaggggctgtgtctacctggcttacctctgtattcccagcacctattccactgcctggcacggacaatgctctcaataaatatttgtccaataaatgaattaacaaagacaac

SEQ ID NO: 68462 - DNA, 654 bp, Homo sapiens
gtaatcccagcactttgggaggcagaggtgggcagatcatgaggtcaggagttcgacaccagcctggccaatatggtgaaactctgtcactattgaaaatacaaaaaaattagccgagcatagtggtgggtgcctgtaatcccagctacttgggaggctgaggcagtagaatcacttgaaactggaaggcagaggttgaagtgagccaagatcgtgccactgcactccagcctgggtgaaagagcgaaactctgtcaaaaaaaaaaaaaaaaaaaccaacacttacttcataaggttgctgtaaatatcaacatttaaacaagattctggataactccactggtagaccacgtgacttgtaactgaccartaaatgcaaatgacatgggagcagagtctctgttttgttccctgctaggtcccaggagaagggcaatacctggtcagtatttgttgagtgaagatgtgaacaagcttgcgacctaggacccaggtgtttagctggttgctcgcttttcttcctggtcaaatggttccagggcaggggctgtgtctacctggcttacctctgtattcccagcacctattccactgcctggcacggacaatgctctcaataaatatttgtccaataaatgaattaacaaagacaac

SEQ ID NO: 68463 - DNA, 691 bp, Homo sapiens
acgtggagctcggttgagttcagcgccaggctgtctggcggtgactcgggcacgggacagatcctgacttgctggagcattcagaggtgttcattatggaatccctgtgggtttcctgtctctgtccttccggcttcagttctccatctccccagggaatcctccccatgtaacatcaggctgtgactcagcccccagcatctttctccctttctcttacacgctgggccggataatctttatactgagccttctgtgcgctccccttttgaaagccccaaatcctgcttaatctcagcagaaagccttccagcgtgatttatcagccacccctttgtggtgttgcaggaagttaaaatctccagcccggattacaaagactgcaactcggcagaagccatggacgacttcatgaagaggatcagttgctatgaagccagctaccagcccctcgaccccgacaaatgcgacaggtgattcccgtggctggccgtctctgcaagacccacatgagggttctyactgaattcttgatgttcccacaaaggatttgctcctggatacctttaaaaaaatttttttaagacagttttttttgtagagatgaggtctcgctatgttgcccgggctggtcttgagctcctggcctcaggtgatccacatacagccgctggatacctttatcaactct

SEQ ID NO: 68464 - DNA, 606 bp, Homo sapiens
cggtgagtcctgggaggcgggcaggcagcctcaccctcgggcatggggcggcttcccaagaggccctagacacccctgtggtttgttcccctgagtgaccactgggtccccgcagggcgtctgtgaggagctgacctacgaggagatcagggacacctaccctgaggagtatgcgctgcgggagcaggacaagtactattaccgctaccccaccggggaggtgagcgcaggctggggcgggctgacggtccccagcacacatgaccactgctgtgcagggctgggccacccctccagggagttcacttccgtgtgggttctgggggctcctacaccctccaccttggaactgagtccccccaaactgaaccttctaacagcctggggtgaagtgcattttcccataagcagaagtgagatgtgyttccctagggacatagaactatatgggagaggaggaaggtggtgtgtgaaggtccactgggcagggtggtgggcaggctggcaggaggggtggctctatatcccctgggcagcgtctgtgcttccccgtgcacggtgcccgggtggctgtggctgaggacgctgttgcctcctctgccgatg

SEQ ID NO: 68465 - DNA, 768 bp, Homo sapiens
ccctgtagtacctggcacaacttaagtaccccagcaatatttttctccattaatmttttgaagacaggactgggcatggtggctcatgcctgtaatcccagcactttgggaggccaagatgggaggactgcttgagcccaggagttctataccaccctgggccacatagtgagaccttgtctctacaaaaaacagaaaaattagccaggcatgctggtgtgcacctgtagtctgagctatttgggaggctgaggcaggaggatcattaagcctaagagtttgaggctgcagtgagctatgatcacactgctttatttcagcctgggcgacagagagaccttatatgtatgtatatttgtacatatgtatatatatatgtacaaatatgcatatatttatatacgtatcatacacacacagacacagacacactatgacacatttttaccagaagcacttacctcgttgtcctagcagaagggacttctagtatgttcttattctaggggcagagggtccctggttgtttaaagacttcagttcctgagactataggaatctcatcacagtgatggtagtcagtattttattttttggtgaatcaggagaaaggactttttgttttcctaagggaaaataggaaagctaattaagaagaagaaacaaaaaatattatgtagatatttttctatgccatacagcagttttcttgtggaagaattgcaaactttctgtgtatctctactaaatggaattttaattggaaaa

SEQ ID NO: 68466 - DNA, 768 bp, Homo sapiens
ccctgtagtacctggcacaacttaagtaccccagcaatatttttctccattaatattttgaagacaggactgggcatggtggctcatgcctgtaatcccagcactttgggaggccaagatgggaggactgcttgagcccaggagttctataccaccctgggccacatagtgagaccttgtctctacaaaaaacagaaaaattagccaggcatgctggtgtgcacctgtagtctgagctatttgggaggctgaggcaggaggatcrttaagcctaagagtttgaggctgcagtgagctatgatcacactgctttatttcagcctgggcgacagagagaccttatatgtatgtatatttgtacatatgtatatatatatgtacaaatatgcatatatttatatacgtatcatacacacacagacacagacacactatgacacatttttaccagaagcacttacctcgttgtcctagcagaagggacttctagtatgttcttattctaggggcagagggtccctggttgtttaaagacttcagttcctgagactataggaatctcatcacagtgatggtagtcagtattttattttttggtgaatcaggagaaaggactttttgttttcctaagggaaaataggaaagctaattaagaagaagaaacaaaaaatattatgtagatatttttctatgccatacagcagttttcttgtggaagaattgcaaactttctgtgtatctctactaaatggaattttaattggaaaa

SEQ ID NO: 68467 - DNA, 768 bp, Homo sapiens
ccctgtagtacctggcacaacttaagtaccccagcaatatttttctccattaatattttgaagacaggactgggcatggtggctcatgcctgtaatcccagcactttgggaggccaagatgggaggactgcttgagcccaggagttctataccaccctgggccacatagtgagaccttgtctctacaaaaaacagaaaaattagccaggcatgctggtgtgcacctgtagtctgagctatttgggaggctgaggcaggaggatcattaagcctaagagtttgaggctgcagtgagctatgatcacactgctttatttcagcctgggcgacagagagaccttatatgtatgtatatttgtacatatgtatatatatatgtacaaatatgcatatatttatataygtatcatacacacacagacacagacacactatgacacatttttaccagaagcacttacctcgttgtcctagcagaagggacttctagtatgttcttattctaggggcagagggtccctggttgtttaaagacttcagttcctgagactataggaatctcatcacagtgatggtagtcagtattttattttttggtgaatcaggagaaaggactttttgttttcctaagggaaaataggaaagctaattaagaagaagaaacaaaaaatattatgtagatatttttctatgccatacagcagttttcttgtggaagaattgcaaactttctgtgtatctctactaaatggaattttaattggaaaa

SEQ ID NO: 68468 - DNA, 1170 bp, Homo sapiens
acccctgttcctggtcctgctcctgggaatatgctcacaaggaactctgtacctcctccaggctgaaaactctgagccccttattccagcccagacttctccttacagacccaggacaggggcagggttggtggtattaaggccagttctgccactgcattgctgaaggctggttaagagctctctttagaaaaccagagtgcttagcactttctgggtcacctttgggcaatggcagccattccaagacaacagaacaaaatctgactcacaccctattacatagaattctaattgtgagatgtgtgagaaaggaaaagaacagggtgctatgagaggaaatgcccatgctcaggatcacacttctggatctcaaatcccagctctgccccttattaactgtgtgatcttgggcaggttacttcgcctctctgtgcctcagcttccttatttgtaaaatggtgatgataacagtacatacctcataggacgaaatgagaaaatgtaaacaaaactcttaacatagcgcctgtcacattaataaatgctcagtaaacgtaagttccctgagggatccaggcacctcacaggcacccaacaacacttgatgaaataatgaatgaggtagtgagaccccatctctacaaaaaattaaaaattagccaaatatggtggcacatgcctatagttccaactacctgggaagctgaggtaggaggatcacttgagcccaagaggttgaggctgcagtgagctgtgatcatgctactgtactccagyctgggcaacagagcaagactctgccaaaaaaaaaaaaaaaaaaaaaaacacagaattacacttacacatagattttctttctttcttttttttttttttttttttgagttggagtctcgctctgtcgcccaggctggaatgcagtggcgcgatctcggctcactgcaagctccgcttcccgtgttcacgccattctcctgcctcagcctcctgagtagctgcgactacaggcgcctgccacagcgcccggctaattttttttgtattttttttagtagagacggggtttcaccgtgttagccaggatggtctcaatctcctgacctcgtgatccccctgcctcggcctcccaaagtgctgggattacaggcgtgagccaccgcgcccggc

SEQ ID NO: 68469 - DNA, 1170 bp, Homo sapiens
acccctgttcctggtcctgctcctgggaatatgctcacaaggaactctgtacctcctccaggctgaaaactctgagccccttattccagcccagacttctccttacagacccaggacaggggcagggttggtggtattaaggccagttctgccactgcattgctgaaggctggttaagagctctctttagaaaaccagagtgcttagcactttctgggtcacctttgggcaatggcagccattccaagacaacagaacaaaatctgactcacaccctattacatagaattctaattgtgagatgtgtgagaaaggaaaagaacagggtgctatgagaggaaatgcccatgctcaggatcacacttctggatctcaaatcccagctctgccccttattaactgtgtgatcttgggcaggttacttcgcctctctgtgcctcagcttccttatttgtaaaatggtgatgataacagtacatacctcataggacgaaatgagaaaatgtaaacaaaactcttaacatagcgcctgtcacattaataaatgctcagtaaacgtaagttccctgagggatccaggcacctcacaggcacccaacaacacttgatgaaataatgaatgaggtagtgagaccccatctctacaaaaaattaaaaattagccaaatatggtggcacatgcctatagttccaactacctgggaagctgaggtaggaggatcacttgagcccaagaggttgaggctgcagtgagctgtgatcatgctactgtactccagcctgggcaacagagcaagactctgccaaaaaaaaaaaaaaaaaaaaaaacacagaattacacttacacatagattttctttctttctttyttttttttttttttttgagttggagtctcgctctgtcgcccaggctggaatgcagtggcgcgatctcggctcactgcaagctccgcttcccgtgttcacgccattctcctgcctcagcctcctgagtagctgcgactacaggcgcctgccacagcgcccggctaattttttttgtattttttttagtagagacggggtttcaccgtgttagccaggatggtctcaatctcctgacctcgtgatccccctgcctcggcctcccaaagtgctgggattacaggcgtgagccaccgcgcccggc

SEQ ID NO: 68470 - DNA, 1869 bp, Homo sapiens
tttggaggtcaggcttggaagtggcatttaactctcctgtccatattcccttagccagagctcacacaccaggcactgcaggggatactcaggagtgtttagctgagtgccctgcaagagaatgaactggatttggtgaacacatatcattacaatcatgactgttttacagactgactagctttagctgtcttctggccaaacaatgagctattccctgagggggagcttgtcttctgcaattctaaaattccctcactgtgcacaggttctgacacatctctcttgaattggattgaattggaaaagctaaatcctgttgcagagtggtgagtgattcttaaatacatcctcctttctttaagactttctggttttccacttcagctgacagcactccccttctgggttggaaggttgacagctggaatccctggctcctgcccaaggctgaagttgcacagtgaagctctcccttgccaggtgggccgcccaaggtcctttggaacactccttctctgtggtttcttcagtgagataagaaaagtctaatgatgcagaaatacaaaggaagtaggtcggaggaggagaacgaagaatgactttgttaaacctggtagtttcatctttctaattgcggagaaaggatggatgcatatcccaaagcagagagttacctacttgggatgatctgattgctttaggggcacatttcccccatcgttacacagacaaactcaagctcaggttcaagtgttggtcttgacccccgtgtccccttgtctgctacatgcttgatgttatacgtgatcctatagagacacgtcatcctcttcatcttcatctgtcctctcactgggaaaaatagcccatgacatttcacattgtttcctgacccgatgtttgactcagcagtgcctaaatgaggcttgctttctttttttaattgtgtttcctttttaaaatgacctaatcggtgattatcactgtggatatctgagaagaatggacaaaaatgaaggtgagaatggtaaacggcttccacagggggagaaaaaggccccagagagcgaaaatcatcaaaaacaaagactggagatatggtttaaagaacttcatcattattaatttaggaagcttaaagagggctggcgacaaggaaagggyggtaaaaaaaaatcctaatgataagcctgccaagcatgttgaaggttatccaggcctctgggagccagaatgattgcagccctttacttcctttgttcttccactggggccggtgggcactccttctgtaggaggcaaggatgggggataggaggatatgggtgagcagcacgaccctgcagggccctgacctgtccctgtgggttgttggcagggttctgagaaggctcagcagtgctaggaagtctaatggggcttcctaatcaaatatggagactgcttcacagcgagcctggcagtggcattgacccatgagaatggaagccacctatcatgctaagtcagggcactggcaggctcctcttgtgccagcccttgcccagttagtagagttgctgagttgggatcatctgggggttttagagaagggtaaggacagcttggggaagaaaggtaggtgggagaaggacttggggagtgtattttggtcaaccagtaggcagtatttcaatatcttaacagctagtccagttgtcccaatgtacagcagctggatttctgccttggtaacttcacccctgtaatttgcactgctgtagggatcgaaccacaaaatagaaatggatctccttggcaaaaccattcatcggttctactggagagagttaatcaggcatcatagctcacagttctccataatgc

SEQ ID NO: 68471 - DNA, 559 bp, Homo sapiens
agtattgttgaaataacttaaagaaaccctgaagaaatggaaagatatcccatgttcatgaattggaagataatattattaagatggcaatacccagattgatctacagattcaacacaatccttaacaaaataccaaaataccagctgtctgttttttaaagttttgttttttggggttttgtttttgcagatattgtcaggctggtcctaaaatttatatgaaaatgcaaggggccccaaaatagcaaaacaatcttaaaaaggagaaaaaaaattgaaaarcgtacttcttgatttcaaagcttactacaaagctataggcataaggatagattatggattaggggactagaactgaaagcccagaaataaactctcacatttatgatcaactgagttaggcaagggtgccaagacaacaatgggaaatgaatagtgcttttcaataaatggttctgaaacaattgtacttaaagaaaccactgaattgtggactttaaaaataacaataacgaacttaaaaataatatctttatctctttatattcttttaatag

SEQ ID NO: 68472 - DNA, 559 bp, Homo sapiens
agtattgttgaaataacttaaagaaaccctgaagaaatggaaagatatcccatgttcatgaattggaagataatattattaagatggcaatacccagattgatctacagattcaacacaatccttaacaaaataccaaaataccagctgtctgttttttaaagttttgttttttggggttttgtttttgcagatattgtcaggctggtcctaaaatttatatgaaaatgcaaggggccccaaaatagcaaaacaatcttaaaaaggagaaaaaaaattgaaaaacgtacttcttgatttcaaagcttactacaaagctataggcataaggatagattatggattaggggactagaactgaaagcccagaaataaactctcacatttatgatcaactgagttaggcaagggtgccaagacaacaatggraaatgaatagtgcttttcaataaatggttctgaaacaattgtacttaaagaaaccactgaattgtggactttaaaaataacaataacgaacttaaaaataatatctttatctctttatattcttttaatag

SEQ ID NO: 68473 - DNA, 559 bp, Homo sapiens
agtattgttgaaataacttaaagaaaccctgaagaaatggaaagatatcccatgttcatgaattggaagataatattattaagatggcaatacccagattgatctacagattcaacacaatccttaacaaaataccaaaataccagctgtctgttttttaaagttttgttttttggggttttgtttttgcagatattgtcaggctggtcctaaaatttatatgaaaatgcaaggggccccaaaatagcaaaacaatcttaaaaaggagaaaaaaaattgaaaaacgtacttcttgatttcaaagcttactacaaagctataggcataaggatagattatggattaggggactagaactgaaagcccagaaataaactctcacatttatgatcaactgagttaggcaagggtgccaagacaacaatgggaaatgaatagtgcttttcaataaatggttctgaaacaattgtacttaaagaaaccactgaattgtggacttyaaaaataacaataacgaacttaaaaataatatctttatctctttatattcttttaatag

SEQ ID NO: 68474 - DNA, 1657 bp, Homo sapiens
atacttttgctataatagttaatactaatagctgcttttgatttgctcttatgtgccaggcactgtgcttaattatttatatttacctaaaagttgaatcttcacaacaacccaaagaattaattaattagaataactccattttttagacaagagttgtaatgacatttatggtaaaaaaaatggaactttttacttaaaaatctttaatgttcttattactcctttaaatctcaagcacttaaagaacaacatttggttataaattaatcaaagtgctgggaaaggtggtggtctgtctcattcacctaattttctatcaaaatagatttgttaaagttctgtataaagataatagcttcttcatttgctctgttcatgtgttacaattagatcatagaaagtcagaatggaaagcaaccttggaattcaactagtccagcagtagtgttttataaatagacttaggcataaagaaattaaatgaatctttttaaaaatactggatttttgtagtgagcatttggaatgcataaaactgtaagaatggttatcattcgttcacgtaaattaygtttctcaaacagtacatttgttcttcataaaaactacaatgacattataatccctactttcctgataaaggcacctaagtaaactgctcaagatcacattgacactaaacagtaaacccaggatttaaagtcagatatgctcctccaatacactttgcttttactttcaaaataagatcaactcatagtaaaaatgttttagaaattaatcatagcagttataatagtttggattgaatgtttactcattctagaaaactggaaattatgttgattttgtttattttttggggtgggggtggagcactccacttgaaagaaaaaggtagaaaaaattccattacttatgtttccattaatgcctgtagcatcgcaaatccagtgatcaacaaaatccagtaccatttgggcagtgagatagtggctgtcaacaactatggagagagaaacttgcagagactattgggggaaatccctaacgtaagaaaatccctcctcagcaacagagtgtcccagggacctttgagattctactaagggctggtaaagtaaaatgtcaatccaagtggcagatactatctttcatgtcttctctgaattacaggatttctctcctcctataccttctctcctcctattcctcataggaagttcctggctggagagactcccaatatgggtaggccaaagaggaaggactctagggctgcttgctcttccttggggactttaaataccaacttctgcttttatcttatatgtatgtatgtatgtatgtatgtatgtatgtatgtatgtatctatcaatcatctatttattatctatctatctatctatctatctatctatctatctatctaccatctattttgggggaagtaggggattataatgagcaataatcaaatgaccaatatagcctgatttattgaactcataaaaaatccgtaaaatatgccttttagagattgagagaaattagcctaaaagtaattttttggccatgtgagcagttgacaatgggtttaaatacaacttaatctttagttgatgagcccctcagcctacccctgacactaca

SEQ ID NO: 68475 - DNA, 1072 bp, Homo sapiens
acttaactggttttcagtacattcattcattgaataaatatttattgcatgctaaagggtgtgaggaactgctccatcagtgtaaagatcagcaaatatccctaccctggtgatactcacattttagaagggggagatagaaaataaatgataaacacaataaataaagtagcatattagtggatgataagtactatggaaagaaataaaaagtacagtagagtaaatgagatcgggagaagcaggtcaaggtcagccccactgggaataaacatttgtgtgtgttgggggagaacaaaggttgttaaaggtattcccaagagcagtacacaatattgttctcaccttctttagagttactatagtagctctaaagcaaaaaacacatttattttataaaaagcaccaaattctaggaaccatccttgccctcccccaccgcatgattctcttcatgaccctgaccccctcttccagcaccagagcatatgcagtggtcttccctctaccagtggtggttcctgacagtctactaaggattctggaagtgctactgcaaatttagagaaaaaaaagcgatgaaacaaatttttaatatacaacttacagaaatcttgccatattctttttttcaaatgttccaayaaggtgcatatacactataagggctgcacatgtcatgtcactgctactaacaatcaatcaactgagacccattttttctcatgaatatgttcttatatttatgtgctactacttacctatgttaaatataaatttttattatctctactctgttgccttatatcccaattcataaaaatgggtatatagttcaaatatggttttagtgtagtcatagtgctgaaatcagcatcataaatgatataactcaaaataactggaagcataaatagcaaacaggactctagtactaatttttttaagtaaatctgcatttgctgggataaatgactctgtgggtaaaatgatttttcccaggcagctaaaaatggaaagtataaataggaagtaagacaatgaatcctttattcaaacaatgaattttatt

SEQ ID NO: 68476 - DNA, 1305 bp, Homo sapiens
gcacagaatgaaacatgttagataatagaagtatgcaaaatggatgtgctatggaaacacagagaaggaagttggacatcatcaaatggagggcactgaagtctgatagaatagtgtgagcagaggccatagcatatgtagcctgcttgagggctagcaagtattctcatggtttcgtaggctgagaaatgaatcaaaattaagagctcaagaatgggaagaatggtgtaaaatagaaatcataagtagtaaattgtagaatttttaccgtgattataaaacaacaaaatgtatacaattgttcttagaagacaagatacataatgtaagaagaaatagaataatcactgggatcagaaaattcaattagaggtttgtgagacgggcaaaagggaggtygccatatttcacagatggaaatcatatagattttgatttagaaatgtgggtttaagtgtatttattataatttttattatgtaaagatgacagtaggatatgtagaatgtatgactaataaatcactagaaaagaagaaaaacctaataaaagtcaatgcagcaaaatatatgattatacataagggaaaagacaaaaagtaaaaaaatagaaagcatataataaaatgatagtagtcacatctgacatattcaaaatgtccctattataagacaagtatccctaggctgggctctaaacacaaaattcaaatattactatttacatacaataagtatacctaaaactaagtgactagacagttccaaataaggaatgagcttggccattttataaaagtgtgtgtaatatacgaagagagaagatacactttccatgagtaatgaaaattgacaagtcattaagagaactatcgatagtctataaaaatatcttggatcctcagagaggttatcgaaaggagtatgctcctctcaaaaaagaagaaaaaccgagagaaaatctaaagcattgggagaatttcttgtaaataaagtgtcttgtacttttttggagaacagagctatgcagcatcactaacatatgagagatgataaaatatactattataattaaatatattactgcttaggatgtggcaaaattaaaggtatttgtaaatccgatattccaaaagagttctcaagcgaagtagacacagcatgcatatagtttaaaacaaaactgaattgccttattcaattgagaatgttaggttttatttatgttcctaatgaattctgtattatctttaaactttctattaaaatgctaagtatctaatatatccatataaaacatcacata

SEQ ID NO: 68477 - DNA, 673 bp, Homo sapiens
ggtgggaaaggcatgagcaagcagtagttacaccagcacatggcactgtatggttgtttattaagtcactttggcaaacattgagagtttcgatgcaaacatttgcaggtggcatcaggtcattgaaagcgacccagcagatcactgggtacattagggagaatataaattgggctgttgacacagagactcaggatggcttaatcaagataaatgtgtgtctctcttcctcctaagagctccagtgtaaatggtccaaagctggtgtggcagctccatggggtcaaagacccagttctaggaagscttgtttcagagtcctccatccagtcagcaggaagagggaagagggaaagttatgctcattgttctcatcctattggatagaactgggtcacatggccgcactcagccacaagggaggctgggaaatgtagtcctttgttccacatggccctgtgcccagctaaaaagagataaggggaagaagtagaaagcttttccatacctacacaagctcattttgcctaagttcagggggccttcccagcccctttccatgcccactgtcctgaaccagttcctccagaccaatgaacctggagggtaagtttctgcctctgtactccctgggcaggaagatggcagggaggagggggccactgtagggcag

SEQ ID NO: 68478 - DNA, 702 bp, Homo sapiens
ggataagcgcatagtggggattgtgtaaggtcgtgtggacatcaggtttcttaggaaaatatttgagtcctcagtgcaccctatgtattttattttatttatttatttattgagaaagagtctcgctctgtcgcccaggctgcagtatagtggcatgatctcggctcactgcaacctccacctcccaggttcaagcgattctcttgcctcagccccctgagtagctgggaccacagtcatgtgccaccacacccagcaaatttttgtatttttagtagagacggggtttcgccatgttggccaggctggtcttgaactcctgacctcaagtgatgctcccacctcagcctcccaaagtgctgggattacaggtgtgagccactgtgcccagcctcagtgaactctaataacagactatttttagttcaggaattctaaattccagtygctgtaaacaaactttcattctcagcaaccagttggcggagctcagtctttcttagaaaggaaagcctgtagaattatccagcatgcctcacaatgatcgaggatgagctgacaccagcttcccccgtggccccggcccctctgctctgtgtttatccgtctcgtcccaccctgtcctccctcgcctgccctggccatccccaccacgtcctttcctctgaactacacagtaatgaattcagcccaactgcagca

SEQ ID NO: 68479 - DNA, 702 bp, Homo sapiens
ggataagcgcatagtggggattgtgtaaggtcgtgtggacatcaggtttcttaggaaaatatttgagtcctcagtgcaccctatgtattttattttatttatttatttattgagaaagagtctcgctctgtcgcccaggctgcagtatagtggcatgatctcggctcactgcaacctccacctcccaggttcaagcgattctcttgcctcagccccctgagtagctgggaccacagtcatgtgccaccacacccagcaaatttttgtatttttagtagagacggggtttcgccatgttggccaggctggtcttgaactcctgacctcaagtgatgctcccacctcagcctcccaaagtgctgggattacaggtgtgagccactgtgcccagcctcagtgaactctaataacagactatttttagttcaggaattctaaattccagttgctgtaaacaaactttcattytcagcaaccagttggcggagctcagtctttcttagaaaggaaagcctgtagaattatccagcatgcctcacaatgatcgaggatgagctgacaccagcttcccccgtggccccggcccctctgctctgtgtttatccgtctcgtcccaccctgtcctccctcgcctgccctggccatccccaccacgtcctttcctctgaactacacagtaatgaattcagcccaactgcagca

SEQ ID NO: 68480 - DNA, 544 bp, Homo sapiens
acatcaccaggaatgagatgctggacattgtggatgccatttaccagatggtggtgagaagccgggtctcgtgtggttaggggtggcaggaggggcaaagccagtgactgacagacagagagagagcacttgtgcagccatgctcctgcccagggtggaagcaggggtcactggctgagccgttctgtacatctctgcctgggcaggcaggcacaagctggtagatagtggggctggggtgtgggatgttccagggcacaatggcagggatggggaggggaaagaagaggggggsggccctcatctggaaactgccaggtctggggggcaaatgcgtggccaagagcccaaagcccagagtgccagggcccacccccgccttgtccgtccctgcaggggaataccgtggagctcccagaggaggagaacactcctgagaagagggtggaccggatctttgccatgatggataaggtgaggtgggggggcggggctggtcctggaccagggaggcaaggtgtcgggggcaggaattggagtccct

SEQ ID NO: 68481 - DNA, 1064 bp, Homo sapiens
attgcattctccattacttgcagccaaaagcattcccactgagacatgcctgtccttttgtttttccctcctatggtgtagggttttgcataactatttacgttcaggcaataaacacaaaaccatgaacattgaccttcatgtggaatttaaggattgctaaacttttttctgtacctagatttctcctgtgttgattttggaatccaactcctggggcaggcgctgaggcaccctgaggaaagggctgtgattgtccagtgccaaaagtgacccacaaagcaaagtgtctccaaaggacagagaccacaattgactcattctcattcatacccttgaacccaagtacagcatctggaacacagcaggagctcaataaataagtgttgtatgaatggatggatagaacaagaaaagtccaggccctttcattcattgtattataagcttgcaagcttaattagtacaattaaaatacataagcaatatcttagtttctttaataattccccttaatttacacgctctctttatttgagtaagttccccaggtgtttgaagaatgttattagaattggacagtccctgtgttggagacagggccattgaagctggtatttcttctcccttcccttccttcctcccttcctttcttttttttttyctccaagatggggtcttgttctgtccccagggtggagtgctgttgcatgatcatggctcactgcagcctcaacctcctaggcttaagcgatcctcctgcctcagcctcctaagtagctgggacacaccaccatgcctagcttttttttttttttttttttttttttttttggatacagggtctgtattagtccattctcaaactgctaataaagatatacccaagactgggtgatttataaaggaaagaagtttagtggactcacagttccacatggctggggaagcctcaaaatcatgatggaaggcaaaggagaagcaaaggcacgtcttacatggtggcaggaaagagaacttggtgcagcggaactcccatttataaaatcacgagatcttggcca

SEQ ID NO: 68482 - DNA, 2175 bp, Homo sapiens
gatgaaggaaagggttaaaatcctgtttgttcctttaaccagcctgcaagaaacgtattggaccttcacgttcccgtttacagctaaggaaactgaggctcagagaggtgaatttagttacccaaggtcacttgtctacaggggctaaagaatgagtcagtttagacaaagaccctttctactgagtaggtcagttgcttcagtgccttccacaatgtctgaccttggcagtgtttgggaaatgcttgtggaatgggactgatccggatccctgagtgccggggtcggctctgaaatgtttgagagggtccccaccaggaatcttgagaaaactccacacacccaagatttccccagggtcttggccagccacggtggctcacgcctgtaatcccaggactttgagaggccgaggtgggcggatcacttgaggtcagtagttcgagaccagtctagtcaacatggtgaaaccctgtctctactaaaaatacaaaaattagccgggtgtggtggcgcgtgcctataatcccagctactcaggaagctgaggcaggagaattgcttgaacctgcttgaacccagaaggtggaggttgcagtgacctgagattgtgccactgcactccagcctgggtgacagagctagaagatagactccatctcaaaaaaaaaaaaaaaaaaaaaatatatatatatatatatatatatatatattcccaaggtctcgaaggccccaaagaggcagaagatgtggctyacttccttttggaagattctgagctgagtctggcaggaaagatggcttgagccagggggtagttcttgtatgtttatgcaagagagagagagagagagagagagagagagagaatatatgtggtcattggaacaagttcctttactagccagaaataactttgggttttagaaaataaaagtagccctgtctactttccaacttacccacctaaaacaagaacatgcattctgtgagaacacacatacattgagcacctactatgtgccagatgctaccatttggctgcaacttaggcagacatagatcctgccccatggagcacccagccattggggaaggtccaaatcggacaaaagcaggcactcacagagacagaacaaaaccatttctcatacagcttctctgaggccactgtgtacattttcaactggtttctttccatctattttctacgtatgtaactatggtaggttttatcgcccttagttttctggtgagaaaaccaagggaggttaaccgacttgtccaatgtcacacaactggaacatggtagagccgggatttgaacctatgtcagtgcgacttgatctgggtcactcagccagtcaaagcaagttaacagatcagcagatactgaggacctttgcctgccagcaccaacggcactttgttggggcgtcagagatgccaaagattcagtaactctttgacagcgtgcgggaggtgggcaggatcatccttggggatgatatctcccagctaaagccttcctgagcctggactctggagtcgataaacctggcctccatctccactcctccacccctgactgcgtgatcttggttgagtgctttgcctctctgtgaaaccgcagtttcttggaagtgggctggcagggacccccgcctgtcagcacagggccttggggaggatcccaaggggctgagagggaaacggggctttgattttgaatctgagcagctctaagcagcctctctcctggctccacttcctgcgggagcggcaacagcttcccatcttggtgtctgccccaaggcctggccctctgacttttattcagacaccacgactcctcatcggcacagcatctccagggcgcccaccatgtgctgggctcagtgcttgtgatgtgtatcctctcgttggcccctgacagcggggcagggagcacgctgacccaggccacgtggcgactggatagttggtagacccatctgtgcaaaggccctgggtgatccctgctggactgtgtgtcccaagcagagagcctggctttagagggcctcgggcaggagagccaggcctgggtgcagagcggtgaagagcagctcccgggagctggggctgaaggttacctggcctggcccgagtctgccctccggggccagggactcc

SEQ ID NO: 68483 - DNA, 684 bp, Homo sapiens
aggattcgaatgcatatcttctgatagtccagtacgtttgccatgctgtgcccattcagggaagaagagaactttctcttcatatctgagtcttatcttgacttcctatccttggagatgttatagctatcttttcaaatgagttgttgatagtgtgggttgtcaactgagagcacagggacaaacttgaattttgtctctataacttcctggctgtgaaactgygagcaattaactaaacctctttgaacctctttccttatctgtagaataggaatgctgttaccttacttatagggttatagttaaggtgaaattagacaacggatgaaaagtgcatagcatagtgcttggcccacagtaaattctcattatttcggtattattattattattactggatgagtgtagaaaggaaaagaagagtagtagaagcaacaacgtgtcaactgccataattatctcggtaatccaggcatcacccccccacctttgtttgaattaaccatatatgtccatatgtgtggtctctctgcttagctaactcttgagagtctttggagcctggcctaagttccatttcctctgaggacttctccaactgctcaatcaatctctcccttctctggatgcctatagatcaacattgttagtaccacgtaactatgcttttctaaaatcttt

SEQ ID NO: 68484 - DNA, 717 bp, Homo sapiens
cagccctggaggctcccaaagccaggtctgtgactccctctttggggccctgtggttcctgatgtctccaggcttccgggcaccactgcattccctggtgccagccagggaagctgcttgtggtgcacctggtccagctgcagtctcacagagagtgggcacccatcccagcacctggagctgcctgtgccatggcagcagctgtcgtgtctgactgtgtgcagtggctggaccccacactcgttcacacaccccttgctgttccatgcctgactcccactcagagtcgtggggtccaggctggtggcgtgagccgagcgtggcctgccaggccaagtgagtggaacaagctcagtgggcccgagcaacactcagggaaaggtgccaccagccacagaggtttctggccagraaagcaacaccccaaagatcctgtaacgatatgtaaaatcttatcaaagatactgtttgatacagtttgggtcaggtgcttttgcttgcatcaatcgtggtggcccgaggataagatattgaaatggagagtaccattaaagcctcacaaaagagagggtaagaaaaattccacaaagaaggaaaggtactgctatcggaatatgaacgtaagggatgctgggcagaaaaaagcaataaatgctcggttaaaaaaataaatatcttacagagcttttggtgagaaaaattgtaagtttttatttg

SEQ ID NO: 68485 - DNA, 660 bp, Homo sapiens
catttaggatcagatatctgcattaagaataattttcccagtatgtagcttgctttttatctccatggtatctttagaagagcagatgtttttaaaatttcttgagggtttctccccactgtaccactcctgatgctggtgaaggcttgcagtgactcataaccatcttcctcatgccccataggtgtaccatttcygggatgccttccctggcacacgggtcaaatatctttcaagaccctctcccacatttcacacagcgggccttctgggtggatgagctgggcttgggactcactgtgactctccttccacagaattcctctgctgaagtgcctcctaagcctctgtttcataccaacaaccagagagtgggcacatggctgagctgtagcacaggtggagaggctgacctccaacatactcctctgcaaatgggttttaccagtggtgggggtgctgaacacagtgcagaggtggtgcctagactcaggaaaatctgactgcaactgacaagctggtgtccaaggactgctaaaggcatatgtgcatacctccagagacattcagtgtaggccagtgtttgagagcacaggagtgggttctgtcccaggccctttctctgaggctgaagcatgaggtctccctcgtattcaactt

SEQ ID NO: 68486 - DNA, 630 bp, Homo sapiens
taatacattggataaataactaaagcaataaaataatgtaatatttagcatacaacagttggttccattgtggtttttttttaaatatcattttgtaaaataagtcttccctaggggtaaataaggacttctagagtaatatttaaaatttttcctatggcatttttggggtgaccacccgtcatctaaattgtatatggaagcatgtaactcaggaaaatcccaagttaattttagaggattattcattcaaaaaaattacttaaaatctactatgtatcagataaggttctgggccctaaaaatgtggtttttccctaagccttaaggattttaatccccttacgggatacacattcacaagattgaacattcccaagtcgtaaacttgcatatagtctgtccttaagttgctttggaaaaaccaaagagtataggggagtggttcttaaactgtggtcctaggaccagcagtgtcagcatcacttggaaacttgttagaaatacaaactcttggccragtacggtggctcacgtctataatcccagcaatttgagaggctgaggccggcagatcagttgaggccaggtgttcgacaccagcctggtcaatgtggtgaaaccccatgt

SEQ ID NO: 68487 - DNA, 533 bp, Homo sapiens
gaaaaatttaaattactaccaagtaaattagtattttttacatattgattttaaaataaaatgtgtgataagactaagtgttggcaggttatgtagccacagacatcattacatayggccagagcgagtctaccctggtaatctccaccttagacaaataattataatctagcattgcaaaaaagaaataacacatatctaccagagatatacacaacaatttcataccagcattgttagtaattagaagaattataagcaatctatgttgcaacagtaggaaaatggataaatgagctgtagtatatgtataaaagagtcaaaacagagaaaatgaatgaactagaactacatctttaacatatatgaatacttttcaaaagaaaacaatctgcttgagattatatacaatattttcctatttatacaaggtttaaaacagagaaacaatattataaatgtgcagtgatacctgtgttgcaggacttttcctcagtcagctaaaggcatctttgtccgtcccacagccacaa

SEQ ID NO: 68488 - DNA, 533 bp, Homo sapiens
gaaaaatttaaattactaccaagtaaattagtattttttacatattgattttaaaataaaatgtgtgataagactaagtgttggcaggttatgtagccacagacatcattacatacggccagagcgagtctaccctggtaatctccaccttagacaaataattataatctagcattgcaaaaaagaaataacacatatctaccagagatatacacaacaatttcataccagcattgttagtaattagaagaattataagcaatctatgttgcaacagtaggaaaatggataaatgagctgtagtayatgtataaaagagtcaaaacagagaaaatgaatgaactagaactacatctttaacatatatgaatacttttcaaaagaaaacaatctgcttgagattatatacaatattttcctatttatacaaggtttaaaacagagaaacaatattataaatgtgcagtgatacctgtgttgcaggacttttcctcagtcagctaaaggcatctttgtccgtcccacagccacaa

SEQ ID NO: 68489 - DNA, 1010 bp, Homo sapiens
acagaaggtgacgtggaggattttgttgcaatggctgcaacatggcccagatcttagaatcacccagttctgcttttaagatacatgtctctgtctttcaatatttctcctttaaaaaatatcagttttacagaagagatgtgttggaagagatttattcatgtgataaaaagattcctcattaaatcaaaggctgcaccacattttactatctggtttccttggggtcacatggtattttacaaataatttattatttttagaaattcatcttaaggatttcaaagtgcaccaatactatccttggttttgaatagatatgtatgtacctagattttccacagtttatgttctacacgacatacagcaacattatatatggttgaaatatgggcaaggaaatggtcatcagcaatttggaaatccacagtctagagaattaaaagtattttttgcttactttgaaattatgtgattaaatgataaaatgaacataagcctcagtggagtgtagccatggtatacttgaagagtttttatgtgacaattctttaaatttgacagaactttcaggcttgcacttactaaatacagctctacaaaggaattatagccttgaaattagaacactaaaaatgcacgagtgacttattcacgaaaaataactgcataataacgcatccttgcattctaatatccaaatattctttctcaaatattcagcctctgcaacatcttctcaatgattaaatatccatgttttaaaagcttttacagaggcagtgtgagatactgaatgagaattgcgatctggttgaacattcctctgtcttgattgtcattgaataatgaatatttacactgagaattcatattgtcagtgacttgaaataaaagagcctcttggagcatttttctttttagtcatagttttctaagcaattaaaaatgagttagaagctgcattrtaaatggaaattcagaaaagttttagaatcatacattgtaat

SEQ ID NO: 68490 - DNA, 779 bp, Homo sapiens
  misc_feature (1)...(779): n = A,T,C or G
atgtgaagaaaatatatcacaagattgataaggtgtggtagtatttatgtaaagggaaggacaaagacaatgcaaatagtgatcttgttggtaaggctatttattttgaaaaactaatattttgtagttaggacgacatactcattgacaaactaattaaatgcagaaaaagctactaagaagacaataaaatcacaaaaatctcaccattcagagataaacttccagatacctaaatgtatatagacacatatagctatgtggacataatgctttgtaaataagtttatgctacattgcaggttaattttttcacacttaaaaacatgctgagaggtcaggcatggtggctcacgcttgtaatcccagcactctggtggatcacttgaggtcggagttcgagactagcctggccaacatggtgaaaccgcatttctactaaaaatacaaaaattagcctggcatggtggcacatgcctgtagtcccagctactcgggaggctgtggcaggagaatcacttgaacctgggaggtggaggttgaggtgagcagagatcgcrccactgcatgcgccatagcctgggagacagagacagactctgtctcaaaaaacaaaaacaaagccaaacaaacagataaacaaacaaaaaacatgctgagattatgtttctacctcnnnnnnnnnnnnnnnnnnnnnnnnnnnnnnnnnnnnnnnnnnnnnnnnnnnnnnnnnnnnnnnnnnnnnnnnnnnnnnnnnnnnnnnnnnnnnnnnnnnnatt

SEQ ID NO: 68491 - DNA, 585 bp, Homo sapiens
tcaagtgattcttctgcttcagcctcctgagtagctgggattataggtgcctgccaccatgcccggctaatttttgtattttcagtagagaaggggtttcgccatgttggccaggctggtctcaaactcctgacttcaggtgatccccctgcctcagcctcccaaagtgccaggattacaggcgtgaaccaccgcaccctgcccaagaccagctttaacagtgaaaaggaagtgctcttcagtggcaggtagcactttgtccttattaaggtgtcagcggcatgacccaggcacctaaagggtcagaaattgctcctgtgctttgactgagagcagcctggccgggtccccactcagaagggccttcytccccctgcccgctcaccggctgtgcttccaggcgttccggatgtccttcagcttgctgttcctcatgttggccacagagaagatgaaaaggtacttgtaggtgtccacacatttccgaagctgtgggacaattcacgaggctctgagttcaagcagcagcatacaacgggcactactctggcctcagatgagaatgaatctgctctgggcccctga

SEQ ID NO: 68492 - DNA, 706 bp, Homo sapiens
aaacattgcccattttcaaactagagatcacatctgttatggaagatactgtgacaaaacagcatttccacacaaaaagtcatattgttgcttggctggcctcacaataatattctgtcgtataaatgattcactatttaattcctgccctactcaatggctccccacaattttcaaaagaatatttcaacatcctagcttagcattgtttatacatgaagtgagtcctgctttctaccttagcctcctctgcttggctggaagtgttgcccatcaaaatctgttctccttcttctataataacagagttgaggctaggggcataagttagagactgtattttctaatatcctctatatctaggactaagttrtcccaatgtgagccaaaagggtgagctttagagcaatggacattttctcctcctatgatcttttccttttcccataggtgggaacataatgggaaaacttcaatcaatcaaatgaggtaacactcaaggaagaagcggatcaatgaggaaaaaggagcctgggttcttgaatgacctcatggagcagagttgcttgtgagcctaaaccatctggactgttgcatcggagagaaatggcattctctcttatgaaagctgtttaatgcttaggtctctttgatacactagcttaggctttgccccaactcacacatacccttttgtcataggtgg

SEQ ID NO: 68493 - DNA, 628 bp, Homo sapiens
cctgggatgttgttgctgttggccacagcttccagcacaatggagtcgatgctcaggcaggctgcgttgtagtacttggccacgctaacggcattggctgactttcctattaaaaagaccagggggttgaatttcacggtgctcatttgctcagtgtcccagagagaaaaggtctcaagagcagaggtccctgcaaagtgatctctctgagtgctctgcctccttcccatgtggctggaggtgttagcagcaaagagaaggaagacctcagcctggagtcagggctgtgggtctgattctaaccctgccactgatgcgtgcrtgctgtggcaatctgcatcctcgctgggttttccctcagtttaaaaaacagattctttttttctttttttttgagatggagtctcactctgtcacccaggctggagtgcagtggcgagatctcagctcactgtaacctccgcctcctggtttcaagtgattctcctgcctcagcctcccaagtagctgggattacaggcacccaccaccatatctggttaattttttgtatttttagtagagatggggtttcaccatgttggccaggctggtctcgaactcctaacctcaaatgatccacctgcct

SEQ ID NO: 68494 - DNA, 628 bp, Homo sapiens
cctgggatgttgttgctgttggccacagcttccagcacaatggagtcgatgctcaggcaggctgcgttgtagtacttggccacgctaacggcattggctgactttcctattaaaaagaccagggggttgaatttcacggtgctcatttgctcagtgtcccagagagaaaaggtctcaagagcagaggtccctgcaaagtgatctctctgagtgctctgcctccttcccatgtggctggaggtgttagcagcaaagagaaggaagacctcagcctggagtcagggctgtgggtctgattctaaccctgccactgatgcgtgcgtgctgtggcaatctgcatcctcgctgggttttccctcagtttaaaaaacagattctttttttctttttttttgagatggagtctcactctgtcacccaggctggagtgcagtggcgagatctcagctcactgtaacctcygcctcctggtttcaagtgattctcctgcctcagcctcccaagtagctgggattacaggcacccaccaccatatctggttaattttttgtatttttagtagagatggggtttcaccatgttggccaggctggtctcgaactcctaacctcaaatgatccacctgcct

SEQ ID NO: 68495 - DNA, 1055 bp, Homo sapiens
catgtgattctctggcagctacagggaacatttytttcctggcttctcccatgattctgatacggggagctctgggattggaacagtatcgattgttcttgtttgctatgcactcccttttcaaaataactgaatctactcctgtttgggtcgcataccaggaaagtaatcacctgttcctgagggtaaaaggaaatctgatccaaaaaaactctaccagcattctatttccatattttggagcaggttttctggttttaataacgtaaagtcctcattacagtaaatgtttcactgtctcctgtggctcaaggggcaagcacggagggcggctctgccttcctctattgatttccagaaagacctcttacttcccaattgtccaggtagcattgtcaactgaggtgttgtttttcctcaggtatgaagaccctctacagctttgtatttttccattacagaaattcccatttgttttctctttatgcagcacatcccacaggggtgcaaaggctggatgggtgagtgctattatgtggggcagcgagccggcaaagcctcgccaggcgtctctgctgacctggagtgatttcataagtgttcagaattgtcctcggctgattttcactgtccctagctgttaaggctgcagtgatagccccatattaattatcagctccatcctcagctgtcatgctgccattcctacccacggcagctcctaaatctgggctgcccattagaattgcctgggaaggctgttaaaatctaactcctgagacctgctgaattgtaatctgtcagaggacaaggttcaggaatctttattttaaggagcttcccgggagatttgttagcacccagcccaacatgcgttctctgcccctaatggagtggtttcagccagaggtaaagtcagctagagacatctggtctggaacaagtcaaatggaagctcaagccaaaaatgaaaagagcttttccaaaatctgccaattctccatgctttcccatcgccactctttatcccaggttgaaaaacaaggtgcataata

SEQ ID NO: 68496 - DNA, 1055 bp, Homo sapiens
catgtgattctctggcagctacagggaacatttctttcctggcttctcccatgattctgatacggggagctctgggattggaacagtatcgattgttcttgtttgctatgcactcccttttmaaaataactgaatctactcctgtttgggtcgcataccaggaaagtaatcacctgttcctgagggtaaaaggaaatctgatccaaaaaaactctaccagcattctatttccatattttggagcaggttttctggttttaataacgtaaagtcctcattacagtaaatgtttcactgtctcctgtggctcaaggggcaagcacggagggcggctctgccttcctctattgatttccagaaagacctcttacttcccaattgtccaggtagcattgtcaactgaggtgttgtttttcctcaggtatgaagaccctctacagctttgtatttttccattacagaaattcccatttgttttctctttatgcagcacatcccacaggggtgcaaaggctggatgggtgagtgctattatgtggggcagcgagccggcaaagcctcgccaggcgtctctgctgacctggagtgatttcataagtgttcagaattgtcctcggctgattttcactgtccctagctgttaaggctgcagtgatagccccatattaattatcagctccatcctcagctgtcatgctgccattcctacccacggcagctcctaaatctgggctgcccattagaattgcctgggaaggctgttaaaatctaactcctgagacctgctgaattgtaatctgtcagaggacaaggttcaggaatctttattttaaggagcttcccgggagatttgttagcacccagcccaacatgcgttctctgcccctaatggagtggtttcagccagaggtaaagtcagctagagacatctggtctggaacaagtcaaatggaagctcaagccaaaaatgaaaagagcttttccaaaatctgccaattctccatgctttcccatcgccactctttatcccaggttgaaaaacaaggtgcataata

SEQ ID NO: 68497 - DNA, 1055 bp, Homo sapiens
catgtgattctctggcagctacagggaacatttctttcctggcttctcccatgattctgatacggggagctctgggattggaacagtatcgattgttcttgtttgctatgcactcccttttcaaaataactgaatctactcctgtttgggtcgcataccaggaaagtaatcacctgttcctgagggtaaaaggaaatctgatccaaaaaaactctaccagcrttctatttccatattttggagcaggttttctggttttaataacgtaaagtcctcattacagtaaatgtttcactgtctcctgtggctcaaggggcaagcacggagggcggctctgccttcctctattgatttccagaaagacctcttacttcccaattgtccaggtagcattgtcaactgaggtgttgtttttcctcaggtatgaagaccctctacagctttgtatttttccattacagaaattcccatttgttttctctttatgcagcacatcccacaggggtgcaaaggctggatgggtgagtgctattatgtggggcagcgagccggcaaagcctcgccaggcgtctctgctgacctggagtgatttcataagtgttcagaattgtcctcggctgattttcactgtccctagctgttaaggctgcagtgatagccccatattaattatcagctccatcctcagctgtcatgctgccattcctacccacggcagctcctaaatctgggctgcccattagaattgcctgggaaggctgttaaaatctaactcctgagacctgctgaattgtaatctgtcagaggacaaggttcaggaatctttattttaaggagcttcccgggagatttgttagcacccagcccaacatgcgttctctgcccctaatggagtggtttcagccagaggtaaagtcagctagagacatctggtctggaacaagtcaaatggaagctcaagccaaaaatgaaaagagcttttccaaaatctgccaattctccatgctttcccatcgccactctttatcccaggttgaaaaacaaggtgcataata

SEQ ID NO: 68498 - DNA, 1055 bp, Homo sapiens
catgtgattctctggcagctacagggaacatttctttcctggcttctcccatgattctgatacggggagctctgggattggaacagtatcgattgttcttgtttgctatgcactcccttttcaaaataactgaatctactcctgtttgggtcgcataccaggaaagtaatcacctgttcctgagggtaaaaggaaatctgatccaaaaaaactctaccagcattctatttcmatattttggagcaggttttctggttttaataacgtaaagtcctcattacagtaaatgtttcactgtctcctgtggctcaaggggcaagcacggagggcggctctgccttcctctattgatttccagaaagacctcttacttcccaattgtccaggtagcattgtcaactgaggtgttgtttttcctcaggtatgaagaccctctacagctttgtatttttccattacagaaattcccatttgttttctctttatgcagcacatcccacaggggtgcaaaggctggatgggtgagtgctattatgtggggcagcgagccggcaaagcctcgccaggcgtctctgctgacctggagtgatttcataagtgttcagaattgtcctcggctgattttcactgtccctagctgttaaggctgcagtgatagccccatattaattatcagctccatcctcagctgtcatgctgccattcctacccacggcagctcctaaatctgggctgcccattagaattgcctgggaaggctgttaaaatctaactcctgagacctgctgaattgtaatctgtcagaggacaaggttcaggaatctttattttaaggagcttcccgggagatttgttagcacccagcccaacatgcgttctctgcccctaatggagtggtttcagccagaggtaaagtcagctagagacatctggtctggaacaagtcaaatggaagctcaagccaaaaatgaaaagagcttttccaaaatctgccaattctccatgctttcccatcgccactctttatcccaggttgaaaaacaaggtgcataata

SEQ ID NO: 68499 - DNA, 1055 bp, Homo sapiens
catgtgattctctggcagctacagggaacatttctttcctggcttctcccatgattctgatacggggagctctgggattggaacagtatcgattgttcttgtttgctatgcactcccttttcaaaataactgaatctactcctgtttgggtcgcataccaggaaagtaatcacctgttcctgagggtaaaaggaaatctgatccaaaaaaactctaccagcattctatttccatattttggagcaggttttctggttttaataacgtaaagtcctcattacagtaaatgtttcactgtctcctgtggctcarggggcaagcacggagggcggctctgccttcctctattgatttccagaaagacctcttacttcccaattgtccaggtagcattgtcaactgaggtgttgtttttcctcaggtatgaagaccctctacagctttgtatttttccattacagaaattcccatttgttttctctttatgcagcacatcccacaggggtgcaaaggctggatgggtgagtgctattatgtggggcagcgagccggcaaagcctcgccaggcgtctctgctgacctggagtgatttcataagtgttcagaattgtcctcggctgattttcactgtccctagctgttaaggctgcagtgatagccccatattaattatcagctccatcctcagctgtcatgctgccattcctacccacggcagctcctaaatctgggctgcccattagaattgcctgggaaggctgttaaaatctaactcctgagacctgctgaattgtaatctgtcagaggacaaggttcaggaatctttattttaaggagcttcccgggagatttgttagcacccagcccaacatgcgttctctgcccctaatggagtggtttcagccagaggtaaagtcagctagagacatctggtctggaacaagtcaaatggaagctcaagccaaaaatgaaaagagcttttccaaaatctgccaattctccatgctttcccatcgccactctttatcccaggttgaaaaacaaggtgcataata

SEQ ID NO: 68500 - DNA, 1055 bp, Homo sapiens
catgtgattctctggcagctacagggaacatttctttcctggcttctcccatgattctgatacggggagctctgggattggaacagtatcgattgttcttgtttgctatgcactcccttttcaaaataactgaatctactcctgtttgggtcgcataccaggaaagtaatcacctgttcctgagggtaaaaggaaatctgatccaaaaaaactctaccagcattctatttccatattttggagcaggttttctggttttaataacgtaaagtcctcattacagtaaatgtttcactgtctcctgtggctcaaggggcaagcasggagggcggctctgccttcctctattgatttccagaaagacctcttacttcccaattgtccaggtagcattgtcaactgaggtgttgtttttcctcaggtatgaagaccctctacagctttgtatttttccattacagaaattcccatttgttttctctttatgcagcacatcccacaggggtgcaaaggctggatgggtgagtgctattatgtggggcagcgagccggcaaagcctcgccaggcgtctctgctgacctggagtgatttcataagtgttcagaattgtcctcggctgattttcactgtccctagctgttaaggctgcagtgatagccccatattaattatcagctccatcctcagctgtcatgctgccattcctacccacggcagctcctaaatctgggctgcccattagaattgcctgggaaggctgttaaaatctaactcctgagacctgctgaattgtaatctgtcagaggacaaggttcaggaatctttattttaaggagcttcccgggagatttgttagcacccagcccaacatgcgttctctgcccctaatggagtggtttcagccagaggtaaagtcagctagagacatctggtctggaacaagtcaaatggaagctcaagccaaaaatgaaaagagcttttccaaaatctgccaattctccatgctttcccatcgccactctttatcccaggttgaaaaacaaggtgcataata

SEQ ID NO: 68501 - DNA, 1886 bp, Homo sapiens
tactttccccttcccagctgcatgtaggattccactgagcaacagactggtgatagccaggtgggtttcagtccttgtgcaagcatgaacttaggaaagctttcttgtaccttctctgagacacagtttcctcatacataaaatgtaaatataatacccagctggtggaattgttgggaaagttaaatgagttaattcaaataaagtgcttacaacagtgcctggcacacaataagcacgataaacattaggtggtagtggtggtggtggtggtggagttggtggacctggtacacagcagtgagagaaaagctaacccaatgacatctgacaatgaaagtccctgatgaggtacttgctcccaggaaaacttgaagragtacaatcaccttacagaaaaatcctgtgagctgtgacctagggtggcagagacctaagtgagctgctggggcctccttgacctcctgcagtcataccactgagacccctcccacacctaggccacctcagcttggtcctggagctgagcatctgctcatatccagttcaccttttccgaggagctcaggatacttttttaggatttccaggtcactttccatatcccactaaatgcctatgagagagaccagagggtaagactgtgctcattttgcagcaggaatattttctcaacattgatgggggaagtaacctgcggccatacttaggtacacagaaggagccaaattcaggctgcttatgctcagcccagtcatgcactcaaggcactgagtgatgctattgaccaagacagacccagcctctactcccatagagctcacattctggtggatataatattcatttccaaccaactaagaaagcaacaactgatgacaaaataaaacaaataaaaataaccttatcctctcaggattcccaacctgccacctggagagcaaggtccggtcctggtagcaaaagggcggagcaccttgcccatctgccattttgatctgaaagactcggactacataagtggccatcagcgcaacccagagctccgagggtccagtgggggagctctggatccaaacacccgggtgattgagttcaccactgtgggcataggagggaagaatctccggtgagttgcttaggtttacattgattgaattcacatcggtcctaaagaactctaaaagaattcagatagatgagctagacctattcctataagcaggctcgatatcctggggtttgacctgagttttagaggtttgactttagagaactgttacgttaagaaagctgaattctgtctccttagttttgccactgaggaaaatatggaagacacaaaagtataatccctgaccacctccttaaccacagaggatcattggcacagttgtgcccttggcagcattgttattccaaagtccagaaccctaccctgactgtggatcgctagaggagatggagttttcatttccacagtaacaaagtgctctgaacagttctgcttcccagatgggggactgggttggggccaggttctaagaaatttctcttaatcctcaatcccctgtcccactctcttctgtcaattctccccaccctggccaggacctttaccatcctaaacccaaccaatagcacctactccttctgctggatctctgaagaaattgaaagtctccagaaccctgcagcattcacatgccttacagaaaagggcttcatccaccctgaaaagaaagccgaggtatgtgcagatgagaaccactcaacccaaggcttagatcactctagccattgctgtgtagaaagtgtgccatagacagtaagtggaattaggaagaactgcctgagggtgtagtgcatcaatcaacaagtattta

SEQ ID NO: 68502 - DNA, 1886 bp, Homo sapiens
tactttccccttcccagctgcatgtaggattccactgagcaacagactggtgatagccaggtgggtttcagtccttgtgcaagcatgaacttaggaaagctttcttgtaccttctctgagacacagtttcctcatacataaaatgtaaatataatacccagctggtggaattgttgggaaagttaaatgagttaattcaaataaagtgcttacaacagtgcctggcacacaataagcacgataaacattaggtggtagtggtggtggtggtggtggagttggtggacctggtacacagcagtgagagaaaagctaacccaatgacatctgacaatgaaagtccctgatgaggtacttgctcccaggaaaacttgaagaagtacaatcaccttacagaaaaatcctgtgagctgtgrcctagggtggcagagacctaagtgagctgctggggcctccttgacctcctgcagtcataccactgagacccctcccacacctaggccacctcagcttggtcctggagctgagcatctgctcatatccagttcaccttttccgaggagctcaggatacttttttaggatttccaggtcactttccatatcccactaaatgcctatgagagagaccagagggtaagactgtgctcattttgcagcaggaatattttctcaacattgatgggggaagtaacctgcggccatacttaggtacacagaaggagccaaattcaggctgcttatgctcagcccagtcatgcactcaaggcactgagtgatgctattgaccaagacagacccagcctctactcccatagagctcacattctggtggatataatattcatttccaaccaactaagaaagcaacaactgatgacaaaataaaacaaataaaaataaccttatcctctcaggattcccaacctgccacctggagagcaaggtccggtcctggtagcaaaagggcggagcaccttgcccatctgccattttgatctgaaagactcggactacataagtggccatcagcgcaacccagagctccgagggtccagtgggggagctctggatccaaacacccgggtgattgagttcaccactgtgggcataggagggaagaatctccggtgagttgcttaggtttacattgattgaattcacatcggtcctaaagaactctaaaagaattcagatagatgagctagacctattcctataagcaggctcgatatcctggggtttgacctgagttttagaggtttgactttagagaactgttacgttaagaaagctgaattctgtctccttagttttgccactgaggaaaatatggaagacacaaaagtataatccctgaccacctccttaaccacagaggatcattggcacagttgtgcccttggcagcattgttattccaaagtccagaaccctaccctgactgtggatcgctagaggagatggagttttcatttccacagtaacaaagtgctctgaacagttctgcttcccagatgggggactgggttggggccaggttctaagaaatttctcttaatcctcaatcccctgtcccactctcttctgtcaattctccccaccctggccaggacctttaccatcctaaacccaaccaatagcacctactccttctgctggatctctgaagaaattgaaagtctccagaaccctgcagcattcacatgccttacagaaaagggcttcatccaccctgaaaagaaagccgaggtatgtgcagatgagaaccactcaacccaaggcttagatcactctagccattgctgtgtagaaagtgtgccatagacagtaagtggaattaggaagaactgcctgagggtgtagtgcatcaatcaacaagtattta

SEQ ID NO: 68503 - DNA, 583 bp, Homo sapiens
tagcaggccagattcagccagggcaccacagtttgctgccctctggtttcgttcatgacaaactagatgcaactttttttctttttttcttttttttttttttgagatggagtctcactctgttgcccaggctggagtgcagtggcacaatatcagctcactgcaacctctgcctctggtgttcaagcgattctcctgcctcagcctcctaagtagctgggactataggcatgcaccagcacgaccagctaatttttttgkatctttagtagagacagggtttcaccatgttggtcaggctggtcttaaactcctgaccttaaatgatcagcctcagcctcccaaagtgctgggattacaggcatgagtcaacttttaaaagtagagactagagcctgggagggatatgtggcaggtcagggatgatgggaggatcagagtcatccctgcaatccatgtgacttccatgtgccgcggcccacagtagaagccttgccacagtggtcccgggtggcaccacaggcgggaaggactgctgggggacacacaacatcagctctacgcccttcccagtttcacctca

SEQ ID NO: 68504 - DNA, 583 bp, Homo sapiens
tagcaggccagattcagccagggcaccacagtttgctgccctctggtttcgttcatgacaaactagatgcaactttttttctttttttcttttttttttttttgagatggagtctcactctgttgcccaggctggagtgcagtggcacaatatcagctcactgcaacctctgcctctggtgttcaagcgattctcctgcctcagcctcctaagtagctgggactataggcatgcaccagcacgaccagctaatttttttggatctttagtagagacagggtttcaccatgttggtcaggctggtcttaaactcctgaccttaaatgatcagcctcagcctcccaaagtgctgggattacaggcatgagtcaacttttaaaagtagagactagagcctgggagggatatgtggcaggtcagggatgaygggaggatcagagtcatccctgcaatccatgtgacttccatgtgccgcggcccacagtagaagccttgccacagtggtcccgggtggcaccacaggcgggaaggactgctgggggacacacaacatcagctctacgcccttcccagtttcacctca

SEQ ID NO: 68505 - DNA, 1246 bp, Homo sapiens
cccagatgaatagtgttatctgagaatcatgatgggatgggctgtggcacaggacccaggagcactgagtcccgctcatggccaggccactcccggtgggcaacatgtccacagagaacaatgttcagttactgagcatgcaaaatctgtaacccagcaggagggcagatgaggtgcaaagagaatgcctcatgctttgacgataggatccctggagccttgaagcatagtgggccagttgcctccttccctccatagcacaccccagatcttggatcttaccattgggagaaaaaygctcactggagtgtggcaaccagcaaggactgtacaaaagaggaagacaagacagaatgtttcccatccctcacacccccttgcatgacttcccctatgtgtcctccacgattctcctttgtgagaatccagagttccaaattaggaatcacagagcgggaatccagcaatcaggcagcatctcatagtctccccttcactccccagccttcgtgaccgaaaacaatgccttgatatttgaagagcaccagatatgtaccagtgccaacctgcaccacatcctgcagaccatagagagcggggggctgttcgtcgaggatgagaacaagttcatcttctgcaatgtcctggtgggccgccaagccaaggctcgtttcaagatcagcaacgtgggaaagatcacctgtgatgtcaacattgtagtcaggcctatctccaataaggtaagacgctcccaatggcccctggcccagcatggttcacataaagctggaaaaagggctctcagcatcctctgctctggagcctgtatgcgtgagtggaaattatctggccctgctggaagttatgtgaagtaaccgggggctttcccctaggccagtggtgatacatttgtcccagtgggtgtctcctccgggtacctttgtgataagtacgcatggacgagcaaaccgcattcctccattgaatgctcactatgtgcctaaaatagacaaagcatggtggggagaggctaaggtgagtgccagctccagacaggcctacctccagctgcatattctgctggtaagggagatttgggggcatcagattctgaggataaggtgaaatgatgagcatgttttagcccttcccatgtgacaagcactgtgctaagtgatttatatttactgcctccttttgccctcacaacaactcttccgactttgtattattatcccgattctac

SEQ ID NO: 68506 - DNA, 1246 bp, Homo sapiens
cccagatgaatagtgttatctgagaatcatgatgggatgggctgtggcacaggacccaggagcactgagtcccgctcatggccaggccactcccggtgggcaacatgtccacagagaacaatgttcagttactgagcatgcaaaatctgtaacccagcaggagggcagatgaggtgcaaagagaatgcctcatgctttgacgataggatccctggagccttgaagcatagtgggccagttgcctccttccctccatagcacaccccagatcttggatcttaccattgggagaaaaatgctcactggagtgtggcaaccagcaaggactgtacaaaagaggaagacaagacagaatgtttcccatccctcacacccccttgcatgacttcccctatgtgtcctccacgattctcctttgtgagaatccagagttccaaattaggaatcacagagcgggaatccagcaatcaggcagcatctcatagtctccccttcactccccagccttcgtgaccgaaaacaatgccttgatatttgaagagcaccagatatgtaccagtgccaacctgcaccacatcctgcagaccatagagagcggggggctgttcgtcgaggatgagaacaagttcatcttctgcaatgtcctggtgggccgccaagccaaggctcgtttcaagatcagcaacgtgggaaagatcacctgtgatgtcaacattgtagtcaggcctatctccaataaggtaagacgctcccaatggcccctggcccagcatggttcacataaagctggaaaaagggctctcagcatcctctgctctggagcctgtatgcgtgagtggaaattatctggccctgctggaagttatgtgaagtaaccgggggctttcccctaggccagtggtgatacatttgtcccagtgggtgtctcctccgggtacctttgtgataagtacgcatggacsagcaaaccgcattcctccattgaatgctcactatgtgcctaaaatagacaaagcatggtggggagaggctaaggtgagtgccagctccagacaggcctacctccagctgcatattctgctggtaagggagatttgggggcatcagattctgaggataaggtgaaatgatgagcatgttttagcccttcccatgtgacaagcactgtgctaagtgatttatatttactgcctccttttgccctcacaacaactcttccgactttgtattattatcccgattctac

SEQ ID NO: 68507 - DNA, 803 bp, Homo sapiens
tattgatccatgtcctctccaacacttggcattgtcagacttcttgatttttatcatttgaatgaatgggaaatggtctcattatgagcctattttgcattgccctgatctctgatcacaaataaggctgagtatttcttcatatgattactagtcatacaagttatcccttgcaggaatgccttttcatgccttttgctcatttttcaattatgatacttatattttgtgtgagttgttttattttttataaactcttctgttcatattatttgtctgcaaatatccttaccaaatttatagtatatctttttttttttttttttgaggrggacagagttttgctctttcgcccaggccagaatacagtgacacaatctcggctcactgcaacctccgcctcctaggttcaagagagtctcatgccccagcctcccaagtagctgggattacaaacatgcaccaccacacccggctaatttttgtacttttagcagagacagggtttcaccatgttggccaggctggtctcaaactcctagcctcaagtgatccacccacctcggcctcccaaagtgctgggattatgggcgtgagccaccatgcctggcctagtttatcttttctgttattaattttaatatcatcaagtttattaatcccttcttttatatgtattactttttgtgtcttatttttaactctttcctcccggaaagatgttcacttatatatttttaagacttgtttttttgatatttcagctcttggcccacctggattttatgtatgttgtgaagcaa

SEQ ID NO: 68508 - DNA, 803 bp, Homo sapiens
tattgatccatgtcctctccaacacttggcattgtcagacttcttgatttttatcatttgaatgaatgggaaatggtctcattatgagcctattttgcattgccctgatctctgatcacaaataaggctgagtatttcttcatatgattactagtcatacaagttatcccttgcaggaatgccttttcatgccttttgctcatttttcaattatgatacttatattttgtgtgagttgttttattttttataaactcttctgttcatattatttgtctgcaaatatccttaccaaatttatagtatatctttttttttttttttttgaggaggacagagttttgctctttcgcccaggccagaatacagtgacacaatctcggctcactgcaacctccrcctcctaggttcaagagagtctcatgccccagcctcccaagtagctgggattacaaacatgcaccaccacacccggctaatttttgtacttttagcagagacagggtttcaccatgttggccaggctggtctcaaactcctagcctcaagtgatccacccacctcggcctcccaaagtgctgggattatgggcgtgagccaccatgcctggcctagtttatcttttctgttattaattttaatatcatcaagtttattaatcccttcttttatatgtattactttttgtgtcttatttttaactctttcctcccggaaagatgttcacttatatatttttaagacttgtttttttgatatttcagctcttggcccacctggattttatgtatgttgtgaagcaa

SEQ ID NO: 68509 - DNA, 803 bp, Homo sapiens
tattgatccatgtcctctccaacacttggcattgtcagacttcttgatttttatcatttgaatgaatgggaaatggtctcattatgagcctattttgcattgccctgatctctgatcacaaataaggctgagtatttcttcatatgattactagtcatacaagttatcccttgcaggaatgccttttcatgccttttgctcatttttcaattatgatacttatattttgtgtgagttgttttattttttataaactcttctgttcatattatttgtctgcaaatatccttaccaaatttatagtatatctttttttttttttttttgaggaggacagagttttgctctttcgcccaggccagaatacagtgacacaatctcggctcactgcaacctccgcctcctaggttcaagagagtctcatgccccagcctcccaagtagctgggattacaarcatgcaccaccacacccggctaatttttgtacttttagcagagacagggtttcaccatgttggccaggctggtctcaaactcctagcctcaagtgatccacccacctcggcctcccaaagtgctgggattatgggcgtgagccaccatgcctggcctagtttatcttttctgttattaattttaatatcatcaagtttattaatcccttcttttatatgtattactttttgtgtcttatttttaactctttcctcccggaaagatgttcacttatatatttttaagacttgtttttttgatatttcagctcttggcccacctggattttatgtatgttgtgaagcaa

SEQ ID NO: 68510 - DNA, 803 bp, Homo sapiens
tattgatccatgtcctctccaacacttggcattgtcagacttcttgatttttatcatttgaatgaatgggaaatggtctcattatgagcctattttgcattgccctgatctctgatcacaaataaggctgagtatttcttcatatgattactagtcatacaagttatcccttgcaggaatgccttttcatgccttttgctcatttttcaattatgatacttatattttgtgtgagttgttttattttttataaactcttctgttcatattatttgtctgcaaatatccttaccaaatttatagtatatctttttttttttttttttgaggaggacagagttttgctctttcgcccaggccagaatacagtgacacaatctcggctcactgcaacctccgcctcctaggttcaagagagtctcatgccccagcctcccaagtagctgggattacaaacatgcaccaccacacccggctaatttttgtacttttagcagagacagggtttcaccatgttggccaggctggtctcaaactcctagcctcaagtgatccacccacctcggyctcccaaagtgctgggattatgggcgtgagccaccatgcctggcctagtttatcttttctgttattaattttaatatcatcaagtttattaatcccttcttttatatgtattactttttgtgtcttatttttaactctttcctcccggaaagatgttcacttatatatttttaagacttgtttttttgatatttcagctcttggcccacctggattttatgtatgttgtgaagcaa

SEQ ID NO: 68511 - DNA, 803 bp, Homo sapiens
tattgatccatgtcctctccaacacttggcattgtcagacttcttgatttttatcatttgaatgaatgggaaatggtctcattatgagcctattttgcattgccctgatctctgatcacaaataaggctgagtatttcttcatatgattactagtcatacaagttatcccttgcaggaatgccttttcatgccttttgctcatttttcaattatgatacttatattttgtgtgagttgttttattttttataaactcttctgttcatattatttgtctgcaaatatccttaccaaatttatagtatatctttttttttttttttttgaggaggacagagttttgctctttcgcccaggccagaatacagtgacacaatctcggctcactgcaacctccgcctcctaggttcaagagagtctcatgccccagcctcccaagtagctgggattacaaacatgcaccaccacacccggctaatttttgtacttttagcagagacagggtttcaccatgttggccaggctggtctcaaactcctagcctcaagtgatccacccacctcggcctcccaaagtgctgggattaygggcgtgagccaccatgcctggcctagtttatcttttctgttattaattttaatatcatcaagtttattaatcccttcttttatatgtattactttttgtgtcttatttttaactctttcctcccggaaagatgttcacttatatatttttaagacttgtttttttgatatttcagctcttggcccacctggattttatgtatgttgtgaagcaa

SEQ ID NO: 68512 - DNA, 803 bp, Homo sapiens
tattgatccatgtcctctccaacacttggcattgtcagacttcttgatttttatcatttgaatgaatgggaaatggtctcattatgagcctattttgcattgccctgatctctgatcacaaataaggctgagtatttcttcatatgattactagtcatacaagttatcccttgcaggaatgccttttcatgccttttgctcatttttcaattatgatacttatattttgtgtgagttgttttattttttataaactcttctgttcatattatttgtctgcaaatatccttaccaaatttatagtatatctttttttttttttttttgaggaggacagagttttgctctttcgcccaggccagaatacagtgacacaatctcggctcactgcaacctccgcctcctaggttcaagagagtctcatgccccagcctcccaagtagctgggattacaaacatgcaccaccacacccggctaatttttgtacttttagcagagacagggtttcaccatgttggccaggctggtctcaaactcctagcctcaagtgatccacccacctcggcctcccaaagtgctgggattatgggcgtgagccaccatgcctggcctagtttatcttttctgttattaattttaatatcatcaagtttattaatcccttcttttatatgtattactttttgtgtcttatttttaactctttcctcccggaaagatgttcacttatatatttttaagacttgtttttttgatatttcagctcttggcccrcctggattttatgtatgttgtgaagcaa

SEQ ID NO: 68513 - DNA, 732 bp, Homo sapiens
agaaaaaggtgagcttagaaatgaaatgtttattgtagttaaataattagttatattattttgtcatattactatgtaattcctaggaagcaggactgagatgtaataaaagaatgtggacatgtgaccagtaagatttcagaaatactacagactagggactgctctttgcttttcattctatttttgaatgagaatgccaactgcatttttcttaccttcatctcgacattgtgtwttggggatggaggagcaaataatgtgtttctttagtccacaggtcgagaggaaccatacttgaagaaacatacctgaagggtttcatccatatgtgggcctgatttggatgataaaatcctgcatcttgagcctgatcttgatgctgcctgtgttctgatgccatcaggagttgagagtctaggggttttagaaagggtgaatgtattttcccataggcaaggaacataatcaatggccaaaatgtgcactgtgacagattaaaggttgctacaaattctctgatacccttccattaagaggtagggcagatattccctcccctcaaatctgggtgggctccatgacttgctttgatcaacagaaaacggcagcagtgatgctgggccagttgttggatccaggccttaagaaccaacaacttccacttaagttctcttggaacactgagtccctgactaccctaatatcatgttggaaaggctacatgtaggc

SEQ ID NO: 68514 - DNA, 2816 bp, Homo sapiens
gagagaacatcatgccttctcttgtctaaagtggacatgtattttcacgaggatagggcagggggtctcctggtaaccagtccccaaagccagggccattccctctccttccaccacactccttaaccccctttcttcccaataagagcagagaagtaaggctggatttgagtcattagagttggaaaggatgttagagatagagtggcctccatggtaaactgaagaaaagcattttcaactccctgcccactggcgggagccaagatccttctgtccagccttgccctgggcagggctctcgggtaatggcagtatccccactgccctcccagtgccacccgcaccgtgaggcaggcggaggccagctcctccgagcttagctgtgcctgaagacctctcacacgccagctctgctcctgcccgtgacatggaaggaaacacacgcagacctttgacagccacaggcacctcctgatcctctcgactctccctgcatgtcacatcactcccaccgcccaggcctcagaaaggactaagtggggaaggaagctgaatttgtctcccacacgtgactgcctttgctcatgttctggggaagactatcggccttctagagggcacctgtctagtcagtattcctcaagcgtaagggcattgggaaagttctgccacttcacaaattaccaacggtctccactcccagtaactggtcttacagccaggaagctggccccaggtttttgtagtggtgactagctgaagactctccccaccctcataccattatagagaactatctttaaacaagagttggcactgtagttagatagtatggaactggcagccccagaacaacctagaaaaatcaggaaaaaaaatgcatgggttttaaaatgaccatacagtgggtgttttctatatgagtagttaaaggactttatgtttggtgttggttcatgatttcctcataagggtgaggctcaaattattatttgctctcagtctgttttgagtatcttgtgctattggcactggcaaggctctggggcaggcacacatytgggacagcctcactcttggcccttctagcatggatggtctcatttatatatggagatgcacacgtaaatcaagaatcctgctctactggaaatgcacttttacctccaaattgtccccttttataggaactgtaccttcacttccatacttataggacaggattttgtgccacgtgacaacaccacattatcactactaaccccagtcacaggggactggttcagggtgggcagcttctcaaatagaatcaatggctccctttcttgggcgttttcgactttagaccaagggagtttccaggagctgacatagtaaatcataaagcttagggcagagagcagctaagactctgcccagttcctaacgggtcattaactagtacccatcgcggcctgggggttggagacccctgcattaatgtatatacacatttatatcaatggacagagagaaatgcagttatcacttaagagggctgaaggagcaaatgaagtttctgtttctgatttattttagggttgggacttgggcattgcgtaaaagagtccacagggggagactctacacatttgcataatgccagctaactactcatatagaaaacacccattgtatggtcattttaaaacccatgcatttttcttcctgatttttctaaggtgttctgggactgccagttccataccatggaagggagggagggaggggaacctacagatacagggatgagaaactaaaaaacttgttttggatttcttaagatacctcagttcccttatcataattcactttttccttatgctagtttgagctggattactagtgcttgcattcagaagaatttaatatatccactgcaacataatgcattctataacagagcgcttccagagtgccactggaacttccaaatggtagggacgtagcatagggaagaacaaaaagagctatactcacatagtacctactgtgtgccaggtacatgcattaatgcagaggtccccaaactttttggcaccagggaccgacttcatggaagacaatttttccacagaccagagggtggagaggatggttgtgagattattcaagctcgttacatgtgcactttatttttattattattacattgtaatatataatgaaataattatacaactcatcatagtgtagaatcagtgggagccctgagcttgttttcctgtaactagacggtcccatctgggggtgatgggagacagtgacagatcatcaggcattagattctcataaggagcgggcagcctagatccctggcatgtgcagttcataatagggttcgagctcctacgagaatccagtgctgccactgatctgacaggaggtggagctcaggcagtaatgctcgcttgccccccactcacctcctgctgtccggcccagttcctaacaggccacgaactggtacccatcactgcctaggggttggggacccctgcattaatgtatatacacatttacataaatggacagagaaaaatgcagttatcacttaggagggctgaaggagcaaatgaagcttctgtttctgatttattttagggttgggacttgggcattgtgtaaaagagtccacagggggagaaactgaagaatgaagagatggtgtagaccctaagactctacaatgtctagggcctctggggaatagcattaagagttggctctgaaaaggacagggaggaaaggcttctgcttcacttaatttcaca

SEQ ID NO: 68515 - DNA, 892 bp, Homo sapiens
tgcattatgctagtactgtgagtcaagatttattaayaatgccacttgggaaggtacttgaagtcacaggatcaactgtatctgcttgttttgttagtctggattagttgattctcacgtttctgaaagccgatataattaagctgctctcagcaagtctaggataagccaaagatatatttcatagaagcccaaagaaagagggcaggaatataaagtcatgagacttatttctacaaataccactcaaaagcccctgaaagtgactcatatttaacttccaaaattcagtgtgttcactcaataagcatttgagaactcactgggtacatagtaaacaataatatcagaaaagaggaaaatcaattcaaatccatatggatataattaaattcctagtattcatttttttaattcaatttcttgggtaccaactatagaccatgtgctcttctagctgtggactggagtgggaggggtgggcaggagtaattatgataataaacaaaactagcatgctctcttccttcctcaagcttacagtccagctatgctacagacagcagaggacacaaggtaaatatgacagaatcctttcaaaagagtttgcaatctactggaaaggtagtagatacataatgacaaggtagaacatgctttctcttcttaaccagaattatcatcaaaatcacttggaaggctttttcaaaattcatatgcctaggtttcattccacacccaaatgaatgaaaatggctggcagtggagcctgagaatgcacattttgaaacactgtgttcagatgattctggcgtggaccactggttaggagctccgcgtttagaaggtgtttgaatttctcacctcagttttgctctgacttcattataat

SEQ ID NO: 68516 - DNA, 839 bp, Homo sapiens
aaactaaaaacatatagttctctaccatctgattcagcaattccactactgggtatatgtcgaaaagaaagggaatcaatatatcaaagagttatctgcatgcccatgtgtattgcagcactattcacagtagcgaagatatgcaatcaacctaagttctcatcaatggatgggtaaataaagtaaatgtggtatatatatatatgcaatggaatattattcagccataaaaagaatgaaatcctgtaatttcctgcaacatggatggaactggaggtcattatgttaaataagccaaccacagggagacaaatrtcgtatgttctcactcatatgtgggaactaaaattgtggatctcatgaggatatgcagtagattggtggttactagaggccaggaaggagagagtggacaaagtagggaaaaggatataaatgggtttattaccattgaaccttacacttaaaaatggtaaaaatggtaccttttaaaatgttgtttttagaaaaagaaactttcccgtaaccagtccctggtacactcctgccctcatcctctgggagaccgtggtcctgaggtctcaaagtggttccctaaggacccaccagaggcgttgcccagaagacagagacctttccagcgaatgcattgctgactgttgaaacttctccactgatttcactcctcaaaaaaagaaaaaaaatatgtttctgaattttgcaagcctttaagatgtaaatccttgcactgcattttcttatagcccaaattcatctgaagccttgggttgggagattgtttctgtacattaaataggggttaactctgagatcctgca

SEQ ID NO: 68517 - DNA, 889 bp, Homo sapiens
tttggatgtatggagtatagaagtatctaacttgggttcaaatcccagcttagtttgaatttcctcatcagttaaataggaataatagttaactgggtcatctgacttaactgagttacctcatcagttaattgggaataatatgagtatctccttacaaggttattatgacattaattgagatgtggtgtgtaaagcacwtagcagaggacctggctcataccacaggtccagttaatcttttttctttctttttttttgagatggagtctcactctgtcacccaggctggagtgtagtggcataatcttggctcactgcaacctctgcctcccaggttcaagcaattctcccacctcggcctcccgagtagctgggattacacgcacacaccaccatgctcggctaatttttgtatttttagtagagacatggtttcaccatgttggccaggctggtctcgacctcctggcctcaagtgatccgcccacctcagcttcccaaagtgctgggattataggcgtgaaccactgtacccggcccagtgaatcttaattatcattattattgtcattaataatccatcctctacctgattatcagtttttactgtgcttgaacccctctttgatcactttccaggtttaggtttccctatagaggcattgttctgccctgtaatataattgtttgggcacttgtcatattaccattattagagttataagctccttgatagcaggaatcaggtctaattcatctgtgtatttcatgcagtgcctcatctgtgctaattataggtcaacccctgctacaaaagtctccaagatactccacagcccactgattgagatccaggctcctatcttcactttggccccaaatatgc

SEQ ID NO: 68518 - DNA, 889 bp, Homo sapiens
tttggatgtatggagtatagaagtatctaacttgggttcaaatcccagcttagtttgaatttcctcatcagttaaataggaataatagttaactgggtcatctgacttaactgagttacctcatcagttaattgggaataatatgagtatctccttacaaggttattatgacattaattgagatgtggtgtgtaaagcacttagcagaggacctggctcataccacaggtccagttaatcttttttcttyctttttttttgagatggagtctcactctgtcacccaggctggagtgtagtggcataatcttggctcactgcaacctctgcctcccaggttcaagcaattctcccacctcggcctcccgagtagctgggattacacgcacacaccaccatgctcggctaatttttgtatttttagtagagacatggtttcaccatgttggccaggctggtctcgacctcctggcctcaagtgatccgcccacctcagcttcccaaagtgctgggattataggcgtgaaccactgtacccggcccagtgaatcttaattatcattattattgtcattaataatccatcctctacctgattatcagtttttactgtgcttgaacccctctttgatcactttccaggtttaggtttccctatagaggcattgttctgccctgtaatataattgtttgggcacttgtcatattaccattattagagttataagctccttgatagcaggaatcaggtctaattcatctgtgtatttcatgcagtgcctcatctgtgctaattataggtcaacccctgctacaaaagtctccaagatactccacagcccactgattgagatccaggctcctatcttcactttggccccaaatatgc

SEQ ID NO: 68519 - DNA, 889 bp, Homo sapiens
tttggatgtatggagtatagaagtatctaacttgggttcaaatcccagcttagtttgaatttcctcatcagttaaataggaataatagttaactgggtcatctgacttaactgagttacctcatcagttaattgggaataatatgagtatctccttacaaggttattatgacattaattgagatgtggtgtgtaaagcacttagcagaggacctggctcataccacaggtccagttaatcttttttctttytttttttttgagatggagtctcactctgtcacccaggctggagtgtagtggcataatcttggctcactgcaacctctgcctcccaggttcaagcaattctcccacctcggcctcccgagtagctgggattacacgcacacaccaccatgctcggctaatttttgtatttttagtagagacatggtttcaccatgttggccaggctggtctcgacctcctggcctcaagtgatccgcccacctcagcttcccaaagtgctgggattataggcgtgaaccactgtacccggcccagtgaatcttaattatcattattattgtcattaataatccatcctctacctgattatcagtttttactgtgcttgaacccctctttgatcactttccaggtttaggtttccctatagaggcattgttctgccctgtaatataattgtttgggcacttgtcatattaccattattagagttataagctccttgatagcaggaatcaggtctaattcatctgtgtatttcatgcagtgcctcatctgtgctaattataggtcaacccctgctacaaaagtctccaagatactccacagcccactgattgagatccaggctcctatcttcactttggccccaaatatgc

SEQ ID NO: 68520 - DNA, 889 bp, Homo sapiens
tttggatgtatggagtatagaagtatctaacttgggttcaaatcccagcttagtttgaatttcctcatcagttaaataggaataatagttaactgggtcatctgacttaactgagttacctcatcagttaattgggaataatatgagtatctccttacaaggttattatgacattaattgagatgtggtgtgtaaagcacttagcagaggacctggctcataccacaggtccagttaatcttttttctttctttttttttgagatggagtctcactctgtcacccaggctggagtgtagtggcataatcttggctcactgcaacctctgcctcccaggtycaagcaattctcccacctcggcctcccgagtagctgggattacacgcacacaccaccatgctcggctaatttttgtatttttagtagagacatggtttcaccatgttggccaggctggtctcgacctcctggcctcaagtgatccgcccacctcagcttcccaaagtgctgggattataggcgtgaaccactgtacccggcccagtgaatcttaattatcattattattgtcattaataatccatcctctacctgattatcagtttttactgtgcttgaacccctctttgatcactttccaggtttaggtttccctatagaggcattgttctgccctgtaatataattgtttgggcacttgtcatattaccattattagagttataagctccttgatagcaggaatcaggtctaattcatctgtgtatttcatgcagtgcctcatctgtgctaattataggtcaacccctgctacaaaagtctccaagatactccacagcccactgattgagatccaggctcctatcttcactttggccccaaatatgc

SEQ ID NO: 68521 - DNA, 912 bp, Homo sapiens
aatggcattgggacttcgttttcaacttcagattcaacccagttcctctaatcagctgcaggtatatctttattggtgaaaagaaaatgtcagaatttgctcatgagagtttggggtggaagggaaaaataagagtcctgctgactccccaggatgaaggctgaagacgggagaaagcctgaggggaggaggaaagaggcccattttaattggacagctttttccccccttttattcttcttgtttttaagttccagtcttggatcctagaaattacaggctccttcagcatcgcctctgcggttggaaaaaatgcttatttcacttttaaaacaaacaatggaaagttccttttaaaggaaaaatcttattagcccaagtccaaggagatctgctgagagtcagatctgctgggattgcctactgggcaaactgggcctcacagggtgcagccccaagacaaggtctggccgacccccacccaagggctcccttctcagaagaagaacccacccctccccgcagagcagcatgcagaagacctcccagtgaacactcrcaggaggaaaccgctcagacatgaaagggaggagaatatcctttacccaaataaacagccagaggaagatgcagagggaagcgagtccatcagacaaagccacaaattaagatcacaagagggcttgggattcgggctctgtctttaaaacatcttccaggaagctgcccctggggcaaccctgtcatcatgctgggctcgagtggcccttccagtgggcatctgcgcatgtgctgagtcactggtgacatagagttggcgggagcctgagaagatgggaatagaggtgaaataggccatgggttagggtcaaggatgtggaatggggcttgtggaaaggaggagatggagcc

SEQ ID NO: 68522 - DNA, 533 bp, Homo sapiens
catcccataagtggcagatccttgtattcatttgctataaggagaactcatacatgactacatgggagggtgaaggcagaagaggtgggtacaaattgctgacattgtggggaaagttttggatgggaaatttgaaggttgacctaagttgcaacagatatcactacaccttatgaataaatatttcaattcagtaaagatgtatgaaatcctgctatatccaaggtgctttggtgacctcctgctagctttaggccagggcagatcttactggcctaaagmcaggaaggttcacttaatcatgtataaagaaatgactgactgagcacctactgcctgctgggatcagtgccccagaccttgcgagcatcattttatttagtccttattatgatcctaattttccagcagaggaaactgaggcacatacaagttaagtctcctcttcaggtaacacaaccagtggaagatcagagacttcaatccaggaaggctgacttcagagaccatgctcacaggtgctctgtttgctt

SEQ ID NO: 68523 - DNA, 642 bp, Homo sapiens
aagaaatggaggcacaaatgcacagttattgtttttcttgcaactgtgtacgtggggggcattaacattcacccaggagctgctgaaatccgctcaaccagaacaaggctggtgaggagagaactgaccaaatttgtttacagggggctaatctggctctgtctctcactccacacagcctgggagaaagtctaattacagcctgacagcccagagtgtctcatgggaagacgaatcttgaataaaagtatgaaaatagacttgaatggtgtgtgtgtgtgtgtgtgtatttgtttcctggtcctgcagttctaagagggatttctgagataaggattatataagcctaaggttgcctactggaggaggcagtggagataagctaacccttaggtgtggaccctgaagtccggagaagtcacatgactgtcccaagttcctgcaatggggtcttgatacaggttagcataagaatccaggtgcctractctggagattctgagttccctccggggagtccccaagggcttccccttgtgtggcaggtgcatggtgttccaggtcctgggagttggtctctaacctggtttcttggcttctgatcccaactccccgatccctgcccctcactgcatcctccaa

SEQ ID NO: 68524 - DNA, 531 bp, Homo sapiens
catgatcaccaagtaaatgttattaaagtgccacataaccttacaaaatatgccgtccactctggctttaacttaactctgaagctacattgtcaaaccattgatctcattcataaggcaggcatgggaaggcatgtaaatcataataacagctgataattgttacctgccaagcactgtttcaattacatgtatcaatctttggctctatgaaatagatactattattctttycacaatcagatgaagaaactgaagcatgatgcaagctcacagagtagttagcagcagagataagaagccagatatttgaatccagatatttgaatctgaagtcttaaccattatgctatataccatcttacacaggggatgtactggttgaagtcaaacatggcatgaatagatcacaccgtaatggaagtcatcaaagaaagaggtcatcagagtatacagcaaggaggattccaaaggactgaccagactattagctagagacataatgagagaaaagtatgtctgctagtggta

SEQ ID NO: 68525 - DNA, 961 bp, Homo sapiens
  misc_feature (1)...(961): n = A,T,C or G
atatgtgttaagcataytctgtagaatttgcaatggcacaaaatacaactgctaataattttaaacatgtgattcttaccaatcaaatgttttataacactgaaatagtatttgactctgcgtttttactgtcccctgaagagcataaatattattggctataaaattgtcctaaacccaatctgggttattactgacataaatatttagacttgcagaatattcttttatgccttaaattttcctatttttccccagcaagaatcagaggaatgagcagtaatattaatctaaatattctggagttatgtttctgccaaaaaataataaagaaaattggatttctactcaaacaaaataaagtgaaataaaatgactgaaatagtttccatcctttataatctcccattgtaaagatattatttacattttatatagtaatgaaaaatgaacaatttatatggttagaaaaactcatgaattcagcataatgaaactgtcaagagaaaataaatggagaaattattccctagtgatcaattattctctaaaactgtgaaagatcccaaaggtaacataaatgtgaactatgttaataactctggtgagggttttggagagaatatatgcagaaatgaatagcagaattgttattgcaagttgccgataattgggttgtgaataaagtggattatatgtttctttctataattatttntatagttctagtgcagtatggaagactacctgcaatgggaggagatagttagggttatctaaactagatccaatacagcttttcagtttgcccctatgaactacctggataacaatgccagctctatcttaattcccattagttaagtctgggattcagcaggcttttctataaaacatggaggaagttttattttcactgaagctctgcctttatagaatacttatttgattaaatgaggta

SEQ ID NO: 68526 - DNA, 1388 bp, Homo sapiens
gtctttgaaagactttggctgccatcaaaggtaaggctactcccagattatgaggtagtcagatctaagaatgaatactcagtgaaccctggaaattcaaaaattcctttggttctattgtgagaaactcaatagctgacaacttgctggagatcatatgaatgctttaaataaactgaatgacaacagggagtatttctctagtcttttgaatgtgtttttcttttgattgatctaatgatggtgctgctaaagacaaatctgaactgctgaagccaaatataaatgggaagtctgttttggtatataaattaggatattcatcaacaaatgctgtccagaaagaaagcagtggaagaataatattttattcataaaatgtatggggccattcatgctgttcaggccattcaaattggcaaggggccttctagtacaccattctttacttgtcactatctctaattttttttttatttaagttctgagatacatgtgtaggatgtacaggtttgttacatagttaaacgtgtgccatcaggggttgctgcacccatcaaccttatcttcatccttatccttttttaaaaaaattttgattatcatctaagtttaatataaatatatatgtttgaaagagtaataaaaaaggaagaactgaattgcatccatagcaggacaagtttcctcatacgttaaagaggtgttcagaaaattccatacagtatctgctaaataaacatgtttcgcagcttagcaaagattatatgatagcagcatccatgatttgaagtaaaacagcatttgctttcttctgctggaggtcgttgctcggggcgatgtgcatgttcttagacctacagccttaaggaagggcttgggggtggctcagtgcatggccccagtgcagacacttccaaaccccaaacaatgaatcaaccaaccaaacacacaaacatcaaacaattgtctcctttgagttcctcttgaccgaatggaggctcagcaaggactgctgtagaaggtacattaacagattttggaatgaggaaaataccttaatacctaggtattaagcctcgcatgcattagctatttttcctgatgctctccctcccccmacccacaataggccccactgtgtgttgttcccctccctgtgtccatgcattctcattgttcagctctcacttataagtgagaacctgtggtgattggttttctgttcctgcattagtttgctgagtataatgacttccagctccaaccatgtccctgcaaacgacatgatctcattcctttttatggctacatagtattccatggtgtatatgtacattttctttatccagtctaccactgatgggcatttgggttgattccatgtc

SEQ ID NO: 68527 - DNA, 606 bp, Homo sapiens
acacttcccccaagggcaaagccattatcacagggacagaatatggcacactacaaatcagtgcagctcacagcagtccctggttaattctgaggttccctggggagagggatagctggaagaacagggaatgtttgagcccagattgcaattctaaggcctctctagcctaggcttattaatacctatgggacagaaactagatcctaggttttcatccacctcttcagatagacattactagcaaaagcaactgttgtcctacaagaataaaaagcaaagatggctgggtgcgatggctcatgcctatcatcctagcactttcgtaggccaagggagaccagcctggaaaagaaaaaaattagaaaattatcyggctatgatgttgtgcgtctgtagtcccagctagtcaggaggctgaggcaggagtatcacctgagcccaggagattgaggctgcattgagtgtgattgtgccactgcactccagcccaggcaacagagcaagatcctgcctcaaaacaaacaaacaaacaaacaaagcccagcaaacacataagggaaattcccaggcatctgaggagtgtaaatataatgaaaggcagca

SEQ ID NO: 68528 - DNA, 539 bp, Homo sapiens
ccaccgtgcctggccaatggcactttctataagcatagtagcagccgtatatgttggtaggtcgtttgtatcgctaccgatggcagtggcggcccaactgcagcagcagccgcagggatgccagttgcagtgagggaggcgtggccagggctgtgtgctcagtggagccagtgggggctggaaacaggcagaagccctgacccctaccgagttggtggggcgggaaccctgtgctcccgggcgcagctgcccagccatggctccagacccaggtatccctgcactctcgggggcccaggaagcctccctgccctgtcaggctcagaaagcctgctccctctctcttgtctctccctgcttccgrtgcccactctgatcttgaagcaaagttgaagccgagcctgggcgctgtcgtgacctagccaggtgtgcacacactcagggccgcagtgacacatcatccccccctggccttctcagccccctctgaaacttcaggcactgacgaactctgagagggaggcccgggggctagggga

SEQ ID NO: 68529 - DNA, 763 bp, Homo sapiens
  misc_feature (1)...(763): n = A,T,C or G
gaaaannnnnnnnnnnnnnnnnnnnnnnnnnnnnnnnnnnnnnnnnnnnnnnnnnnnnnnnnnnnnnnnnnnnnnnnnnnnnnnnnnnnnnnnnnnnnnnnnnnnatacacacacacacatacacacatatgtatgtgcatatataaataaaacttttatatatatacacacacaccaacatatctacacacacacacacacacacacacacacacatatatacacacatatatatactcaccacattttctttatccactcatcattgcttttggggtcttagtcataaattctttgcctaggccaatgcccagaagaattttatgtaggttttcttctagaatttttatggtttcaggtcttagatttaagtctttaattcatcttgagtcaatttttgtacattgtgagagatagggatccagtttcattctctacatgtggctatcaaattttcccagcatcatttaatgaattggatgtcattttcccaatttatgtttttgtatgyttcatcaaagatcatttggctgaagtatttggctttatttttgggttctctattctgttccattagtctatgtatttacttttataccagtaccatgcttttggcatcttcgtcatgaaatctttgcctgatcctatgtccagaatggcattgcctaggttgtcttccagggtttttatactttgggattttacatttaagtctttaatccatcttgagttaatttttgtataaggtttaaggaaggggtc

SEQ ID NO: 68530 - DNA, 1341 bp, Homo sapiens
gacgcaaatgcacttatgcttgcctagttcttggaaataatatttttatatacaaagaatcaggatcatcaaatcaccatcttcatcacttcaattttcttaagcatgatgacagcctcgtcactgtcctttaatttgaaatttgttaactgtcttctaatttgaaatttgttaagcatgagcatatgcttaagtgctgatatctttcatttgaaatttgtaaaattataactgggacgaggaggtctttagaaaatactgtaagaatgttagatattttgtaggaatgtgagattaaattctctaacacaagttttgagttaaaaaaaatcctcatttcttactgargaatttaaaactggttatgtatttacatatatattttaaaattacctacactatgaaaagttacctttagtatttatgcattgttttatgaacataaaacaagcgaaactgagtatgttgaatgaaaatttagaattgaaacatcccattcttgatgaatatgaattactaaagttttagtctaaaatgactagatgatataatgatatatagcttgagaactgataatagcaagtaaatgaaagtcaatttattcagagaattgaatgggaaactaaaaccatttaagccttttctataaaaaaccatcagctttatgaatcaccaaattaaagaataaatatactaagataaaagtttccccattatattacagagaaaaccatgttctgagctatggacttttatacctggatgtctaatctgaggccatcaaaagaactcactcatagatcagtttgcctcatttcatggtctgccttggattcccccacacccactgatccaaagtctgtggaatagggaggcaccttccagcaaagaaggcagacatgaaagtgtacattgtgatctctctgttacgaagttgaagaactggccaaactgatgtatgttaataggaatcaaaacaggggctgcgtgtggaggggtggacgatgttatttgaaaagttacaggacagattttctgtgttaatggacatgagccatacattgagagggctgctggctactgaaagaaatataaaattttaaaatttctgaaatcatgcagttaacatctgcacacttcactatattttaagtttttgttaatataaaagaataagaaaacagaaaagtattactgttaaacaataatagagaaatgtatactttatttacaaatttctccctctagctgatcatacagttgaccagttcagggtgcccgctgctggttggatgccaggcggaatgtcagggtgttctctggtgtctgttgtggctgtgg

SEQ ID NO: 68531 - DNA, 1341 bp, Homo sapiens
gacgcaaatgcacttatgcttgcctagttcttggaaataatatttttatatacaaagaatcaggatcatcaaatcaccatcttcatcacttcaattttcttaagcatgatgacagcctcgtcactgtcctttaatttgaaatttgttaactgtcttctaatttgaaatttgttaagcatgagcatatgcttaagtgctgatatctttcatttgaaatttgtaaaattataactgggacgaggaggtctttagaaaatactgtaagaatgttagatattttgtaggaatgtgagattaaattctctaacacaagttttgagttaaaaaaaatcctcatttcttactgaagaatttaaaactggttatgtatttacatatatattttaaaattacctacactatgaaaagktacctttagtatttatgcattgttttatgaacataaaacaagcgaaactgagtatgttgaatgaaaatttagaattgaaacatcccattcttgatgaatatgaattactaaagttttagtctaaaatgactagatgatataatgatatatagcttgagaactgataatagcaagtaaatgaaagtcaatttattcagagaattgaatgggaaactaaaaccatttaagccttttctataaaaaaccatcagctttatgaatcaccaaattaaagaataaatatactaagataaaagtttccccattatattacagagaaaaccatgttctgagctatggacttttatacctggatgtctaatctgaggccatcaaaagaactcactcatagatcagtttgcctcatttcatggtctgccttggattcccccacacccactgatccaaagtctgtggaatagggaggcaccttccagcaaagaaggcagacatgaaagtgtacattgtgatctctctgttacgaagttgaagaactggccaaactgatgtatgttaataggaatcaaaacaggggctgcgtgtggaggggtggacgatgttatttgaaaagttacaggacagattttctgtgttaatggacatgagccatacattgagagggctgctggctactgaaagaaatataaaattttaaaatttctgaaatcatgcagttaacatctgcacacttcactatattttaagtttttgttaatataaaagaataagaaaacagaaaagtattactgttaaacaataatagagaaatgtatactttatttacaaatttctccctctagctgatcatacagttgaccagttcagggtgcccgctgctggttggatgccaggcggaatgtcagggtgttctctggtgtctgttgtggctgtgg

SEQ ID NO: 68532 - DNA, 1341 bp, Homo sapiens
gacgcaaatgcacttatgcttgcctagttcttggaaataatatttttatatacaaagaatcaggatcatcaaatcaccatcttcatcacttcaattttcttaagcatgatgacagcctcgtcactgtcctttaatttgaaatttgttaactgtcttctaatttgaaatttgttaagcatgagcatatgcttaagtgctgatatctttcatttgaaatttgtaaaattataactgggacgaggaggtctttagaaaatactgtaagaatgttagatattttgtaggaatgtgagattaaattctctaacacaagttttgagttaaaaaaaatcctcatttcttactgaagaatttaaaactggttatgtatttacatatatattttaaaattacctacactatgaaaagttacctttagtatttatgcattgttttatgaacataaaacaagcgaaactgagtatgttgaatgaaaatttagaattgaaacatcccattcttgatgaatatgaattactaaagttttagtctaaaatgactagatgatataatgatatatagcttgagaactgataatagcaagtaaatgaaagtcaatttattcagagaattgaatgggaaactaaaaccatttaagccttttctataaaaaaccatcagctttatgaatcaccaaattaaagaataaatatactaagataaaagtttccccattatattacagagaaaaccatgttctgagctatggacttttatacctggatgtctaatctgaggccatcaaaagaactcactcatagatcagtttgcctcatttcatggtctgccttggattcccccacacccactgatccaaagtctgtggaatagggaggcaccttccagcaaagaaggcagacatgaaagtgtacattgtgatctctctgttacgaagttgaagaactggccaaactgatgtatgttaataggaatcaaaacaggggctgcgtgtggaggggtggacgatgttatttgaaaagttacaggacagattttctgtgttaatggacatgagccatacattgagagggctgctggctactgaaagaaatataaaattttaaaatttctgaaatcatgcagttaacatctgcacacttcactatattttaagtttttgttaatataaaagaataagaaaacagaaaagtattactgttaaacaataatagagaaaygtatactttatttacaaatttctccctctagctgatcatacagttgaccagttcagggtgcccgctgctggttggatgccaggcggaatgtcagggtgttctctggtgtctgttgtggctgtgg

SEQ ID NO: 68533 - DNA, 612 bp, Homo sapiens
tgcataaatctatagattatagatttgttcaccatgggagtcctatacagaataggtacactctgctaaaaacatcctataagtaaggactctttcatgttcagatccaagtaatgtgcttattaaaacacatatcaatgtgttttaaaaaacatgtcaacagcatatttttaagagagttttactggaccacttttttcctccaagatttgtctccaaggtaaagggaaaaaaaatacatttcagatccactactaattgttatctaagtgatcgctgcttagaagttttgttgtttgtgtgtcttttatgtgtttttttttkactcttgtaatttcttttttttcttttttttgacggagtctcactctgtcgcccaggctggagtgcagtggcgccatctctgctcactgcaagctccgcctctcgggttcacaccattctcctgcctcagcctcccgagtagctgggactgcagacgcccgccaccacgcccggctaattttttctatttttcagtagagaaggggtttcaccgtgttagtcaggatggtctcgatttcctgacctcgtgatccgcccacctcggcctcccaaagtgctgggatttac

SEQ ID NO: 68534 - DNA, 612 bp, Homo sapiens
tgcataaatctatagattatagatttgttcaccatgggagtcctatacagaataggtacactctgctaaaaacatcctataagtaaggactctttcatgttcagatccaagtaatgtgcttattaaaacacatatcaatgtgttttaaaaaacatgtcaacagcatatttttaagagagttttactggaccacttttttcctccaagatttgtctccaaggtaaagggaaaaaaaatacatttcagatccactactaattgttatctaagtgatcgctgcttagaagttttgttgtttgtgtgtcttttatgtgtttttttttgmctcttgtaatttcttttttttcttttttttgacggagtctcactctgtcgcccaggctggagtgcagtggcgccatctctgctcactgcaagctccgcctctcgggttcacaccattctcctgcctcagcctcccgagtagctgggactgcagacgcccgccaccacgcccggctaattttttctatttttcagtagagaaggggtttcaccgtgttagtcaggatggtctcgatttcctgacctcgtgatccgcccacctcggcctcccaaagtgctgggatttac

SEQ ID NO: 68535 - DNA, 1208 bp, Homo sapiens
  misc_feature (1)...(1208): n = A,T,C or G
aaagaaacactaataaatgctttgcctttgtataaatgaaatgaaataaataaatggtagttacattccaattaatccaaccaaaagtgaaaactcttacaatgctagtggaataatttggtagaactttaagaataatttttcaggctgggcatggtggctcacacctgtaatcccagcactttgggaggctgaggtgggtggatcacgaggtcaggagttcaagaccagcctagctaatacggtgaaaccccgtctctactaaaaatacaaaaattagctgggcgtggtggcacrcgcctgtagtcccagctacttggggggctgaggcaggagaatcgcttgaacccagtaggcagagtttgtagtgagccaagatcatgccactgcactccagcctggatgacagagcaagactccatctcaaaaaaaaaaaaaaagaatttttcatcataagttagaggactaattatagatcttttatcacaaacaaattttgatgnnnnnnnnnnnnnnnnnnnnnnnnnnnnnnnnnnnnnnnnnnnnnnnnnnnnnnnnnnnnnnnnnnnnnnnnnnnnnnnnnnnnnnnnnnnnnnnnnnnntgactttgagttttgcaagataaatagagttttgtagatgggagtagtgtcaatagctatttatattgacactacttaactgtacatttaaaaattgttaatatgataatttttattttatgagtattttaacacaattattaataatttttaaaaatctccccaataattcctatgaaaattactttgagacctcttctgacctgaataaagttccactaaatttgatttattgttcaaattaattttggaataattaagtaataagtcaatcttttgactatcaaatacatattgtaaaatacatttaatatcactatataattgttggtctatttaattaaggtactttctacaaatcttatccatgattatttgttgacttgtaaacaaaaaacaatgctaattaattatttattgtttaaagcatttgaaaactaatggatccttcaaaaatttatttttaatttaatacaacattttctctaagaatactttttcggtaaacatgtattcagttatttacttctcacataactgcatattttggttctttcttacaggcaggagacatcacttttgtgcattaataggctctctcggttt

SEQ ID NO: 68536 - DNA, 1208 bp, Homo sapiens
  misc_feature (1)...(1208): n = A,T,C or G
aaagaaacactaataaatgctttgcctttgtataaatgaaatgaaataaataaatggtagttacattccaattaatccaaccaaaagtgaaaactcttacaatgctagtggaataatttggtagaactttaagaataatttttcaggctgggcatggtggctcacacctgtaatcccagcactttgggaggctgaggtgggtggatcacgaggtcaggagttcaagaccagcctagctaatacggtgaaaccccgtctctactaaaaatacaaaaattagctgggcgtggtggcacacgcctgtagtcccagctacttggggggctgaggcaggagaatcgcttgaacccagtaggcagagkttgtagtgagccaagatcatgccactgcactccagcctggatgacagagcaagactccatctcaaaaaaaaaaaaaaagaatttttcatcataagttagaggactaattatagatcttttatcacaaacaaattttgatgnnnnnnnnnnnnnnnnnnnnnnnnnnnnnnnnnnnnnnnnnnnnnnnnnnnnnnnnnnnnnnnnnnnnnnnnnnnnnnnnnnnnnnnnnnnnnnnnnnnntgactttgagttttgcaagataaatagagttttgtagatgggagtagtgtcaatagctatttatattgacactacttaactgtacatttaaaaattgttaatatgataatttttattttatgagtattttaacacaattattaataatttttaaaaatctccccaataattcctatgaaaattactttgagacctcttctgacctgaataaagttccactaaatttgatttattgttcaaattaattttggaataattaagtaataagtcaatcttttgactatcaaatacatattgtaaaatacatttaatatcactatataattgttggtctatttaattaaggtactttctacaaatcttatccatgattatttgttgacttgtaaacaaaaaacaatgctaattaattatttattgtttaaagcatttgaaaactaatggatccttcaaaaatttatttttaatttaatacaacattttctctaagaatactttttcggtaaacatgtattcagttatttacttctcacataactgcatattttggttctttcttacaggcaggagacatcacttttgtgcattaataggctctctcggttt

SEQ ID NO: 68537 - DNA, 763 bp, Homo sapiens
aaatcccggggttccacatataagttaaaggctcttttgtttgtatttaaaacctgcattcgacaatataaagatggatagtagtccatcttctcccatgtaatgtttcaatcactttacaagattgccatttatcatttagcctatatgctgaattgagaactcacaaactctctaagtctcaggtgcctcatctgcaaaacaggaataatgatattttataggatgtgctaaagattaaaaataatgtctttaaagcccttagcagagtatctggatatactcggcactcactagtagctcaagaagctactagagtgctattctactactactaaagatgatgatgatgatgatgatgatgatgatgatgatgatgagataatataatttctttttatttttttttttaaagacggaatctcgctctgtcacccaggctggagtgcagtggcgtgatctcggctcactgcaacctccgcctcccgggttcacgccattctcctgcctcagcctcctgagtagctgggactacaggcccccgccaccatgcctggctaattttttgtatttttagtagagacagggtatcactgtgttagccaggaaggtctcaatctcctgaccacgtgatccgcccgcctsggcctcccaaagtgctggaattacaggcgtgagccaccccgcccagccgatgatgatacaatttcttaaagctaccaattcattttcagacagctttattgcaaaaccttctacacag

SEQ ID NO: 68538 - DNA, 1063 bp, Homo sapiens
ctctcctgcatccttaatgcaggatgtgcacgtgcatggaggaacacaggagccatgtgctgtagggagggcagaatctctcctacagtggagattcaagcatccaggagtttctttttggctcttgccaaaaagttttttttttttttgagacagagtcttggtctatcgcccaggatggagtccagtggcatgatcttggctgacaggaacctccgactcccaggttcaagcaattgctactacctcagactcccaagtggctgggattatgggcatgtgccaccacacctagctaatttttgtattttaggagagagagggtttcaccatgttgaccaggctggtcttgaactcctgacctcaggtgatccgcctgcctcagcctaacaaagtgctaagattataggcgtgagccacagtgcccrtcacctattttcttactattacagaaataactggtttctgctttttttttttttttttttttgacggagtctcattttgtcacccaggctggcgcaatctcagctcactgtaagctccgcctcccaggttcatgccattctcctgcctcagcctcccaagtagctgggactacaggcacccgccaccacgcctggctaattttttgtatttttagtggagacagggttttaccatgttagccaggatggtctcgatctcctgacctcgtgatccacccacctcagcctcccaaagtgctgagattacaggtgtgagccaccacgtcaagcccagtttctgcttttatggaaggaaccactcttatttaaaactacaatttttgtatttgtgttaggtttttgtctggtttgtgttgtacaaaaagagtgtcccacgtgtgtgttttatggtttcacagactttattcatcttcgtggacaaaggcaggtaaaacacatgtttttcattttattttttttctgtaaactgtactttcaataaatgactgattcttaaatagatgataatactttttctagtgcagaaataaagtccatgcaatttttataaaacttggaccatacttttcaaagtt

SEQ ID NO: 68539 - DNA, 601 bp, Homo sapiens
tgatgttatctgctggcagcagaaggttcgctccgagcggagctccagaagctcctgacaagagaaagacagattgagatagagatagaaagagaaagagagaaagagacagcagagcgagagcgcaagtgaaagaggcaggggagggggatggagaatattagcctgacggtctagggagtcatccaggaacaaactgaggggctgcccggctgcagacaggaggagacagagaggatctattttagggtggcaagtgcctacctaccctaagcgagcaattccacgttggggagaagccagcagaggttgggaaagggtgggagtccaagggagcccctgcgcaaccccctcaggaataaaactccccagccagggtgtcgcaagggctgccgttgtgatccgcagggggtgaacgcaaccgcgacggctgatcgtctgtggctgggttggcgtttggagcaagagaaggaggagcaggagaaggagggagctggaggctggaagcgtttgcaagcggcggcggcagcaacgtggagtaaccaagcgggtcagcgcgcgcccgccagggtgtaggccacggmgcgcagctcccagagca

SEQ ID NO: 68540 - DNA, 625 bp, Homo sapiens
ttttttaatttacagggagaccctcaattcagtgtaaaatttattgttatacttgtcctatgacctagctttattattttcgcccaccagtagttccaccaggtaaattccctgagaaatgcagtgatctctggaccctgagtctcctgaaaacaggcaaaatccatctagttattgcccttttgtaaaaaaagaggacgttttgtgctatcagaaaacatctttgaagactttgcagaatagagtttatgtatattccgtaggaggaccctttcacagcttaatagccaaccacatttattgaccatcttctgcctgcagcatattttaccaaatgctgctttatagagcattatctctaatctataccagcacagactattggctctctttggagaatagagtttgccccattatctgcctctcaatgatttttattagtttccaaatgctacctgcatagtttctaagactcaaagagccaaatacatctagtaacgcatacacattatatatatgggattttctttgttgtgccatagatcatcagaagacatgcttacataggtcaggytgaaggcaatcaatgctcattttgtgaacaaaagagtggctttttggactt

SEQ ID NO: 68541 - DNA, 922 bp, Homo sapiens
tttcatattatctccttacataaatagttcaaatctaatagtaagtaaaacagctggcagaatagaaggaaggatgaggtagaaatttgcggaaaagggaccacagatggaactcctagacttctactgtgcaaagagataggacagatggtcctttgaacctctcaggcccagctgctcaggacctgatggggcaagagagtagcagtgggaaggaagaagccctcatctcttcagcttgctcttgaaaggcagtggcatggatcttttcacgtaatccatggcaaagagtgttggccctggattagcaacaaagctagggagagtatcctaaagagcttcctctgactcagtcacctttccatcagagagcatgtatgatggaagctgggacatgtctcactgggtaaagctactacctaagacaggcatggagtcacactgggtagaatgagggtgaaacagttctaacatcatcagaaaccagaggcagaattggcaaaagggcagagagggcaagaacaagagtgcttgcttggtgggcaagcgggcacatttctacggtgagaggactcagactactggctgctcaatctttctcactacctttccccctgcagaccatcaccatgtacataatgaacatctgaaaaggcaatactcaataaaaagttgggtcatccccaggtccttttgtccagggcggkggggcagatttgtcatggctttctgtgctgtattaactgtttcaaaagcaaagcttaattcaacttttaattataacagcacttttatatttttaacatgtttcaaataatttttatctctgaagagatgttatgaatctgacaaaaataatcctttatatatgtagggataatttttgtgttttatagaaaatagactattacatccaaaaatg

SEQ ID NO: 68542 - DNA, 497 bp, Homo sapiens
gaaaggcaaccttagaggccaggcatggtggctcayacctgtaatcccaacactttgggaggcagagcaggaggatcacttgaaatctggaattcaagaccagcctggaaaacatagtgagatcccagtttctgcaaaaatcaaacaattagctgggtgtgatggcatgcacttgtggtcccagctactcaagaggctgaggtgggaggatcatttgagctcaggagttcaaggctgcagtgagctatgatccactgcactccagcctgggcaacagagcaataccttgtctcaaaaaaaaaaaaaaaagaaaaaaatactatctcagaatcccactggtttgcagaaacagacatttcctctctccagggtctgcaggctccctgtccttagctccagagtatgacttagacttagatttaggtaggtccatgtctttttttttttttttttttttttgagatggagttttgctcctgtggcccaggctggagtgc

SEQ ID NO: 68543 - DNA, 587 bp, Homo sapiens
caagatactaggagtataacctgctataaaaagcaaagagaagacactccctgcctctcctgccagcattcctggtgagggtggttcttttgtagaccatccctttgcccctctaggttattttgtcatgagtggggtacataattatatactgcagccccactgcctcagagtgctgcctagccttttatctctgcctgccmtgaccaataggaatcacacaaactcacatacacacacacattctcctacacacacattcatacacactcacacacgtatgtgtgtatatatacatttatgtcccaaagaattagacattttctattctaatatatatatatttgtatatacatatcagatatatgtatatatatatataatatatcagagcaaagaagaagaaaagaaggatggacttaatacactactttcctgacacaagaatacttcatatattaataagtgttctttaatactgtatataaatataaaatctgaatggggaactgattagggtcaattagccataaaaatatggattgggtgaacatggaaacatttaccacatgtagtcaataactcaa

SEQ ID NO: 68544 - DNA, 796 bp, Homo sapiens
ttctcattcattgagttgcattaccctgagaaataaggatttttattcccattttaagaatgaggaaacaaaaaatattagtgaagttaaataacatgctcaagttcatccagcttgtggattgctaaattggggtcaaaataaggaataaagggatcaaatgtacagtgatacttcaatgagaaacaggtttcttgagaataaaattaaaattatttcatgtgttactttacattcatttaatttatttattcatttttaccattgattgtgttattcgggcmacagatgccccgagtgccaactgtgcctttcacttgcccttgactgaaaacacccagaagacacaaaggcacagtttttgcccccaataacttacagtttggtggggaatcaagcatatgaactattggtgataaacagaggaacactgcttatcctctgaaatcataagtcaaattcttccatatactatgaaataagaaaaaatggggatactattagggcatataaagaacatttctctttactctcttcaggctgtggcttgatcattaagagcttgaaggatcatggtcctctgatgacttcatgttagtgccacctgtctgggccacggagaacccatgatggaactgagaatctgaggaagagaactaatagataagagaaaaaataaggctcatggacaggggcaaagtcctcatgaactggagagggaatttctttatatacctggcaagggtgagctctgaaactgatgtcatagacagatcttagaggccagctcccagtg

SEQ ID NO: 68545 - DNA, 796 bp, Homo sapiens
ttctcattcattgagttgcattaccctgagaaataaggatttttattcccattttaagaatgaggaaacaaaaaatattagtgaagttaaataacatgctcaagttcatccagcttgtggattgctaaattggggtcaaaataaggaataaagggatcaaatgtacagtgatacttcaatgagaaacaggtttcttgagaataaaattaaaattatttcatgtgttactttacattcatttaatttatttattcatttttaccattgattgtgttattcgggccacagatgccccgagtgccaactgtgcctttcacttgcccttgactgaaaacacccagaagacacaaaggcacagtttttgcccccaataacttacagtttggtggggaatcaagcatatgaactattggtgataaacagaggaacactgcttatcctctgaaatcataagtcaaattcttccatatactatgaaataagaaaaaatggggatactattagggcatataaagaacatttctctttactctcttcaggctgtggcttgatcattaagagcttgaaggatcatggtcctctgatgacttcatgttagtgccacctgtctgggccacggagaacccatgatggaactgagaatctgaggaagagaactaatagataagagaaaaaataaggctcatggacaggggcaaagtcctcatgaactggagagggaatttctttatatacctggcaagggtgagctctgaaactgatgtcatagacagatcttagagsccagctcccagtg

SEQ ID NO: 68546 - DNA, 1379 bp, Homo sapiens
gatgaactgctaaacttctaagatattttaaagtcytccaacacccgtgattgttttctgtgatgaccaagtcacactggtccagagaagatgggccacagcgacctcttggaaagctttctgtcaagtcccttacacaaggggagcaaaatcacaaaggtcccaggcaatttttttcttctcccctttcctcttttcttcataaatcttggtttttcttttatttgccaaaaccaatctaatgccctttctccctcctatacaatggtaaattagcatgcagatagctgtccctgtattattatttgataggttttttcaggggctatgtccataacaattagcacatctgagaaacatcactggagccaacagaaccctccacccaacaggcatcttgtgtagacctgaaccctcagagctattagctcctgtttccttgcttcttttaatgaatatcatgaatagaaattgagctctttggcttttaatcactaagtatggctgtagtacatgtctctgtctccctctatgtcttctctctctctctctctctctctctcactgtttctttctcatttttgcattattattttctgtcatcagtggcaccaatgtgggtttctggttttgatgttatggagtgaacttctggggacaatctctgttaggtggtggttgacaaggatccattccctgattggcagtacatgacagctaatctagtctgtgagtctttcttgattgtccattatcctaaagattctggtctttcctgacatttgagactgcagcaatgagaaggttttcatatcttgtctatctgatgtttggtaaaagtcttagggacacattagctgtcaatatctgcaagaatggcatctctgtaataaggatgatcttaatacacaatatgccacaccccatttcataagaactcttggctccaggaaagtgctatacctaaatggatcttagcacaggaaagaaactaaattcctagcatgtgaggggaacctttctttgattggcatattcaagtttttcacagctgaaaagtatcaaattaatctcctctaaggattgtgtaaattacagcacaggaaggagaaaaaagacaattataacatcccaaataggcaactgagtcagcaacatgagcacttgtgataattatacaaatcaagacctcataatttcctggaatttaagcaagtccagcccttagtaaaaatggatgaaaagcaatgacctgtaaaagttgtcagaatgaaaaatggagtcacgtatgccaaatcctaacaaaattcaatcaggagatcataaaggaggggtgctcacacacacatgcctgtgataaaaactattacaagaactct

SEQ ID NO: 68547 - DNA, 1379 bp, Homo sapiens
gatgaactgctaaacttctaagatattttaaagtcctccaacacccgtgattgttttctgtgatgaccaagtcacactggtccagagaagatgggccacagcgacctcttggaaagctttctgtcaagtcccttacacaaggggagcaaaatcacaaaggtcccaggcaatttttttcttctcccctttcctcttttcttcataaatcttggtttttcttttatttgccaaaaccaatctaatgccctttctccctcctatacaatggtaaattagcatgcaratagctgtccctgtattattatttgataggttttttcaggggctatgtccataacaattagcacatctgagaaacatcactggagccaacagaaccctccacccaacaggcatcttgtgtagacctgaaccctcagagctattagctcctgtttccttgcttcttttaatgaatatcatgaatagaaattgagctctttggcttttaatcactaagtatggctgtagtacatgtctctgtctccctctatgtcttctctctctctctctctctctctctcactgtttctttctcatttttgcattattattttctgtcatcagtggcaccaatgtgggtttctggttttgatgttatggagtgaacttctggggacaatctctgttaggtggtggttgacaaggatccattccctgattggcagtacatgacagctaatctagtctgtgagtctttcttgattgtccattatcctaaagattctggtctttcctgacatttgagactgcagcaatgagaaggttttcatatcttgtctatctgatgtttggtaaaagtcttagggacacattagctgtcaatatctgcaagaatggcatctctgtaataaggatgatcttaatacacaatatgccacaccccatttcataagaactcttggctccaggaaagtgctatacctaaatggatcttagcacaggaaagaaactaaattcctagcatgtgaggggaacctttctttgattggcatattcaagtttttcacagctgaaaagtatcaaattaatctcctctaaggattgtgtaaattacagcacaggaaggagaaaaaagacaattataacatcccaaataggcaactgagtcagcaacatgagcacttgtgataattatacaaatcaagacctcataatttcctggaatttaagcaagtccagcccttagtaaaaatggatgaaaagcaatgacctgtaaaagttgtcagaatgaaaaatggagtcacgtatgccaaatcctaacaaaattcaatcaggagatcataaaggaggggtgctcacacacacatgcctgtgataaaaactattacaagaactct

SEQ ID NO: 68548 - DNA, 862 bp, Homo sapiens
caaaattaaaaatcaaacctacaccaaaacaaaaccttaaacacaattagcacaagatgacaccgactatccctctatctatcccagggtttctcaacctcagccctcttacctttttgggcccaatataattctttgttttgaggggtctatcctgtgcactgcagcatgttcagcagcatctctggcctccacccactgcatgacagtagcaaccctcctctagcccctagttacaaaaatcaaaaatgtctacaggctgggtgtggtggctcacacctaccatcccagtactttgggaggccgaagcaggactgcttgaggccaggagtttgacaccagcctaggcaacacagtgagactctgtctctacaaaaaattaaaaaattagccgggtgtggtggtacagctagttgggaggctgaggtgggaggattgcttgagcccaggaggtggaagccgcagtgagccgtgatcrcgccactgcactccaacctgggcaacaaagtcagactctgtctccaaaaaaaagataaaaaattgtctacagactttgccaaatgttccctgggaaacaaaactacctgaaattgaaaaccactgctctaggctatctcatttattgctcagcaggctgtgaagagatccaacctggccaacatggtgaaaccctcgtctctactaaaaatacaaaaattagccaggcatggtggcaggcgcctgtaatcccagctacttgggaggctgaggcaggagaatcacttgaaactgtaaggcagaggatgcagtgagccaagatcgtgctactgcactccagcctgggtgaaagagggaaactctgttaaaaaaaaaaaaaaaaaaa

SEQ ID NO: 68549 - DNA, 770 bp, Homo sapiens
attaaggtctatgcacttgccataagtaaatacattctcagtctgatgacagagatgtaacattaataccgttacaatagtcacagccccttgactaatcccagatttgagtcagttcaagactgagagttccttggatacatgaaggataagataaacctaaagaaagacttgcagtaacaatctgtatagtacatttttctcctagcacttttcaatataactttcatcttacagtggcataactgtggactgggtaaaaggaaaaaaaaaaacaccattccaaattgattgggttgtatggtcactgctcaaagtagggactgatataacttgtgtggtctatctattcagttatgtatgtgaatcgtattatgagaaaaatctaccaaactggtgaaatgacatgtcagaggctaccctttcccatgwgttgcatgtaatgagcagttgagaaggaggttgatcagggatctgtacttctgggcactggatctgcatttaggtttgaaaaagaaagtgaggcaaaagacaaaggcaaatattttcttcacatgactttgccagctttattctggaagtacagtcctcttcaggtgcttctgaaatccccttagccagaactgtcacataatcgtagctggagaaaggacaggcattcaagtactgttttggcattggcagaaaagagcaatactgaagcaggaacaaatcatgcttcaggtggaaaatagagcttaaacaaatttcatctcatttggggcccaatg

SEQ ID NO: 68550 - DNA, 770 bp, Homo sapiens
attaaggtctatgcacttgccataagtaaatacattctcagtctgatgacagagatgtaacattaataccgttacaatagtcacagccccttgactaatcccagatttgagtcagttcaagactgagagttccttggatacatgaaggataagataaacctaaagaaagacttgcagtaacaatctgtatagtacatttttctcctagcacttttcaatataactttcatcttacagtggcataactgtggactgggtaaaaggaaaaaaaaaaacaccattccaaattgattgggttgtatggtcactgctcaaagtagggactgatataacttgtgtggtctatctattcagttatgtatgtgaatcgtattatgagaaaaatctaccaaactggtgaaatgacatgtcagaggctaccctttcccatgtgttgcatgtaatgagcagttgagaaggaggttgatcagggatctgtacttctgggcactggatctgcatttaggtttgaaaaagaaagtgaggcaaaagacaaaggcaaatattttcttcacatgactttgccagctttattctggaagtacagtcctcttcaggtgcttctgaaatccccttagccagaactgtcacataatcgtagctggagaaaggacaggcatkcaagtactgttttggcattggcagaaaagagcaatactgaagcaggaacaaatcatgcttcaggtggaaaatagagcttaaacaaatttcatctcatttggggcccaatg

SEQ ID NO: 68551 - DNA, 736 bp, Homo sapiens
ccctccttgcccttgtgaaaagaaaaagtgtctccaaactttaccaagtatcccctgggggcaaaacttctcattgttgaaaatcactgcattagacatattgagacaatcttaatctggtcaattgtgttgacacaaactgttagaggaagaataattattaacatttgtgtctagtcaactgatctggtcacataaattctgtatgtgaattcattttgtttaccaccaaagcacaaagacttttcagataactttaaataatattgtacaagtataggggttcagaggagcaagtgaataattaaatttacctagaatgtggagaaattgggtttggaatattcatgacactagttctatttctaatgtttagtgactaccaytgaataatttatgtcttattattagaacaccaggagttatgacacatattttttgtgaagtttgccaactttggacttttcaagcatcaaaattcaactctgtatatttatagctaaactaggaaccaggaaatttagatgatttggccatgtccataaagtcacttcactgcaaaacaggaattgtggtctgatattctggcaaatactttgatcttatttccatgtacaataatatttctcaaagattagacagtggtagggtaatgagaagccattgatgaagtataaattgatccccaattcaacacttttatttcattctttggagcaagtgatattcacttcct

SEQ ID NO: 68552 - DNA, 675 bp, Homo sapiens
ttgaatacatttacagaagattgattttcccaagggaatgtacctatcctatttctttaattattcttgaagttttgcctatcaactgacaatttcttacagaaaggaagcaaaacagcctggctttcgtgacagcgaagaattataatactagaataaaaacaggtttgtcactttccttatctcttctaatgtctgagttactgggagtcagaaatataataaccccatcccagtaacacagttattcagaatatgttaaatcgaaaggtaaattcaaagtcaaatttctctattttttgaagatcagtatactcattcctaactacaagcatccagtatgattagttataaaacattagagaaaatatggtcatattcactttattttttcaactgattatcacctgattagaaagaagaccattttgtttcacatgatttactctcagcaaaaaaactgtttacttaagcataggaaagccaaccttcgtactaaaagagaactgagaaatttaaacagcccatgatcttcattgctttggcctctgctgcaaagcgtcactgtgaaaaattggtcctgatcccagcaatcaatgctttcccactgcacagagatggcctggygtcattgtgccattgtggctgctaagggcagggttccttagcaatgca

SEQ ID NO: 68553 - DNA, 1497 bp, Homo sapiens
  misc_feature (1)...(1497): n = A,T,C or G
tgcatgaccgtagaatgagatatctgcctcccactgcataatgctagagttaaactgatagctgaagcggcccctgatggcagaacttgaagacagggagccatacttggctaccactttcaacaatttgccatgacagagccaggattaatccattttgaaggcctctgtttattaaggtggactgctgggtcaatggaaggtcagcaggtagagaccatgggaaaaactcccaggggctggatctgagttaggcatgaccagaagtcagccagagaagacatcatcaatatcagaaatccgtgctgtgcagaagtccccacaagtcctccaaggatctaaatgtgatacaagctggcatttggatgtctgccccaaagcacgcattgacagcctatcggctgttggtagccaagggaaaacaaaatagcaagaccaatgaagtaaaaataaataaaacatttacaatcttgtttctaatctcttctctctattatgctgcttcagatttcttttaagtcaggtaggaaggagggaggataaatgaatggaccctccaccaaatgcaaggccacaaacsccacagtcagcatgaggtgggatagagaagacagttgcttttaactagattaatatttaaatcaatttgttgtagtctcttctgaaaggtatagagctctttttagaatttcttttaattgaaagttatcagaaatctaagctatctgcctgttccagatattacatatgaatgggatgaagaaggcaggatcaaaacaaacgtgtttaaaagcaggcggaaaaattttttctcacttttaccctaagattaaattactttataaacaagttttagcgatgatgctcattctatatagacttaaatgctttataaaannnnnnnnnnnnnnnnnnnnnnnnnnnnnnnnnnnnnnnnnnnnnnnnnnnnnnnnnnnnnnnnnnnnnnnnnnnnnnnnnnnnnnnnnnnnnnnnnnnntttagtctctaccaatgacattgtctcagaacagggggaaaatttaacagcttatatttattattttaaaattttagatgatcactccagagtgattttgcaacccgtagaggatgatccttcctcagattatattaatgccaactatattgatgtaagtatttttatagttaagtatgtctactttattggcttatatatatgaacctttttgcttattacctataaagtgattgctagctttttaaaatataaaagtacaaactgtacacttttccttgttctgcgtcctagtacttactgacattgttgtgctttctttcacacctgactttggtttgggctgtagatttggctgtacagggatgtaagtaccactatatgtaaataacagcaccctattataaatacaaacattcttaattacagttattactaacgctctgttactactagttatttctgcatgcttcacctaattagcttcatacaatatatct

SEQ ID NO: 68554 - DNA, 574 bp, Homo sapiens
atatatttagcactctttaaacttcaactattttttttacaattaaaatctaggtgtgctataattaaattgattcacaatatgtataattataagacaaaaggtggaggtattaagaatggtagcatatgtatacttytatagacctaaaaggtatgaaacctaggacccaacattttataatttccataaataggaaataattttcattacatttattaggttcacattttagagttatgaattgtcattatgtatttagttgaactaatatattttataaagcatagtatatgagtatatgagttcaatttctgatcataatcttactcttattcattatataaatttatcaaacatcattatgtaaaactaagctaatggtctaatttttagaataaaaaaatcaacagttctatgacaaattttgtaattgttcttacctatttagtttaacctgggttttctgccaggacttgtacactggagccttgttataaaattatttcatgggtcatatggtaggactgtattttaaataagacttgttatctagtctttctgttaagacccc

SEQ ID NO: 68555 - DNA, 514 bp, Homo sapiens
tgggtttaaccaggatgtaaccccatcacaagtcaaagagcatctgtacttaaaaaggaaccaaagtaaggtctatactgaattggccttcattcaaaaataaagagtaatccaaaagaaaacacacatgtgcccaacagctatgtgaaaaaatgcacaacatcattaatcatcagagaagtgcaaattaaaatcacaatgaggtatcacctcacacctgtcagaatggctattatcgaaaagatgaggctgggtgcagtggctcatgcccataatcccagcactttcagaggccraggtcagaggatcacttgagcccaggagttcaagaccagcctggcaacgtagttagatcttgtccctacaaaaaacaattttaaaaattagccaggcatggtggcatgagcctgcggtcccagctactcaggaggctgaggtgggaggatcacttgagcccaagaggtcaaggctgcagtgagccatgattgtgccactgcactccagtgtaggagac

SEQ ID NO: 68556 - DNA, 991 bp, Homo sapiens
taaactgatcctaaagatcctataattattaaaagactattcataggaaagaggctggacacagaattatttggggacaataccttggtgaatgcaaacagcagattttccagtttgccccaagttttcatcaatgggctttacttcttcagtgcttctgccattcagggaagaactggcatgaatgtcattctgtatatcctgaacaaagccatctttatcatagccattagtgacaatgacttccaaattcttatggtctgctgacttcttcatcattttcttatcttttacgagaaaatgggaaagattcataaaagttcacagtaggtcaccttctgcataccatgttttaatatccagctgttatttccctaacctaccacaatccctttgaagggtttcctacttggatcaaagagaaggcgtgctccttgaaatggggtttactatacgctgagagctcacccaaactatgttggcttcaaaactgtttcagttccctgtcaatcttctagaatttcttttaaaaagtaatctctcaaagtctttttactcccttaggcataagcaaattgctctatgagacctagcagtgcgaaggggtccacatagctgataaaaaggatccttaaagaaggcgctatttgtcataccttactggaaagggaaggcaaaactaagttacacagttttttttttttttgagacaaagtctcgctctgtcacccaggctagagtgcaatggcatgagcttggctcactgcaaattctgcctccygggttcaagtgattctcctgcctcagcctcccaagtagctgggattacaggcgcccgccactatgcctggctaatttttgtatttttagtagagaccgggtttcaccatgttggtcaggctggtctcgaactcccaacctcaggtgatctgcccgcctcggcctcccaaaatgctgggattacgagtgtgagccagccgtgcccggccgc

SEQ ID NO: 68557 - DNA, 740 bp, Homo sapiens
tatatcccgagggtaaatacatcagagcttctcaactttaatgtgcatacaaatcttctgagagctatttaagatgcagattctgaattagtatgtctagggtgatctaagattccaaatttctataaagatcacatttgttaccaatgctgttggttactggacactgttttgagaacatggattgaaagacaatatttttgaggtaacaatactccccaaaatgatctgcaaattcactgcaatctgtatcaaaatccaagctggcatttctgcaaaaattgacatgcagattctaaaattcatatgaaaatgygagggatcaagattagccaaaacaatcttgaaaaataacaaaattggaggactcatcattcctgatttcaaaacttactgtatatgtatattctgaaaatggcaatgtaaaactgatacatctgttctattggacctaaatggctacttttaaggaaatgctttgtttagaaaaaaaaaggcaagactgcaaactgttttgcaatttggtaatatcttacaaaattacaaacatcaaacatttctaactccatttctaatatttcttacagatatgctttcacatatgtgaaatgacaaatgtacgtggttattctcagcagtattttctgaagatcaaaggagtaaataacctaaatgtccaccagaatggctcaggttaaaaaaattatggtgcaggtccacaatcccttacttacaaccct

SEQ ID NO: 68558 - DNA, 740 bp, Homo sapiens
tatatcccgagggtaaatacatcagagcttctcaactttaatgtgcatacaaatcttctgagagctatttaagatgcagattctgaattagtatgtctagggtgatctaagattccaaatttctataaagatcacatttgttaccaatgctgttggttactggacactgttttgagaacatggattgaaagacaatatttttgaggtaacaatactccccaaaatgatctgcaaattcactgcaatctgtatcaaaatccaagctggcatttctgcaaaaattgacatgcagattctaaaattcatatgaaaatgtgagggatcaagattagccaaaacaatcttgaaaaataacaaaattggaggactcatcattcctgatttcaaaacttactgtatatgtatattctgaaaatggcaatgtaaaactgatacatctgttctattggacctaaatggctacttttaaggaaatgctttgtttagaaaaaaaaaggcamgactgcaaactgttttgcaatttggtaatatcttacaaaattacaaacatcaaacatttctaactccatttctaatatttcttacagatatgctttcacatatgtgaaatgacaaatgtacgtggttattctcagcagtattttctgaagatcaaaggagtaaataacctaaatgtccaccagaatggctcaggttaaaaaaattatggtgcaggtccacaatcccttacttacaaccct

SEQ ID NO: 68559 - DNA, 740 bp, Homo sapiens
tatatcccgagggtaaatacatcagagcttctcaactttaatgtgcatacaaatcttctgagagctatttaagatgcagattctgaattagtatgtctagggtgatctaagattccaaatttctataaagatcacatttgttaccaatgctgttggttactggacactgttttgagaacatggattgaaagacaatatttttgaggtaacaatactccccaaaatgatctgcaaattcactgcaatctgtatcaaaatccaagctggcatttctgcaaaaattgacatgcagattctaaaattcatatgaaaatgtgagggatcaagattagccaaaacaatcttgaaaaataacaaaattggaggactcatcattcctgatttcaaaacttactgtatatgtatattctgaaaatggcaatgtaaaactgatacatctgttctattggacctaaatggctacttttaaggaaatgctttgtttagaaaaaaaaaggcaagactgcaaactgttttgcaatttggtaatatcttacaaaattacaaayatcaaacatttctaactccatttctaatatttcttacagatatgctttcacatatgtgaaatgacaaatgtacgtggttattctcagcagtattttctgaagatcaaaggagtaaataacctaaatgtccaccagaatggctcaggttaaaaaaattatggtgcaggtccacaatcccttacttacaaccct

SEQ ID NO: 68560 - DNA, 740 bp, Homo sapiens
tatatcccgagggtaaatacatcagagcttctcaactttaatgtgcatacaaatcttctgagagctatttaagatgcagattctgaattagtatgtctagggtgatctaagattccaaatttctataaagatcacatttgttaccaatgctgttggttactggacactgttttgagaacatggattgaaagacaatatttttgaggtaacaatactccccaaaatgatctgcaaattcactgcaatctgtatcaaaatccaagctggcatttctgcaaaaattgacatgcagattctaaaattcatatgaaaatgtgagggatcaagattagccaaaacaatcttgaaaaataacaaaattggaggactcatcattcctgatttcaaaacttactgtatatgtatattctgaaaatggcaatgtaaaactgatacatctgttctattggacctaaatggctacttttaaggaaatgctttgtttagaaaaaaaaaggcaagactgcaaactgttttgcaatttggtaatatcttacaaaattacaaacatcaaacatttctaactccatttctaatatttcttacagatatgctttcacatatgtgaaatgacaaatgtacgtggttattctcagcagtattttctgaagatcaaaggagtaamtaacctaaatgtccaccagaatggctcaggttaaaaaaattatggtgcaggtccacaatcccttacttacaaccct

SEQ ID NO: 68561 - DNA, 730 bp, Homo sapiens
aacatttaaaaaatagtagaaagctggaaacatccagcattaggggagcggcaaaacaaatgataccactggtcgagtgcagtggctcacgcctgtaaccccagcactttgggagaccgaggtgggtggatcacttgaggtcaggagttcaagaccagcctgaccaacacagtgaaaccccatctctaccaaaaaatacaacaattagatgggtgtgatggtgtgcgcctgtagtctcagctacttgggaggctgtggtagaagaattgcttgatctcaggaggcggaagttgcagtgagctgtgatcatgccactgcactctagccagggcaacagggtgagacctgtctctcaaaaaaaaaaaaaaaaaaaaaaaaagaaactaccacagaatgaaatacatccaacattwaaaaaaaaaaaaaatagtaagtaggccgggaatggtggctcatgcctgtaatcccagcactttgggaggccaaggcaggtagatacctgaggtcaggagttcgagaccagcctggccaacgtggtgaaatcccatcgccactaaaaatacaaaaaaattggccaggaatggtgttgggcgcctgtaatcccagatacttgggaggcagaggcaggagaatcactcgaacctgggaggcggaggttgcagtgagccaagatcatgccattgcattccagcctgggtgacaagagcaaaactccatctcaaaataaata

SEQ ID NO: 68562 - DNA, 675 bp, Homo sapiens
caggttggctcaagacaaacttggtatattatawaccactcagtagttttctcaatgcaggagtatattaagccctaatttggaaactagtaaatctcattagcagctgccttaaaattcttttgttgttgttgttgttgttgttgttgttgagacagagacttgctctgtcaccaggctgcagtgcatgcagtggtgtgatctcggctcactgcaacctccgcctcccaggttcaagtgattctcctgcctcagccccccaagtagctgggactacaggcatgtgccaccacgcccagctaatttttgtattttttagtagagatggggtttcaccatgttggccaggatggtctcgatctcttgaccttgtgatcctcctgcctcggcctcccaaagtgctgggattttaaaattccttttgtaacgaggtatggtaatatagagaaaagcattacgtcccaaaatgcatttctttatcaagtagaatgtattcaggaaaatgagcttcagaaatgtgtcatttgcatcagcttctaggtgttccctgtaataatttctttctttttttggttttgggatttttttgagacaggatctgggtctgtcgcccaggctggaatgtagtagcacaatctcggctcactgcaactttctgggctcaagcaattcttc

SEQ ID NO: 68563 - DNA, 675 bp, Homo sapiens
caggttggctcaagacaaacttggtatattatataccactcagtagttttctcaatgcaggagtatattaagccctaatttggaaactagtaaatctcattagcagctgccttaaaattcttttgttgttgttgttgttgttgttgttgttgagacagagacttgctctgtcaccaggctgcagtgcatgcagtggtgygatctcggctcactgcaacctccgcctcccaggttcaagtgattctcctgcctcagccccccaagtagctgggactacaggcatgtgccaccacgcccagctaatttttgtattttttagtagagatggggtttcaccatgttggccaggatggtctcgatctcttgaccttgtgatcctcctgcctcggcctcccaaagtgctgggattttaaaattccttttgtaacgaggtatggtaatatagagaaaagcattacgtcccaaaatgcatttctttatcaagtagaatgtattcaggaaaatgagcttcagaaatgtgtcatttgcatcagcttctaggtgttccctgtaataatttctttctttttttggttttgggatttttttgagacaggatctgggtctgtcgcccaggctggaatgtagtagcacaatctcggctcactgcaactttctgggctcaagcaattcttc

SEQ ID NO: 68564 - DNA, 725 bp, Homo sapiens
cccaaatagctgggactgcagctgcatcccaccacacctggctaatttttgtatttttagtagagacggggtttcaccatgttggccaggctggtctcgaactcctgacctcaagtaatccgcccacctcagcctcccaaagtgctgggattacaggcrtgagccattactctgcccaaaagagcatacttttattttactaggtagaaggaaataggaacaatgacaggtaatgaaatggcagtaaagaggtgaggaaggctttgaaatcttgtaagcagagcagctcagtgatatagagcttccaatgtagccataagctagaagtcaatatgttgtagagatgcaagtcagtgaaatcaaggaagtcaaagaaccatgaagagaacgtgtcagaactgtcatcagtatctattcttgaagtcaccatgaaggataaggatggagcacagggaagaaagggagaagggggtgagcttcatgctaaagctgtctagggcaatagatactgctaaggagcgtggtgatagaaacaggtggcaaggccttagagtcaaaactggagcattcatcatggaagatcaatggcatggaaggtttatcaaggagcagaaagtaggccacactctcttcccctgagtcagggattctttaacaagatgcaggcagggtgggcgcggtggctcacacctataatcccagcactttgggaggctgaggcgggt

SEQ ID NO: 68565 - DNA, 725 bp, Homo sapiens
cccaaatagctgggactgcagctgcatcccaccacacctggctaatttttgtatttttagtagagacggggtttcaccatgttggccaggctggtctcgaactcctgacctcaagtaatccgcccacctcagcctcccaaagtgctgggattacaggcatgagccattactctgcccaaaagagcatacttttattttactaggtagaaggaaataggaacaatgacaggtaatgaaatggcagtaaagaggtgaggaaggctttgaaatcttgtaagcagagcagctcrgtgatatagagcttccaatgtagccataagctagaagtcaatatgttgtagagatgcaagtcagtgaaatcaaggaagtcaaagaaccatgaagagaacgtgtcagaactgtcatcagtatctattcttgaagtcaccatgaaggataaggatggagcacagggaagaaagggagaagggggtgagcttcatgctaaagctgtctagggcaatagatactgctaaggagcgtggtgatagaaacaggtggcaaggccttagagtcaaaactggagcattcatcatggaagatcaatggcatggaaggtttatcaaggagcagaaagtaggccacactctcttcccctgagtcagggattctttaacaagatgcaggcagggtgggcgcggtggctcacacctataatcccagcactttgggaggctgaggcgggt

SEQ ID NO: 68566 - DNA, 725 bp, Homo sapiens
cccaaatagctgggactgcagctgcatcccaccacacctggctaatttttgtatttttagtagagacggggtttcaccatgttggccaggctggtctcgaactcctgacctcaagtaatccgcccacctcagcctcccaaagtgctgggattacaggcatgagccattactctgcccaaaagagcatacttttattttactaggtagaaggaaataggaacaatgacaggtaatgaaatggcagtaaagaggtgaggaaggctttgaaatcttgtaagcagagcagctcagtgatatagagcttccaatgtagccataagctagaagtcaatatgttgtagagatgcaagtcagtgaaatcaaggaagtcaaagaaccatgaagagaacgtgtcagaactgtcatcagtatctattcttgaagtcaccatgaaggataaggatggagcacagggaagaaagggagargggggtgagcttcatgctaaagctgtctagggcaatagatactgctaaggagcgtggtgatagaaacaggtggcaaggccttagagtcaaaactggagcattcatcatggaagatcaatggcatggaaggtttatcaaggagcagaaagtaggccacactctcttcccctgagtcagggattctttaacaagatgcaggcagggtgggcgcggtggctcacacctataatcccagcactttgggaggctgaggcgggt

SEQ ID NO: 68567 - DNA, 725 bp, Homo sapiens
cccaaatagctgggactgcagctgcatcccaccacacctggctaatttttgtatttttagtagagacggggtttcaccatgttggccaggctggtctcgaactcctgacctcaagtaatccgcccacctcagcctcccaaagtgctgggattacaggcatgagccattactctgcccaaaagagcatacttttattttactaggtagaaggaaataggaacaatgacaggtaatgaaatggcagtaaagaggtgaggaaggctttgaaatcttgtaagcagagcagctcagtgatatagagcttccaatgtagccataagctagaagtcaatatgttgtagagatgcaagtcagtgaaatcaaggaagtcaaagaaccatgaagagaacgtgtcagaactgtcatcagtatctattcttgaagtcaccatgaaggataaggatggagcacagggaagaaagggagaagggggtgagcttcatgctaaagctgtctagggcaatagatactgctaaggagcgtggtgatagaaacaggtggcaaggccttagagtcaaaactggagcattcatcatggaagatcaatggcatggaaggtttatcaaggagcagaaagtaggccacactctcttcccctgagtcagggattctttaacaagatgcaggcagggtgggcrcggtggctcacacctataatcccagcactttgggaggctgaggcgggt

SEQ ID NO: 68568 - DNA, 651 bp, Homo sapiens
ttccctataagtggctgaagggctgcaaaagctctcaggaaccagtatctctccccacacaggcagcttacttgcagactccctgagagaagtatcggcacaaaggtctgcaggctggcatggccgtcaccccaataayccagggtcttttattccagccactctgctgtgattagtatacctgccatagctagggttcccccaaggtaggggtcagcagatggaaataatcatggatgcccgaggtatgatccacctctcctgtttcagaaccaatatcattacctgtttcaatgtctagcggggaaatgtcactggaggcctcattaacagcagacagtatagagagtcatagtctaacttctggcctttctgcaggatttaaagcttatattaaggaaggaagaaaaagaacaggtgtcgtgacttgtctttttcttttttcataccacaactgtcactcatagggttccaaacggaatgaaaagagccaaaaggaagcccagtgagttgcctggcctgggaggtcatgatggtttattgcagcctttgtttttacgagaaaggacagcaggccagtgtctctctcgcctaccttcccttttaagatactcttttgacttgacagtcttttggctgtcaaagccccat

SEQ ID NO: 68569 - DNA, 395 bp, Homo sapiens
ctgcattattccattctcgcatcactataaagaaatattcaagactggataatttataaagaaaataagtttaattggcccacagttccaaatgctatataggaagcatgatgctatatgttcagcttctgtgaagacctcaggaaactyacaatcatggcggaaggtgaaggggaagcaggcatatcttacatggctggagcaggagcaagaggcagggggaggtgctgcatacatttaagcaaccaattttcatgagaactcactattgttacggcagcaccaagggtgggaaaccatgagaaaccatccttatgatccaatcacctcccaccaggccccacccccagcactgagggttacatttcaacatgaaatttgggtgaggacactac

SEQ ID NO: 68570 - DNA, 1872 bp, Homo sapiens
  misc_feature (1)...(1872): n = A,T,C or G
aatgtaattttgtatattaatttttatgtgatatcttgaactttttctctcaagattacaaattttcaggatatgatttcaatagttttataatattatatagctgtgtttttttcagtttcccatgttgtcttgaggattcatagagatgagagtcttgggggctaccaaaggctttggggaagcaggaactgggagtgcagtaattgagtcaactggctccaggatccccttggacttttcagagtccacatttgactaatttttatactgggcttctgcgcaaaattctccctgaagaagaattcccaaacatgttaaaatttgaaatcattattggtaagttataatttcacatttgttgcacatctagtgtttctatagtttagtgtcatggagcactttgtacaaacatacacacatacgcacacacgcacacacacacttatttcttcaggatatataaatagatatagaattactgggtcaagtaatatatactgttaaattgtgctaaatattgtctggagagtggttatgcaacttcaacttctaacagcagtgtataaaaggacccatctcataacacacaaatcaccttttcttggttgtcattttctattttgaaaagtaacatatcactgctattttaataagcaattgttttatggtgaggctaaattttatttacatgtttattagtaatattttcttgcctgaatttacttgctcatatttctttgctaacatttctattggagcattagtgttttccagtggattttaagatttacagttgacctttgaacaacacagattaannnnnnnnnnnnnnnnnnnnnnnnnnnnnnnnnnnnnnnnnnnnnnnnnnnnnnnnnnnnnnnnnnnnnnnnnnnnnnnnnnnnnnnnnnnnnnnnnnnnatctctttccattcacctataatttctagtttcattaaaaatattaatagcactttgggaggccraggcgggtggatcacgaggtcaggagatcgagaccatcctggctaacatggtgaaaccccgtctctactaaaaatacagaaaaattagccaggtgtggtggcgggcacctgtagtcccagctactcgggaggctgaggcaggaggatggcttgaacccgggagggagagcttgcagtgagtcgagatcacaccactgcactccagcctgggcgacagagcaaaactccgtctcaaaaaaaaaaaaaaattaatattaattcataagaatgtattagggactaagatgtgttttatttgtaattcgtaatagctaacttttatgttattttttgaatgatccataccaatttcattgaattattaatgtatgggaatgtaattaactttatatagtgaccttttatccaactatcttcctaaactgtattgttttctctgatcatttatttgaagagtttcttggagtttctagatggaaaaaaactatcagaaaataattattgttttgtttctttctctacaacctgcatgccagttatcttttcttctttccttacccttctggctggggtcagtacagtgttgaattgaattactgatagtgggtatctttgtcacgttcctgtcttcaaagggaatgatctaacttcttgccatttggggtgattgttgtaagttttcattagattctgcttatcaggttaagaaagttcattttaatttttatttgctaagagttctttaaaattgtgaattatttttgaataataaaaaataaattttccccatccattgaaatattcatttcttttcttttgctaaagtagtcggattatactaattaggttttctggtgtgaacccatctgaaattggactcaatgca

SEQ ID NO: 68571 - DNA, 2014 bp, Homo sapiens
attgtttgtggattttgtttcattcttacgaatgccctccttattccatgactataaaatatttgctaatggtttcctgtggtatggtttgagttttyttttttacatttaaatgtttgatgttcctgaggtgtgattcgatttaggttgttaggtatagttcaaatgaatttttattatttttattattttacctatttaagtctaattttactgtttgttgttgttgttgttgttggagacagagcctcactctgccacccaggctggagtgcagtggtgtgatcatagctcactgcagcctcaaattcctggactccagttatcttcccacctcagtctcctgagcagctgggactacaggcatggaccactatgcctggccaattttttaattgtttttatttttgtggagacaaggtctcaccatcttgcccaggctgatctcaagctccttggctcaagtgatcctccctccttggcctcccaaagtgctgggattacaggtgtgacctattgcacctggcctcaaatggatttttaataggttataacctgtttattccaatggtaattcaatccttgattgagtaatccgccttttccacagtaatctgaattgtaccctttattaaatattaaatttctatgcatatatgtgggtgtatttttggttttctgttctatttcattgattggtcttttcatgcattaataaaactgcagccttttatttattgaagtattgtactatttagtacgcagataggactaagcctttttcatgcctgttttttgtagagtttgtagtttaggaatcattttaaaatttttacatggtttaacccaggaggcagaggttgcagtgagctgagattttgcgactacactccaacctgggcaacagagcgggactccattccaaaaaaataagaaaaacagaaaaataataattacatctgcaaagaccttatttccaggtaagtccacattcacaagtatcaggaattagaacttggacatatctttttgaggtattcaatttaacccactacacccagttgacaatatatatcaacaccctcttcacttagtgtcctgaaggaattgatcctatagtggaaaagtttttgtttctattttttcttttttttttttctgaaatcgagttttgctcttgtcgcccaggctagagtgcagtggcgtgatctcagctcactgcaacctccacctcccaggttcaagtgattctcctgcctcagcctcccgagtagctgggactacaggcgcgtgccaccacgcctggctaattttttgtatttttagtagagacggggttttaccatcttggccaggctggtctcgatctcctgacctcatgatccacccacatcggcctctcaaagtgctgggattacaagcgtgagccaccgcgcccggcctgttgctctttttctttgtacattctgttaatattttcatcgttaattagtaaatgatggcagtgtttttcagactgcaagttgtcacccattagagaatggtgaaattagcttagtcggtcacaatcaataccctttataatataaaagaatgtagcaaagtctattaatttctttttgaaatatatagacatgatgtaaaatgttttggtttttttttgttgttgttgttgggggggacagaatctcactctgacgcccaggctggagtgcagtggcacaatctcagctcactgcaaccacctccgccctctgggtccaagtgattttctgcctcagcctcctcagtagctgggattacaggcacccgtcaccacacctggctaattttgtatttttagtagacacagggtttcactatgttggccaggctggtcttgaactcctgacctcgtgatccacctgccttggcctcccaaagtgctgggattacaggcgtaatccaccgtgcctggtgtaaaatatattttttattatgagtctaagtcaaaaaagcataagaaacatgtatg

SEQ ID NO: 68572 - DNA, 1129 bp, Homo sapiens
agggacactcacaatgtggagagtcatcaggaataattagagctactaccattttaatttcagcttacaggtaaattttgtggctctttgaaaaccatagctttattttgtagtctagcaatttcttttattttgagaggtcctaagcacagaggatgaagtgtgcagggtggcgtgatggagtttagagcctcaggcttagctctggaatgacaagcctttcaagagtctaccacctctgaaggaagactgatgcagtccttcctttactatgtatgcctatgtcttctcagttattacactgtattatatttcattgtatacaagcccctttccttgttagacagtgagctccatgagggcaggaccgtgccttgtcattcatgggattttggccttattattttctgttgtactatggttaatttttttgttttgtttttgtgatcattcgtgactaggtatacttcaaaatcctactgtgaaaaaaacccaaaatttccacataatgtttactttttataaacattttaaatagaatcttcccctattagcccaygaaaatatttaagaggcaaaagaagtttaaagtaaaagaatgagtaacttttatagtagaacttgggaaatatttgttgaataaatatagtatgctgcgtgtttatttttaggtggaaatgcaatctgtaagcccactttaaattcttggatctatatatttataattagtaaataatagaagaatgttcacattggtacaaaaggaagagggatctctctctctctctcactgtatcatccatattaatataaaaaagaaggcaatccagacttagtttttctcttcaggaacaatgtaacactaatggaaatctaaatactttacagcaagatagcattacttcacatgtcacttttggatatttcacacctatcaccttttccaaactgacatttatcccaatactttatattgctggtactgtagcaacaaattgtaaaatctcaatcatgtgaccattgtttactcaattctgaatcttaggagatttggagtaatagcttacaagtgagttttttaaaattaagagttagaaaaatcatctcactgagttcccatagaaataaa

SEQ ID NO: 68573 - DNA, 678 bp, Homo sapiens
ccttgtgtggctggggaatccaggtggttcctagagttcactgggaagggaagggctcacttttgtgatatccaattttcagggagtagagggtagtggggaggtataaatgggttacgttggaaggcctggctggggtgacatcctccctgcgatgtccctggtggagtccaggcctgccaagggccccagtaatgggctctacttcaccagccctgggcacttcttctgcaggcctcaagatgcctggagcgtgtttkgagccagcccctgaccaaccatgatctggtcgcctccattagtgtgccaccgtacaccagagacctgtctttggcctccaggatcagtggaaccgtctgtcttagcgtacctcagcctttcccttaccaagtgattggtcgttaggtattctatttgagttcactctattcgtaattaaggacagatctcccctgggaagtggggatgagaggagaagtcttggcttcacttttggtgagaaagacatgaaagacactgaagaaagtttgaacttgtggcggggacctgtccctctcaggccttctaggcacgtgcctgagggaagtctcctgagtgtaagaagtgttattggcaaagcaatccaataaaataagctacctgtgatgcaaagccttcgatgtgctgtcctctttcctt

SEQ ID NO: 68574 - DNA, 727 bp, Homo sapiens
ggagtgaatatctcaaacagtggcgtgagattacaagcacttacataacagctctaccagtagatggctttatgatcttcagcaagtcactgatttcttagtgcattggttttcccacataaaattgagataatactgactacctcaggtgagcaacagtcttttgcctggattctttyaccatctttcttctaataaaactattgtttcttaaaagcgtaccctatctccctagctccaaaaggggaatggtgattgacataatcaaatcaggccttacacattgtgattcactggtccaggaatgagcatgtgacctgtattaacctaaccaggtgttaggaaaggatttatactctgcacttgagtggagggtttcctgcctcctcctgtctctggttagatgtgattaagaaggtgtgtggcattagttgccactgttgtcatcttgtagacaataagaggagccaccaataatatacagctgaaaaagaggacagcagagacagaaataatctggaaatttgatgatgtcattgaacaaattgtgttctgcctggagttagccctacctctgttcttccagttagataaaaatgtccttctatcgaaggttgtttcttgtggtaatgtggtaaggattataattgatggtaactgggaagcattttttgacacaatattggcagtcactaagcctgagttgttattctaaggcgtgggatcc

SEQ ID NO: 68575 - DNA, 727 bp, Homo sapiens
ggagtgaatatctcaaacagtggcgtgagattacaagcacttacataacagctctaccagtagatggctttatgatcttcagcaagtcactgatttcttagtgcattggttttcccacataaaattgagataatactgactacctcaggtgagcaacagtcttttgcctggattcttttaccatctttcttctaataaaactattgtttcttaaaagcgtaccctatctccctagctycaaaaggggaatggtgattgacataatcaaatcaggccttacacattgtgattcactggtccaggaatgagcatgtgacctgtattaacctaaccaggtgttaggaaaggatttatactctgcacttgagtggagggtttcctgcctcctcctgtctctggttagatgtgattaagaaggtgtgtggcattagttgccactgttgtcatcttgtagacaataagaggagccaccaataatatacagctgaaaaagaggacagcagagacagaaataatctggaaatttgatgatgtcattgaacaaattgtgttctgcctggagttagccctacctctgttcttccagttagataaaaatgtccttctatcgaaggttgtttcttgtggtaatgtggtaaggattataattgatggtaactgggaagcattttttgacacaatattggcagtcactaagcctgagttgttattctaaggcgtgggatcc

SEQ ID NO: 68576 - DNA, 727 bp, Homo sapiens
ggagtgaatatctcaaacagtggcgtgagattacaagcacttacataacagctctaccagtagatggctttatgatcttcagcaagtcactgatttcttagtgcattggttttcccacataaaattgagataatactgactacctcaggtgagcaacagtcttttgcctggattcttttaccatctttcttctaataaaactattgtttcttaaaagcgtaccctatctccctagctccaaaaggggaatggtgattgacataatcaaatcaggccttacacattgtgattcactggtccaggaatgagcatgtgacctgtattaacctaaccaggtgttaggaaaggatttatactctgyacttgagtggagggtttcctgcctcctcctgtctctggttagatgtgattaagaaggtgtgtggcattagttgccactgttgtcatcttgtagacaataagaggagccaccaataatatacagctgaaaaagaggacagcagagacagaaataatctggaaatttgatgatgtcattgaacaaattgtgttctgcctggagttagccctacctctgttcttccagttagataaaaatgtccttctatcgaaggttgtttcttgtggtaatgtggtaaggattataattgatggtaactgggaagcattttttgacacaatattggcagtcactaagcctgagttgttattctaaggcgtgggatcc

SEQ ID NO: 68577 - DNA, 675 bp, Homo sapiens
cctgccattgccataggtatctcttgcctggtgatgataaacggagccttgagtcctttcagcaatcagacccttagaatgattaatgtgtaattactggactgaaaaatagtaataatgataatccccacattatactgttgtattgagaaagaaataaaacgatctagggctagttcttggattcatgtctggcatgttrtaggtggttaatgaatgattgttataatatttaccaaatagtgcgtttgggataaaacatgttttatcccaagcattcagaggcaaaaaccaatcctacaaattatagtggtaatcggaaatttcatagaaagggtgaaatttcatactggctttggataatgtgtagaattcatgtgcagaaagaagtgtagagggacagacaaaataggagcaaagtgcaggatcaggaaatacaatggcatttttaagagacaggtgaggatgtaagcttggccagaaagaaaatattattaggagatgaatccccaaaggtacatggagatcttgtctgacattgtttacaacagcaaaaattggagaaaatcccaaattcacatcctcaaagacagtagatgaatgatctgttatagtcacacaaaatactataatgcgacactcagtgaatgaactgtgatgatgtgcagcaacaca

SEQ ID NO: 68578 - DNA, 675 bp, Homo sapiens
cctgccattgccataggtatctcttgcctggtgatgataaacggagccttgagtcctttcagcaatcagacccttagaatgattaatgtgtaattactggactgaaaaatagtaataatgataatccccacattatactgttgtattgagaaagaaataaaacgatctagggctagttcttggattcatgtctggcatgttataggtggttaatgaatgattgttataatatttaccaaatagtgmgtttgggataaaacatgttttatcccaagcattcagaggcaaaaaccaatcctacaaattatagtggtaatcggaaatttcatagaaagggtgaaatttcatactggctttggataatgtgtagaattcatgtgcagaaagaagtgtagagggacagacaaaataggagcaaagtgcaggatcaggaaatacaatggcatttttaagagacaggtgaggatgtaagcttggccagaaagaaaatattattaggagatgaatccccaaaggtacatggagatcttgtctgacattgtttacaacagcaaaaattggagaaaatcccaaattcacatcctcaaagacagtagatgaatgatctgttatagtcacacaaaatactataatgcgacactcagtgaatgaactgtgatgatgtgcagcaacaca

SEQ ID NO: 68579 - DNA, 992 bp, Homo sapiens
atgttctcctccagccacacaatgaggaagcctacaaagtcctctcttgcatgaagatctttgcacatgactttctctctgcctagagtgctcctcattcagatacctgcttggctagtcccctgactcccttcgggtctctgttcagatggcactcatcagggagtgtgacggtcctatgtaaaggaactaccacaccattccagcctgctcccttagcctgcttggtttttctccatagctagcactcatcaccatctcacataatgtactctatattcatgtatttgtttgatgtcggaaagttctgagatggcagggagtttgctcgccttgtccattttagcaatmttggtactcagaataataaatatttgtggatggaatgaatgttattcttttactaataatgtggaatgtgtgtgtttttttcccaagtctccattaaaagaccatggggtattcagttaaacaaataaattttgagcactttgtgtttatgctagacaccataataggtgccggcacaacagcagagatcaagactgagtcccttcaaggactgcaggcaagtataatcaataggtaatagaagaataagaggattcattcccaaggtgctctgggaaccattgatgggcacctcacccaggtctagggaatcagaatagatagctaagagaagctgccatcaaagctgagatatgaaggacaagtaacagttaactattaatttaaaaatcacacagtctataaatttggaaaggagattttttttttttttttttaaataaagggttacggcctgcaaggtacccatcctgagaggctaggaagcatagcctctggcagaagcagttagcaggcactttgtgggaggagaaggtggaaaagggatttatgctgatgggtttgctaagtatacatactcaacaggttataggaggagctataaatgaagtgggtcctaatgaatgtgtactgaaataaac

SEQ ID NO: 68580 - DNA, 585 bp, Homo sapiens
gagttattgggtttaatttatgtactgattagaggcaatacagtaagtaaaaatatgtaaggtttttatcccatatcccaatagcttaacacatgtaacaaacagatgtaagtgtgtatatacatatatacataaagtcacttgtgcacacacatatgcacacacacactattgagactatgcagaatagtgaaaataactagcacttatcataaccttaactttgtagtgaagaatagcccacaggttcatatggggttgaaaattctacttatattaatttttttaggcactaagctggcctgaaaaaaaagacttttggctatttatgaatgcatttcttttacttttctgagccacactttctttagcagtaaaatggagaaccaaagtagctgatctaattcatgaaacgtgtttttcagaggagttcatatatataaaagcactttgaaaagtggaagttctcatagaaatagaagtatagctatcattcattcattcatttattcaayatgtatttactgagcacctattatatgctagggactatactaactgctggggcctcattgatgaaaaaga

SEQ ID NO: 68581 - DNA, 804 bp, Homo sapiens
tattttgtttatctctcttgcatccgtatatttggaagcaccttactacaaaagtccctggtacaataaaaccacaaacccataaatcaaggactgaaaaaaaaaaagcaaactaatctcaaaggaaacctaatctaaggaaagctacttttaattacacaaaggttttacctctttttgcagcagcctaggcaaaaaaataaaagtggattatggagtcttcatcattcaaagaagcataccagagagacttattccaagcattgaacaaagcagaactcactgagacagtctaagtaaagatgttaaatgatataatgattggaactgtctttttaattttaaaaaacacagaaatactcttcatacttccatttctcaaaatataaattatcagtgaatgtgtctcacaccaccacccgggccatctctcttcctcactactctgtaagctccttatgggcagagtccgttctagaacagtgtatactctgcacctagaacaaagcagccattcactaaatttgctgaaaggaagaaagaaaggaagaagcaagggagtatagaaggagtgggtctttgcttaccctatattgactcaaatgtttcctttgccaaacttgaccatctgtaattctaaccatacacttatgtggttgactgacagctttttttttctttctttctttttttgagacacagtcttgctctgtcaccaggctrtagtgcagtggcacgatctcagctcactgcaacctctgcctcccaggttcaagtgattctcctgcctcagcctcccgagta

SEQ ID NO: 68582 - DNA, 804 bp, Homo sapiens
tattttgtttatctctcttgcatccgtatatttggaagcaccttactacaaaagtccctggtacaataaaaccacaaacccataaatcaaggactgaaaaaaaaaaagcaaactaatctcaaaggaaacctaatctaaggaaagctacttttaattacacaaaggttttacctctttttgcagcagcctaggcaaaaaaataaaagtggattatggagtcttcatcattcaaagaagcataccagagagacttattccaagcattgaacaaagcagaactcactgagacagtctaagtaaagatgttaaatgatataatgattggaactgtctttttaattttaaaaaacacagaaatactcttcatacttccatttctcaaaatataaattatcagtgaatgtgtctcacaccaccacccgggccatctctcttcctcactactctgtaagctccttatgggcagagtccgttctagaacagtgtatactctgcacctagaacaaagcagccattcactaaatttgctgaaaggaagaaagaaaggaagaagcaagggagtatagaaggagtgggtctttgcttaccctatattgactcaaatgtttcctttgccaaacttgaccatctgtaattctaaccatacacttatgtggttgactgacagctttttttttctttctttctttttttgagacacagtcttgctctgtcaccaggctgtagtgcagtrgcacgatctcagctcactgcaacctctgcctcccaggttcaagtgattctcctgcctcagcctcccgagta

SEQ ID NO: 68583 - DNA, 646 bp, Homo sapiens
tcttacccagcttggccttgctatgcagtagakttggactttcgttggtgatgggaaactaacaacaaattactcagtattcattttatacctttgggactgtgtgtaaacaaatatgtccttgtctttcacttacagctcttttaagctaattcctattcagaaattctgaatcgaggtaaataatgctcttagcggttttggcagctggtttccgtcattatttcagatcaagaacggagttatttatttttgaaaaaggtcataattgttgatgtttatgtgcctctgaatgcaaggcattgtgctgggtggtacccacagctagttaaatagagccttctgggtcaggagcttacactctaaaatggatagtttcaacagagcaggagaggagaagggcagagaacgtggagctaaaaccataatacagagtttgtggttaagagtttgtggcttctgagccagagtatgaatgagtaagtcactggataagggaggaagattgtgtccttcctctggcagaagagctatcagtggagaaggggcaagatcatgttcagagcagaataaacgaacttcatttatgtgacagaagtagggatctgtgggaagttggcaggggtagggtgaggtgagtttgtgt

SEQ ID NO: 68584 - DNA, 956 bp, Homo sapiens
tttctctttgtttgttgtgaatgaacagcgaggtgaaatagtatttcataatcaccccattcgaattttcctccccacgaagcgccgagaaatctctaaataaaataaataaacaagccaagaccttaaaataaattccagagggtaaagtgctacgtgtgggttatcacagctgcggggaggctggggctgggaggtggggaagggaggacaaagggccaggggccttgtcagttatcaggaatcgkatcccccagatccagagactgacaaggaagggcagaagatcagaggaatggtttgaagatctgcagcagcatggagctggaacagactcccccctacttcatttcttccttctttttctttcagaatcttctggtcctccttctctcactgaaaaccaaagaaactcttgttccctgttcccttggcactttacaacctctcactcaaaatactcctcatccggggctctttggataatgtctgcctgccctctgagctagtccaaccttctcaagtgatagaggaagaaaccatagcaaagagaacatggaaggaacatatctaagactctccagcaagttaatgacagggttgggcctggaagccagggggcttgactccctgtcaagtcagctttcatctacctgcacttatctctagatgtctttgagatgcctcctatgccgctggattttctccactggctgttcccaattttttgttttgtgcatctcagcatctccagaccttcaggtcctagcaaggtgcctggaacatggggtcactcatcaaatgtttgttagatatgtggatggatgaatggatggataaatgaatgaattggtgggtggatggatggaagggtggatggatggaaggatgaatgggtgaattggtgggtggatgcgtggaagggtacatagatggatagatggatgaatggatgg

SEQ ID NO: 68585 - DNA, 956 bp, Homo sapiens
tttctctttgtttgttgtgaatgaacagcgaggtgaaatagtatttcataatcaccccattcgaattttcctccccacgaagcgccgagaaatctctaaataaaataaataaacaagccaagaccttaaaataaattccagagggtaaagtgctacgtgtgggttatcacagctgcggggaggctggggctgggaggtggggaagggaggacaaagggccaggggccttgtcagttatcaggaatcgtatcccccagatccagagactgacaaggaagggcagaagatcagaggaatggtttgaagatctgcagcagcatggagctggaacagactcccccctacttcatttcttccttctttttctttcagaatcttctggtcctccttctctcactgaaaaccaaagaaactcttgttccctgttcccttggcactttacaacctctcactcaaaatactcctcatccggggctctttggataatgtctgcctgccctctgagctagtccaaccttctcaagtgatagaggaagaaaccatagcaaagagaacatggaaggaacatatctaagactctccagcaagttaatgacagggttgggcctggaagccagggggcttgactccctgtcaagtcagctttcatctacctgcacttatctctagatgtctttgagatgcctcctatgccgctggattttctccactggctgttcccaattttttgttttgtgcatctcagcatctccagaccttcaggtcctagcaaggtgcctggaacatggggtcactcatcaaatgtttgttagatatgtggatggatgaatggatggataaatgaatgaattggtgggkggatggatggaagggtggatggatggaaggatgaatgggtgaattggtgggtggatgcgtggaagggtacatagatggatagatggatgaatggatgg

SEQ ID NO: 68586 - DNA, 544 bp, Homo sapiens
ggagggtcccggtgccgctggccgggggtatccctgtggaacagacacaggtcaccacacgggccactcctggtactccatgaccaacccacagctccacacaggacacgcacacaaacaaccacgtgcaacatacacagggacacatgtgcagacccccagccggacacggccggccatctcccaacacagctgcacagggactgacccacagcccagccatggctcctgaccgacaccctgccacacgccatgggcagccacaccactgcgtacggcacctcaacagacacggcaaagcacacggccacacccacacccgcagctgcacacacgcacacagccactgcgcacrgcacctcaacagacacggcagagcacacggccacacccacacctgcacacacgcacacagcggggtgtggcattcacgtggaaactcacagccacggaggtcacagccacgcaccggggactcactcccactggggagccagggaggggttctgcgggtgctgggctctgcactggcccctgagggctg

SEQ ID NO: 68587 - DNA, 638 bp, Homo sapiens
ccactgatgatgcggtaaacggcattccagtttggagagtggggctgatctcggtccatcaccgtgaggtttgcgaccacggtctccacgcggttttcggggacctcccctgcaaactgcaaaatggaaggaaagaatgtcacaaacccgtgttaagtgtaaatatgcacagagaagtgcacgtagcatatgtgcagctcaacgagtgttcacaaacagaacacaccgtgtcagcccagctcgagtgttcacaaacagaacacaccatgtcagcccagctcaacgagtgttcacaaacagaacacaacgtgtcggcccagctcaaggagtgttcacaaacagaacacaccatgtcagcccagctcaaggagtgttcacaaacagarcacaccgtgtcagcccagctcaacgagtgttcacaaacagaacacaccgtgtcagccacgcccagatcaggaatcagagaagacaggctgctcaggggtgcacgggagtgcacgcctcatagcacggctgccggggccccactgaagcaggcgtgcagacctgcccggcaggtgcgtcagccctgcagccacggcagagggccactgatggagcggcttcaacaatgggcacttcttttcattcccagtccc

SEQ ID NO: 68588 - DNA, 1092 bp, Homo sapiens
ggggcccctacccttcctgcttctgccaggtgcagagaattcattaaaaagtgatttggccattttcaagttcaagaggagggaagaaaaccacagtgggccatccctggggtttttgctcacctccccatagctcagcatgtaaattttgcagaacagccatcaataatgcaggcggccagcctgccctagaaaggcatcaaagcttcctgagtcgagcgtgccctggccatacccagcatcggctggccggctgcacagccagtgaggcaccctggcaggagccacgcctggaactcagatcctgaagttctcctggatgctgcccccaccccagccaccatctagggatggtctcatctgccaggctgcaagcacgcctcccccacctgctctgggctctctgcacctagaggcggtacatatgggggtataaaaggagtcccaaggccctgtagcccaggcttgcagatgccctgcatcccttccttctgggtgagccagagccagtcccagcacgacggcggctgctgctctgggagcttctccagctcctctcaggtcagcgctgttcccactgcttcctcctggaccacacactccccaagggccttccctgctgtcactgctggaacctccatccccttggaagctgcgagatggagcagacagagatctgggtcctgctctccgtctcatcctcaggctgcacagcacctggggtctgtccggagcctgagaatgtgactccggcatgaagattagatgctgtgggaggagggagtgcaggcaccacggaaaacaggctggcgggtcctcacaagtcaagagtcaccacggggcctggcagctccgctcctgggtatgtatccaaaagagctcaaaccaggggttctgacaaacacttacacgccctcgttcaaagcagcgccattaacagcagccaaaagggcygaacagccaagggtccattgagcgatgaatggacaaagagaacgtggttgccccatgcagcggaatattattcagccattaagaggcatgaaacgcagacacgaactaccacggtgacgctcggtgagagacaccaga

SEQ ID NO: 68589 - DNA, 689 bp, Homo sapiens
cactctctggcaacaaggaccgctccctgctttccggccaactgcgaaaacatgctccatctaggcatctacgcttttttctttttgctacgytcaggaatctgctttttaaggccaaatgacacacttttgagaattcttttctggatgcagaaataaaacacactcatgataactagcacacgctcaccgggaaacatctaaaggcacaatgaggagaaggcactgaccgtctcacacccaacacacctgctggaacgctggggtgtagccctcttgccaaagggtctggatcgtacatctttaacacagatgggctttctgctgcttctccttctttttaaaaccaactttattattgatcaaagaaatgaaaggaagacattttccacatgtcaaatgtgcaaaagctactttaaaataatgatggtacctaatcgtgatggcacagagggcagctggccccttccatggcctccggggggagggggaggcctcagcttctcagaggcggtttagctgtgcatacacaaaacccttcaaaatgtgcccactcagcaaattcactgctaggagtttatcctaaggaaaaaatcgcaggtgtggaaaaccctggctgtccaagctgacatcgtttctgagagcagagtagggcctggaacaaatatttactgaacatccctctgtgc

SEQ ID NO: 68590 - DNA, 689 bp, Homo sapiens
cactctctggcaacaaggaccgctccctgctttccggccaactgcgaaaacatgctccatctaggcatctacgcttttttctttttgctacgttcaggaatctgctttttaaggccaaatgayacacttttgagaattcttttctggatgcagaaataaaacacactcatgataactagcacacgctcaccgggaaacatctaaaggcacaatgaggagaaggcactgaccgtctcacacccaacacacctgctggaacgctggggtgtagccctcttgccaaagggtctggatcgtacatctttaacacagatgggctttctgctgcttctccttctttttaaaaccaactttattattgatcaaagaaatgaaaggaagacattttccacatgtcaaatgtgcaaaagctactttaaaataatgatggtacctaatcgtgatggcacagagggcagctggccccttccatggcctccggggggagggggaggcctcagcttctcagaggcggtttagctgtgcatacacaaaacccttcaaaatgtgcccactcagcaaattcactgctaggagtttatcctaaggaaaaaatcgcaggtgtggaaaaccctggctgtccaagctgacatcgtttctgagagcagagtagggcctggaacaaatatttactgaacatccctctgtgc

SEQ ID NO: 68591 - DNA, 649 bp, Homo sapiens
atcacctacactaatcagccaggaagtcagttcatcacctacattaactagccaggaagtcagctcactgcctcctgccggatgcagcgagggatgcagggtggcaggaggggtacctggcagagctgttggggggcaggggcaggggtgggagcacagggagaggccaggcaggggtcggggcatgaggtctgggcgcacacagattgaagttcacgaggctgcctcgaatccactcaggggtggatttaggcagaaaatsccccaggtgtggcacagagccctggaggctctgctgcacagcagactggagagaaagccaggacccgggggggtgacagggcaggagagtggccccgtgcagccccagagaggaccacagccaggggtcaagggcaacaggacaactgctgcacttggccttgccctgggaggccccagcgaactcaccagggctggtttgtcagtggattcaggagggaatgatgggtggagataatcgggtttgtctcataagggtctgcccgggaagctggggccacctccccctcggtcctctcatgggcgccgtccgcgctggcaagggcttggctctgggagttgagtgagtgtgtcctggagagggagctgcggtgcctctgacctcact

SEQ ID NO: 68592 - DNA, 836 bp, Homo sapiens
gggtgtgggttccctccaaggcgtatggaactgggaacagtccatgagggtcttggaagtggccgaggggtaaaggtgttggagactttcttcatcagtgacatcggcagccaacacgcaccgtgcgtttgctcagggccaggcagtgctataagaaccctacacacgttaactccaattttcatcagaatctgtgagattggcattgtcttggtccctattttacagatgaggaaactgaggctcagaaaggttagaaaactttcggaagatgacagcgtgtggctgggtgagctaatgtgtctaacttacggaatccttcaaggaatcttctggagcatcaccctgcaaagccagcagtgagcacttgtgcgtgttgtgcgtttgaatgtttacaggctggctttagggtgacacgtgtcacagtcgtcagcgtactcaggctggggatgcgtcctcgccaccctcagcccacagagcygggtggaaaatggaacaggatctaaagacactggggaggtaggaaaaactctaagatggccccaaggatgtcaggtgctggtcccagatgtgaagacagatgtgttccctccccactgggctacgtttttgaccttaagacagggctgggtggacgccatccaaccacatgggccttcgaaagctgaacgttctccagctggaggcaggagagaagggcatgcgggcatcctatgcaccttgctgggtgacagtggaggagacacgtgccgaggcatgcaggtgcccttcagggggtggctgtggccccccgaatagccagcaaggacatggagacctcagtcctgcaaccacaa

SEQ ID NO: 68593 - DNA, 527 bp, Homo sapiens
gcagtgggaccccttggcctccctcctgggctccagctccaggcctggaagggctgaacaggcggatgcagtcccagctgacaggaagtctgaggagcagcttgtaatgagcttcgttggctgacaggttttttttttattaaaaaaatttgttttttttgagacagagtctcgctctgtcaccaggctggagtgcagtggcatgatcttgacttgctgcaaactctgcctcctgggttcaagcaattctcctgcctcagcctcctgagtacctggtattacaggcatgcaccaccacctggctgatttttgtatttttagtagagacggggtttcgccacgatggccaggccagtctcaaactccygacctcgggtgatcctcccgcctcagcctcccaaagtactgggattacaggcgtgaaccaccgcgcccagctggctgacagttttatgttaccacgagtgcagctccttgtcagggcaggtctgtgattgtgctacggctcattaacgagattgcaaatc

SEQ ID NO: 68594 - DNA, 821 bp, Homo sapiens
aagatgagtttccgtttccccagggctcctctgccatcacttcccttccaagccaggagaaatcctttaaccagaacctacgctgtgccttatccccaccctgtctgcacccccagccctcccccagcccctcagggctgtttctttttctggctgccacactccagctcctcacatacacacacaaagtgaagcagaagctccgcgaccccatgctcatgagtagaatcaaagagagcctctcattcctcaagggtcacagatgtccagtctgtgataagattggggtttccagctgttttactgggcgggacattaaaacaacacccctggccttctggtagctcagtgggagggttgrgaagctgcctcctgctactgcctttactcctgctctgcctggtccctcacggcagtcagaggggtcttggtaaatcaatttatgccacaccacatcactctttgggtttcagaatcaaccaccaagtccctcccatggccacacgcccctgagtgacctggccttgacactctctcagttcttctctctcaccctctccctggccatttctattcagcccctctgacatcctggctcttcctctaagactctgagcatttgcacttactgttccctctgcctggagcactcatcccctcgatatccccatgattctctctgccactgcattcagtcctctcagaagtgactttcttggccaccttatctgaaatcaaacttcaatggcatcccacattctctggttcccagactgtaactaagagttacttatccctgtctttgatcataaactccatga

SEQ ID NO: 68595 - DNA, 772 bp, Homo sapiens
gggtaggagccctgcacacctgggtgggggctctacacacctgggtgggggctctgcaaacctgggtgggggccctgtccacctgggtgagggctctgcgcacctgggtgagggccctatccagctgggtgagggctctgtgcacctggtggggtgtgcagtgtccaccagacgatcctacctgacagggttagtccaggggtcacaaaccacagcccacaggccaaatccagctcctgcctctagcaggtcaccatccactcctccagcagcgattcactgagggattctctgggccagcctgcattcttagtggctgggacacagacaggggcaagatcagagccgccccaccctcagggagcccacagcccagcaggaggaagcggatggtaggcaaaactgagctgccacaggtgtgaccctccccatgaggaaatgccacgtggtgtgaggagatggtgargcatggccagggagtgggccagggctgcgtgtgaatagggtgggggtcctatcgtggcagagaagccatcggaggagagacctgatgaactgaggtggtgagccctagagccacatgctgggcagagccagggaggagtgtcctgaccccgcctttggggagcaggaggaagcccccagtgcccaagcgtcggccacagcttcgacctcgagtgagcttggggagtggccagcgtggctcaggtgtagaaggcccctctgctccaggggtagggcagtgagctggaggccaggaaggaggaggcca

SEQ ID NO: 68596 - DNA, 1657 bp, Homo sapiens
catccacaactaacaagcatattttattgtaaatatcaatattgcgtattttctaattttcaaattatgtagattcaagttttatttactggcaaacttactaaacaaggataaacaataagtaatagaagacgatcttttctttggcataattatactatccaataagaataatttatttcaggataaagtttatataccttcttgagttgattattctattaatttgtttaataagtaacattttcagaactagagtttataatatctaaagacactttatatatatgaaagtccttttgttttcctctcaaataaaatatcaattcactaagcagaaaattcttcagtcatattttttcctctcaaaacaccatgcgttaatctaccataccttgcaattagtgttttagattaaagaaattgttttcattcttacttggttacctttccagtgaggaaaacaaaacaaaacaaaattcttttgctgtcacagtcttggaaagacaagctggaagtcagtttccctctcatggttagattggactgctatatttgcttttataaccatgtactacttgacatcctgacaaactgctttgttcctctggttctccctgagagaagaaagataggaatctgagaagccaatctgtggtccagaaagagccggtggccatgtctgccttaggttacttccatctagaaataaacaggcctggatgtatgatagacaaatgctgtaattgttgacttggaagccagacatgttagatgagcacgctattgtgcacactttttctcttcctttgtgcccatacacacaataagtaggctttaaaatacgtcaaatatttaaactaattgatgaactaagaaaaactgaaatggagtagctaaaaatgattgatattaacttagaaccattacataatacaattctattttatatattttgyttggtgctgagtcttttttcatccaatttcaagaaaagctctctctctctttctcattgcctcttctcaatgaaatatcagtcttctctctatggaaattctattatgcatgctgtatatttttactctcacccatgctcttcatgaacctcacttttaaaataaattcttgccgggtgcagtggctcacgcgtcatcccaacactttgggaggccgaggcggcggatcaagaggtcaggagatcgaaaccatcctgactaacacggagaaaccccatctctactaaaaatacaaaaaaaaactagccgggcgtggtggcgggcgcctgtagtcccagctactagagaggctgaggcaggagaatggtgtgaacctgggaagtggagcttgcagtgagctgagatcgcgccgctgtatacagccagggcgacagagttgagactctgtcacaaaataaataaataaataaataaataaataaataaataaataaataaataaataaattctatctcctcattctttatttatagtactgcattagcttgttttactgtaataaactaatgctcttcttttaacagtctactgtattttagttttaaatttagtaatcatatttttatcttctaaactttttcttgttttcctatttttccattctattacttaatgttttttgcatgaatttaatact

SEQ ID NO: 68597 - DNA, 1657 bp, Homo sapiens
catccacaactaacaagcatattttattgtaaatatcaatattgcgtattttctaattttcaaattatgtagattcaagttttatttactggcaaacttactaaacaaggataaacaataagtaatagaagacgatcttttctttggcataattatactatccaataagaataatttatttcaggataaagtttatataccttcttgagttgattattctattaatttgtttaataagtaacattttcagaactagagtttataatatctaaagacactttatatatatgaaagtccttttgttttcctctcaaataaaatatcaattcactaagcagaaaattcttcagtcatattttttcctctcaaaacaccatgcgttaatctaccataccttgcaattagtgttttagattaaagaaattgttttcattcttacttggttacctttccagtgaggaaaacaaaacaaaacaaaattcttttgctgtcacagtcttggaaagacaagctggaagtcagtttccctctcatggttagattggactgctatatttgcttttataaccatgtactacttgacatcctgacaaactgctttgttcctctggttctccctgagagaagaaagataggaatctgagaagccaatctgtggtccagaaagagccggtggccatgtctgccttaggttacttccatctagaaataaacaggcctggatgtatgatagacaaatgctgtaattgttgacttggaagccagacatgttagatgagcacgctattgtgcacactttttctcttcctttgtgcccatacacacaataagtaggctttaaaatacgtcaaatatttaaactaattgatgaactaagaaaaactgaaatggagtagctaaaaatgattgatattaacttagaaccattacataatacaattctattttatatattttgcttggtgctgagtcttttttcatccaatttcaagaaaagctctctctctctttctcrttgcctcttctcaatgaaatatcagtcttctctctatggaaattctattatgcatgctgtatatttttactctcacccatgctcttcatgaacctcacttttaaaataaattcttgccgggtgcagtggctcacgcgtcatcccaacactttgggaggccgaggcggcggatcaagaggtcaggagatcgaaaccatcctgactaacacggagaaaccccatctctactaaaaatacaaaaaaaaactagccgggcgtggtggcgggcgcctgtagtcccagctactagagaggctgaggcaggagaatggtgtgaacctgggaagtggagcttgcagtgagctgagatcgcgccgctgtatacagccagggcgacagagttgagactctgtcacaaaataaataaataaataaataaataaataaataaataaataaataaataaataaattctatctcctcattctttatttatagtactgcattagcttgttttactgtaataaactaatgctcttcttttaacagtctactgtattttagttttaaatttagtaatcatatttttatcttctaaactttttcttgttttcctatttttccattctattacttaatgttttttgcatgaatttaatact

SEQ ID NO: 68598 - DNA, 712 bp, Homo sapiens
ggatccagtttcagctttctacatatggctagccagttttcccatcaccatttattaaatagggaatcctttccccattgcttatttttctcaggtttgtcaaagatcagatagttatagatatgcagcattacttctgagggctctgttctgttccattgatctatatctctgttttggtaccagtaccatgctgttttggttactgtagccttgtagtatagtttgaagtcaggtagygtgatgcctccagccttgttcttttggcttaggattgacttggcgatgcgggctcttttttggttccatatgaactttaaagtagttttttccaattctgtgaagaaagtcactggtctatttttaggctagggtaaaaggcttctgcagtttgcttcaaggttctatcttgaaacccaagagagaggcaaaaaagatttttaaaaaaggtttgaagctaagctcttgagtttcaattccctgctctcaaattccattccatttctatgaaaagcagctacttcctgctgagaagggtgtagttagggagtattggaatggaatctgttgatcaggagctggaaatattcttgagtccctggattcatagtagggatttgttggagcattatggtgtgaggacctaggatttttggggaaagcgtgtcctgcattcccatataaagtgtacggcagcaataaaatccatagc

SEQ ID NO: 68599 - DNA, 712 bp, Homo sapiens
ggatccagtttcagctttctacatatggctagccagttttcccatcaccatttattaaatagggaatcctttccccattgcttatttttctcaggtttgtcaaagatcagatagttatagatatgcagcattacttctgagggctctgttctgttccattgatctatatctctgttttggtaccagtaccatgctgttttggttactgtagccttgtagtatagtttgaagtcaggtagcgtgatgcctccagcyttgttcttttggcttaggattgacttggcgatgcgggctcttttttggttccatatgaactttaaagtagttttttccaattctgtgaagaaagtcactggtctatttttaggctagggtaaaaggcttctgcagtttgcttcaaggttctatcttgaaacccaagagagaggcaaaaaagatttttaaaaaaggtttgaagctaagctcttgagtttcaattccctgctctcaaattccattccatttctatgaaaagcagctacttcctgctgagaagggtgtagttagggagtattggaatggaatctgttgatcaggagctggaaatattcttgagtccctggattcatagtagggatttgttggagcattatggtgtgaggacctaggatttttggggaaagcgtgtcctgcattcccatataaagtgtacggcagcaataaaatccatagc

SEQ ID NO: 68600 - DNA, 712 bp, Homo sapiens
ggatccagtttcagctttctacatatggctagccagttttcccatcaccatttattaaatagggaatcctttccccattgcttatttttctcaggtttgtcaaagatcagatagttatagatatgcagcattacttctgagggctctgttctgttccattgatctatatctctgttttggtaccagtaccatgctgttttggttactgtagccttgtagtatagtttgaagtcaggtagcgtgatgcctccagccttgttcttttggcttaggattgacttggcgatgcgggctcttttttggttccatatgaactttaaagtagttttttccaattctgtgaagaaagtcactggtctatttttaggctagggtaaaaggcttctgcagtttgcttcaaggttctatcttgaaacccaagagagaggcaaaaaagatttttwaaaaaggtttgaagctaagctcttgagtttcaattccctgctctcaaattccattccatttctatgaaaagcagctacttcctgctgagaagggtgtagttagggagtattggaatggaatctgttgatcaggagctggaaatattcttgagtccctggattcatagtagggatttgttggagcattatggtgtgaggacctaggatttttggggaaagcgtgtcctgcattcccatataaagtgtacggcagcaataaaatccatagc

SEQ ID NO: 68601 - DNA, 712 bp, Homo sapiens
ggatccagtttcagctttctacatatggctagccagttttcccatcaccatttattaaatagggaatcctttccccattgcttatttttctcaggtttgtcaaagatcagatagttatagatatgcagcattacttctgagggctctgttctgttccattgatctatatctctgttttggtaccagtaccatgctgttttggttactgtagccttgtagtatagtttgaagtcaggtagcgtgatgcctccagccttgttcttttggcttaggattgacttggcgatgcgggctcttttttggttccatatgaactttaaagtagttttttccaattctgtgaagaaagtcactggtctatttttaggctagggtaaaaggcttctgcagtttgcttcaaggttctatcttgaaacccaagagagaggcaaaaaagatttttaaaaaaggtttgaagctaagctctygagtttcaattccctgctctcaaattccattccatttctatgaaaagcagctacttcctgctgagaagggtgtagttagggagtattggaatggaatctgttgatcaggagctggaaatattcttgagtccctggattcatagtagggatttgttggagcattatggtgtgaggacctaggatttttggggaaagcgtgtcctgcattcccatataaagtgtacggcagcaataaaatccatagc

SEQ ID NO: 68602 - DNA, 604 bp, Homo sapiens
ctacagtgatctatgattgcatcactgcacttcagcctaggcaagagagtgagatcctgtcttgaaaaaaaaagtttatttatcaaggaattgtgggacataccaaggtcaaatgtaaatcacagaaaatgtccaaagtttatcattttaattcttctcttaaggcagaaagttgtgctattttttaaaataaaaatgccaagtacttcttataataaatgatcatcatgaaatgtgaaaaaattaaaagcttaataaaatgataaaaggatttttctctctgtcactttgcaagccagggaccccyggccggtgacaccatgcctgggcctcgcttggccatgctacctgctgcaggagactgcccactcatttggcccaccccagttgagtctggcttgcccactgcttcctgagttctcttctagtgtccaagaagaatgaggatgctgacaatcgaagagtatacaaggtgagaaacagctttcagcaggaaggggatgtgggagtggtcccactacacaaaggcaggaaaagttccctaatatggctgagcctggggcccttatgggctcagaatagggagtgcatgctgattggtttg

SEQ ID NO: 68603 - DNA, 604 bp, Homo sapiens
ctacagtgatctatgattgcatcactgcacttcagcctaggcaagagagtgagatcctgtcttgaaaaaaaaagtttatttatcaaggaattgtgggacataccaaggtcaaatgtaaatcacagaaaatgtccaaagtttatcattttaattcttctcttaaggcagaaagttgtgctattttttaaaataaaaatgccaagtacttcttataataaatgatcatcatgaaatgtgaaaaaattaaaagcttaataaaatgataaaaggatttttctctctgtcactttgcaagccagggacccccggccggtgacaccatgcctgggcctcgyttggccatgctacctgctgcaggagactgcccactcatttggcccaccccagttgagtctggcttgcccactgcttcctgagttctcttctagtgtccaagaagaatgaggatgctgacaatcgaagagtatacaaggtgagaaacagctttcagcaggaaggggatgtgggagtggtcccactacacaaaggcaggaaaagttccctaatatggctgagcctggggcccttatgggctcagaatagggagtgcatgctgattggtttg

SEQ ID NO: 68604 - DNA, 604 bp, Homo sapiens
ctacagtgatctatgattgcatcactgcacttcagcctaggcaagagagtgagatcctgtcttgaaaaaaaaagtttatttatcaaggaattgtgggacataccaaggtcaaatgtaaatcacagaaaatgtccaaagtttatcattttaattcttctcttaaggcagaaagttgtgctattttttaaaataaaaatgccaagtacttcttataataaatgatcatcatgaaatgtgaaaaaattaaaagcttaataaaatgataaaaggatttttctctctgtcactttgcaagccagggacccccggccggtgacaccatgcctgggcctcgcttggccatgctacctgctgcaggagackgcccactcatttggcccaccccagttgagtctggcttgcccactgcttcctgagttctcttctagtgtccaagaagaatgaggatgctgacaatcgaagagtatacaaggtgagaaacagctttcagcaggaaggggatgtgggagtggtcccactacacaaaggcaggaaaagttccctaatatggctgagcctggggcccttatgggctcagaatagggagtgcatgctgattggtttg

SEQ ID NO: 68605 - DNA, 604 bp, Homo sapiens
ctacagtgatctatgattgcatcactgcacttcagcctaggcaagagagtgagatcctgtcttgaaaaaaaaagtttatttatcaaggaattgtgggacataccaaggtcaaatgtaaatcacagaaaatgtccaaagtttatcattttaattcttctcttaaggcagaaagttgtgctattttttaaaataaaaatgccaagtacttcttataataaatgatcatcatgaaatgtgaaaaaattaaaagcttaataaaatgataaaaggatttttctctctgtcactttgcaagccagggacccccggccggtgacaccatgcctgggcctcgcttggccatgctacctgctgcaggagactgcccactcatttggcccaccccagttgagtctggcttgcccactgcttcctgagttctcttctagtgtccaagaagaatgaggatgctgacaatcgaagagtatacaaggtgagaaacagctttcagcaggaaggggatgtgggagtggtcccactacacaaaggcaggaaaagttccctaatrtggctgagcctggggcccttatgggctcagaatagggagtgcatgctgattggtttg

SEQ ID NO: 68606 - DNA, 619 bp, Homo sapiens
aggaagtttccaggattgtaccaagacctcacatggatacgtcctaagcactggcatttactgagcgtgccgttctgagctggtgagccagagggatgagaactctgcctggagaagtgggtgcccagcatgtatgtcaaggcttggccyggacctgagggagtccttgctgaacgtgcggtgcaggacttacatttcagggctaacgtttgccacgaaaaccagcccaacgtgggacatgaaagcatcttagccgcagcagccgagtccagcaatgtggacagccagacgcatgcttggtggaggcagccagcgcccccatcctggtctcggtcatcagttccatcaatgacaaatgctgctggggcccatgaggaccacccgcgccactcacatgttgctttccttctgcgatctgctagcttccgagatggccaaggcagatgcactcatggctcagtgagaaggtgaacgtcacctctgcgttcactgctaatggagactggagtaatgatgtctggtccgcgttaaggcgggcagctcggcagcccacacctttggttttctggtctcaggcccattatggataagctggtgtggggtggggcaggggagtttc

SEQ ID NO: 68607 - DNA, 619 bp, Homo sapiens
aggaagtttccaggattgtaccaagacctcacatggatacgtcctaagcactggcatttactgagcgtgccgttctgagctggtgagccagagggatgagaactctgcctggagaagtgggtgcccagcatgtatgtcaaggcttggcccggacctgagggagtccttgctgaacgtgcggtgcaggacttacatttcagggctaacgtttgccacgaaaaccagcccaacgtgggacatgaaagcatcttagccgcagcagccgagtccagcaatgtggacagccagacgcatgcttggtggaggcagccagcgcccccatcctggtctcggtcatcagttccatcaatgacaaatgctgctggggcccatgaggaccacccgcgccactcacatgttgctttccttctgcgatctgctagcttccgagatggccaaggcagatgcactcatggctcagtgagaaggtgaacgtcrcctctgcgttcactgctaatggagactggagtaatgatgtctggtccgcgttaaggcgggcagctcggcagcccacacctttggttttctggtctcaggcccattatggataagctggtgtggggtggggcaggggagtttc

SEQ ID NO: 68608 - DNA, 467 bp, Homo sapiens
  misc_feature (1)...(467): n = A,T,C or G
gnnnnnnnnnnnnnnnnnnnnnnnnnnnnnnnnnnnnnnnnnnnnnnnnnnnnnnnnnnnnnnnnnnnnnnnnnnnnnnnnnnnnnnnnnnnnnnnnnnnnttagtgcagtgacctggaagcatgcttctaaccaaaggaagcatgcctggaacagggagggtccccaaggcccctaccctggcgaacctgccacagactagaagcgggtaattgcagggcactcagacaaggtkcagggcacccatcaaacttcctgcagtggattttcctgacagcttcttcaaaaggagcccatctaatgtattaaaaataactgcatttgtgtccgatcagcacagagatgctcagaaagcctccagttaaaaccagcggggtggagatctgtgttttgacagctccaaccccaaatacctttcatgcttctgcctgtcaggaagaaccacagaaaccccgagggtctcctgg

SEQ ID NO: 68609 - DNA, 467 bp, Homo sapiens
  misc_feature (1)...(467): n = A,T,C or G
gnnnnnnnnnnnnnnnnnnnnnnnnnnnnnnnnnnnnnnnnnnnnnnnnnnnnnnnnnnnnnnnnnnnnnnnnnnnnnnnnnnnnnnnnnnnnnnnnnnnnttagtgcagtgacctggaagcatgcttctaaccaaaggaagcatgcctggaacagggagggtccccaaggcccctaccctggcgaacctgccacagactagaagcgggtaattgcagggcactcagacaaggtgcagrgcacccatcaaacttcctgcagtggattttcctgacagcttcttcaaaaggagcccatctaatgtattaaaaataactgcatttgtgtccgatcagcacagagatgctcagaaagcctccagttaaaaccagcggggtggagatctgtgttttgacagctccaaccccaaatacctttcatgcttctgcctgtcaggaagaaccacagaaaccccgagggtctcctgg

SEQ ID NO: 68610 - DNA, 467 bp, Homo sapiens
  misc_feature (1)...(467): n = A,T,C or G
gnnnnnnnnnnnnnnnnnnnnnnnnnnnnnnnnnnnnnnnnnnnnnnnnnnnnnnnnnnnnnnnnnnnnnnnnnnnnnnnnnnnnnnnnnnnnnnnnnnnnttagtgcagtgacctggaagcatgcttctaaccaaaggaagcatgcctggaacagggagggtccccaaggcccctaccctggcgaacctgccacagactagaagcgggtaattgcagggcactcagacaaggtgcaggrcacccatcaaacttcctgcagtggattttcctgacagcttcttcaaaaggagcccatctaatgtattaaaaataactgcatttgtgtccgatcagcacagagatgctcagaaagcctccagttaaaaccagcggggtggagatctgtgttttgacagctccaaccccaaatacctttcatgcttctgcctgtcaggaagaaccacagaaaccccgagggtctcctgg

SEQ ID NO: 68611 - DNA, 1148 bp, Homo sapiens
aaataaaggtaaaagaattagacaaaaggaaaataaagatagagaagagtaaacgtgggacttgggttagcattcacacttatgccctcatggttccatacattaaatatttaggctacaaatatagctctaatctcccagacatcagatcaaaaaaggaaaacaaacaggattagttacaagattcatagtgtgcataaagttagaaacaattaatgatggaaagtcagctttgcccgctaccaagacctgagagaaatttttgctaagggtctttattaaaagtatgttatattatacattggcttagtagtggtcattcaaattttatttctttgcttcttgtttctttttgcatagcttgcaaacatcagcctttcctccaggagttcttcaagtgtttgactctatcatcctgttatcaatgcctcttacaatgattgctaaaagggtaaattgccagaatattttcyactttcactagcattctttcttgccaaaagatttatattaatcctactttaattaagtcattaatcaaaggccaggttgtaaaggtctgcaattttcatagttctataactgtgctgtttgctgatgatagcgtatgtaaatgcagacctaattcttcagaatacagatttttttcccttgaagttctagcctgactatagggaaatttttttagagaaatgaaactgtcttttataaagtgggtaaaaatatgaagaatatagcatcaccttaattgtttgcctaagttaccttaattacattaaccatattatcattttatattaatacttatatatttgtatgatagatgtattattttcatagatgtgctgataaaccagctctccagaagaacaatacaaaacaataacaaaaacagatttgttgtgtttgtagatttccatgatacaaatacacccaccatagtcaatttcaagccactgatgggcttaatagccagtttgctgaattcttgaaaatttcaaaattggttcttgcaagccagtatagacttggcttacatgtgttgtactagtgcaattgttaatagtaactactttcattctcaaaaaaggaagcagaaactttctctggaaatcaaaaatcttggctggatgtggtggctcatgcat

SEQ ID NO: 68612 - DNA, 574 bp, Homo sapiens
gatcatgattgagaagagaggaaaaaaaggcgacagtttaaaacgtgtttccttgggattattcattattcatgtgttagctaccaaaagcattaaatattttaactaattctttatattggaacataaaataagaattcatttgttatgttttaatttcatcattcttytagttaatgacaaatttaatagccttaataaacaggaatctatacagatttttgttttgttaagctccacagtacaaagagttatttatgtttctaaaagtactgtgtgtcatataattacttttatcaagtttaaccttgttttaagttgcccttctttttttccttcccaatcacattaaatgtgataagattcattgggaagaagagcagaacacacaaaacgataaagttgtaatgtatctatcaacatattgaagacatgctctccatttcttcttcttaccaaagtgtggatttcttgcactaaaacattaagtgtgttttcagaatgattaggaaagtcattaattatcagatttggtaggaattgcttcctgcctcttccttctttcacttgtatt

SEQ ID NO: 68613 - DNA, 758 bp, Homo sapiens
attgtcaagataaagcacagcttctggataggttgcagcatgtctgaagaaaaggcacatattaagcttaaatttcagctttaattatccatgtttgctacctacagcccagatttactatttaattgtcacattctcaatttatttctctcatgggaacccaattcaatgttatttttccttctagaattctaatgccataaaatttataatcatacaaacracatatgttatctgtagtagtcacaaatttaaaaaaattctggatattttaatatgtattataagaaatactttactgcatgtacttcaaatcttagaattttgttgagttttcctgctaattacatgaaacatttttgaccacctgttatgctagatatgaaggaagctaagtgataaatttatgatcccctgtttccatctaggaaattgttggagacacaagtaaagctagatcccttaagtaaatggtggcttaattccatctttactttcctcggggaaaggcattctatcaaaagagttggtaaaagcttggataatactagtctttctaccttacatgtacttcacaaacactaaagacaataattacaagcaaatgttctttttcttctcctcctttttctttctaatggctttaaatcgttaaagtgagactcacacactttaccaagatcacattaaacctagaaacctaggtctcttgagcctccctaagagctgagcccataaaacaacagtatctcttatca

SEQ ID NO: 68614 - DNA, 603 bp, Homo sapiens
cccgggagatctggggctcagagaacaacactgcctctgattcagggtaaatgaggaaggagccctgagttggggggagacagaaaaagctctggtaagataattgtcctcctgaatccccacctgggctccctggttccgctttccttccccaaatgtaccttgaacttgcccacaaggtgtccagatccttcctcttctccacctccatcctggcccccttgccctcggtacagaggaaacacattcagccagtcttcaaagtggttaaattcttcctycagggacctgttgtagatctaaaaggcaaggacttcagcaacagcccgatgtccagaatccaaaggagactttcctcttcccagtacccagtcaccttcagggtggcaactgctttttttggggacacagtgcctttgacttcagcctcaccctggtcttggatctccccaaccatagaaatgaggttgaccccatctggaaacagcaaaaatgccccagtcagaaatatctgggtgggtaggggatgggcagatggaaccagagcaaaaagcccaatctgttacctgaatctccaggatcatccatttcatcttcatcaaa

SEQ ID NO: 68615 - DNA, 603 bp, Homo sapiens
cccgggagatctggggctcagagaacaacactgcctctgattcagggtaaatgaggaaggagccctgagttggggggagacagaaaaagctctggtaagataattgtcctcctgaatccccacctgggctccctggttccgctttccttccccaaatgtaccttgaacttgcccacaaggtgtccagatccttcctcttctccacctccatcctggcccccttgccctcggtacagaggaaacacattcagccagtcttcaaagtggttaaattcttccttcagggacctgttgtagatctaaaaggcaaggacttcagcarcagcccgatgtccagaatccaaaggagactttcctcttcccagtacccagtcaccttcagggtggcaactgctttttttggggacacagtgcctttgacttcagcctcaccctggtcttggatctccccaaccatagaaatgaggttgaccccatctggaaacagcaaaaatgccccagtcagaaatatctgggtgggtaggggatgggcagatggaaccagagcaaaaagcccaatctgttacctgaatctccaggatcatccatttcatcttcatcaaa

SEQ ID NO: 68616 - DNA, 1268 bp, Homo sapiens
cccacttccatcctcctccgtgccaccagcctggctaacccgtagttcccatcccttagtgacgaggaccagttcagagttggggagaggtgctgtgaggaggtccaagcaaactcggcttggtgctttctctggagctccaaggaaggaggtggccccttgaagctttggtagtggaactctcggattcagccatgtctgtcaccacccctcctcctggtctctccagtggccaaggggtaccttttctgctccagccagaaggacytggatttcagcccattggaactgaaagagtccctggagtgagtggggctcaaacgtggggctaggtggcttagccaagtggatgccccactgcacgtggctgcaggaaagaccaataccccttgtccctcatggcccttgctgtgtcctagacttcagccctacagccgagggggatcctctcagcaggactcctgctggtctgtgttcccatggcccagaccaacccatggacattcaggacaccctggagggtcctcacaaagaagggatgttacccacagggctggccctgagggtcctgctgggcccaagggagcagctgatggggtggccttcagcccttctggattccttgcaggggctgggcctggccagcctgtcctctgccctagaagcacccaggggtgatgtggctctggtgaagcgcacaggtcctggagtccagttacgaggcctggagcttggcttgtcctaatattagcagcagggcctcggggagcctctgagagcttcagttttcttagggataatgaataatgctgtctttagatttttgtgaagatgaactgggataaagcagatggagtgtttagcacaggtcctggcgcatcggaagtgtttagtgaggatgaatgattaggcttcatcttcccctctgcatcctcttctgaagaaacctgctcagagttcaaaaggcccaacccaggccacacctaaggaggccaacagtgtctgctggcctcagacggggttagtcagcgtccttggtagtgtgtacttgagagggctgccatgtgaagccccattctgtaggtcaccaatagatccatgtgcaaacagatcaggggccacgaaggctctggcccgtggacaggcggcagggccggcagaaagagagacctttcctagcacacctcgaatttgtcttcatgctaacatttctgtctcctaactctttcctccagtgacctcttccccaccaaggctagggagaaaag

SEQ ID NO: 68617 - DNA, 562 bp, Homo sapiens
tcagcaagactaccattccctgctcaggaaggcccccggtcaccttctcaggtccctgactctctgcccctgccccagcagtgttcctggggtcactacctgcatgcacatcctgtctcagaatatgctcctggaggcccaggaaatgccccaggtcccaacagggctgcatgttcctgtttggaccatttgtgggaacaaagagagcactgtggctttccagtatctgtgtgggtgttcccaygggccagcttcagggctcccgtacaagaggctgggacacaggcaatgaggagaagcagtctggtgggggggcggtgtggattaatttgatgagaaccagaatgaaaaagattcagggggaggacaatgcttcagttcctaaatggtcaggttatttctcctcattcattcctctcttccactggctccctctctctctctctccttccctcctcacctctgtcttttttactctgtttcttggtctcagtctctctctctctctctctcctctgtcctgggacaggatttcattcatcttcctgtaagtgctcacatt

SEQ ID NO: 68618 - DNA, 562 bp, Homo sapiens
tcagcaagactaccattccctgctcaggaaggcccccggtcaccttctcaggtccctgactctctgcccctgccccagcagtgttcctggggtcactacctgcatgcacatcctgtctcagaatatgctcctggaggcccaggaaatgccccaggtcccaacagggctgcatgttcctgtttggaccatttgtgggaacaaagagagcactgtggctttccagtatctgtgtgggtgttcccatgggccagcttcagggctccsgtacaagaggctgggacacaggcaatgaggagaagcagtctggtgggggggcggtgtggattaatttgatgagaaccagaatgaaaaagattcagggggaggacaatgcttcagttcctaaatggtcaggttatttctcctcattcattcctctcttccactggctccctctctctctctctccttccctcctcacctctgtcttttttactctgtttcttggtctcagtctctctctctctctctctcctctgtcctgggacaggatttcattcatcttcctgtaagtgctcacatt

SEQ ID NO: 68619 - DNA, 578 bp, Homo sapiens
gtgacatggaaataaaaatgattagcttccagggatttagtagggatgaaaggttgtgaatatgtatatagtgcttggaaaatagaaggaactccattcattcattctttcggtatttcccaaacacctgctttgtgtgaggtgctgagggtgatatggtagggaaaaaagcatataagggccctacagasgactgacaaaactatggcctacaagccaaatttagccaaatgactgttttttttttttttttttttttgtaaataatgtttcattggagcacagccacaccaattgttttatgtattgtcgacagctgctttcatgctataggggtagagttgagcagatgcaacagaagccatatgtctcataaagcctaaaatatttacaatctgcctctttatagaaaaaagtttgttgacccttgctctagatgctgacaatgaaattggagaaaataggcataaataaataaacacacaagaacaattagtgtgtaataattactccagaaaaaacttgccagatataataaagcctaactgttgggaaaataggtagccatggaaatctta

SEQ ID NO: 68620 - DNA, 578 bp, Homo sapiens
gtgacatggaaataaaaatgattagcttccagggatttagtagggatgaaaggttgtgaatatgtatatagtgcttggaaaatagaaggaactccattcattcattctttcggtatttcccaaacacctgctttgtgtgaggtgctgagggtgatatggtagggaaaaaagcatataagggccctacagaggactgacaaaactatggcctacragccaaatttagccaaatgactgttttttttttttttttttttttgtaaataatgtttcattggagcacagccacaccaattgttttatgtattgtcgacagctgctttcatgctataggggtagagttgagcagatgcaacagaagccatatgtctcataaagcctaaaatatttacaatctgcctctttatagaaaaaagtttgttgacccttgctctagatgctgacaatgaaattggagaaaataggcataaataaataaacacacaagaacaattagtgtgtaataattactccagaaaaaacttgccagatataataaagcctaactgttgggaaaataggtagccatggaaatctta

SEQ ID NO: 68621 - DNA, 1255 bp, Homo sapiens
ttgtcttttagagttaagtagaatttgattgaaagagctttgttcttgtccttcatataaataaaaagaaaagaaaaaagacaccaagactcagagaagaaactcatgctagatcatttcacaatctactgaaagaaaagtaatcataacataaattgtctgactcccactgttgtttttctttaatgtattactgtcgatattgttgctattattactatcattgtaaagagaaacattcaagaaataataaaatcataaaaggttagcactggagagagctttggtttcttgaacttgtgaggtgaagtaagtgattggtaatgtgaccgaaaccacatcaattgagtagcaggaccctgagatttctgactcttcttacagtgtttttctgtctttatcttactgcttctaagttcaacaggaatctttttaagaaataggtttaaaagagcgtgtctcacctgaagcaatcgcactcaggttttgatagtatttagctcaatccattgagaaacaatacttattttgagaattagaaaaaatacaaccattgcaaaatatgtattttccaaattagacctatatccttattataaccttttagctcaatttactatgcacctgttgcttagagtatagggcattattttaaatgccagatgaataaatttttgctctgtagtcacagataaaccaacgttacatccatttattttctatattcctgaacttgagggtatctatcctcttaacaggawaaatgtgcaccatatgtaaagcattttctattgtacttaaagatgttgtctttgtgactcatgcaagacttctactctctgaatttaccctgaaatcaccacaagcacctattaagtattcctcactactactgaatttgcagtcaaagtggaaatatgatgccttctctgggtttgaataccaaagggaatgtttataaagtaaaaataatattgcaatttgacttctttaataaatgtgaatggtgcatattaagtttgtaattaaaatactttctgtcattttggggcttttaaatgttggatgatgtctgtgtttcatttatattcactttttgaaattaataataaacatttccaaatagggatgattgtggttataacttttgcttggtctcatttgaaattccaggatctaagacttctccctctggttctctgtgtgtcttgtattacaattttgttactgttatttgtgcttgaaaaaatatttt

SEQ ID NO: 68622 - DNA, 757 bp, Homo sapiens
gggccacacataaaatacactaacactaacgatagctgataagccaaaaaaaaaaaaaaaaaaaaaaagattgcaaaaagacattgtgggaaaaaaatgaagaatgtttacaaatttgtgttgggtcacattcaaaggcattctgggccacatgcagcccactggctgtgggttggacaagcttggtttaaagaatagtgagactactgccacatttctcatacatgttccaataggagtagattgaactgtcttctagaggtagcagagtaattaagtaattaagttcatagtagttatgaactgtcttcaagaggtagaagaataattaagtgcaaggcctttactgcagtgaggagaatcaggaataattaagaggtagaattgctcaacccaatggatgaccacaatgtggggaaaacatagagtagggcagcaggtgtcattgcaaaaggtggagaaggtggcagaactgacatgtctgaggatatgtgaggaaggaggtaaaattaatcttaatctgttaatctctttctactgccaaaccatgaaaaataacaataaaaagtatttggttgagttcagtcattcaaaactstctgctattgcccaaagatacttggttctttctctggaatgatctatccctcttttcacacctagcacattcctactcatttttgagtcacatcctttaggaaacttccataaactgcactcctaatgtatgtttggctgctctctcctctgtaatgca

SEQ ID NO: 68623 - DNA, 663 bp, Homo sapiens
ccactaccatcattatttttgttataccatccttgttccaacagtacaagggccaaggccgtctacaaatctctgaacttatgccacataaatgtagaatgggatgcccttctagagattaaattagtgatttcctttttttccataaaataagttagcaggtgcctctggactgaaaaagaagacttgtcttattctaggaaagttcacaaaagtgatatcctttaaatacacaagaatagggcaactagacactttcttaattgtttcaagtataaggaatatctttagaagcaatttacaaataatattttttacagctgcaatcacaggggagttaatgagcaggtcagtttgtagaggggcaaagcaagccgtatcaaagtaaaatttgatgtgaggaacatcaaattttacattctgggcatagtagtcactctcrtgattgttcagcatgtgaatctttcagtaaggactacaaggtatctcaacaagagtgaccctcagaccttactttcagttcaattttctttattgttaaatatgcctttctcatatttcaaaataatcttttgtgactgactcttctctttcctttttataatacatatttaatattctagaaaactgcataaaaattgctagctttccttcaaactagta

SEQ ID NO: 68624 - DNA, 1227 bp, Homo sapiens
ggaaaagcctcatacaggcctggcagaggctgctcagaggaggggctccctttcagctccccctcacgtatgtgggcagcatacaagtccacatctcagctgctccccagctgccacataggagagggacaggtggaagcttgggggtctcaaggcagcacctgcacagagttccaacatttcctccacttaccacattcaatacccaaaacatcgacgggcatgaccaaaccaagccacatgacagtcgccaaccttgcctggctcgcctctagggctgaggaagcagagcccctgcctcgtctcacagccagtcggcaagcagagctcccaaatccagctcctacatcagcagcagcccggccatccagaatccacttccattttaatgacttggctcctctgggcctgcaaacaggaggctggtccagggacctggcctggggataggagtggcggctctgacagggccgtggggcagtctccgatgagcacagatctgcactctcctgactaaaaggggtcaccgtgcaagatgtcagctggaacgggggcagaagggatgctgggctctgtcactaacagtgccaagacaccaagctttgctgttgaccgagaraggctcagacaaaacacagctcagtgacactcttagggcatgcatccatggagcagcaggtcccaacacctgccagccagctcctaggcagacgccaccccagggctagcaaggaacaggagtgggaggcccatgtctctggacacagtggaggctgctcacagccagggagggctggccttctcagctgagtgacagggaggctgctgtccctgactggtgggtggagaacgacagtcgtctgtgcccgaggaggaggggctgcaggtgagcgcacccctaggataatgggggcctgtcctcagtcctgctgtggccacctgcccactaacgcctctctacatcccagtcaccttgtgaatgcataaacaggaacatgtacaacggaaatgtcagcgggtgctcaggagggctatgccagtggctacaggagagggagcgtggccgggggccctgtccaccaccccggacgctgtcgcatgcagcacaggccttgcgattcacatactttacacgggcatagaaagagttacgttaaaattaatctctttactgatataattaaattttaaatcctgagaagaaaagagagaagggagaatggtgcc

SEQ ID NO: 68625 - DNA, 438 bp, Homo sapiens
tttccaaacatgagtttttaacatagtgaccacgggcctctattttctaggctgtgagccatattattaccttgtttaatccttgtgaaaaccctgtgaagtattatccttattccataaatggggaaactgagactttcagaggcaaaacaaacagcctgaggccacataggtcagaaatggcagagttggggcctaagttcatgtcatctgacattgagttttttgctgcttgcactgagtgaagattatctctaggcaaattctttctttttttctttctttctttcttcttcttttttttwaatctggaagagaaatgctgccttgagtgtttgcttatctctctccagcaggttcccagggtcttggtttcggctctagccctgaggggcctgatgggcatcagcactgacctttttctgtgtggctgcaggc

SEQ ID NO: 68626 - DNA, 438 bp, Homo sapiens
tttccaaacatgagtttttaacatagtgaccacgggcctctattttctaggctgtgagccatattattaccttgtttaatccttgtgaaaaccctgtgaagtattatccttattccataaatggggaaactgagactttcagaggcaaaacaaacagcctgaggccacataggtcagaaatggcagagttggggcctaagttcatgtcatctgacattgagttttttgctgcttgcactgagtgaagattatctctaggcaaattctttctttttttctttctttctttcttcttctttttttttaatctrgaagagaaatgctgccttgagtgtttgcttatctctctccagcaggttcccagggtcttggtttcggctctagccctgaggggcctgatgggcatcagcactgacctttttctgtgtggctgcaggc

SEQ ID NO: 68627 - DNA, 737 bp, Homo sapiens
ttctctctcattcttgtgtttcccacagccgtgaggccctgcttcctttgtctggaacgcgtgtccccactctgcttctcatgaggtcctgggactgtggcctggccccgtactgaggaccctgaagtggtcactgtgcctccttgtgagtgtgctgttgggacaccttcctctggactgtccccgaggggcggggcctgccggtccacttccgcctccccaccttgagggtatgaatgagtgaagagcagctactctaacagctgtgctgaccgtggcctttggagccactgctttgctgaaacactcactgtagtgcacaagtcctgggtgaaaagtttctcaggactgcgggtgcctccggcatgagcagatgagggtcccacagctgccgacttccgtgctttttgttcctttgccctgaaagtgcaaggaactgtactggcggcaggtggagacccggaccttggcactccctcctgcctgcctgaccctctgcctctgaggacagcagtgccgggataggagctgcagrcctgggttcctgtcccagaggagggacctgctgattcagggagctgagcggagggatgaggtcccttgcagccttggagaccactcagtggacctgcaggaggatgggaagtgggagctgctgctgttcctcaggttttctccgggtgctttgccaggagtgcaccaagaattggaggcaggggcgagaattgtcactaagg

SEQ ID NO: 68628 - DNA, 528 bp, Homo sapiens
gaaagctctctttttccagcatggcagcctccctgcccaccattttatttcctattctaaccagtgaagcccacaggggaaagagcagcaggcttttggggttcagtttaaacaaatgaggtggtacagtgaggatgactgggacaagaaagaagctkgtaagtaatctgtagttaccatctaacttcctgccagttttccaaaaggattatgtatttttattttaaaattttacaattatctgttattttatgcaaaataggcatatcagccaggtagacaataaaatgagtttctaaaatgcaaaatccatttcttcactgacttcatcatgagactgcagatgagttcctacaggaaaaaaaaaattccccaattattggagataaaaatttatcacaagaagaggttaagttgatgtcagttctgtggcaaacatagtaatctgttattctagcaagattcttacctgcctggagtcaaatggtgaggaatagtgtgatatggttaaaggatcacaggatttgg

SEQ ID NO: 68629 - DNA, 684 bp, Homo sapiens
gagctccatcaggatttctctgtcaatatttttgtagaccataccctgtcaccataaatggtgcttggtagaaatgactgtatgcatgtgatagggataacacagaaaacccatggtagagagcatggcgactaacttggagggacttctttttgtgytttttttttttttttttttttttcgtttttgcagagatgcaggtattgtcatgttgcctgggctggtctcaaactcctgggttcaagcaatcctcccacctgtgcctccctaagtgttgggattacaggcatgagccgctgcctccccgcagcatggggggacttcttataagcatttttatttatttatttggaattcggatgggatagatcatgttggcctgataatgtatgtgcaagagcacagactctggggtctcatggacaagccccactctgccccttgcttaatgtctctgagcctcagtttcctcatctgtaacaagggcagaaatgccatccgtgtgcagcagagtaccgacgaaaggatggatgcaatgctcttatggcagtgccccagccaaagcacaaggaaaaaccacgaaagcaattccaagtttacaccacgtcccaaactggattttccattcgactataattcctcccaataagggctcaaaacgttgtctaaggaaagtcgattggt

SEQ ID NO: 68630 - DNA, 652 bp, Homo sapiens
  misc_feature (1)...(652): n = A,T,C or G
tactcttccttggctgtctacttcttccccattactgctgaggggcctgctgggaagatggtgagattctgaggaatgtcctggggggcagggcagggtgtggggtggggagaggtgttccacaaatcgtgaggttcttggaggaatctctaattctaagcaggcagtggcatgtgtgtgccatcttttgagtcttttcttatctaaatttcatagtttttttttcaacggtttctcacagtgacagtggcyaaagccctcacgggccctcctgttctccctccatggaacctactctggtccctgacataacatagcctgacacatccatcacagctctgcagatcaggcctgatggttctgagacactcagggattgagttcctttaaagactgagctgctctctatctttgctcctattttgagctttagttctttttttaatgatgctggttttacactgtccaatctgaagagcattcttcttgatgggaaaagcaaaagaaaaataggagctgaataacacatttcattgtggggtgcattatgtnnnnnnnnnnnnnnnnnnnnnnnnnnnnnnnnnnnnnnnnnnnnnnnnnnnnnnnnnnnnnnnnnnnnnnnnnnnnnnnnnnnnnnnnnnnnnnnnnnnna

SEQ ID NO: 68631 - DNA, 560 bp, Homo sapiens
tgttccttaatactattgcaggtaagatgtctcattctttaatctaataatatgtttatgttcatcaaaatcatggtaatgtagcctgatataatacatttttctctttggaattcaaatgcatcattagagtaaattttgaagcactcacattaaattttatcagaaactgtgcaagctcataccaaacttttagatgcatttattgttgaagaggcttttccttgctttccttctgccatttcctttgctgacagctttgtctgaaggtttattagagtcaacaaaccattgccagagtgtctggaaataataatgggaaaagtaatttcactactttgtcattctcagcaatagcagctagacaggagaataacaacaggattctgcctagtacagatgtcacctggawtatggcatgattaggttacagcatctttttttcttaaaatcttcaaataaaaatacaaaatcagattacattttctaaattatgagtaactgccatcaacctttgcagtaccatgcttgcaaatcaaaaggaggtagtggctttgttt

SEQ ID NO: 68632 - DNA, 733 bp, Homo sapiens
aaaacaaaacaaaacaaaacaaacaaaagacaaaaacaaacaaaaaaaagaggttcagagatttctattttaacataatgagcagaaggctttcataggttgaacacagaagcaaaggaaacatttgattggctacagataggtgtttgccttatttgggctggatccagcaggaagtccctagttagagaaaagtggacagtttctgattggttaagcttaagttttgttttactatttacctcagactttagttttcctacctaggaacccaacacattggagcaatctgagcctttaaattaattttttaacactgtttatctacttatttcttccaaatacaggatttctcaagagtaatttaagtgtaaaaaatctctggcctcccattacacacacgcttttcttttgacagataaatattaaaactacttaatcctttagtttttgctgtatttatcaattatgacttataataggatggtccaataataatgttattaagtatagtgcaaaaataccttagggattaaatcttaaagcaataaagacagaatgatatttattctcattctctctcactctccattttatttttatgaatagacatagtttttgtcaatgatttcatgtaatcaacaatggcaaggaaccaattttcagtgtacacrtaacatcattttatattgtttataaataattatttttcttagcattgccctaacatagg

SEQ ID NO: 68633 - DNA, 667 bp, Homo sapiens
cggaccctggggtgggaggcaggtggggcaacactgaggatcacccacccagttctcctccaggaagcctcccactgcccttctgactcccttaatacacccatcggggaccccctatgaggattcaggtccctgtgtgtcccactacgtgggaagcacctgagagtgtggcccaccctcaccctacaggacctgaactgacctccgcactggagaacaagaaatgtttgtggaggagtgaacaaaccattgattaactctttatttattcatgtgattagactctgtgccttagagccctggccctgtcttgatagagggtttcaggctgctgagagcagaggtagaaggtaggagttaggagttagcccaggaagacggctctgtccaaggtttgggacagtgtgaagccaggatggggtagaagtgtccgtgggctgtaagtgtgcaggggctggacacatgaggttgggcactgaatgtccasctcagggctggggtcaggggccaaaacctgctcagatcagaatggggcctgaggacacgtctcaattcattgtctccgcctggcccaggaactgcatcgggaaacaatttgccatgaaccagctgaaggtggccagggccctgaccctgctccgctttgagctgctgcctgatcccacca

SEQ ID NO: 68634 - DNA, 1260 bp, Homo sapiens
  misc_feature (1)...(1260): n = A,T,C or G
ggcattgactttgtgtcagggattcatggttttagattccagtttgtcctttccttagctatgtgtcgttcatatgctctaagaggcagttccctcatctgtaaaatgggagtagtatcaaattcacagggtgctgttatgtataagatcagatacataaggctcattgtaagcacttgataaatggaattgttgttagctaaatattctttaaatctttattaggattagtgtctttggtgaatgctaagcatattgtctaacaagaccttccctttaagacaacttactctgtgtgtgtgtgtgtgtgtgtgtgtgcatgtgtgtgtgtatttaaaaagaagagattaagccactgaggcgctagaactaagaaagcatatttccattttgaaagcctnttctattgtacatttcttttagcaacttgagttgtgttaatatagacaaataactagaaaccatccattcatctatatatctagccaattatttatccaacatttataaagtcttcattaygtggtgagcaataaaaatgcaaagaataagatcctaccctacctttaagggtttcacaatctaataaagatttatatcaaagagacatataaatataattaaagcagtgtttcagttgctatatttgtaatgtatcagttattagctgcttatgacactagatgcttgcacaggaagaagcacttaactgaggaggagaggatccctaaagggttgatgcttcatctaggccttgaaaagtgaatcgtttcttagatggccaaggaaagaactgggggtatcataaggaaagaggactttctgggcagaggctgtgcctgtgagaagataaaaaggatcagaagaacatggtgtattctgaggaacctctatagtttcaaatgtcatgactgtggagtgcttaagggtggcagtcagggcaaggctagaaaggtaggaagggccagattatgaatgagctagtgtggcatgataaagaatacagactttaccctgtagatattggtgaaccattacaggatttttaagagagaaacaagcaaattaacacttccactctggtggcagtgtggaatatagactagagggcttgggaagggaggctaagagacctgggcggaggctactgcaagcatccagagagtcatggtgagagactgagctaaggcagtggtgctggatatggaggaaagaaaatgtgtctgactggcctgtgtgtggggtgaggggtggggaggg

SEQ ID NO: 68635 - DNA, 2067 bp, Homo sapiens
  misc_feature (1)...(2067): n = A,T,C or G
tgtccttgacttctcacccccgtttaaataattatttttggtatctgtaacatccatartaggatcacaagtaccaatctatgaacttacacccactttcccttctcatctgtacaaatttcattaacaaagtagaaggggattctccctcaccctttcaaagaattttgaatgtattttgtgtgggcttattccaaagcagaactcagcgaacattttctgtaaagcgaagacagtaaatattttagtctttgtggaccacatacagtctctgttatatatactttttttttctttctttctttttttttttttttttttcatttgcagcttgaagggccatacatagataggtcagatttggcctgtaggcgaagttcactgactcttgttccaaagcatatggttctttatcactacagcagtggtctccaaaattttttaaaagtgtatccctcttaaaaaagcttcaagaatgtactcacagcctagatactgaaatgtttatttttatttataaaacattagatgtttttatcaaactaataaattatgtacattataaaacatgctcaaaaatataaatttaaaaagcatgagatgaaatgtgaatgtaaatagaagttctaaaagttctttctgtgccccaggagatcatcttgcctactttttgagcaatctgcatttcatcttggagttctccctgttggaggaaaaagatgatgcttgtcacatgacactggcccacaattttctagaagatcttaatatcagcctttatcttgagcctacttaaacccaagggaacttgattcatttggacctgccaaaataaaggttgaaaaacattacaagaatagacttaaaaaattagttctcaaagctattcagaaaatagactataatagaaaataagctcttcaagattataaaagtctccttcagggtcataatttattaaccatttcatttttttcactggtgaatgtacagtcttttaatgtgatatatcacttgaaatgccaaggctaccttttgggaaacagcatggaatccaggtaaatgcatttacttatgaaaccggactgttaagtgacnnnnnnnnnnnnnnnnnnnnnnnnnnnnnnnnnnnnnnnnnnnnnnnnnnnnnnnnnnnnnnnnnnnnnnnnnnnnnnnnnnnnnnnnnnnnnnnnnnnnaacaacgccccctccctagccttgttgggttttgacagtatcagggtatcagaaaagggaaaaacagtggcatagtaaagtagtaaaagaggctcagagagaagttgttatacacaacacagattagtgacaagctaggctattaacgatccaatattggacccatgacaattttttgtgatatgtagtatatggtaggtactttacgggggggagctaagtgctttacacacatttcctcattcctcctcagtcttatgagataagtaccaccacacccttttaggttaattttctaaatggtgtagaaaaagagcacacaacagagctacttttaggtaccaatcataggcaaaaccaacttgaacaaacatgaagggaaaagaaagtacatttgattcatacaaggaacctgtgttcacacagggtgatggtgcagctgtttcagggcaactggaaataggactgggaagttggagaactctgccacttctctctgctcttcttactatgtgggctccgctccctctttcttcaaagtggctctctcctcatggtgggaaacagagctggcagcaggtgctagctcacgtgtcccaacttccccacctgagagagatactctcttgctaaacctggaccacttcactggccagggtatactgccctgattgtctcgaccctttagatgtctctaacctctgtatccatcatggcctgaagggcaagagagaagcacacacaggccctatgggtgatctcggtgctctagaccaccacagatggtgtgcaatacaccatcctaagaaatgaaatctccttccaggcaaagggaaaggtaataagcagaacattcaagggaaaaaaata

SEQ ID NO: 68636 - DNA, 621 bp, Homo sapiens
tgctctgaaaagtagagacacctaacattctgcactggttggatgttcgcctctagctgtactcttcactttgactctagatggccagcttcccccaacattggctgttgtagaagtttgtgaccttggtcaaagagaggatctgagtgagggaggactctgttctaccccttccttttggtttgggatattctcctaacccaatgttagctgattgtaactgtcctttgtgatgcaaataaaatgggattgattaacttgagtgttatcccatggacagtggaaatctgggctctttaggcccatattttgtttccaagtagtagaggattccaccaycttgccaggtgttgggagagtcccactctcataaatgaagatggagtaggcacaggcacccgttagtacctggaatgactgcaggtcagtaacctcagacacgtgcaacatagctgaactcttatcactgccccacggtaggtatttattccccccaaatgatgataagtcaaatctgaacacagatgtaggtagtaggctagcaaagcttctagggtagcttagaagtagggagctggggagaatagattcccctccaggaaacgcagagagagaagcccg

SEQ ID NO: 68637 - DNA, 637 bp, Homo sapiens
ctggcattttctgctctttgtgtttcccagtcctcgtgtaggtggttctgtcccaaagtgatgtgatctcattaaaatcttcgaggctcctctgtacccctcctttctgtccagccgcatgtgcctgcccccagcttcatcacaaactgagccccatcccctctcctgggcctctccaccttctgcagctccgttgcacttccaattggcctgctaccttttctgctttagtctgcctcgtctctttctctgaaagctcatctctctcctttctcttctcccttgtgtgcttcagacaaagacagaccttttggaagtgagctcagctttctattctcacagctcgtttccccttctggttttcttcttatccctcttgtttaccccacattactttatcactctcctactccatgaccctaaawctctcttcttcacagaatactgctccctctcacaaactcctcctcttgctcactctgaagcctcagcaacaaacattatttcaaaacgtgccctagctctgcatggcctcttctttcattcagggcccttgaagctgtcccagctctgcctgcctcctttttaggttattcttttagaaggacatttcaaagatattctctttcacaccaca

SEQ ID NO: 68638 - DNA, 1028 bp, Homo sapiens
tttctgtttatacacatggcctttaagatgaatatatgatacacttctcggagtatccactttacaagcaaaaaatgacttctctctccttccatgtctaccttaaagaaataaagcaagtctgagcatggtggctcatgcctataatcccagcactttgggaggccgaggtgagaggatcatttgagtccaggagtttgagaccagcctgagcaacagagtgagactacgtctctagaaaaaaaaaaaaatccaaaaattagctgggcatggtggcatgcacctgtagtctcagctactctgggaggctgaggtaagaggatcccatgagcctgggagttcgaggctgcagcgagctgtgctygtgacactgtccactccagcttgggtgtgacagaacaagaccctgtctcaaaataaattaaaaagaatgaaagaaagaaatgaagatgtcagttcattggaatccttaggtgctggtttgttggatccatccctctatctcttctgactggttctgtgacctcttaatgatgctcagtggtggttaaattttaacaacacataacggggctgataggccaagtgttcagttaacagcaaataaagttctctagaagaaagaaaaatgtgtgtgcacgtgtgtgtgtatgcctattgtgtttaacagaaggagtgcttgtacagccccctacctgccccctcaaaggcaccattggaaagcatttgtatttaatgggaaataaaagagaatcatgcattgcagttacaagtgcaaaacagggaggagtggtataaagagatctcatctctataagtttatctgcctcccaaattgcccatgctctacttttattatctgtgatctgttgttcctgtatctgaaaattacttcctgaatctattaggaaaagtggatgaaaagaaatcagcagtcgcaaattctggtccaagcagaataaatcagggagggtggctctcgcgccacgggtataggcatgaacatatttcaagaacataatcgccgg

SEQ ID NO: 68639 - DNA, 1354 bp, Homo sapiens
tcctccgtcttctcactcctcctcacccctttttcctctgaaattagtaagaactgccacactggggctgattacaatgaagctgagattcattgctcagcccagttaagccgttttgtagcgtagtgaaagaccacagcagctgccactgaatagctttaagttccaacctcactaacctcttccgttttctagctctctgaccttggacaggtttcttctctcgatctcagggttttcgtttttaaatgatgacgataatatccacataagccatgtttctaaactgcctactaattcctgatgcacaccagtaacttgacacctgttaattccttcttctgttttgtatgttgtacatttaaattgcccttgatattgagggattagagtacaatgcaagtgtgaaaaagaagcaatctggagtttcttgcatgcataagttgcataggcaccggcagtaattgcagggccgtgaaacaggataaccatcacagctcataaatggtggtacattttaatcagattttagatgttatgaaggctccaagtaattacagttatttttgccttaaaattgaactgccgttattaaaatgcttttattaaatctttttttcctttggtagttatgaaagattgtagaatttctgagtcaaataaccgagcactagatgttgcatacataaaagttcttatgatttaggtgtaggaagggtcccagactcactgctaatgctggagcctgaagaagaaacagtggcttttcagtcacccctgttggttctggcttattcctcatcacctttactctgagatgtgccttattttccctttattgaccatccttatgtctgttttctctaaggcagttatcattattttcatttcccagatgagaagtttcaggatcaaatatgttagttcatcccaaaccattcacccatggtgtgctatttgctaggtaatgtgccaggagagcacacaatcagcgcaggctcacctggcctgtaggaaagggcagatccacgatagggggcaggtccccaagttcagcacagtgttccctctgttacaatctgctgaaacatcgggaaagacttagggcccatttcagagtccaaactggattattacaaatcctattattattaataatgattataatcatcctgaagatagggctctaagataatacagatggtccaggagcatccagataaacaagactgtctgggtctctgccctgggacagtgcatatcctatcggggtagcacatgacaggcataataacaacagcaatrttgactggcttctgatatttggaggcaccaagccaaggtattccatgca

SEQ ID NO: 68640 - DNA, 907 bp, Homo sapiens
tgcatttagtgtgtctctttagcctattttaatttggaacaatccctggttcattgtttttcattacactgaagtttttgaacccaatgggctacaatgtggcacattctggatttgtctgattgttttctcatgattagattaaaattaaatatcttggtcaagaatacaacataggagatactgcctttcctagaaggaagtcatacctcaaaggcatatgtctcccctatataacaaaaggtcctcattagagaagcattaagcttgttcatttctttacaagtcatgttgatgttgtggcttctcccccaaaaagatttacgatatattttaatcacaaccagatcggtaaaataattattaaacacccagttatatactgaccactgaatttgatgctaarattccaggcaaagaaaatatctggctaaaaacaacacataattcttagtaactgtggtcaacttcaccacagcaaataatcgtaaaaaggaaattgcctgggacgtaaattccacaggtgaatgtatcactttaaaaaacatgatggcagcaccttgcactgtggtttcccagcagaagcagcatcaatcttcatggaaagcctgactcgatgggattctgtgctgtgcggtagggtgaccccgcgggttcttgcatgccagaagtttcagtgagaaagctgacagttttgaaaatggaggaacctgactcctgtttttgaacagatgtggaaccactcacctttgcagggcagtggtttacttgaagctctatacatattattttccaaatacagaactaaattatatacagaaagaatggctaaagcctaaaaccggataataactagacaaacagtcctgaaattgatcaaaagatgtatctttaattctaaaaatgg

SEQ ID NO: 68641 - DNA, 720 bp, Homo sapiens
tctccgacgcaccactgtgtccccagcatccagctcctatgttagggtcctgaaatatatttgtttaattaataagtttgtgtcttgcttaccattgtatctttagagcctcaaacagtatatggcacacaataataatattaaaagtgatttttgaaataacaggcaggcttaaaaacgtatctagcactgggtgtgtgccaggtactgttctcagctcttgagatatgatattatttagttctctcaacaactatgtagggcaggtactgttcctagtcacagattaggaaagtgagggacaaagaagccaagtaacttgctcaaagtcacatgcrtggtaagtaaagccatcaggattcaaaaccaggaggtctagcttcagagcgtgtgctgttaaccactttaaataaataaacaagtcatgaaattgtcgtcaaaaatttctccttgtgacatcctccttcaacccaacagggcatgaggacatgacagctgtttcctacgttagcagctctctttactagtatagtcggagaacgcattaaccaatactacattgtataaaaagcactacctaaaacaccaataaatatcacactagggcatgagaaaaaaaatgttaaagaaagattatttatttttgttgcttacttaacctctgaagggttaaaagccactgatatccaaaaaggaaacttctgtattctaatttatgcc

SEQ ID NO: 68642 - DNA, 674 bp, Homo sapiens
ggttacaagaattgcattgctgagtgttgggctggaacctaatggaaatggctgagaccccacagggacctccaccatgagtaaggtcaactttaaaattgaatcaggttagaagagtcacgttatgctttggagccaggcagataaccctgactagcaaatgaagcttcagtgagaggcaaaactcagcaattttcacttcattcttttccaatatatagctaaagtgccaacgtagcatgacatttaaaccttacaataccatattaagagaacacaaatgcagcacagcaagtatttttcaaagggggctactaagaggctgagcttggagatttagagtcaagttgatttacagttacctaattatagrtaggaaccctgatcaccattccttgggccccaaatttgctgtcttcatagattgagggaattcaccaatggaactctcaaggtgcctcgtgggcaatcagtaaaggcctggggaattttacccacatttaagatagagtgaaacaaatccagaacatggttcatgagatggttctaagtttaacctccggatgacattctgagatcattatgtaggagctcagaatttagattctacgctaaataacctctgtgaacaccagagagaagggagcttgctcagctggtttttccaaggatcc

SEQ ID NO: 68643 - DNA, 566 bp, Homo sapiens
tcagctagtgtttgagagaaattatttgtgccctgatgaagtgctcaataatgctgtggttggaaccagagctctggatcccagaatcagctggctcgtaggcacccacctctctaaccgacagcagtgtcttggaatttaatatactttcaagtgagttttagtatgtgtgacatttttgagccaaaagctgagttcagagaaatgtcaattcggtgagacaattttcaagatgtgctattgtatcttaatgagatcctgatctcaggggtaatgtagtagctacctcctgtttaaggatgcaaattccctgattttctttgaaaccacagtagttaatgaatttagctaaagggagaagcccccctcagctcacaaaggtcccccataccattggtaaatatgttaataaatgtyacccagtactttccctatcaaaagtcatcaagttacttctagtgccgcagagttctaactaccccaagggaaggagctgacagtgataatatcatttccctgaaagtgttgggtttctgtttattttcaacgcaggcaagctggtaagt

SEQ ID NO: 68644 - DNA, 566 bp, Homo sapiens
catcttctgttataaataattgcattatttttataattgcatcttctgttataaacaatttcgataaactgtgaactgcttgagggcagagatcatttctcatttccctctatttaatattaattcactcattcactcattcattcatgtaaagagcatatactgagcatctgtgatatgccagacactatgctagccacggaaaatatagggaacaatcataataaaaccatggtctagttctcgctatcatgtttagtggttgtagggtaaacacacctgacagcaacaatgtaagcatacccttagatttatcctgtatagcatcggtacctgaatatgtgttccatgctagggaatccaggagtggccagcctggagatttgttgcttatctatgacaaacatctgaaccaccagctcatcccattgagcacaagccatacagaggattgaggagttggtttggggttaaatgaaggttgccagttgaagattgctagagggagagtgttaagcaaaaatgctgtttgcaggcagttatgggttttcctgcccaggaygttg

SEQ ID NO: 68645 - DNA, 765 bp, Homo sapiens
ggatgccaatctgagcattcttaacaccgtttttgtaaaagagagagagagagagagaaggatattcctggactgactgatactatggtgcctcattgcctgaggcccaaaagagctagcagagtctgcaaacttttcaatctgtctgaaaaagatgatgtctgccaatatgttgtaaaaaaaaatttttwaaaaaaatttaaaaaaagccctcaaaaaaagaaagtaagaaacctggggccaaagcacctgagatttttactacatgtcctgaagcataaatgctggcatatttctctgaagaaacagcttactaagaaaagtaaggaagaggttgtagaatatgctaagcttttggccaagtaaatgaaagaggctaaaaacaaaaataaaaccatagcaaaacaaaaacccaccaggaacacagactgccctctctgtgagcttctacttgtctgagtctagtcaaaagccagttttttttttttttgagtaacaaataaatagatcagtctccctcacaaaattgctaaattaaattaaatcaaggtgttggccagctgcattctttctgaggttccaggaaagaataggttttcggagattcctgcattccttggcagatgatgcctttctccatcttcagagacagcagtctaacaacttcaaagctctctctctgatcttttccctgccttttccatctttccatgcacccttgacattatggtgggtccacctggataacgtaggataacctcctca

SEQ ID NO: 68646 - DNA, 765 bp, Homo sapiens
ggatgccaatctgagcattcttaacaccgtttttgtaaaagagagagagagagagagaaggatattcctggactgactgatactatggtgcctcattgcctgaggcccaaaagagctagcagagtctgcaaacttttcaatctgtctgaaaaagatgatgtctgccaatatgttgtaaaaaaaaatttttawaaaaaatttaaaaaaagccctcaaaaaaagaaagtaagaaacctggggccaaagcacctgagatttttactacatgtcctgaagcataaatgctggcatatttctctgaagaaacagcttactaagaaaagtaaggaagaggttgtagaatatgctaagcttttggccaagtaaatgaaagaggctaaaaacaaaaataaaaccatagcaaaacaaaaacccaccaggaacacagactgccctctctgtgagcttctacttgtctgagtctagtcaaaagccagttttttttttttttgagtaacaaataaatagatcagtctccctcacaaaattgctaaattaaattaaatcaaggtgttggccagctgcattctttctgaggttccaggaaagaataggttttcggagattcctgcattccttggcagatgatgcctttctccatcttcagagacagcagtctaacaacttcaaagctctctctctgatcttttccctgccttttccatctttccatgcacccttgacattatggtgggtccacctggataacgtaggataacctcctca

SEQ ID NO: 68647 - DNA, 625 bp, Homo sapiens
ggggctccacagctggggttcaggtggcagaaagacggtgcgctgcctgttgctgtccatgccatcccatcgcatgagaggcacaggactgattcctcagaaaccccagcccaagaagcttcgggcacgggaagacccagctcacacagggctgggctgggcgtcacggagcacgggaggagccagttaccatctgtgctctgaggcctgggccctctgccgctgtcccctgctctgctgcaatcgcacctttggcctgggtcactccccgaggggacactggaggattcccattctggcggaaaggccctagaaatattaataattccgccagtgggcggcagcacaaaggctggcctcttccccactgtcagtggacgggcaccgccactccacataccygggacaagtcgtctgtcttccagcacctcgttctaaaacctgactggagagcaacaaaccaccggacatgggaggaaagcctttagcatgaaggagactataacaaatctataatttttttctcaatgctatttaacatcatgcaatactaaatcgccaaatttagtacttcacaaagtactaaaaataactgagtcacagtaaggtgaatgctattatttta

SEQ ID NO: 68648 - DNA, 2949 bp, Homo sapiens
tatatatgctatatgctatatataggactatatatatatacacatacacacacgcgtatatatatagtcctatatacatagtcctatatacagatttgccctatgtgtaacaactacgtagataaaaaagttatgaaattgtttttggttttacaatgctatattaaaaacattgaaattcaccaattgaacaatctatgcaagggtattatggttttttgttattgttgtttaagtcctgaaatacagagataagagctgagtgagyagccactggtggagaaacagtcttcacggggccagtatttttctgccccgtctcatttggctgcggatcaacacatgtcatttagtacaaacaagcaaacaaaaatagcaatatgcttgtgtgcctaccccagatgctttatgtgcaataatgaaatgaggaaggggaagataagagaatggagaaaaggatactgtaccagccagaatgtggagtcagaatgtggtgtcagaatgtggagtcagaatgtgatgaaatcacattgtgggtttctacatgagaatgtctgctggagttgtaggaagaggtcctgggtaaaggagcaggtgtgttcttagaaggccctcctgtctgctgctggaacacatcacctgtttattcgtcctccatttcccgctttgcaggtgtgtcagtttcactgagtgaccgtccgtaaaatccaaatctgatttgcttcatggccaaaccctgccattcaccataggcttccactccttcattcagtgatgtgtacttcttccccttcaactgcgccccagaaccatcctaccctccaccttcaaattcacagaattgttgttctgtcttgactcaaacttttttcctgccacagcagagcactgaaagtctcttaagttacagcttcacaacagaagtctaaagtctgcgcagaactagcacatctgcagccgtaggagcagcagaatgaccaggcagcagagctttattccatgttttcatctccattcctacaacagcagcggcagcagcaacaactgctactacttctaattgtggtaaaaatacttagaataataatgcataatgacaattgtagttgacatttttggtttatatatgattatttgtaatgttctacaatttacctttagtaatatacacataacttttgcataaacatcaggaccctaaaacaccacacctgatgattgaatctcacctatggacctaaggtcttcacatgctggtgcaggccctctcaccactccatctccaaacagaggatatggtccaccttctgagtcaatatagtagccctgacactcacatgatctatttgaggtcttggaaaacaagcttgccttgttaaaaatcaaaggatgggccgggcacggtggctcacgcctgtaatcccagcactttgggaggccgaggcgggctgatcacgaggtcaggagatggagaccatcctgactaacacgatgaaaccccatctctactaaaaatacaaaaaaattagccgggcatggtggccggcgcctgtagtcccagctactcgggaggctgaggcaggagaatggcgtgaacccgggaggcggagcttgcagtgagccgagatcacaccactgcactccagcctggatgacacagcgagactccatcttaaaaaaaaaaaaaaaaaaaaaaatcaaagaatggcttcaaattgtagtcagctgtttcgttaaattgcagcaggaagaaatttttctcagcaggtctattttcatgtcacttgctttcagagtaagaggttatttcagacacagtggtttgatttagtctttgttgaaaatcataaatagcctacaaacaacaaaaagggatgaataggatttgcgttcatgtggagtgcgtcatctgtgcttttaaatttatcctatgaaaagaaataaaaaatatgtaatatcgaacattggtttcctaaattagcaaatcgaccatttcctcaagttattccacgttcttccaagatgtgtcagaagcattctctggaggcagttgttccaaatggtgaagagtactagatggatcccaatctcacaggattcttgcttctattgcagaagagttactttccaggacttcaaaggtttagagaagctgcttgattcgtgtggcttgcagaggtgcatgggctttggagtcacgaaaagttaatcctggtcccagcccagcctcttagtagctgtgaggctttgcacaacttccttgtcttggaaagttatataaacctcatctgcaagaaaaggcatgatactgattgcaaaaatggcagcaactcttcatcccttcctgtatttatgccctttgtgatgtgcttttatagctgctttcattgagaggcagaatctgtttcccaaaccttgaatctcactggccttatttgctctggcagtagaaagctgtgaatatgaccatgtgccagtttggggccgaggcacaaaagctcttgaatgcttctgctttttatttcacaaccctgtcatctccataataacaagtccatgttagcctgctagaggatgagatactatagggaggaaaaccaaagtgccacagttgacaggcagctcaccctcagaagcagcattgcctagtcaaccagcagctgaccacacgtgcctgaaagggcccagcagagaccagaagaatggctcacttgagcccagcctagaaggtggaccagctcaatctaatacgttttggggaattttactgtgaagcaataggtaatacgtacacctagtgcagacaggatgccaggattcaatgacatgttgattgcaatttaccaggcaaacacaaggcaccctgtatgtactgatttccttttccctttatgtaaagttggatttctggttagacggtgttgagccatacagaagtgcacgtagaca

SEQ ID NO: 68649 - DNA, 2949 bp, Homo sapiens
tatatatgctatatgctatatataggactatatatatatacacatacacacacgcgtatatatatagtcctatatacatagtcctatatacagatttgccctatgtgtaacaactacgtagataaaaaagttatgaaattgtttttggttttacaatgctatattaaaaacattgaaattcaccaattgaacaatctatgcaagggtattatggttttttgttattgttgtttaagtcctgaaatacagagataagagctgagtgagcagccactggtggagaaacagtcttcacgggsccagtatttttctgccccgtctcatttggctgcggatcaacacatgtcatttagtacaaacaagcaaacaaaaatagcaatatgcttgtgtgcctaccccagatgctttatgtgcaataatgaaatgaggaaggggaagataagagaatggagaaaaggatactgtaccagccagaatgtggagtcagaatgtggtgtcagaatgtggagtcagaatgtgatgaaatcacattgtgggtttctacatgagaatgtctgctggagttgtaggaagaggtcctgggtaaaggagcaggtgtgttcttagaaggccctcctgtctgctgctggaacacatcacctgtttattcgtcctccatttcccgctttgcaggtgtgtcagtttcactgagtgaccgtccgtaaaatccaaatctgatttgcttcatggccaaaccctgccattcaccataggcttccactccttcattcagtgatgtgtacttcttccccttcaactgcgccccagaaccatcctaccctccaccttcaaattcacagaattgttgttctgtcttgactcaaacttttttcctgccacagcagagcactgaaagtctcttaagttacagcttcacaacagaagtctaaagtctgcgcagaactagcacatctgcagccgtaggagcagcagaatgaccaggcagcagagctttattccatgttttcatctccattcctacaacagcagcggcagcagcaacaactgctactacttctaattgtggtaaaaatacttagaataataatgcataatgacaattgtagttgacatttttggtttatatatgattatttgtaatgttctacaatttacctttagtaatatacacataacttttgcataaacatcaggaccctaaaacaccacacctgatgattgaatctcacctatggacctaaggtcttcacatgctggtgcaggccctctcaccactccatctccaaacagaggatatggtccaccttctgagtcaatatagtagccctgacactcacatgatctatttgaggtcttggaaaacaagcttgccttgttaaaaatcaaaggatgggccgggcacggtggctcacgcctgtaatcccagcactttgggaggccgaggcgggctgatcacgaggtcaggagatggagaccatcctgactaacacgatgaaaccccatctctactaaaaatacaaaaaaattagccgggcatggtggccggcgcctgtagtcccagctactcgggaggctgaggcaggagaatggcgtgaacccgggaggcggagcttgcagtgagccgagatcacaccactgcactccagcctggatgacacagcgagactccatcttaaaaaaaaaaaaaaaaaaaaaaatcaaagaatggcttcaaattgtagtcagctgtttcgttaaattgcagcaggaagaaatttttctcagcaggtctattttcatgtcacttgctttcagagtaagaggttatttcagacacagtggtttgatttagtctttgttgaaaatcataaatagcctacaaacaacaaaaagggatgaataggatttgcgttcatgtggagtgcgtcatctgtgcttttaaatttatcctatgaaaagaaataaaaaatatgtaatatcgaacattggtttcctaaattagcaaatcgaccatttcctcaagttattccacgttcttccaagatgtgtcagaagcattctctggaggcagttgttccaaatggtgaagagtactagatggatcccaatctcacaggattcttgcttctattgcagaagagttactttccaggacttcaaaggtttagagaagctgcttgattcgtgtggcttgcagaggtgcatgggctttggagtcacgaaaagttaatcctggtcccagcccagcctcttagtagctgtgaggctttgcacaacttccttgtcttggaaagttatataaacctcatctgcaagaaaaggcatgatactgattgcaaaaatggcagcaactcttcatcccttcctgtatttatgccctttgtgatgtgcttttatagctgctttcattgagaggcagaatctgtttcccaaaccttgaatctcactggccttatttgctctggcagtagaaagctgtgaatatgaccatgtgccagtttggggccgaggcacaaaagctcttgaatgcttctgctttttatttcacaaccctgtcatctccataataacaagtccatgttagcctgctagaggatgagatactatagggaggaaaaccaaagtgccacagttgacaggcagctcaccctcagaagcagcattgcctagtcaaccagcagctgaccacacgtgcctgaaagggcccagcagagaccagaagaatggctcacttgagcccagcctagaaggtggaccagctcaatctaatacgttttggggaattttactgtgaagcaataggtaatacgtacacctagtgcagacaggatgccaggattcaatgacatgttgattgcaatttaccaggcaaacacaaggcaccctgtatgtactgatttccttttccctttatgtaaagttggatttctggttagacggtgttgagccatacagaagtgcacgtagaca

SEQ ID NO: 68650 - DNA, 2949 bp, Homo sapiens
tatatatgctatatgctatatataggactatatatatatacacatacacacacgcgtatatatatagtcctatatacatagtcctatatacagatttgccctatgtgtaacaactacgtagataaaaaagttatgaaattgtttttggttttacaatgctatattaaaaacattgaaattcaccaattgaacaatctatgcaagggtattatggttttttgttattgttgtttaagtcctgaaatacagagataagagctgagtgagcagccactggtggagaaacagtcttcacggggccagtatttttctgccccgtctcatttggctgcggatcaacacatgtcatttagtacaaacaagcaaacaaaaayagcaatatgcttgtgtgcctaccccagatgctttatgtgcaataatgaaatgaggaaggggaagataagagaatggagaaaaggatactgtaccagccagaatgtggagtcagaatgtggtgtcagaatgtggagtcagaatgtgatgaaatcacattgtgggtttctacatgagaatgtctgctggagttgtaggaagaggtcctgggtaaaggagcaggtgtgttcttagaaggccctcctgtctgctgctggaacacatcacctgtttattcgtcctccatttcccgctttgcaggtgtgtcagtttcactgagtgaccgtccgtaaaatccaaatctgatttgcttcatggccaaaccctgccattcaccataggcttccactccttcattcagtgatgtgtacttcttccccttcaactgcgccccagaaccatcctaccctccaccttcaaattcacagaattgttgttctgtcttgactcaaacttttttcctgccacagcagagcactgaaagtctcttaagttacagcttcacaacagaagtctaaagtctgcgcagaactagcacatctgcagccgtaggagcagcagaatgaccaggcagcagagctttattccatgttttcatctccattcctacaacagcagcggcagcagcaacaactgctactacttctaattgtggtaaaaatacttagaataataatgcataatgacaattgtagttgacatttttggtttatatatgattatttgtaatgttctacaatttacctttagtaatatacacataacttttgcataaacatcaggaccctaaaacaccacacctgatgattgaatctcacctatggacctaaggtcttcacatgctggtgcaggccctctcaccactccatctccaaacagaggatatggtccaccttctgagtcaatatagtagccctgacactcacatgatctatttgaggtcttggaaaacaagcttgccttgttaaaaatcaaaggatgggccgggcacggtggctcacgcctgtaatcccagcactttgggaggccgaggcgggctgatcacgaggtcaggagatggagaccatcctgactaacacgatgaaaccccatctctactaaaaatacaaaaaaattagccgggcatggtggccggcgcctgtagtcccagctactcgggaggctgaggcaggagaatggcgtgaacccgggaggcggagcttgcagtgagccgagatcacaccactgcactccagcctggatgacacagcgagactccatcttaaaaaaaaaaaaaaaaaaaaaaatcaaagaatggcttcaaattgtagtcagctgtttcgttaaattgcagcaggaagaaatttttctcagcaggtctattttcatgtcacttgctttcagagtaagaggttatttcagacacagtggtttgatttagtctttgttgaaaatcataaatagcctacaaacaacaaaaagggatgaataggatttgcgttcatgtggagtgcgtcatctgtgcttttaaatttatcctatgaaaagaaataaaaaatatgtaatatcgaacattggtttcctaaattagcaaatcgaccatttcctcaagttattccacgttcttccaagatgtgtcagaagcattctctggaggcagttgttccaaatggtgaagagtactagatggatcccaatctcacaggattcttgcttctattgcagaagagttactttccaggacttcaaaggtttagagaagctgcttgattcgtgtggcttgcagaggtgcatgggctttggagtcacgaaaagttaatcctggtcccagcccagcctcttagtagctgtgaggctttgcacaacttccttgtcttggaaagttatataaacctcatctgcaagaaaaggcatgatactgattgcaaaaatggcagcaactcttcatcccttcctgtatttatgccctttgtgatgtgcttttatagctgctttcattgagaggcagaatctgtttcccaaaccttgaatctcactggccttatttgctctggcagtagaaagctgtgaatatgaccatgtgccagtttggggccgaggcacaaaagctcttgaatgcttctgctttttatttcacaaccctgtcatctccataataacaagtccatgttagcctgctagaggatgagatactatagggaggaaaaccaaagtgccacagttgacaggcagctcaccctcagaagcagcattgcctagtcaaccagcagctgaccacacgtgcctgaaagggcccagcagagaccagaagaatggctcacttgagcccagcctagaaggtggaccagctcaatctaatacgttttggggaattttactgtgaagcaataggtaatacgtacacctagtgcagacaggatgccaggattcaatgacatgttgattgcaatttaccaggcaaacacaaggcaccctgtatgtactgatttccttttccctttatgtaaagttggatttctggttagacggtgttgagccatacagaagtgcacgtagaca

SEQ ID NO: 68651 - DNA, 2949 bp, Homo sapiens
tatatatgctatatgctatatataggactatatatatatacacatacacacacgcgtatatatatagtcctatatacatagtcctatatacagatttgccctatgtgtaacaactacgtagataaaaaagttatgaaattgtttttggttttacaatgctatattaaaaacattgaaattcaccaattgaacaatctatgcaagggtattatggttttttgttattgttgtttaagtcctgaaatacagagataagagctgagtgagcagccactggtggagaaacagtcttcacggggccagtatttttctgccccgtctcatttggctgcggatcaacacatgtcatttagtacaaacaagcaaacaaaaatagcaatatgcttgtgtgcctaccccagatgctttatgtgcaataatgaaatgaggaaggggaagataagagaatggagaaaaggatactgtaccagccagaatgtggagtcagaatgtggtgtcagaatgtggagtcagaatgtgatgaaatcacattgtgggtttctacatgagaatgtctgctggagttgtaggaagaggtcctgggtaaaggagcaggtgtgttcttagaaggccctcctgtctgctgctggaacacatcacctgtttattcgtcctccatttcccgctttgcaggtgtgtcagtttcactgagtgaccgtccgtaaaatccaaatctgatttgcttcatggccaaaccctgccattcaccataggcttccactccttcattcagtgatgtgtacttcttccccttcaactgcgccccagaaccatcctaccctccaccttyaaattcacagaattgttgttctgtcttgactcaaacttttttcctgccacagcagagcactgaaagtctcttaagttacagcttcacaacagaagtctaaagtctgcgcagaactagcacatctgcagccgtaggagcagcagaatgaccaggcagcagagctttattccatgttttcatctccattcctacaacagcagcggcagcagcaacaactgctactacttctaattgtggtaaaaatacttagaataataatgcataatgacaattgtagttgacatttttggtttatatatgattatttgtaatgttctacaatttacctttagtaatatacacataacttttgcataaacatcaggaccctaaaacaccacacctgatgattgaatctcacctatggacctaaggtcttcacatgctggtgcaggccctctcaccactccatctccaaacagaggatatggtccaccttctgagtcaatatagtagccctgacactcacatgatctatttgaggtcttggaaaacaagcttgccttgttaaaaatcaaaggatgggccgggcacggtggctcacgcctgtaatcccagcactttgggaggccgaggcgggctgatcacgaggtcaggagatggagaccatcctgactaacacgatgaaaccccatctctactaaaaatacaaaaaaattagccgggcatggtggccggcgcctgtagtcccagctactcgggaggctgaggcaggagaatggcgtgaacccgggaggcggagcttgcagtgagccgagatcacaccactgcactccagcctggatgacacagcgagactccatcttaaaaaaaaaaaaaaaaaaaaaaatcaaagaatggcttcaaattgtagtcagctgtttcgttaaattgcagcaggaagaaatttttctcagcaggtctattttcatgtcacttgctttcagagtaagaggttatttcagacacagtggtttgatttagtctttgttgaaaatcataaatagcctacaaacaacaaaaagggatgaataggatttgcgttcatgtggagtgcgtcatctgtgcttttaaatttatcctatgaaaagaaataaaaaatatgtaatatcgaacattggtttcctaaattagcaaatcgaccatttcctcaagttattccacgttcttccaagatgtgtcagaagcattctctggaggcagttgttccaaatggtgaagagtactagatggatcccaatctcacaggattcttgcttctattgcagaagagttactttccaggacttcaaaggtttagagaagctgcttgattcgtgtggcttgcagaggtgcatgggctttggagtcacgaaaagttaatcctggtcccagcccagcctcttagtagctgtgaggctttgcacaacttccttgtcttggaaagttatataaacctcatctgcaagaaaaggcatgatactgattgcaaaaatggcagcaactcttcatcccttcctgtatttatgccctttgtgatgtgcttttatagctgctttcattgagaggcagaatctgtttcccaaaccttgaatctcactggccttatttgctctggcagtagaaagctgtgaatatgaccatgtgccagtttggggccgaggcacaaaagctcttgaatgcttctgctttttatttcacaaccctgtcatctccataataacaagtccatgttagcctgctagaggatgagatactatagggaggaaaaccaaagtgccacagttgacaggcagctcaccctcagaagcagcattgcctagtcaaccagcagctgaccacacgtgcctgaaagggcccagcagagaccagaagaatggctcacttgagcccagcctagaaggtggaccagctcaatctaatacgttttggggaattttactgtgaagcaataggtaatacgtacacctagtgcagacaggatgccaggattcaatgacatgttgattgcaatttaccaggcaaacacaaggcaccctgtatgtactgatttccttttccctttatgtaaagttggatttctggttagacggtgttgagccatacagaagtgcacgtagaca

SEQ ID NO: 68652 - DNA, 2949 bp, Homo sapiens
tatatatgctatatgctatatataggactatatatatatacacatacacacacgcgtatatatatagtcctatatacatagtcctatatacagatttgccctatgtgtaacaactacgtagataaaaaagttatgaaattgtttttggttttacaatgctatattaaaaacattgaaattcaccaattgaacaatctatgcaagggtattatggttttttgttattgttgtttaagtcctgaaatacagagataagagctgagtgagcagccactggtggagaaacagtcttcacggggccagtatttttctgccccgtctcatttggctgcggatcaacacatgtcatttagtacaaacaagcaaacaaaaatagcaatatgcttgtgtgcctaccccagatgctttatgtgcaataatgaaatgaggaaggggaagataagagaatggagaaaaggatactgtaccagccagaatgtggagtcagaatgtggtgtcagaatgtggagtcagaatgtgatgaaatcacattgtgggtttctacatgagaatgtctgctggagttgtaggaagaggtcctgggtaaaggagcaggtgtgttcttagaaggccctcctgtctgctgctggaacacatcacctgtttattcgtcctccatttcccgctttgcaggtgtgtcagtttcactgagtgaccgtccgtaaaatccaaatctgatttgcttcatggccaaaccctgccattcaccataggcttccactccttcattcagtgatgtgtacttcttccccttcaactgcgccccagaaccatcctaccctccaccttcaaattcacagaattgttgttctgtcttgactcaaacttttttcctgccacagcagagcactgaaagtctcttaagttacagcttcacaacagaagtctaaagtctgcgcagaactagcacatctgcagccgtaggagcagcagaatgaccaggcagcagagctttattccatgttttcatcyccattcctacaacagcagcggcagcagcaacaactgctactacttctaattgtggtaaaaatacttagaataataatgcataatgacaattgtagttgacatttttggtttatatatgattatttgtaatgttctacaatttacctttagtaatatacacataacttttgcataaacatcaggaccctaaaacaccacacctgatgattgaatctcacctatggacctaaggtcttcacatgctggtgcaggccctctcaccactccatctccaaacagaggatatggtccaccttctgagtcaatatagtagccctgacactcacatgatctatttgaggtcttggaaaacaagcttgccttgttaaaaatcaaaggatgggccgggcacggtggctcacgcctgtaatcccagcactttgggaggccgaggcgggctgatcacgaggtcaggagatggagaccatcctgactaacacgatgaaaccccatctctactaaaaatacaaaaaaattagccgggcatggtggccggcgcctgtagtcccagctactcgggaggctgaggcaggagaatggcgtgaacccgggaggcggagcttgcagtgagccgagatcacaccactgcactccagcctggatgacacagcgagactccatcttaaaaaaaaaaaaaaaaaaaaaaatcaaagaatggcttcaaattgtagtcagctgtttcgttaaattgcagcaggaagaaatttttctcagcaggtctattttcatgtcacttgctttcagagtaagaggttatttcagacacagtggtttgatttagtctttgttgaaaatcataaatagcctacaaacaacaaaaagggatgaataggatttgcgttcatgtggagtgcgtcatctgtgcttttaaatttatcctatgaaaagaaataaaaaatatgtaatatcgaacattggtttcctaaattagcaaatcgaccatttcctcaagttattccacgttcttccaagatgtgtcagaagcattctctggaggcagttgttccaaatggtgaagagtactagatggatcccaatctcacaggattcttgcttctattgcagaagagttactttccaggacttcaaaggtttagagaagctgcttgattcgtgtggcttgcagaggtgcatgggctttggagtcacgaaaagttaatcctggtcccagcccagcctcttagtagctgtgaggctttgcacaacttccttgtcttggaaagttatataaacctcatctgcaagaaaaggcatgatactgattgcaaaaatggcagcaactcttcatcccttcctgtatttatgccctttgtgatgtgcttttatagctgctttcattgagaggcagaatctgtttcccaaaccttgaatctcactggccttatttgctctggcagtagaaagctgtgaatatgaccatgtgccagtttggggccgaggcacaaaagctcttgaatgcttctgctttttatttcacaaccctgtcatctccataataacaagtccatgttagcctgctagaggatgagatactatagggaggaaaaccaaagtgccacagttgacaggcagctcaccctcagaagcagcattgcctagtcaaccagcagctgaccacacgtgcctgaaagggcccagcagagaccagaagaatggctcacttgagcccagcctagaaggtggaccagctcaatctaatacgttttggggaattttactgtgaagcaataggtaatacgtacacctagtgcagacaggatgccaggattcaatgacatgttgattgcaatttaccaggcaaacacaaggcaccctgtatgtactgatttccttttccctttatgtaaagttggatttctggttagacggtgttgagccatacagaagtgcacgtagaca

SEQ ID NO: 68653 - DNA, 1833 bp, Homo sapiens
atactaagttacaattgatgtaaaaaataaaattacaaaaggattgttaaagtaaattcaaagggacatcaggcctaaaaaatccctgaggaaatgtgtgatcagaggctttcccaggcacacactgctctacagccctaccacacaggcttaaccgagaatttgaccccggaaggtgacggatgaacatgtgtcctggtattctgatctacagaaatcctgccctctcttaatgatccatccagagctctaggatcgtttctagatttatttactacacrcagactggaagtttttgacagaagctttgaactgggaaccctaccctgttccaccagcttctctagaagtacaatgttctaattactcctgagagactccatctgagggtaactctctgagccaacaagatttaaagtgagaagaggaaaaaggcaagagtcgggctatgtctaggattcccttacctgacttatgtctttggtttacccaagtattgataagattcgtctctagatggtagaaactagatggaggagcactagctcacagaagtagacaatgggatcagtgctccatagatccagcttaagctcagccatgagatactaagtctctcagaaaaaaaagtaacagttctccatcatctacccccgtagcctcagacagctaggcagtaagcatgcatgctcaataaaactccacatccacatcacagagagagatagaacaatcccaaaggaccgtgaagggtgatgtggagagaccaaaaggatatgaacccacagcatctgccctaccatctgctccaatactaaccctgtcctttcccaacatgatttccagatttttctttggccctcactaagggtgattcagaaagacaaaaagttattaatgcccttccattctccatatctcctgaggtctcagttgtttactctgcgggtttcgggtagctatccctccccaactacatccacaaaattagtgtatctcattcagcaccaagaatttcacctttattctggtcactccctaccttctcctagacattttatctagaaaagccagatgaaatagcgacaaaaatgtttacataaaactcaaccacaactaagttggagtatcataatcccactttgggctaggttgccactcagcctactacaaactaggcttggggcagttaggggaaagctagggtttagagctgatgtgaaagtcagctaaaagcttgctaccgagcccctgtcaagctgaatcctaacccaaggaggactgagggctgcgtagctttatattccacttttgaggtgggtgtcagctaaaagcttgctacagagctcctgtcaagctgaatcctaacccaaggaggactgagggctgtgtggctttatattccacttttgaggtgggtcaatttgaactctctgaaagcccgcaaaagactagctctaaaccctagtctagtacaaactaagctagggttgcatttagcggaaaggaagattatcttttctttctttctttttttttttttgagacagagtctcgctctgtctcccaggctggagtgcagtggcccgatctcagctcaatgcaacctccgcctcccaggttcaagcaattctcctgcctcagcctcctgagtagctgggactacaggcgttcgccaccatgcctggctaatttttgtatttttagtagaaccggggtttcaccatattggccaggccggtctcgaactcctgaccttgtgatccacccgcctcggcctcccaaagtgctgggattacaggcgtgggccactgcgcctggccagtgagatgc

SEQ ID NO: 68654 - DNA, 639 bp, Homo sapiens
cattttacataaccatggtacacttatcaaaactaagaaattaacattggtataaccctcaactgaacgatagacattatcccatttcatgaaattttttcattaatgacttttatccattccagaattgaatccagtacatcgtgctgcaattagttgttttatgtttttgttttgttttttttttttttttttgaggtggagtttcgctctgttgtccagtctggagtgcagtggcgcaatctcggctcactgcaagctccacctgccgggttcacgccattctcctgcctcagcctcccaagtagctgggactataggcacccgcctaaatgttatctttacattttcttttaaaatcagaagtcacctgagaaaaaattagcccagctaattttttttttttatttttagtagagayggggtttcaccatgttaggcaggatggtcttgatctcctgacctcatgatctgcccgcctcagcctcccaaagtgctgggatgcaattagttttatgttaaattgccttccttttttcttcatttttggaatcactgaaaaatcttgagtcagaatttcatttttgctatctcaaacaatatctttatttccttttagtgtcttttatcatgggatcc

SEQ ID NO: 68655 - DNA, 639 bp, Homo sapiens
cattttacataaccatggtacacttatcaaaactaagaaattaacattggtataaccctcaactgaacgatagacattatcccatttcatgaaattttttcattaatgacttttatccattccagaattgaatccagtacatcgtgctgcaattagttgttttatgtttttgttttgttttttttttttttttttgaggtggagtttcgctctgttgtccagtctggagtgcagtggcgcaatctcggctcactgcaagctccacctgccgggttcacgccattctcctgcctcagcctcccaagtagctgggactataggcacccgcctaaatgttatctttacattttcttttaaaatcagaagtcacctgagaaaaaattagcccagctaattttttttttttatttttagtagagatggggtttcaccatgttaggcaggatggtcttgatctcctgacctcatgatctgcccgcctcrgcctcccaaagtgctgggatgcaattagttttatgttaaattgccttccttttttcttcatttttggaatcactgaaaaatcttgagtcagaatttcatttttgctatctcaaacaatatctttatttccttttagtgtcttttatcatgggatcc

SEQ ID NO: 68656 - DNA, 601 bp, Homo sapiens
ttgactctggcttcaaattccattcatgtgcttgggaggcttattcaaggccatcagcataccatggaccaggacaaacaggttgggycacaccagaaaagggcacacggcagttgcagatgtcctgagtttggtatcccatgtagctgtgaacgtgtcacatgcttttgtgtaagatcagtcagcatcacagaaccatagattcttttttaaaaaataatttcaacttctattttagatgcagggcatgcatgtgcaggttttttacatgggtatactgcatgatgctgaggtatggggtacaagtgatctgatcacccaggtaatgagcacagtacccaagagttagtttttcaacctttgccccccgctctccttcctccctctagaatcctagatgtaagccaccctagaggtcattgatgcagtcttccaccaactgcaattaaaatgttaagggacaagcagtttatttcccataaaggcaatccagtttgaccctttatcagacacagttctaccctacgttgaaccaaaatctgtcatttcttccccagtacatgggtcggcaaccttgggtgtgactctcatatgttccttg

SEQ ID NO: 68657 - DNA, 601 bp, Homo sapiens
ttgactctggcttcaaattccattcatgtgcttgggaggcttattcaaggccatcagcataccatggaccaggacaaacaggttgggtcacaccagaaaagggcacacggcagttgcagatgtcctgagtttggtatcccatgtagctgtgaacgtgtcacatgcttttgtgtaagatcagtcagcatcacagaaccatagattcttttttaaaaaataatttcaacttctattttagatgcagggcatgcatgtgcaggttttttacatgggtatactgcatgatgctgaggtatggggtacaagtgatctgatcacccargtaatgagcacagtacccaagagttagtttttcaacctttgccccccgctctccttcctccctctagaatcctagatgtaagccaccctagaggtcattgatgcagtcttccaccaactgcaattaaaatgttaagggacaagcagtttatttcccataaaggcaatccagtttgaccctttatcagacacagttctaccctacgttgaaccaaaatctgtcatttcttccccagtacatgggtcggcaaccttgggtgtgactctcatatgttccttg

SEQ ID NO: 68658 - DNA, 601 bp, Homo sapiens
ttgactctggcttcaaattccattcatgtgcttgggaggcttattcaaggccatcagcataccatggaccaggacaaacaggttgggtcacaccagaaaagggcacacggcagttgcagatgtcctgagtttggtatcccatgtagctgtgaacgtgtcacatgcttttgtgtaagatcagtcagcatcacagaaccatagattcttttttaaaaaataatttcaacttctattttagatgcagggcatgcatgtgcaggttttttacatgggtatactgcatgatgctgaggtatggggtacaagtgatctgatcacccaggtaatgagcacagtacccaagagttagtttttcaacctttgcccccygctctccttcctccctctagaatcctagatgtaagccaccctagaggtcattgatgcagtcttccaccaactgcaattaaaatgttaagggacaagcagtttatttcccataaaggcaatccagtttgaccctttatcagacacagttctaccctacgttgaaccaaaatctgtcatttcttccccagtacatgggtcggcaaccttgggtgtgactctcatatgttccttg

SEQ ID NO: 68659 - DNA, 1144 bp, Homo sapiens
agattttttatgtatcagcctaaggctgtaagtggtacaaggataattactagctttgatgcagcttgggcagggtggggacggcctctgtctcattcccgacgtggctgccttgtgcctcctttctttttccccattggtctcattggagttttatcaattttaataaccttctcttagaatcagctttagattttgttgatttttctctagtgtctgcttccttctttctctgcattcttttgaaactggtaaagttttgatgaaaattatggacatgagtcacaaaatgttggtgatttggtgcagggcacagaggtgttggggggtcatatgactgaatggagacacaagggggcttgccagtcccagctcctgggggtccatgatattcattttgtttactcctgcaactctacctgtacattattatagatttcactgcttcaagagtgttcctaccctttaaccaagtaatttcatttctgagaaataggctgagcatatcattagccaagagtcaggcagatatgctgttgttattcatgcaggcagcagggaggggatttaccaggtcatgcgtatgaaccatccaagggaagggctgcaggcttggctgcctccaggagctccaaggggctcatcaggcttttctttatctcctctctgccttygtctgggctgtcatagataaactcttctcacttggtggcaagagagccacctgcagcaacaagtttgcagctggcattgtgtgaactcggcagctctaacaggaaatcggatctcccttccagcagtccttgcactattttgagacgtgcaagtgtctcgggaccatggcttgggtgatgaaatgtgatttctgcacttttttttccctttaactttgtatttcaggcataaagtggtaagaatccatactacaaagattcccatgtacttttccattccccaaatgttaaatgtggccacgtttgctttatccttctctcctctctctcccccttgctcctctctccctctctcccttcctatatcataaattttcacacctatctttattccttttcttctactttctgcgggattaattttagttctttttctgaactcttgagatagatacttgggtcatgatttt

SEQ ID NO: 68660 - DNA, 1144 bp, Homo sapiens
agattttttatgtatcagcctaaggctgtaagtggtacaaggataattactagctttgatgcagcttgggcagggtggggacggcctctgtctcattcccgacgtggctgccttgtgcctcctttctttttccccattggtctcattggagttttatcaattttaataaccttctcttagaatcagctttagattttgttgatttttctctagtgtctgcttccttctttctctgcattcttttgaaactggtaaagttttgatgaaaattatggacatgagtcacaaaatgttggtgatttggtgcagggcacagaggtgttggggggtcatatgactgaatggagacacaagggggcttgccagtcccagctcctgggggtccatgatattcattttgtttactcctgcaactctacctgtacattattatagatttcactgcttcaagagtgttcctaccctttaaccaagtaatttcatttctgagaaataggctgagcatatcattagccaagagtcaggcagatatgctgttgttattcatgcaggcagcagggaggggatttaccaggtcatgcgtatgaaccatccaagggaagggctgcaggcttggctgcctccaggagctccaaggggctcatcaggcttttctttatctcctctctgcctttgtctgggctgtcatagataaactcttctcayttggtggcaagagagccacctgcagcaacaagtttgcagctggcattgtgtgaactcggcagctctaacaggaaatcggatctcccttccagcagtccttgcactattttgagacgtgcaagtgtctcgggaccatggcttgggtgatgaaatgtgatttctgcacttttttttccctttaactttgtatttcaggcataaagtggtaagaatccatactacaaagattcccatgtacttttccattccccaaatgttaaatgtggccacgtttgctttatccttctctcctctctctcccccttgctcctctctccctctctcccttcctatatcataaattttcacacctatctttattccttttcttctactttctgcgggattaattttagttctttttctgaactcttgagatagatacttgggtcatgatttt

SEQ ID NO: 68661 - DNA, 620 bp, Homo sapiens
tcctggaggggcaaactccaggcttctcaccctggctttcaagatctccttgagayggctttttatttcccctcatctctgtggcctatttcaggacagtatgtgccctttgctttggcctggtgggcacactgccctttcgcttatgttccacctgcctggactgccttgtgttctccccactgcctatccaagctcaactcatcctttgagacaagctaaagtgccaattctctgtggtaccttctctggccacctctccttcctaatttttatagtttttactttttttttttctgagacggagtcttgctctgtcacccaggctggagtgcagtggcatgatctccgctcactgcaacctctactttccaggttcaagcaatcatcatgtctcagccacctgagtagctgggactacaggcacatgccaccacgcccggctaatttttgtatttttagtagagacggagtttcaccatgttgaccgggctggtcttgaactcctgacctcatgcgatctgctcacctgggcctcccaaagtgctgggattacaggcataagccaccgtgcctggcccagtttttactatttgtacagttcatattgtcctttatac

SEQ ID NO: 68662 - DNA, 1989 bp, Homo sapiens
aatgtaaattgaagagtttaatgtctaagatatttgttcttttgtttgtagcttatcttttactccccacgtttcaaatatccctttgcaaaataatttttgagttaaaattttcaattaaaaaactgtatmcttgaggtagaaaagataaagatagaagatatatgtgaattaggttgtatctctccttaagagggaatactgttttttatctaaggagaactaacaaccctccctttcattgtctgggttggtataagtaaaaatccttgtttgaagttattaagccttcccacccatatgatgattagtttggttcataagctagagttagggcttggtaaaggctcctttttttttttttttttaaagtctttccaccttaactagcaagtaagctagaaatgacagagcagtagaagggggaatctaccagagtgtcctacaggaccttgttgaatgctactgctgcatgcaagggttgtggatttggtgtgggccttctgcagtatcacccaaatttgagcagtacatgtaactaaaagtaagaaaaataaattagacagtttatttcatttcagactttggaagcccaggactgtggggattagctattagctaagacaatgattcactgagcaaatgcagtgaaagattcttttgttacactgatcatcatttgtggagagactctgaagaaggataaagctctggctgcatagtcaaaccagacctactactcaaggacatgcatactagatatgtaggtgtttccaaatatttttttcagttgtggcggtgcaaatcatttcaatagtagagtaactcagttcattactgttactggaaaaacaagtttaaccaagcacatatcctactgagggtgagtcaacagtgtcattttaacataagaaggacagtacatgaagtgagttattccaagtcctgtggttttcctacagctgagcaaagacagctgttctttcggaagtggggctctaaaaagaagttgcccatctcctttctttcttgattatagccttttagttttcttttggcctgagacatttcaaaaattcatttcctccttagatttctatcaccaaataccctgaattttgataatttatttatagagtatattatttattatagacttattatagtttaaaactttattttaatttatctcccatttcaagatccacatttgctatatgtgtcagataataaaaatgccataaggaaaacagaggagtgatcttttttaatatgtcattattttctatagttctttagtggtatggacatggaataaggtggcattttgtgggacagtataccaaacttagtgataaaatttatacttttaattttggaggacaaaagtcttgtattctcagccttgtggataagacagtgctctgagctgtctgaggtttcctaaattgggattcaacatcatgaagggtatgtgtctggatagtttatttgttggtttgggaaggtgagtttttgtcttttttccccctctgagttgatttctttagttggagagaagcagaccagatgaagaaaatactttatctcttatggcatttttggtttaccacattagttatgacccgtcttctctgagcagcaggccatgcttctctgttcagtagttcagttttcactaacttaactgcagatgtgttcttggagggatttatttctaatcaattgaattatgggtacttggataaaatgatgatgggttacctacttttaatagggccttcatttttaagagtaaaatcttgtcaagatagggtatatcatacttatgatctggttccatctctaactccataatttccttttgctcctgtgttgctactctattattgagaagagatggtatcttgtcagtgtcaattttacaaagaaaaaattctaaacaatttcagtcatagggtagtttttttttttcctggagaaataatg

SEQ ID NO: 68663 - DNA, 1989 bp, Homo sapiens
aatgtaaattgaagagtttaatgtctaagatatttgttcttttgtttgtagcttatcttttactccccacgtttcaaatatccctttgcaaaataatttttgagttaaaattttcaattaaaaaactgtatacttgaggtagaaaagataaagatagaagatatatgtgaattaggttgtatctctccttaagagggaatactgttttttatctaaggagaactaacaaccctccctttcattgtctgggttggtataagtaaaaatccttgtttgaagttattaagccttcccacccatatgatgattagtttggttcataagctagagttaggrcttggtaaaggctcctttttttttttttttttaaagtctttccaccttaactagcaagtaagctagaaatgacagagcagtagaagggggaatctaccagagtgtcctacaggaccttgttgaatgctactgctgcatgcaagggttgtggatttggtgtgggccttctgcagtatcacccaaatttgagcagtacatgtaactaaaagtaagaaaaataaattagacagtttatttcatttcagactttggaagcccaggactgtggggattagctattagctaagacaatgattcactgagcaaatgcagtgaaagattcttttgttacactgatcatcatttgtggagagactctgaagaaggataaagctctggctgcatagtcaaaccagacctactactcaaggacatgcatactagatatgtaggtgtttccaaatatttttttcagttgtggcggtgcaaatcatttcaatagtagagtaactcagttcattactgttactggaaaaacaagtttaaccaagcacatatcctactgagggtgagtcaacagtgtcattttaacataagaaggacagtacatgaagtgagttattccaagtcctgtggttttcctacagctgagcaaagacagctgttctttcggaagtggggctctaaaaagaagttgcccatctcctttctttcttgattatagccttttagttttcttttggcctgagacatttcaaaaattcatttcctccttagatttctatcaccaaataccctgaattttgataatttatttatagagtatattatttattatagacttattatagtttaaaactttattttaatttatctcccatttcaagatccacatttgctatatgtgtcagataataaaaatgccataaggaaaacagaggagtgatcttttttaatatgtcattattttctatagttctttagtggtatggacatggaataaggtggcattttgtgggacagtataccaaacttagtgataaaatttatacttttaattttggaggacaaaagtcttgtattctcagccttgtggataagacagtgctctgagctgtctgaggtttcctaaattgggattcaacatcatgaagggtatgtgtctggatagtttatttgttggtttgggaaggtgagtttttgtcttttttccccctctgagttgatttctttagttggagagaagcagaccagatgaagaaaatactttatctcttatggcatttttggtttaccacattagttatgacccgtcttctctgagcagcaggccatgcttctctgttcagtagttcagttttcactaacttaactgcagatgtgttcttggagggatttatttctaatcaattgaattatgggtacttggataaaatgatgatgggttacctacttttaatagggccttcatttttaagagtaaaatcttgtcaagatagggtatatcatacttatgatctggttccatctctaactccataatttccttttgctcctgtgttgctactctattattgagaagagatggtatcttgtcagtgtcaattttacaaagaaaaaattctaaacaatttcagtcatagggtagtttttttttttcctggagaaataatg

SEQ ID NO: 68664 - DNA, 1989 bp, Homo sapiens
aatgtaaattgaagagtttaatgtctaagatatttgttcttttgtttgtagcttatcttttactccccacgtttcaaatatccctttgcaaaataatttttgagttaaaattttcaattaaaaaactgtatacttgaggtagaaaagataaagatagaagatatatgtgaattaggttgtatctctccttaagagggaatactgttttttatctaaggagaactaacaaccctccctttcattgtctgggttggtataagtaaaaatccttgtttgaagttattaagccttcccacccatatgatgattagtttggttcataagctagagttagggcttggtaaaggctcctttttttttttttttttraagtctttccaccttaactagcaagtaagctagaaatgacagagcagtagaagggggaatctaccagagtgtcctacaggaccttgttgaatgctactgctgcatgcaagggttgtggatttggtgtgggccttctgcagtatcacccaaatttgagcagtacatgtaactaaaagtaagaaaaataaattagacagtttatttcatttcagactttggaagcccaggactgtggggattagctattagctaagacaatgattcactgagcaaatgcagtgaaagattcttttgttacactgatcatcatttgtggagagactctgaagaaggataaagctctggctgcatagtcaaaccagacctactactcaaggacatgcatactagatatgtaggtgtttccaaatatttttttcagttgtggcggtgcaaatcatttcaatagtagagtaactcagttcattactgttactggaaaaacaagtttaaccaagcacatatcctactgagggtgagtcaacagtgtcattttaacataagaaggacagtacatgaagtgagttattccaagtcctgtggttttcctacagctgagcaaagacagctgttctttcggaagtggggctctaaaaagaagttgcccatctcctttctttcttgattatagccttttagttttcttttggcctgagacatttcaaaaattcatttcctccttagatttctatcaccaaataccctgaattttgataatttatttatagagtatattatttattatagacttattatagtttaaaactttattttaatttatctcccatttcaagatccacatttgctatatgtgtcagataataaaaatgccataaggaaaacagaggagtgatcttttttaatatgtcattattttctatagttctttagtggtatggacatggaataaggtggcattttgtgggacagtataccaaacttagtgataaaatttatacttttaattttggaggacaaaagtcttgtattctcagccttgtggataagacagtgctctgagctgtctgaggtttcctaaattgggattcaacatcatgaagggtatgtgtctggatagtttatttgttggtttgggaaggtgagtttttgtcttttttccccctctgagttgatttctttagttggagagaagcagaccagatgaagaaaatactttatctcttatggcatttttggtttaccacattagttatgacccgtcttctctgagcagcaggccatgcttctctgttcagtagttcagttttcactaacttaactgcagatgtgttcttggagggatttatttctaatcaattgaattatgggtacttggataaaatgatgatgggttacctacttttaatagggccttcatttttaagagtaaaatcttgtcaagatagggtatatcatacttatgatctggttccatctctaactccataatttccttttgctcctgtgttgctactctattattgagaagagatggtatcttgtcagtgtcaattttacaaagaaaaaattctaaacaatttcagtcatagggtagtttttttttttcctggagaaataatg

SEQ ID NO: 68665 - DNA, 1481 bp, Homo sapiens
agctccagttcctaaatagctgagaaaaacaaacattctgaacatcccctttagctccttcggcagggctgggctcctgtctccacacaaggtgtcctggggcattacaggggctccagacttacccctggcttttgcagggggcctgccctttgctaaattaagcccagccaggcctatctgtgaacagagaggctccagccgagtgagagagattggttctgctaaggaatgtcctggggaggggagagaatcgctgagatcatgggtatttatgtgtatgttttctcacttgccagctcagttgggccacatcaacagaggcctctgggacacgaccaagattctaacagagtgactatagggaatgaatagctcatgacacactgagaagggtttaattggagatcagtgtgaataccacagcagaatgtatcttgggaactctgtgctcagagtctaaataaaacaagcagaacacctcattttccctcatttttctttttgtttaaaaaaatggattttgttttttattttattttttattttttagttttttaaaatgagatagggtctttctatgttgcccgggctggtctcaaactcctgggctcgagggatccttctgcttcagccccccaaagtgctaggattacaagtgtgagccaccaggcctggtcagattttgttttttagagcagttttaagctcacggcaaagttaagcagaagagccagagatttcccatttactccctgcccctacatacatacctgtgtatatacagcctcccccactatccaaacccaaagatgtctcattttgatatatcttttcttggattcttaagcttagtgttgaccagaaatacctcttattatgattcatgcatctgactgtctttgggaaaactaacatttattgaacacccactatatgtcaggtatttttttttttaacatcttttcatttacaaccctgaaaggtaggggtattagcaccattaaaaaaactaacaacagaaggaaatgaaacttaggttaaaatgatttacctctagaatacagagatgaactacgtgaaactgtaaaaaaatgattgaatatctccatttttatatggttcaacctaatagaatgtaagagggctcatatttgaacccaggccaatttagttcaaaagcctatactttgcattgtactgtactatrccctaaaattactagaatagcactggattctttattttcccttgggggtgctgtagtttcacatagatgtagatttatattcctgttccttagaagactagaacagcgatgcttagagaaagagcaaaccaaggtatggtatatcttgagttagagtaggagttgagttgagtgggagcctaagtttagagactaaagctaggagttatatgatggacccgcactgattcgtgtatctgctgctatttatatctgccacctgtgtgcattt

SEQ ID NO: 68666 - DNA, 1039 bp, Homo sapiens
gatttaaatagggagcaattttttttctatcaagagctgatcagaaataaatgggaagcatttaaatgctctccttccsttgccccaagaggactttcactttccaacattctacatactttatgtataatatttattgtttattttctgtctactcatgacagactataagttctatgaggatgggaatgcctgtatgtgcttattatatgacctaacagttccactactgggtatttacccaaaagaaataaaacaaagacttatacatgaatatattgatatatactccagtcacctccaatagaatctagaacacagtaggggcttagtacatatttttaaatgaatgaagactaatgtttagtttaaactaggattgacctattcttatcctcggcagggacagagaataactaattaccacttgtcacatattgagacttcagtacctaaaaggcactattaggtcacctgtaagtctgttttcccccaaagtaaaaatcccaattccattgcccttttcacataagcctcattttctaacctttttagtttggtttaacgaatttcctatttcctctgaattctagagttccaaaccagactcagcacaagcctaacagggcaacctatacagataaggacagcccaggcacattgcacacggcaagttgcacctgttttaagagtaaaaatgaggtcaatgccaccttgtactgcaggtacctcaatgagacaatgccaccccttcctgccacaatcttggcaaaagtcactacgaaagtaaatatcattttactagagtcctttctttctctccagtgaataacacaatgtagttattcactggaaaacatcatttgcatttgaaagagttactaactaaattctaaagaatgtaccaaagccttgcttaactgtagaatgaggccacacggctgctgggataccaggtactctccctgagcctattgatggcaaatttcatcctgtgaaaaatgggaacaagacacccacttcataggactattatatg

SEQ ID NO: 68667 - DNA, 1039 bp, Homo sapiens
gatttaaatagggagcaattttttttctatcaagagctgatcagaaataaatgggaagcatttaaatgctctccttccgttgccccaagaggactttcactttccaacattctacatactttatktataatatttattgtttattttctgtctactcatgacagactataagttctatgaggatgggaatgcctgtatgtgcttattatatgacctaacagttccactactgggtatttacccaaaagaaataaaacaaagacttatacatgaatatattgatatatactccagtcacctccaatagaatctagaacacagtaggggcttagtacatatttttaaatgaatgaagactaatgtttagtttaaactaggattgacctattcttatcctcggcagggacagagaataactaattaccacttgtcacatattgagacttcagtacctaaaaggcactattaggtcacctgtaagtctgttttcccccaaagtaaaaatcccaattccattgcccttttcacataagcctcattttctaacctttttagtttggtttaacgaatttcctatttcctctgaattctagagttccaaaccagactcagcacaagcctaacagggcaacctatacagataaggacagcccaggcacattgcacacggcaagttgcacctgttttaagagtaaaaatgaggtcaatgccaccttgtactgcaggtacctcaatgagacaatgccaccccttcctgccacaatcttggcaaaagtcactacgaaagtaaatatcattttactagagtcctttctttctctccagtgaataacacaatgtagttattcactggaaaacatcatttgcatttgaaagagttactaactaaattctaaagaatgtaccaaagccttgcttaactgtagaatgaggccacacggctgctgggataccaggtactctccctgagcctattgatggcaaatttcatcctgtgaaaaatgggaacaagacacccacttcataggactattatatg

SEQ ID NO: 68668 - DNA, 2597 bp, Homo sapiens
tccctccatggaagaagggatgggcagaagagagtgtgggaggatgacagagagggagccgtcatcctggagcacaaagatttcaggcagtcactggttcttaactctggcacctgccaagtggagccgggcactcatcaccagatcttgctcctaaagtaatttaagatccttgagtgacagctgcaacattagcaggaagtattatttataccacattacattgaaggtgatgggaaacaaccccagagcacagataacaaacacgggttctttgtggcaataatattaggttgaaaaaatatattttaacattcaagataaaggaaactacaaaatttacacttaattcaagccctcatttcctccccaacctacctgcttttcattcttccaattccttctcaaaccttcataatcattccagtcaacaactcctgagtactcaccaggtaggacattgggcatgagggatatatagatcaagaatgtcccaaccctcaaagagctacgtggccatacagctggccatgatatgttaagatatgtgttttacattatgatcctccaaacctgtgtttttcaacttttatatgttacattgccatctagtacatatgcatacactcttaactgaagtaaatgtttcaaaaagtaattgtcaccatcactatgtgtgatgtcctctgatatttcctatttctttttctgccagtgacccacccgacggatttcatgacccactaataagtttcagcctgagtttaaaaarcgttgactctgggggagcccgtaagaaagagtagtcagttcttactggggtgatcagagaaagcttcattaggagttgaatttgcactttgccttgaaaaataaaaaatgtttgagtggataaagtggcctcaggaggacataattagagtgaagcattctcccaaatagatttagattataaataggcaaaataggcaagcccaaatatttaccatttgaaaaaaaaaaactacacatttaaaatccatttaactattttcactaaatctgaatgcttagaatttgagaatgccaactaggcttagttagagacagtgaagaaaaaagtctaagttaaaacaactcaaaatatccttttccattcccagttctcttactaaatagctatgttatagaccatttctctagaagcctaactgtcctcacttaaaaaatgaaatggctttaaaaattggtgatttttttttttttgagacagagtcttgctctgttgcctaggctggagtgcagtggtgcaatctcaactcactgcaacctctgcctcccgggttcaagccattctcctgcttcagcctcctgagtagctgggactacaggtgcccgccaccgcgcccggctaatttttcattgttttagtagagacagggtttcacagcgttagccaggatggtctcgatctcctgaccttgagatccgcccgccttggcctcccaaagtgctgggattacaggcatgagccaccgcgtctggccaaaattagtgatttttaaggccctttcctggtctaagctcttcaaggtgataacccagttaatatcacctccattttgctcaaggggaaccaggctgccagagtttagataagtgtttaatcatgctttggctgtctacttagattcctttatcaggtaaaataatttcataaaagttttacaggaagtaaaactgtgtatgaatccagggtattcttatgcatcctagatttctgttggacatttatgcttatttcctccatgatatcttgttcttctatctctctggatccttttctgtgttttttgccagctcctgaaagtgggtatttaaatgatggtaagtccttagccttctacttttttttctcttcacatttttatccatggaggttttatccacttttagggctatactttcaccttcgaaacaattcccaaatctccaaccgagtcttctcacccaagatctagccgtacatattcaactcttggcttagatcattcaacttgagtgttcccaaattccacccaagcaaagcctttcctcttaccctagcctggaaagacttcttcctcttttgaactctaaggcagatattaacattcaacaagtgttcatatgctgccttatgacgtggcttttgttatcttcaagggttatttacatcttttagagttacgtgactttttgtgtgtttgatctttccaactagtctgaagctgcccaaggaaaaagtcaatgactaactaatacatcttcataaactcctacagcttccataacaacctgagacctctccaacagcattcatcccattgtgctgtcacagtctgtttacaatgacctcaacctggctagagtgttttgagagctgacaaggcatattttgtgtccttgtattcttgttgcatagtactcaggaagcactccctaaatatctgtggaatcaatgaacaggaaaatattccataaacattgtacattttgctttgttatatatgggctggctcacctgtattattctcatagatttccaataatatgaaaaaagtttgttttaatagtcc

SEQ ID NO: 68669 - DNA, 2597 bp, Homo sapiens
tccctccatggaagaagggatgggcagaagagagtgtgggaggatgacagagagggagccgtcatcctggagcacaaagatttcaggcagtcactggttcttaactctggcacctgccaagtggagccgggcactcatcaccagatcttgctcctaaagtaatttaagatccttgagtgacagctgcaacattagcaggaagtattatttataccacattacattgaaggtgatgggaaacaaccccagagcacagataacaaacacgggttctttgtggcaataatattaggttgaaaaaatatattttaacattcaagataaaggaaactacaaaatttacacttaattcaagccctcatttcctccccaacctacctgcttttcattcttccaattccttctcaaaccttcataatcattccagtcaacaactcctgagtactcaccaggtaggacattgggcatgagggatatatagatcaagaatgtcccaaccctcaaagagctacgtggccatacagctggccatgatatgttaagatatgtgttttacattatgatcctccaaacctgtgtttttcaacttttatatgttacattgccatctagtacatatgcatacactcttaactgaagtaaatgtttcaaaaagtaattgtcaccatcactatgtgtgatgtcctctgatatttcctatttctttttctgccagtgacccacccgacggatttcatgacccactaataagtttcagcctgagtttaaaaaacgttgactctgggggagcccgtaagaaagagtagtcagttcttactggggtgatcagagaaagcttcattaggagttgaatttgcactttgccttgaaaaataaaaaatgtttgagtggataaagtggcctcaggaggacataattagagtgaagcattctcccaaatagatttagattataaataggcaaaataggcaagcccaaatatttaccatttgaaaaaaaaaaactacacatttaaaatccatttaactattttcactaaatctgaatgcttagaatttgagaatgccaactaggcttagttagagacagtgaagaaaaaagtctaagttaaaacaactcaaaatatccttttccattcccagttctcttactaaatagctatgttatagaccatttctctagaagcctaactgtcctcacttaaaaaatgaaatggctttaaaaattggtgatttttttttttttgagacagagtcttgctctgttgcctaggctggagtgcagtggtgcaatctcaactcactgcaacctctgcctcccgggttcaagccattctcctgcttcagcctcctgagtagctgggactacaggtgcccgccaccgcgcccggctaatttttcattgttttagtagagacagggtttcacagcgttagccaggatggtctcgatctcctgaccttgagatccgcccgccttggcctcccaaagtgctgggattacaggcatgagccaccgcgtctggccaaaattagtgatttttaaggccctttcctggtctaagctcttcaaggtgataacccagttaatatcacctccattttgctcaaggggaaccaggctgccagagtttagataagtgtttaatcatgctttggctgtctacttagattcctttatcaggtaaaataatttcataaaagttttacaggaagtaaaactgtgtatgaatccagggtattcttatgcatcctagatttctgttggacatttatgcttatttcctccatgatatcttgttcttctatctctctggatccttttctgtgttttttgccagctcctgaaagtgggtmtttaaatgatggtaagtccttagccttctacttttttttctcttcacatttttatccatggaggttttatccacttttagggctatactttcaccttcgaaacaattcccaaatctccaaccgagtcttctcacccaagatctagccgtacatattcaactcttggcttagatcattcaacttgagtgttcccaaattccacccaagcaaagcctttcctcttaccctagcctggaaagacttcttcctcttttgaactctaaggcagatattaacattcaacaagtgttcatatgctgccttatgacgtggcttttgttatcttcaagggttatttacatcttttagagttacgtgactttttgtgtgtttgatctttccaactagtctgaagctgcccaaggaaaaagtcaatgactaactaatacatcttcataaactcctacagcttccataacaacctgagacctctccaacagcattcatcccattgtgctgtcacagtctgtttacaatgacctcaacctggctagagtgttttgagagctgacaaggcatattttgtgtccttgtattcttgttgcatagtactcaggaagcactccctaaatatctgtggaatcaatgaacaggaaaatattccataaacattgtacattttgctttgttatatatgggctggctcacctgtattattctcatagatttccaataatatgaaaaaagtttgttttaatagtcc

SEQ ID NO: 68670 - DNA, 2597 bp, Homo sapiens
tccctccatggaagaagggatgggcagaagagagtgtgggaggatgacagagagggagccgtcatcctggagcacaaagatttcaggcagtcactggttcttaactctggcacctgccaagtggagccgggcactcatcaccagatcttgctcctaaagtaatttaagatccttgagtgacagctgcaacattagcaggaagtattatttataccacattacattgaaggtgatgggaaacaaccccagagcacagataacaaacacgggttctttgtggcaataatattaggttgaaaaaatatattttaacattcaagataaaggaaactacaaaatttacacttaattcaagccctcatttcctccccaacctacctgcttttcattcttccaattccttctcaaaccttcataatcattccagtcaacaactcctgagtactcaccaggtaggacattgggcatgagggatatatagatcaagaatgtcccaaccctcaaagagctacgtggccatacagctggccatgatatgttaagatatgtgttttacattatgatcctccaaacctgtgtttttcaacttttatatgttacattgccatctagtacatatgcatacactcttaactgaagtaaatgtttcaaaaagtaattgtcaccatcactatgtgtgatgtcctctgatatttcctatttctttttctgccagtgacccacccgacggatttcatgacccactaataagtttcagcctgagtttaaaaaacgttgactctgggggagcccgtaagaaagagtagtcagttcttactggggtgatcagagaaagcttcattaggagttgaatttgcactttgccttgaaaaataaaaaatgtttgagtggataaagtggcctcaggaggacataattagagtgaagcattctcccaaatagatttagattataaataggcaaaataggcaagcccaaatatttaccatttgaaaaaaaaaaactacacatttaaaatccatttaactattttcactaaatctgaatgcttagaatttgagaatgccaactaggcttagttagagacagtgaagaaaaaagtctaagttaaaacaactcaaaatatccttttccattcccagttctcttactaaatagctatgttatagaccatttctctagaagcctaactgtcctcacttaaaaaatgaaatggctttaaaaattggtgatttttttttttttgagacagagtcttgctctgttgcctaggctggagtgcagtggtgcaatctcaactcactgcaacctctgcctcccgggttcaagccattctcctgcttcagcctcctgagtagctgggactacaggtgcccgccaccgcgcccggctaatttttcattgttttagtagagacagggtttcacagcgttagccaggatggtctcgatctcctgaccttgagatccgcccgccttggcctcccaaagtgctgggattacaggcatgagccaccgcgtctggccaaaattagtgatttttaaggccctttcctggtctaagctcttcaaggtgataacccagttaatatcacctccattttgctcaaggggaaccaggctgccagagtttagataagtgtttaatcatgctttggctgtctacttagattcctttatcaggtaaaataatttcataaaagttttacaggaagtaaaactgtgtatgaatccagggtattcttatgcatcctagatttctgttggacatttatgcttatttcctccatgatatcttgttcttctatctctctggatccttttctgtgttttttgccagctcctgaaagtgggtatttaaatgatggtaagtccttagccttctacttttttttctcttcacatttttatccatggaggttttatccacttttagggctatactttcaccttcgaaacaattcccaaatctccaaccgagtcttctcacccaagatctagccgtacatattcaactcttggcttagatcattcaacttgagtgttcccaaattccacccaagcaaagcctttcctcttaccctagcctggaaagacttcttcctcttttgaactctaaggcagatattaacattcaacaagtgttcatatgctgccttatgacgtggcttttgttatcttcaagggttatttacatcttttagagttacgtgactttttgtgtgtttgatctttccaactagtctgaagctgcccaaggaaaaagtcaatgactaactaatacatcttcataaactcctacagcttccataacaacctgagacctctccaacagcattcatcccattgtgctgtcacagtctgtttacratgacctcaacctggctagagtgttttgagagctgacaaggcatattttgtgtccttgtattcttgttgcatagtactcaggaagcactccctaaatatctgtggaatcaatgaacaggaaaatattccataaacattgtacattttgctttgttatatatgggctggctcacctgtattattctcatagatttccaataatatgaaaaaagtttgttttaatagtcc

SEQ ID NO: 68671 - DNA, 2597 bp, Homo sapiens
tccctccatggaagaagggatgggcagaagagagtgtgggaggatgacagagagggagccgtcatcctggagcacaaagatttcaggcagtcactggttcttaactctggcacctgccaagtggagccgggcactcatcaccagatcttgctcctaaagtaatttaagatccttgagtgacagctgcaacattagcaggaagtattatttataccacattacattgaaggtgatgggaaacaaccccagagcacagataacaaacacgggttctttgtggcaataatattaggttgaaaaaatatattttaacattcaagataaaggaaactacaaaatttacacttaattcaagccctcatttcctccccaacctacctgcttttcattcttccaattccttctcaaaccttcataatcattccagtcaacaactcctgagtactcaccaggtaggacattgggcatgagggatatatagatcaagaatgtcccaaccctcaaagagctacgtggccatacagctggccatgatatgttaagatatgtgttttacattatgatcctccaaacctgtgtttttcaacttttatatgttacattgccatctagtacatatgcatacactcttaactgaagtaaatgtttcaaaaagtaattgtcaccatcactatgtgtgatgtcctctgatatttcctatttctttttctgccagtgacccacccgacggatttcatgacccactaataagtttcagcctgagtttaaaaaacgttgactctgggggagcccgtaagaaagagtagtcagttcttactggggtgatcagagaaagcttcattaggagttgaatttgcactttgccttgaaaaataaaaaatgtttgagtggataaagtggcctcaggaggacataattagagtgaagcattctcccaaatagatttagattataaataggcaaaataggcaagcccaaatatttaccatttgaaaaaaaaaaactacacatttaaaatccatttaactattttcactaaatctgaatgcttagaatttgagaatgccaactaggcttagttagagacagtgaagaaaaaagtctaagttaaaacaactcaaaatatccttttccattcccagttctcttactaaatagctatgttatagaccatttctctagaagcctaactgtcctcacttaaaaaatgaaatggctttaaaaattggtgatttttttttttttgagacagagtcttgctctgttgcctaggctggagtgcagtggtgcaatctcaactcactgcaacctctgcctcccgggttcaagccattctcctgcttcagcctcctgagtagctgggactacaggtgcccgccaccgcgcccggctaatttttcattgttttagtagagacagggtttcacagcgttagccaggatggtctcgatctcctgaccttgagatccgcccgccttggcctcccaaagtgctgggattacaggcatgagccaccgcgtctggccaaaattagtgatttttaaggccctttcctggtctaagctcttcaaggtgataacccagttaatatcacctccattttgctcaaggggaaccaggctgccagagtttagataagtgtttaatcatgctttggctgtctacttagattcctttatcaggtaaaataatttcataaaagttttacaggaagtaaaactgtgtatgaatccagggtattcttatgcatcctagatttctgttggacatttatgcttatttcctccatgatatcttgttcttctatctctctggatccttttctgtgttttttgccagctcctgaaagtgggtatttaaatgatggtaagtccttagccttctacttttttttctcttcacatttttatccatggaggttttatccacttttagggctatactttcaccttcgaaacaattcccaaatctccaaccgagtcttctcacccaagatctagccgtacatattcaactcttggcttagatcattcaacttgagtgttcccaaattccacccaagcaaagcctttcctcttaccctagcctggaaagacttcttcctcttttgaactctaaggcagatattaacattcaacaagtgttcatatgctgccttatgacgtggcttttgttatcttcaagggttatttacatcttttagagttacgtgactttttgtgtgtttgatctttccaactagtctgaagctgcccaaggaaaaagtcaatgactaactaatacatcttcataaactcctacagcttccataacaacctgagacctctccaacagcattcatcccattgtgctgtcacagtctgtttacaatgacctcaacctggctagagtgttttgagagctgacaaggcatattttgtgtccttgtattcttgttgcatagtactcaggaagcactccctaaatatctgkggaatcaatgaacaggaaaatattccataaacattgtacattttgctttgttatatatgggctggctcacctgtattattctcatagatttccaataatatgaaaaaagtttgttttaatagtcc

SEQ ID NO: 68672 - DNA, 640 bp, Homo sapiens
aaaactgtgagtactaaatacttgcagttttcagccactgaggtgatttgctatgcagcaatagtaatagtaacaaacacacagacttctgaacctttccccaatccaaggtcattctgtggagttagagacccagctctcccattcacaaagaagctattattctctctacagtaaagaaagacaaagaagtcagagcagttttttaacgctgcacatcaggaaactagatgtatgctgaaaatttgagagtgataagtaggacctttcccagtctgtagaatataccaccaaagcatgctcactcgagaatgtgcttttgattactaccaagcacacttttttttctttttgaagatatgtgcaaacaatgaaaacccttcttgctgaaattacaatacagccgtacattttggttgaaatgtttatttggagatttcaaagtcaaggttgatatagccaaaagataatacagattagactatcatggaaacaaaaagaatctaaaatwtgatattgtttgtacactagggtcaccgctcatgttaacatttccttcattgcatccactttctcggagctggtgttgtagggttagatgtgagtgtgaatgagcatgcgtacagtggacaaaatcccc

SEQ ID NO: 68673 - DNA, 645 bp, Homo sapiens
gattattaataataatgagattattaataaaaatagtacgatcagttgccctgcacatacctttgtcctaagaaacaagcagactcctggttgcttgactgactcaaagacaggaacaaattatcagagctgcaaagcaaagcgtattatttgtaaaaatgtgttctaccctgggctccttctagagtaaggggtcaccttaattcacatgagtaatacagcaatcttcactgacagtttgaaagaaagttactatttatgcacttcattatgttacttcttcaaaccgtacttcttgttttgttgcaacacacaaggaagacatccgtgtagacrtaactttaatttaatcctcctgtcattaaaaatcaaacatactgctgcatttttgcaggagggtatctatggggtatctggtgtatatgaggaaaacagaggctgtgtttggtctacagattggtaatagaggcttttcatatcagttgactacatcgtcaacaaccctcaaatttctattagcaatatcaacaatcgtgtatataagtaataatcagctgaccccatttatttaccctggaaagtggtccctcagttaacagtgtgtgttagagcctactctgtgcagaacatcaggccctatgatga

SEQ ID NO: 68674 - DNA, 1183 bp, Homo sapiens
gtccatctaatagtctacaagatagtgttggctgaattcagggttagtcattgtagcctggctgggactgaccatgtgggggacaaaatcagctggactgactgagtcacaggccacttatttgggggcgtagagccacatcctgccggttgtagttttcatgaatggccgaggaaacatttgcaaatgacatggcttcagaactcccaccggctgtgctatgttttccgggtgagcctgattgcttttggctctacccagtgcagtgttttccatcaaatcagtctttcctctgcgagggtatttattacgtgccattttgaaaataaaataaaagggatgtggagcaatcatccagcaaaaccatagaacattttattatcctagacggtgaggggtcaggtttgacatacaacgctgggagcggcgatggccgaacaatgtgctactaaagcgtgatttaatgaggcttggaggatttagttcagtcagaaaagttccactctgtcttgggcagaggagaagctgagctggtgtggtcagctgacctagcggcttctcaccaggtaggcctccgccggcagcctctgtttgttcggatcccagacacagttgtcagggagacttgagtgctggaaacctctgactgatttagtggaccccaaacatggcgcagcttccctgttgcttctgttttacaaggccagcagttaattcaacaaaagcctgaattcatttccctctatatgcattgactgtcagctaagagctggcggccatcaacttcattaaaaaaaaaaaaatcccatttcactggaattgagggcctttgccctctgacacatggcagcatgctctctcgggcaacrctttttgtttcacacttttccaggagaaaaactcattagcagatagtggctgatcatcaagtcattgcaagtaatcatacacatcattctgatccagctgaattaaatccaccagttatacttcattattgtgttggcagaacctcagcctttgagttatgaactaagacactcagggacaagttcaagcatccttttgttatcttctttattgagttagatgtgtttattgaatatttatctagtaactatggtatgcttggttccatggggagtgaatggggtgtagaagagctgaaagccctggttactat

SEQ ID NO: 68675 - DNA, 1436 bp, Homo sapiens
tgctgcataaagaacaaccacaagccctcaaagacatacatgttatgcatttgtatccttcttatgtgtctaatctatagacacataagcaaggagatgactctccttcaggctctgggtctgcaagtcacagtgaggctctgattcatacgtaaatgctgaatattgatgtaagcaaaattgcactataactatatttgaagaatgaggggatggaaggggaaggaaagaaagctgaatccttactccggagacagagtagcatagtagttgagaacataagctgtggagctaaacacctgggtctcaatcccaactcagccacttcacatgcatgatcttgagcacattaccaaatccctctgctcctcagtttcctcatttgtaaaatggtgttaataataattcccagcggcaaggcgcggtggctcacagctgtaatcccagcattttgggaggccgaggcaggcggatcacctgaggtcaggagtttgagaccagcctgaccaatatggtgaaaccccatctctactaaaaatacaaaaattagctgggcacgatgacaggtacctgtagtcccagctattcggaagactgaggcaggagaattgcttgaacccaggagttggaggttgcagtaagccgagatcatgccattgcactccagcctgggtgacagagcgagacttcttctcaaaataataataataataataataataataataataataatatccacctctcagagctgttatggccattaaataaattaatatgtgggcagtacccgatagagtgcctagcacatgctgggtgttatgtaactgattgctattattatttatcacggtggagaaccaacagagaatgctgaaactgaaaaaaaaaaatcaagaagtaaccattcaattatattatttacagacctggacataaataccaaaataattatctaggaggtgaagtggttgccactgaggaaaagggaaaaaggcgggggcacaggactgttgtttctcaacaaaattgtggagttggtttattcttgtgtgcattataacttggagaaaagtaaaaactgaaaacaaggaaagatgaaaagaggaaagatgccaaaccatgaatgaggaacataagcatattcatttgatggtggaaggtcaaaatggttctaaaatgttaaaaatgaaatgaagacatccaaatattgagtcccggcagcacacagaaggtgtctatagaaggaaaaagtcattaattttcayttaatccaagagacaataatggatttgtaataagaaaatgcaacagtaatgtcagactgccatagtacagtactcactaatacctaatgcactgctccaggcctccctccctgcctcctctcattcctggcccattaaatatcctgtgaatattcataggcacaatgc

SEQ ID NO: 68676 - DNA, 1436 bp, Homo sapiens
tgctgcataaagaacaaccacaagccctcaaagacatacatgttatgcatttgtatccttcttatgtgtctaatctatagacacataagcaaggagatgactctccttcaggctctgggtctgcaagtcacagtgaggctctgattcatacgtaaatgctgaatattgatgtaagcaaaattgcactataactatatttgaagaatgaggggatggaaggggaaggaaagaaagctgaatccttactccggagacagagtagcatagtagttgagaacataagctgtggagctaaacacctgggtctcaatcccaactcagccacttcacatgcatgatcttgagcacattaccaaatccctctgctcctcagtttcctcatttgtaaaatggtgttaataataattcccagcggcaaggcgcggtggctcacagctgtaatcccagcattttgggaggccgaggcaggcggatcacctgaggtcaggagtttgagaccagcctgaccaatatggtgaaaccccatctctactaaaaatacaaaaattagctgggcacgatgacaggtacctgtagtcccagctattcggaagactgaggcaggagaattgcttgaacccaggagttggaggttgcagtaagccgagatcatgccattgcactccagcctgggtgacagagcgagacttcttctcaaaataataataataataataataataataataataataatatccacctctcagagctgttatggccattaaataaattaatatgtgggcagtacccgatagagtgcctagcacatgctgggtgttatgtaactgattgctattattatttatcacggtggagaaccaacagagaatgctgaaactgaaaaaaaaaaatcaagaagtaaccattcaattatattatttacagacctggacataaataccaaaataattatctaggaggtgaagtggttgccactgaggaaaagggaaaaaggcgggggcacaggactgttgtttctcaacaaaattgtggagttggtttattcttgtgtgcattataacttggagaaaagtaaaaactgaaaacaaggaaagatgaaaagaggaaagatgccaaaccatgaatgaggaacataagcatattcatttgatggtggaaggtcaaaatggttctaaaatgttaaaaatgaaatgaagacatccaaatattgagtcccggcagcacacagaaggtgtctatagaaggaaaaagtcattaattttcacttaatccaagagacaataatggatttgtaataagaaaatgcaacagtaatgtcagactgccrtagtacagtactcactaatacctaatgcactgctccaggcctccctccctgcctcctctcattcctggcccattaaatatcctgtgaatattcataggcacaatgc

SEQ ID NO: 68677 - DNA, 2214 bp, Homo sapiens
gattggatcccatactggagagaggaaatctatcaaaagcattattcattcagctgaccaaattggaacatgagcagtagattaaaatattgtatcagtaaagttaagttgataactgcactgtggctacgtaaaagcatattcctattcttaagaaatacaaactgaagtagttattatttagtagcttatatttagtagttagtagttcagggtaaagggccatgatacctgtaacttatcctcaaatgattctgaaaaaaaaaaaaagtgtatgtatgtgtgtcttcagcacgcagcacataacaggcactcaataagtgcttgctgggtgaaggaaagaaggaattaaataactaatgagcaagttactgtggcattagcacaatcagtatcttgatgacctactccagttctctactttctaggtcacccttatccatcctcagttccaagttatttctttagatcattgggaagtgaaatgctcccccttggctccctgtggccacctgaacctacacttggcagcttccctattttctcctcacattacccttttcctgggcatacctcctgcccttgcattcaccatctcgacccttcatgcttcccgaatccgcagttgtcatgcaagtttactacttcttaatcattaatcctctccgtcaaagagtgtgctccaagaaaagcagctgatgcccccatttcataccacgcctccctctggaaggacatatttacattttcagggcacgttgttgtagtaaaattagtagtacaaatatcatcataactgaatccttttttttacattcttatccctgatctggatacaactaagtttctctcagtgtacaaatttttctaaacaaggaaattttacctaaaagtgagaacaagttaatttttctatttgcaaataagtaaaaagagtttttgatggttgcctttaaaggctttgttattatctttaggttttatgcatcaacgctatccaccaatgaataatgcatatgtcgaagaactttaaattctcttccaaagtttgactactgtgttccaaaaacagccaactgaacctccagatgcagtgataggataatttatttatttagtaaaatgtatccagtaaaaatttactaagcattctcctaaacattgttctcagggctgtctgataaagcatagttcctagcttccaggaatatcacagtgcaggaggctagtgaactrtactagttggtcctctaatccttccagcaagcctgcccttcccatgttcatctggggattggcacaggacacagacttggaaaatcagacccttccatctcactggcccctaaataatacaggaatggtacaccaccaaagccaggcaatcagcattctccccagggacttttctgctagaggtagacaggatgtttctcttgcacttgaggcacaagctgtaaagatggcactgggcaaagtaaggcccactttccctccatagaggaaacaagttagcattaggtagcaattaagccaactcacaaaagggagcaaaagttagatgtaaaggctgcatgccctgataacctggtctgaggctttggatccagttgtacctgacgtttcctccatgttccaggttctctgagcccacaccttcccctctgctaatttgcattgagatcctgtctcttgcagcagagagggtcctgactgacagagggagctaatggtcatgagttgcactgtgagtagcaagaagaataaaacaggcttttacaagaattaagagttaagagagttctcctttattaaggaagacaggaaaaagtggcatttgagctgttttaaaagaatgagataaatctggataaccagaaacgggcaagagaagattcctggtggaaggaacaaaggggaggtggtcagcagtgtccacgctggccagagtgtgttcacaggaacagactgggagctaagactaaaaaggcgagttcgaggtagtcagtggaagactttaaattctgacagaatattcaagtagtagtgtcccggtggatatggaaaatgttatatggcatctcaggagagcagttagagcgggggacattggttgggagttatcagcagaaaaaatataattcaagccttcaggcaactggctgctcataataattaatggtagctaacatatattgaccgcttattcaagtt

SEQ ID NO: 68678 - DNA, 658 bp, Homo sapiens
aaagagaagaaatatgtaaatgaaaaaagatacataaagacagatcctggagacccaataagcaagtaatatgaatgctagaagggaaaaaagtaactgatagaagaaggagtaataacaagatgatcaaggaaatgtttgcttgtttgtggcctttasttatgcagtataggagaggtaataaaaagacacatacctaggcatatcatggtaaaatctaaaaattctaaggttaaaaatagattttgcatgcttctagaccaaaaacccaagatccagaaaaaaaaatcactggacttctcatatgcagcaccagaaatcaatggactgatggaataatggttacaaattactaagagaaaagggctcaaggatctacaacatgtcaagataatatccacttcttcaggtaaaagaaagatattttctaggacgcaaggattcagtgatcatcatccacataacccacctaaggaaaagtttccagaaagtactcttaaaaagaaggagaggagttggggcaaggagaaggaaaagaaattttgtaaaggaaggaaacagaaaagaagtcagtggtaggtgaagaactttgcaatatgtatgggtaatctaaatcaatgatgatagactggctgggaatacatactatgaacactaa

SEQ ID NO: 68679 - DNA, 2403 bp, Homo sapiens
gtgctgttttcatattttcatttttattatctcctaggtaattacaagtgtgactcacactaagcttgaagaatgctaacatttgcctcttgcttaaatttactggaagagatatttactctttaaaaatagcacaaaataagtcaaaactaattttttactttaaaatgaaactcacttgctatcacttacaacctcaagttcattctattagtaacaaatatttattgaaagcctattatgtgccaagcactattgtagatgcttggaatatgttagtgaaaactctcttccagaaaaccttcaaataaactcttaattataaaaacaatagttactgtatgaaatgtcagcaacctttggaaaactaaaaacggtaagtttttaacattcaatttacttttttttttttttttttttttgagggagtcttgctctgtcacccaggctggagtgcagtggcaatctcagctcactgcaacctctgcctccggggttcaagggattctcctgtctcagccacctgagtaactggaactacaggtgcacgccaccacgccgggctaatttttgtttttgggtttgtttaagtatagacagggtttcaccatgttggccaggctggtctcgaactcccgacctcatgtgatccacccgcctcggcctcccaaagtgctgggattacaggcgtgagccaccacacccagcctcaatttactttaaaacaaaacttttttaaaaagttttacactaaagtcagataatcttaatgtgccaattgagtttcaaaagtatgttaacgtaaacaaaactcagtagtttcaagaggataatataataaaatccctcacaaaggtgaagaaaaagtaaaacctgccactagcaaggcatattatcacagccaataaggcagctggattacaaatgacaaagctgatacgacaaagggtatcagggaaagactactgaaacactgtctttttcccctttgaaaaggccctaagtttcttggaatctcccctagcactttcacttacgtgtaataatttccttgccaacatgaaatactaccaacaataaatttctttgtgtttacaatcataaacaacgccagtaatactttaatctatgaattcctacatgtctaattcaattaaataaactttccatgtaacctgccctcacagatttgatgttctagrttttccgagaaacctatagcaaaatattcttcgggaagggaaacctctgttgggttatcctacataacaggttctacaaagatgctttcatatacagttgtccctttttatcagcagggaattggttccaggatcccggtggataccaaaaccctcagatgctcaagtcttttatataaaatggcatagtcccgtaaacattaaatcatctctaggtttcatacactacctagtacattataaatgatatgtaaataatcattatactgtgttgttttttattgtttttttttaattggtttccccctcctccagtatttccaatccaaggttggctgaatacacgggtgggtaaccttggatacggagggccgactgtactcttatctgggagcttgatattgcccatctcagtttacagataagaaaactaaggttaagagtgacaaagtggcaacataaacggcaggacttaagtacaggactgactgcaaccacttaagcagatcccaagaaaagcaaagctagatttctgtatttaaagtgctaccccaagtgtaggaagaatcgcaatagcaaaataaaatgaaagagttaaattcccagaaactgccactgaaagactgaaaagacaatgtttagtaaagtgacacaacattttacaacagggaatcgagaccccgcccagtatgttccccgacagcatgttttataaacgtcacatactggttaatgtgaattctctggacattaagtgttgagggtacggaaaaaccaccgaatttctggtctcaggaagaaaaagcagagaaaggagtgcggctgggagaagcaggcggagggctggcccattttatttctgcacgactttgcctgatcacctgctgaggattctaaggcctgacccagacctagatgccagcccttagatgacaatctctaaaagcagagttcatgctgaggcaggtgccaagaaatcggttcacacccctgataaacggttgttgaaaatgtgtgtcacctgcaccaccagcgaccagaaccactcttcctcactggaacgagagcaatgtctggggttccacacgcagactccaccctgccctgggggtggcccgcgcgccgccacctcccggccattacccaaacccgcaacgccccgttccacacatcccggactctcgagcagccggggagggtc

SEQ ID NO: 68680 - DNA, 569 bp, Homo sapiens
cagacttaaagtctgtgttgatgttaatgctggtcagctgtgcctgaattccaaaagggcggaaggtatattgaggcatgtccaacccctgcttcccatcatagcctgaactcstttttcagattaactttggaatgcccttggcattccaagaagaggggttcattcagatggttagggggcttagcattttatttttgctttacaccagaagcttccctgaggggcctgggccctgggcttcagggcctctgctctcaggccttgcccagaagaatggaagatgcagtgagggacctggaggagagtggactgctgtgtgtgggcttcgtggcacacagggaaaagcacaggctctgggtgagtttaaatcctggctctgctgcctgcaagatgtaagactccagcatgttatttaatctctctgagcctctgtcaccccataaataaaatgaggtaatttctagcacacaggatcattgacatgaataaaataactgatgtttacatggcacttgctacatcagtggcactgattgctggtcatataaagcaaggaaaaaagatgt

SEQ ID NO: 68681 - DNA, 663 bp, Homo sapiens
gatcccctccctccatgaacygtttagtcaacccggaaccccttgaggccctgctggaccctgcacctccaagaacagaggaacaggattctttattttctgttttatttttttctttctttccttcttttctttccttccctcccttccttccctccctccctctctctttctttccttctttgtttcttcttgacagagtgcaatctcagctcactgcaacctctccgccttctgggttcaagtgactctcttgcctcagacttctgagtagctggaattacaggtgtgagccaccatgcccagctaatttttgtatttttagtagaaatggggtttcaccatgttagccaggctggtctcgaactcctgacttcaagtgatccacctgtctcagcctcccaaagtgctgggactacaggcatgagccacttcacccggccacagggttctttaaatagtgggtactctgcagcctttccaccctgccgtggagcctccgccaggagaccagagcagcaaggcccccatcatctgccctttaagccacatgagctggcttagccggcctgacccacaaaaatgaaataaaagccttggtgagcaggacctgaggtcttttccaggggcaacaggtacctgtctgcccctcatggccacctg

SEQ ID NO: 68682 - DNA, 663 bp, Homo sapiens
gatcccctccctccatgaaccgtttagtcaacccggaaccccttgaggccctgctggaccctgcacctccaagaacagaggaacaggattctttattttctgttttatttttttctttctttccttcttttctttccttccctcccttccttccctccctccctctctctttctttccttctttgtttcttcttgacagagtgcaatctcagctcactgcaacctctccgccttctgggttcaagtgactctcttgcctcagacttctgagtagctggaattacaggtgtgagccaccatgcccagctaatttttgtatttttagtagaaatggggtttcaccatgttagccaggctggtctcgaactcctgacttcaagtgatccacctgtctcagyctcccaaagtgctgggactacaggcatgagccacttcacccggccacagggttctttaaatagtgggtactctgcagcctttccaccctgccgtggagcctccgccaggagaccagagcagcaaggcccccatcatctgccctttaagccacatgagctggcttagccggcctgacccacaaaaatgaaataaaagccttggtgagcaggacctgaggtcttttccaggggcaacaggtacctgtctgcccctcatggccacctg

SEQ ID NO: 68683 - DNA, 663 bp, Homo sapiens
caaattttggaaatttgccctcatttgctgggttgaaattcacgttctttatcttttctcaaaattatgactatcattcatgagcccttgctttgatcctttctggtttatctaagctgtttttatagatgtcaaatcactttgacagcatcttccgactgtgacagaaataatgcagaagggtggaaaagtgtaactctgagaatagggaaaattgcatccccccttctagctctgcatagatgtcagacaatcatgtaactcactgggctgtggtcttatcaaatgttgggacaaattatttttataagtctctcagattttagcatgtaattattttatgactcttcccttaaattgtggattcttagaattttctcttccttagtgattcgttttaatgccaggccactcttagcatttggggggtctgttggtgagcctggagagtgtaaagtattgttagagtaggtagttaggcatgagcagagcaggatagagatccgcctccaccccactgccaaccaggaatgtcagaaaaccatcaggtgatggtcaggtagttgttaaactatctytctcaaataataagtggttgcagtcagcaccagggaaaggccatctcccagtacataaaaaaacacctgaatctggtgattagca

SEQ ID NO: 68684 - DNA, 1217 bp, Homo sapiens
aaaaatgcaaagtcctttcagctagggagagaatattaggatttttaggcaacagtatccacagatactctttcttgtggacattagtaacagagtttgcacttgttcttattgccaagtatgtacatggattatcaattttagatttccaggatctcaggtgcaatgctggctctccatttatcttcctgcagggaattggtcccactgagaggatttattaataagcacatgtactttgttactgaaaagccactgaacctcttctttaaaaatgggagcatttgtgagctgctgtgaatatatccatatacatttttaatcctcgctgttcctgccaaagactaaccttcctttaagaggactttctttatgagctaccacttattaatctgctatcatgggccagggtcctatgctaagtatcttaaatacatcgtttctcataacctgtagaacaagccagagaagggagtcttatgaactgtacagtttggtgaaggtactgaagatcagccaggttaggggcagggcagtggttctcgaagtgtgtcctggaccagcagcatcagcagcttgttaggaatgcacattctcaggtccccattccaaatcgattgcctcaaaatctccaggggtaggatcagcactttgtgttttaacaagcactacaggagattctgaaccctctgtaaatttgaggratttccctaggatcccatagccaggaaatagtggggtgggattggagcttgggtctgaggacagactagagcctctctcaaccaagagcaattctgcccccagcagacacttggtaatgtctagagatatttttgtttatcacaactgaggtggggagagttgctactggcatccagtgagtaaaggccagagatgctactaagatctcacaatgcactggacggcccccaggacaaagaattttccagcccaaatgtcagtagtgctgaggtttaagaaaccctggtctacagctttatgctgccttataaaaaagacagttaaaagcagggagggatgagggaggaagagagggagagagagaaacagagaaagacaaaagagggaagaaatgaagggagagaaagaaagaagagaaggaagaaagaaaaggagttaaaggaagaaaagaaggaaaagaaggaaggaggaagagagagaagaaagggaggaaaggggagtggggaggaggg

SEQ ID NO: 68685 - DNA, 748 bp, Homo sapiens
ttgctctcatcatcttcccttgttctccctacctaccctttcttctctcttaacttcttaattttccattttacttttcttcacttttttctaaatcatgcttttttcccctcataatcccttcctctccttccccttctctttgtttttgttttctcaattttctccattttctctccttgcacccccaattttcccatcctttctcttgcccctcacttgctccatctctctcctccctactttttttctggttcaggaaagccttagtcagcccatcaacttctagtcaaagggctcttttttgtttgtttgtttgttttgagatggagtctcactctgtcacccaggctggagtgcagtggttcaatctcagctcactgtaatctccacctcccgggttcaagcaattmtcatgcctcaacctcctgagttgctgggattacaggcatgttccaccatggctaatttttgtatttttactggagatggggtttcaccatgttggccaggctggtctcaaactcctgaccttaggtgatctgcctgcctcggcctcccaaggtgctgggattacaggcacgagccaccacacccagctgaaaaggccctttttctgaaccacacatctcctgcattctcagcaggtgaggaagtaagctttaggaaaggtctcattgtcacttggggcatgggggtaaggattaaaaagaccacagattatccctctgctgtctgggagtactat

SEQ ID NO: 68686 - DNA, 1306 bp, Homo sapiens
actaaaagctgtaatgaatagtatagtgtcatttttaaatgaacttggatgttatgtaaatacaaacattacatcaaaacatacatatattctactcgggaggctgaggcacgagaattgcttaaacctgggaggtggaggttgcggtgagccaagatggctccactgcactccagcctgggtgacagagtgagatcctatctcaaaaaatatatatataaataaaagtaaattttaaaaacatacatatattaacatttgtgaagctctaaaagtacatttgaaaagtgtaaagtgatatattggtaagacttttttttagtttacagacaatatttgatggcattcatattcttgaactctttgtaaaaatttcatggttcttacaggatttgttacccactggatgagaaattcggaataaattcttaaattagttttgctaattatgtgaaaatatctatatacatataatgcttatggtgatcacgtaaccagactatttaattttctcttaaattattccagataaacaagaatgatactgaaaggtttaagaacttatacatattagtgcattgcctctgattaactaaaaattgaacagtatacaaattatgcaactttatgaagttgaaagggattttaaagatgagaagtcttaygatgcagggaaagaattcagaaagaactagagttatagctgggtaggttctacagttttcaagctgtgagccattgaataaattcagctttgtaagcctcagttttctgctttgaaacttggacataaaacacatacctcacagtatcgttgtgaggctctgcatgtaataggtatttggcaaatagtagctatgttctaacccatctctcatttttttagatgagaaacttaagggtcagaaagattgagacttaaagaacacgcacaaaaaatggtctgtagcatttcgaagatctactgactcatgcatctgtgttctaccgcaattcttaaatttatactttctgcttcctatcctcgaaacatgcatgccaattttccaggctggaattggcagtgagctgacagacagaggtttgttttttaaaaagatgagagaacaacttgcagaatcttttatccaaattctcagaatgttttttagtaaatgcttcttatcctaagaactcaaatggtggctttctgctcttcctgccttctctgattctgttgccacttagccctgcggttcacagctaattaaaaagggatggaagaaaattatacctctgttgatgctattgttttaatctatctcaa

SEQ ID NO: 68687 - DNA, 554 bp, Homo sapiens
  misc_feature (1)...(554): n = A,T,C or G
ttactatctgctatctctgtgttaagcactttctatgtattagttcattttaattttgaagaagcaccgtttgcctttctcagttggccataaagatcacctctgtcttatgtagccctgagtgtgagctgagggagaggccctggtgcaactgatggatgacatgaaggtgagtgaactggttgtgcagcataattgggccctgtcccggatgtgacatttccatctcacaataaattgctactgggtcttcctttccaccatctcacaatgctccatttttaccaagacctagtaacatgctttttagaggagtgtacaaattcatgctgtggttggcacagccttgctccaggactntaaaaaactctattgtggktctccatttgaagctcgtgataaattccatgtggcatcttgtccatcctagaaactttcagtaacataagctctggatgatcatgtggggcaaatgacagggctacctgaactgcagcttgagcctgcttcacagctttctgtgctctgggcttccctcaaagccatcagccttg

SEQ ID NO: 68688 - DNA, 554 bp, Homo sapiens
  misc_feature (1)...(554): n = A,T,C or G
ttactatctgctatctctgtgttaagcactttctatgtattagttcattttaattttgaagaagcaccgtttgcctttctcagttggccataaagatcacctctgtcttatgtagccctgagtgtgagctgagggagaggccctggtgcaactgatggatgacatgaaggtgagtgaactggttgtgcagcataattgggccctgtcccggatgtgacatttccatctcacaataaattgctactgggtcttcctttccaccatctcacaatgctccatttttaccaagacctagtaacatgctttttagaggagtgtacaaattcatgctgtggttggcacagccttgctccaggactntaaaaaactctattgtgggtctccatttgaagctcgtgataaattccatgtggcatcttgtccatcctagaaactttcagtaacataagctctggatgatcatgtggggcaaatgacagggctrcctgaactgcagcttgagcctgcttcacagctttctgtgctctgggcttccctcaaagccatcagccttg

SEQ ID NO: 68689 - DNA, 661 bp, Homo sapiens
aggctctttttttgctttgtaatggagtcttgctctgttgcccaggctgaagtgcagtggcacagttatggctcacgggcaccctcaatctcctgcactcaagcgatcctyccacctcagcctttcaagtacctgggaccacaggagcacaccaccacgttcagataatttttttttattttttgtagagatggggtcttgctctgttgctcaggctggtctcaaactcctgggctcaagcagttttcccaccttagcctcctaaagtgctgggatcacaggagtgagccatcacgcccatcctgggctctttctacatatctgctcaatgacatttagctagtacatcctcattgtcacacttgttaccttgtagttacaagatggctgctgaatagccagataggggtatttgctgtttcaggaaagcaaaatccctcccagaaaccctcagaaatgagctaagggtttctgggagggcttttgctttgctgaaacaggaaataccgctatcggggcattcattagtcagaactatgtcacatgacctgtcctgagggaagggaggttgaataaacaagtgttttttgctgggctggcctctgtcccccaggctggagtgcagtggtatgatcatagctcactgcaggcttgaattcct

SEQ ID NO: 68690 - DNA, 661 bp, Homo sapiens
aggctctttttttgctttgtaatggagtcttgctctgttgcccaggctgaagtgcagtggcacagttatggctcacgggcaccctcaatctcctgcactcaagcgatcctcccacctcagcctttcaagtacctgggaccacaggagcacaccaccacgttcagataatttttttttattttttgtagagatggggtcttgctctgttgctcaggctggtctcaaactcctgggctcaagcagttttcccaccttagcctcctaaagtgctgggatcacaggagtgagccatcacgcccatcctgggctctttctacatatctgctcaatgacatttagctagtacatcctcattgtcacacttgttaccttgtagttacaagatggctgctgaatakccagataggggtatttgctgtttcaggaaagcaaaatccctcccagaaaccctcagaaatgagctaagggtttctgggagggcttttgctttgctgaaacaggaaataccgctatcggggcattcattagtcagaactatgtcacatgacctgtcctgagggaagggaggttgaataaacaagtgttttttgctgggctggcctctgtcccccaggctggagtgcagtggtatgatcatagctcactgcaggcttgaattcct

SEQ ID NO: 68691 - DNA, 661 bp, Homo sapiens
aggctctttttttgctttgtaatggagtcttgctctgttgcccaggctgaagtgcagtggcacagttatggctcacgggcaccctcaatctcctgcactcaagcgatcctcccacctcagcctttcaagtacctgggaccacaggagcacaccaccacgttcagataatttttttttattttttgtagagatggggtcttgctctgttgctcaggctggtctcaaactcctgggctcaagcagttttcccaccttagcctcctaaagtgctgggatcacaggagtgagccatcacgcccatcctgggctctttctacatatctgctcaatgacatttagctagtacatcctcattgtcacacttgttaccttgtagttacaagatggctgctgaatagccagataggggtatttkctgtttcaggaaagcaaaatccctcccagaaaccctcagaaatgagctaagggtttctgggagggcttttgctttgctgaaacaggaaataccgctatcggggcattcattagtcagaactatgtcacatgacctgtcctgagggaagggaggttgaataaacaagtgttttttgctgggctggcctctgtcccccaggctggagtgcagtggtatgatcatagctcactgcaggcttgaattcct

SEQ ID NO: 68692 - DNA, 654 bp, Homo sapiens
cagttggaaattctacagtgtgcacatgggagtcactggccccaccaagagaagagaaggttcctaccggtgaggaagccatgggaaggcacagaaccaaacagaagagaactggaactttgttcctwttttttttttaaaatgccattcggtgtttggatgctctgctttattttatctgtctctgttcaccaaaaattctccaccagaaaaaaaaagcacctgtttgaaattctgtttgtactaaatctcgccatgaaaatgatggattcttgaagggacctgagagatcatctagctttaactccttcactttataaagaagaaaacgatgtgctcaacataaacatgcttgtggctgagctcaaatgaaaaatgcagttcttctgcttcccaggcccgtcttctgtctgcagaagtgcctcactggtgtagctgtgggctcccctgacatcgctgtgagtgaaggcagcgtggttatgcccaatgcttggagatgacaggtgaggtacaagatcttccagaaaacacaggaagagagaagagctgctggttgtccagtcatctccctggtttctcttctctgagaggctatgaggttgatgcaaatgtagttgcagtttttgcctttactttcaatggtaaaactgcagt

SEQ ID NO: 68693 - DNA, 654 bp, Homo sapiens
cagttggaaattctacagtgtgcacatgggagtcactggccccaccaagagaagagaaggttcctaccggtgaggaagccatgggaaggcacagaaccaaacagaagagaactggaactttgttcctattttttttttwaaatgccattcggtgtttggatgctctgctttattttatctgtctctgttcaccaaaaattctccaccagaaaaaaaaagcacctgtttgaaattctgtttgtactaaatctcgccatgaaaatgatggattcttgaagggacctgagagatcatctagctttaactccttcactttataaagaagaaaacgatgtgctcaacataaacatgcttgtggctgagctcaaatgaaaaatgcagttcttctgcttcccaggcccgtcttctgtctgcagaagtgcctcactggtgtagctgtgggctcccctgacatcgctgtgagtgaaggcagcgtggttatgcccaatgcttggagatgacaggtgaggtacaagatcttccagaaaacacaggaagagagaagagctgctggttgtccagtcatctccctggtttctcttctctgagaggctatgaggttgatgcaaatgtagttgcagtttttgcctttactttcaatggtaaaactgcagt

SEQ ID NO: 68694 - DNA, 654 bp, Homo sapiens
cagttggaaattctacagtgtgcacatgggagtcactggccccaccaagagaagagaaggttcctaccggtgaggaagccatgggaaggcacagaaccaaacagaagagaactggaactttgttcctattttttttttaaaatgccattcggtgtttggatgctctgctttattttatctgtctctgttcaccaaaaattctccaccagaaaaaaaaagcacctgtttgaaattctgtttgtactaaatctcgccatgaaaatgatggattcttgaagggacctgagagatcatctagctttaactccttcactttataaagaagaaaacgatgtgctcaacataaacatgcttgtggctgagctcaaatgaaaaatgcagttcttctgcttcccaggcccgtcttctgtctgcagaagtgcctcactggtgtagctgtgggctcccctgacatcgctgtgagtgaaggcagcgtggttatgcccaatgcttggagatgacwggtgaggtacaagatcttccagaaaacacaggaagagagaagagctgctggttgtccagtcatctccctggtttctcttctctgagaggctatgaggttgatgcaaatgtagttgcagtttttgcctttactttcaatggtaaaactgcagt

SEQ ID NO: 68695 - DNA, 1132 bp, Homo sapiens
tgcatgaaatcattctgtgctggaataatctatcttgagaaaaggggatatcaaataattttccagtatcccattggccagagtcccctttttgggcttctgtctgacagtccctggataaggtggaacccccatgtgttcggtctggtgagagtatgagcaaagtagtctctcttcagtcagtgggagaggtgctggtgacaactagtgctttacatccatgaaaatagtgtaagctattgtgagggctcttcaagtctggagtcagggcaagtggtgaaggcctgtatcaycttttatgatctagcatagaaaaacacagtgttatttccaaaatattctgtttatagaagtagctacaaaggcccatccatattcaaaaatagaggacatggattccattttctcagtaaactgtggcaggggctggaaaagcatgtgcaattgaaaatatttttgaaaattaaatttgccaatgtcttggtcaattttgtgctgctataccagaatacctgagactaggtaattcataaaaaaaaaaaaagtttatttcttatacttctggagggctggaagtccaaggtccgtctggtgaggaccatcttgctacaacatccaatggtggaaaacagaaggaagggcaagagaacacaagcaagcgagaggcagccaaactcacttttttaacaaacccactctcatgataacaaaccaacttctgcaataatgacattaacccactaatgagagcaggtccctcataacttaattaccttttattaggcccaccttccaccactgttgcattggagattaagttcccaatgcacaaactttggagaacacattcacaccatatcagtcacattgtcttctggcctcaccaaaaaaaaaaaaaacaaaacaaaaaacaaacaaacaaacaaaaaaatttctcttatttgcaaaataccctcaccattgttcccaaacccatcaaagtcttatcctgtgacaacattggattagcctagaggcttgaagattttggtatctaaatcaggtccaggtgtagatgattcttttcagtctagtatcatatctcagtgtaactctttcagttatcaaccttctcattcagaaaacaagcagt

SEQ ID NO: 68696 - DNA, 1132 bp, Homo sapiens
tgcatgaaatcattctgtgctggaataatctatcttgagaaaaggggatatcaaataattttccagtatcccattggccagagtcccctttttgggcttctgtctgacagtccctggataaggtggaacccccatgtgttcggtctggtgagagtatgagcaaagtagtctctcttcagtcagtgggagaggtgctggtgacaactagtgctttacatccatgaaaatagtgtaagctattgtgagggctcttcaagtctggagtcagggcaagtggtgaaggcctgtatcatcttttatgatctagcatagaaaaacacagtgttatttccaaaatattctgtttatagaagtagctacaaaggcccatccatattcaaaaatagaggacatggattccattttctcagtaaactgtggcaggggctggaaaagcatgtgcaattgaaaatatttttgaaaattaaatttgccaatgtcttggtcaattttgtgctgctataccagaatacctgagactaggtaattcataaaaaaaaaaaaagtttatttcttatacttctggagggctggaagtccaaggtccgtctggtgaggaccatcttgctacaacatccaatggtggaaaacagaaggaagggcaagagaacacaagcaagcgagaggcagccaaactcacttttttaacaaacccactctcatgataacaaaccaacttctgcaataatgacattaacccactaatgagagcaggtccctcataacttaattaccttttattaggcccaccttccaccactgttgcattggagattaagttcccaatgcacaaactttggagaacacattcacaccatatcagtcacattgtcttctggcctcaccaaaaaaaaaaaaaamaaaacaaaaaacaaacaaacaaacaaaaaaatttctcttatttgcaaaataccctcaccattgttcccaaacccatcaaagtcttatcctgtgacaacattggattagcctagaggcttgaagattttggtatctaaatcaggtccaggtgtagatgattcttttcagtctagtatcatatctcagtgtaactctttcagttatcaaccttctcattcagaaaacaagcagt

SEQ ID NO: 68697 - DNA, 621 bp, Homo sapiens
gtccactgtgcacaagaccatgtaagaggagggaagtactgagagtgctccctggggagtcagggtaggctctacctgggagrtgtgcaagagcaggcctgaaggatgctcactttgctttgctttgtgtcggttttctctccttaacacaaatataagtgttctgtggagtaggtccctctaagtcttcctcctatgctcagtcatccttctttacttactggtttaagaatcttaacactggccaggcacggtggctcatgcctgtaatcccagcactttgggaggctgaggtgggtggatcacaaggtcaggagatcaagaccatcctggccaacatggtgaatcccgtctctactaaaaatacaaaaattagctgggcgtggtgatgcgtgcctgtaatcccagctacttgggaggctgaggcaggagaatcgcttgaaccagggagtgggaggttgcagtgagccgagattgcaccactgcactccagcaagagaatcttaacactatacatcacagtatccttagagctgggaccttagctgagatacagcaagaagacttaggatgagtgtacaatattaatggcttccaaggagtctttttacattatctgga

SEQ ID NO: 68698 - DNA, 573 bp, Homo sapiens
catctctattttccttcttccttgagatcctagctacttgtctctcaccctctgccatatccaagcctatttattttttctttaggtggagtcttgctctgttgcccaagctggagtgcagtggcacgatcttggctcactgatatctccgcctcctgggttcaagtgattctcctgacttakcctcccaagtagctgggatgacaggtgtgcaccaccacacccagcaaattttttttcttcttcttctttttcttttgtatttttagtagcgacagggtttcaccttgttggctgggccggtcttgaactcctgacctcaggtgatccacccacctcggcctcccatagtgccgtgattacaggcttgagccaccaggcccagccaccaagcctattatgggagatgtttatgtgcttcacactcagactgcaaccctgagccatgtcctctcacctgggccattgaggtaaggtttttggcttccaacaaatgggctgtagcccttctgagaagacataagctgccatttggaaacctcaaagaaaccaacctttcagctcaggagagag

SEQ ID NO: 68699 - DNA, 573 bp, Homo sapiens
catctctattttccttcttccttgagatcctagctacttgtctctcaccctctgccatatccaagcctatttattttttctttaggtggagtcttgctctgttgcccaagctggagtgcagtggcacgatcttggctcactgatatctccgcctcctgggttcaagtgattctcctgacttagcctcccaagtagctgggatgacaggtgtgcaccaccacacccagcraattttttttcttcttcttctttttcttttgtatttttagtagcgacagggtttcaccttgttggctgggccggtcttgaactcctgacctcaggtgatccacccacctcggcctcccatagtgccgtgattacaggcttgagccaccaggcccagccaccaagcctattatgggagatgtttatgtgcttcacactcagactgcaaccctgagccatgtcctctcacctgggccattgaggtaaggtttttggcttccaacaaatgggctgtagcccttctgagaagacataagctgccatttggaaacctcaaagaaaccaacctttcagctcaggagagag

SEQ ID NO: 68700 - DNA, 573 bp, Homo sapiens
catctctattttccttcttccttgagatcctagctacttgtctctcaccctctgccatatccaagcctatttattttttctttaggtggagtcttgctctgttgcccaagctggagtgcagtggcacgatcttggctcactgatatctccgcctcctgggttcaagtgattctcctgacttagcctcccaagtagctgggatgacaggtgtgcaccaccacacccagcaaattttttttcttcttcttctttttcttttgtatttttagtagcgacagggtttcaccttgttggctgggccggtcttgaactcctgacctcaggtgatccacccacctcggcctcccatagtgccgtgattacaggcttgagccaccagrcccagccaccaagcctattatgggagatgtttatgtgcttcacactcagactgcaaccctgagccatgtcctctcacctgggccattgaggtaaggtttttggcttccaacaaatgggctgtagcccttctgagaagacataagctgccatttggaaacctcaaagaaaccaacctttcagctcaggagagag

SEQ ID NO: 68701 - DNA, 583 bp, Homo sapiens
aaagtttccccacacatcgttaatttctcagggaggggacaaagaaccttccagctgatgtgttccaagtatgaagtgccaagtgaagatcaattaaaaagtcaagagaccagaatcttgaagtataaagcatctaagggagaaagactgcttgagttaccgtggacttttcaggggaccttaaaagcggtratgtgacgaccttagacctggaattggattagcctccttgtgagttacacaaagagatcatcctaaacctgcaggaggaaacacctattcattttagactgaaagctttaagcctgtcttggaatccttcattctcttccccttggccaatggctgttactaaatagaatggtgggtaaacaggattcagatttagactgtgggaaagcagttggcctccacctacaagacatactaatagcagattacattccctccagggagataatctttaacacaaggcagaccccagccctccaatctaacagcaggccaggaaggcaagataaagctaaatggccactccatccgtaaaccatttgcacagcacattggtacaaataggaattct

SEQ ID NO: 68702 - DNA, 558 bp, Homo sapiens
actaatacactacctaacccatccctatccccttgcttcttcttgtgtgtttcacgtagatttaataaaccatgagatttgagcatcttaattgggcctctgtgctttctgttttgagaccaccagaattgttttcagggtgatatacttggaggctaccactggatcgtggtatttcctacaggatgacagcaagaattaagtgttacaatctattttaaaagyaaacttgacatccaactacgggatgaacccagctatcgtgacctttaaggaagggaagaggaaggtgtgggcagggctccctgaggctcccgcagtagcatttgctccctcacagacccgaaaggagactgaacgttcaggcaaatgttgagccagagacaaccctcggccttagcaattcctaagcaaaaggaagattcagaatgccagaatctgactacttagtttgcttatcccaaactatactaccagtattttactttttaaatgagacagggacactgggaccactatactttgtcctcagaggaagtttcacctaaaaggaggtca

SEQ ID NO: 68703 - DNA, 1172 bp, Homo sapiens
gctactcttatgccagaagaaatttatgaactgatcttgtcaatgtattgcagggctccaaaacaaaaccatatataagaacttctaaaaaatctaaataaggtagggatgcatgggtaatttaaagagcarcaccaatgtccagttttgggtaaaagccctacagtgtctggcatatgacagatgcaggatcctcctttgtggtgtgattggaatgagatgagatgagcattatggcagagtgtaccacatttcagtttggcgaaagtaataacattcccccaatgactgaggagagaaaccaaacaatacaattcagtcttctccatttgctaagctccatgggtgtggtgggatacttggcatgcgacctctgagtgggagggcccagagctactggcagggccactacactaagggccagggagccacagatggaagggtcagtctgaagagctcaacatgtgtccaaagagtacagtgacagcaggaaagaggctaggcagacaagcagcaattagggtgtaagatgaggccacaaggcaattagaaatccaaaggaatcaaggctaaaaatgccagggatcgggtagacaggcaggaggcacaagccacaaccccatggctgggatgccaggaggatagaagtaagctctgccgcgtaaacttgaacagagggtgagacattgattcacagcaactgtgactgtattcatgcattcatccctcccttccttccttccttcatttcttcatttcttccttccttctttccttccttccctccttccctccttccctctttccttccctccttccctccttccttccctccttccttccttccttccttccttccttcaactaatgcttattggaagattactaggtggcatgccctctgctagccatgggggtacaactcagaacaagacaacccagggcccagtcctcatagaacttatgtcctaacgaaattgattctgcttccaatgggctggggcgtcatagcccaaagccaggcccgtcctgcatgtgaggatggagaggctatagcagtggggaggaggcgagaggagggggcaaatgcaggagttaggcagggcccagcctgggctgtgtgccaggccctggcttaggccaagcagaagaaacaaagatacaaaagacct

SEQ ID NO: 68704 - DNA, 727 bp, Homo sapiens
cctaattatcacagctccagctaacagttcgcccacagcaaagctccttgtggaaccctataaagaaggaaaggaagcgagggatatgctggatgaactaaactctacaaaacaatgawaatggacacacctcttcttcaggcaattccacttaagatagtttccagctgttcttattttagcaagatatctacttggatatactttcattaagaaaaatgacatagtgaactctgaagtaaatatcagatttttttcacccagcaaatatttattgagcaaccaaccacttgaatgccagcaccgtgctaaaagctctcacaaaattacttttattgaatttccacaacagcccttgtgagagaggaattcatatcttcatttttcaacacaaggaagttgagaatgagagaggcccagaaacagcagatctggcaacaagcttgaatatgcagacacaaacattccacacagtcctcctctgaggacacgacgcaactgctccttttcaagagcttatcacttggcacagtgtggcaccaactgcaatcagcagtgcagaggcaaaggccgctagggaactcagtttatttctctgcagtgtgatctgtatgcagaaaatggccctatctttgccagccatcctctgccatacctccctaacccactgatggatgctgggcaggataagggggataagttaatttgttcctaagtgtctaaacaa

SEQ ID NO: 68705 - DNA, 727 bp, Homo sapiens
cctaattatcacagctccagctaacagttcgcccacagcaaagctccttgtggaaccctataaagaaggaaaggaagcgagggatatgctggatgaactaaactctacaaaacaatgaaaatggacacacctcttcttcaggcaattccacttaagatagtttccasctgttcttattttagcaagatatctacttggatatactttcattaagaaaaatgacatagtgaactctgaagtaaatatcagatttttttcacccagcaaatatttattgagcaaccaaccacttgaatgccagcaccgtgctaaaagctctcacaaaattacttttattgaatttccacaacagcccttgtgagagaggaattcatatcttcatttttcaacacaaggaagttgagaatgagagaggcccagaaacagcagatctggcaacaagcttgaatatgcagacacaaacattccacacagtcctcctctgaggacacgacgcaactgctccttttcaagagcttatcacttggcacagtgtggcaccaactgcaatcagcagtgcagaggcaaaggccgctagggaactcagtttatttctctgcagtgtgatctgtatgcagaaaatggccctatctttgccagccatcctctgccatacctccctaacccactgatggatgctgggcaggataagggggataagttaatttgttcctaagtgtctaaacaa

SEQ ID NO: 68706 - DNA, 609 bp, Homo sapiens
aagtaaacatgtccaactacataatagtttgcattcacctgtcaagagcatgggctaagggcattcatcccctcaggggatgactttgcaatcttacatggtctttcctactgcaccagaagtagggaacagagtagactttctgaaaagcatcccgacatcatttaggtcttgtggcagctattttgccctctaaactcctacagtgttttcttactagattacttttctatttctcccaaagctgcatgcttgctgctggggaggttatraccctagccctggctaaactagagtggagacaaagtgacctgtccgccctctctctctcctgggccctggctaggtcaccagaaaggtctggggtaatttcttggcatggctgctcagcaagggctcaaacagcagctgggaattctctacacgatatagactaaatcccgaattcgcttttagctttcacagggctcccaggaacgctgagatagaacaatctgggtttagtccttaggcctaaagtcttaaggtattaaaggtacagtttgttatcagtattcatggtggagcgatactaccatgaggtactacccaggatgctgacataaagag

SEQ ID NO: 68707 - DNA, 686 bp, Homo sapiens
ttccccagcatattctaatggaaaccagggcagcattcagagataggaaccatcacaagttgattttgctctcttaaggtaagatacggcaaagaatgaccagccacctcctagcagggtgctgaggctggctggtgcagtaggtggagatttagcagatgacaatgtatttctgaaaaggtctgtttttcctctaaaaggcattctaggaaccagagagagaagggagaaaggaggggaaggggaagatcaggagagagggagggaaaggaaaggaggcraggagacaggagaaaaacctcaccaccaagcattagcatttatttctcaattgcaatatttttattttaagttgtgctaagaagcctaggatttctttcttcaataataatgatttttatgctttatagttcatgaggctttcatattcattatgttgagatttattttcaaaaaagtgtttagagtcttaagttgtttgcaactttgtagcaaagctcatttcacattaaaacatccttttagcaaagtctcaacatactatagtgaaattaatacaggtttttctaagcatttataagtgttaataagccatgccagtctgctggcatagcatatatggtgctgcggtattctgaatattcagtatctaaatctgttcatttcatacacacatgcacgtgtgt

SEQ ID NO: 68708 - DNA, 686 bp, Homo sapiens
ttccccagcatattctaatggaaaccagggcagcattcagagataggaaccatcacaagttgattttgctctcttaaggtaagatacggcaaagaatgaccagccacctcctagcagggtgctgaggctggctggtgcagtaggtggagatttagcagatgacaatgtatttctgaaaaggtctgtttttcctctaaaaggcattctaggaaccagagagagaagggagaaaggaggggaaggggaagatcaggagagagggagggaaaggaaaggaggcgaggagacaggagaaaaacctcaccaccaagcattagcatttatttctcaattgcaatatttttattttaagttgtgctaagaagcctaggatttctttcttcaataataatgatttttatgctttatagttcatgaggctttcatattcattatgttgagatttattttcaaaaaagtgtttagagtcttaagttrtttgcaactttgtagcaaagctcatttcacattaaaacatccttttagcaaagtctcaacatactatagtgaaattaatacaggtttttctaagcatttataagtgttaataagccatgccagtctgctggcatagcatatatggtgctgcggtattctgaatattcagtatctaaatctgttcatttcatacacacatgcacgtgtgt

SEQ ID NO: 68709 - DNA, 686 bp, Homo sapiens
ttccccagcatattctaatggaaaccagggcagcattcagagataggaaccatcacaagttgattttgctctcttaaggtaagatacggcaaagaatgaccagccacctcctagcagggtgctgaggctggctggtgcagtaggtggagatttagcagatgacaatgtatttctgaaaaggtctgtttttcctctaaaaggcattctaggaaccagagagagaagggagaaaggaggggaaggggaagatcaggagagagggagggaaaggaaaggaggcgaggagacaggagaaaaacctcaccaccaagcattagcatttatttctcaattgcaatatttttattttaagttgtgctaagaagcctaggatttctttcttcaataataatgatttttatgctttatagttcatgaggctttcatattcattatgttgagatttattttcaaaaaagtgtttagagtcttaagttgtttgcaactttgtagcaaagctcatttcacattaaaacatccttttagcaaagtctcaacatactatagtgaaattaatacaggtttttctaagcatttataagtgttaataagccatgccagtctgctggcatagcatatatggtgctgcggtattctgaatattcagtatctaaatctgttcatttcatayacacatgcacgtgtgt

SEQ ID NO: 68710 - DNA, 1202 bp, Homo sapiens
ctgggggacccacaggtcagcccattccaggagaagcagtcttaggcccgtttgcatcccctgccactgccatgtgcctgccagcccggtttctgatgaagacgtggctcagtccctgctctccttgtcgcagtggcttgtacttcatgtgcagtagcccagggcccgccttctagagtgaatgtttccctcgagcccttggatatttttattctattttgaatggttccgatcaattaatgttgctttgtgtggggttcttcagagaaataatgcaaaccggccaggtgcggtggctcacacctgtaatcccaacactttgaggggctgaggcaggtggatcacctgaggtcaggagttcgagaacagcctggccaacgtggcgaaaccttgtctctactaaaaatacaaaaattagccaggggtggtggcaggcacctgtaatcccagctactcaggaggctgaggcaggagaatcactcgaacctgggaggcggaggttgcagtgagccgagatcacgccactgcactccagcctgggtaacagagcgagagtccttctcaaaacaaacaaaaaaagagctaatgcagacctcttctggttagacctgacacggaggaagtaattggctggtcaacttaatggcgccccacagcttcctctggatcctgcttctttgtacttggaacacagtttatttgagctagaggaaaggaaagttctagaattcctgtttcctcagcctgcactgtatcagatccaggatatgtctgcatttcatcaggatcaagtaagatacataaccttatatctgtaggagccagaaaaaaaaaaatctattcctgataggcatggaaacttagtccacatgaaagacagaagacatctaacagctgtctgtcttgggagcattaaaacccagacaccaagacacactagacagtccatctctgggttgtgatctctcagaaacatcttagtagttaatgcactgttcatttagggagtccccatcctggtccaggccaccctcctagaagctgggcggcagctggacgggcctrccttggtggcattcaagcaagcctaattggattaggttggtgcaaaagtgattgcggtttttgccattgcttttgatggcaaactaactttaagtcattaaaataagacccaacgcttataaaagagttcatatcca

SEQ ID NO: 68711 - DNA, 733 bp, Homo sapiens
tttcatcaaattgctagatgagatggtgtaattagggacagccagggggaaaactacaaaggacacagaggacgtcagtccaaaggaggtaaaaactgaaaagataataccttcctcaaaccattgcagaagcgtgtacctgcttgcctggtgacaaagtctttttgaaaatcaacctgtacccataattctgctttctgactttcaccagaggattcataagagcatcctgaatccaaataacaaaattaaatatacactaaccacccgtccttaatcgcttcatgtaaatctgtggcattagaaactgaaaacaaaaattatctgagggtcatgttttgctatgyatttaatggatattacttctgcctgctccaagggcaatgttcagtttccacaaacagtgtagtttattatgaaaaataatttataaatcattcttgtttaaaacaaaatttttttaggagaattagtaacagaatttcaaaaaagttgaataatttctaaagattaagatttcaacttcactcttttaatgtatttaaggtaataatcacttactttggtgattatttataacattaacagctctaagaggcctttaagggccattttgttatacaaaaaagaaacacatttataagcattcttagaataatgctaatgtcattagctacagaagcagcacatgctaagatatcagctttaattttaaattcatattagaccttaa

SEQ ID NO: 68712 - DNA, 585 bp, Homo sapiens
aatgaccagccacctcctagcagggtgctgaggctggctggtgcagtaggtggagatttagcagatgacaatgtatttctgaaaaggtctgtttttcctctaaaaggcattctaggaaccagagagagaagggagaaaggaggggaaggggaagatcaggagagagggagggaaaggaaaggaggcgaggagacaggagaaaaacctcaccaccaagcattagcatttatttctcaattgcaatatttttattttaagttgtgctaagaagcctaggatttctttctycaataataatgatttttatgctttatagttcatgaggctttcatattcattatgttgagatttattttcaaaaaagtgtttagagtcttaagttgtttgcaactttgtagcaaagctcatttcacattaaaacatccttttagcaaagtctcaacatactatagtgaaattaatacaggtttttctaagcatttataagtgttaataagccatgccagtctgctggcatagcatatatggtgctgcggtattctgaatattcagtatctaaatctgttcatttcatacacacatgca

SEQ ID NO: 68713 - DNA, 642 bp, Homo sapiens
ttcacagatgctgtgaactagtacatggacatctttgagaggycattattcttcctactgcacgagtaaatgccccagagcttgttctctcacattctgtcatggtcattccaggccatggccagagagagtgtggtcaagggttgacctatttggaaagtcagtttgtggttatttgcttggctgtgttggggattgccctattgaccctaaccagtgtcttctcagactctgaaatgagaaaagcaagtctgaaaagtccctttcctacatgaggaagtggccttacttggtgtgctatgctctctgggtgcttttattgaaagctattcatagccaaggcagacattggttttacctgccttaaaaaattccagacccaaattcttttggctaaacgacatgaaatgtgctacttggggccatgatggcctggattaaagcagattcgatgagattttccaaggagatccatggccctgcctgccttgttggaagaaagggtggaattgtttgcccagatgcaggctttgcaggacttcctggtttctgcatgtggatgtctgccccactaggttgtctaagggcatgggaatggaggatgaggcctgttgttaataaggcagaaggacattttgcact

SEQ ID NO: 68714 - DNA, 676 bp, Homo sapiens
aatttataaattccaacacaattcccaataaaataccaatattctatttttaattggcaaaactaattctaaagttcattgagctttctttgtaatgagaatacatttctttagtgttggaattggaaattttacttgattcttctttaaatctcttttttcctatattgcattatccaccaccactcccaatcctagtccttgggtttcagttccatcatgtcttaataattttaaacatatttagtgtatattctctttatatcctcattgtaggtatattatctcaaagtctaatattctagaatccagcatyctgatctcactgtttatgattccctgtctcactaattttggctcatatcatcatttggtcattttgattagtaattattaagggtttatttttctgtgaaaaatcccttatgcctcaatttgtatctgcttcttcaagcagcttaatgaatatcactggtatcagactaatttgcatatgagtttcttttcttcagagtctcagactaccgcacttgtaaaattcaaaccccaaaactatgtgatacggacacctacagttttaaattcccactaagaacctagcaagaaagggaacaaatatttggggttctccctgttctgttattttctaatccacagatgggtgccacctcttcca

SEQ ID NO: 68715 - DNA, 676 bp, Homo sapiens
aatttataaattccaacacaattcccaataaaataccaatattctatttttaattggcaaaactaattctaaagttcattgagctttctttgtaatgagaatacatttctttagtgttggaattggaaattttacttgattcttctttaaatctcttttttcctatattgcattatccaccaccactcccaatcctagtccttgggtttcagttccatcatgtcttaataattttaaacatatttagtgtatattctctttatatcctcattgtaggtatattatctcaaagtctaatattctagaatccagcatcctgatctcactgtttatgattccctktctcactaattttggctcatatcatcatttggtcattttgattagtaattattaagggtttatttttctgtgaaaaatcccttatgcctcaatttgtatctgcttcttcaagcagcttaatgaatatcactggtatcagactaatttgcatatgagtttcttttcttcagagtctcagactaccgcacttgtaaaattcaaaccccaaaactatgtgatacggacacctacagttttaaattcccactaagaacctagcaagaaagggaacaaatatttggggttctccctgttctgttattttctaatccacagatgggtgccacctcttcca

SEQ ID NO: 68716 - DNA, 676 bp, Homo sapiens
aatttataaattccaacacaattcccaataaaataccaatattctatttttaattggcaaaactaattctaaagttcattgagctttctttgtaatgagaatacatttctttagtgttggaattggaaattttacttgattcttctttaaatctcttttttcctatattgcattatccaccaccactcccaatcctagtccttgggtttcagttccatcatgtcttaataattttaaacatatttagtgtatattctctttatatcctcattgtaggtatattatctcaaagtctaatattctagaatccagcatcctgatctcactgtttatgattccctgtctcactaattttggctcatatcatcatttggtcattttgattagtaattattaagggtttatttttctgtgaaaaatcccttatgcctcaatttgtatctgcttcttcaagcagcttaatgaatatcactggwatcagactaatttgcatatgagtttcttttcttcagagtctcagactaccgcacttgtaaaattcaaaccccaaaactatgtgatacggacacctacagttttaaattcccactaagaacctagcaagaaagggaacaaatatttggggttctccctgttctgttattttctaatccacagatgggtgccacctcttcca

SEQ ID NO: 68717 - DNA, 676 bp, Homo sapiens
aatttataaattccaacacaattcccaataaaataccaatattctatttttaattggcaaaactaattctaaagttcattgagctttctttgtaatgagaatacatttctttagtgttggaattggaaattttacttgattcttctttaaatctcttttttcctatattgcattatccaccaccactcccaatcctagtccttgggtttcagttccatcatgtcttaataattttaaacatatttagtgtatattctctttatatcctcattgtaggtatattatctcaaagtctaatattctagaatccagcatcctgatctcactgtttatgattccctgtctcactaattttggctcatatcatcatttggtcattttgattagtaattattaagggtttatttttctgtgaaaaatcccttatgcctcaatttgtatctgcttcttcaagcagcttaatgaatatcactggtatcagactaatttgcatatgagtttcttttcttcagagtctcagactaccgcacttgtaaaattcaaaccccaaaactatgtgatackgacacctacagttttaaattcccactaagaacctagcaagaaagggaacaaatatttggggttctccctgttctgttattttctaatccacagatgggtgccacctcttcca

SEQ ID NO: 68718 - DNA, 759 bp, Homo sapiens
tccctttccccttgacagcctgcaggaaaggaatgggttccaggtcagagaattggtcctgccacctcttagcaagttatgtggggttgcctttactcctcactttgaaatgtcagcggcttgtcacttgtcacttatattctcggtttgaggcttcagctgacatcctcagacaagagtctgttatggtctttcaaatctaggggtccgtagattgaccacmtaagaccatatttgtcccagtggccatttcatagttggctcactctttctccagcatgaacgtgacatgatcaaaattatgactgcccttcataagggtcattctggctgccctaaagggactttgctagcatctctggcttccatgcctactcaattagaaactttccatctttgtccagttttaacagactgagatcttggccaagcctaaaatctgaggttctcacctatcatctccatgaatgaacaacaaatactacctactttgctgatttctatgactcaaatatcctttcattagcaaaatgcggaattacagaatggaagcagcttgcattttgttttgatatggacttattcatcaaatatttattagagttgactctgtgctggcactatgcctggactggaggtttaataatgaacaagacaggcaaggttaaatttgacgaaaggccagatgcggtgactcatgcctgtaatcctagcactttgagaggccaaggcgggtggatcgcttaagcccaggagctc

SEQ ID NO: 68719 - DNA, 1093 bp, Homo sapiens
atcctgatttatttgggcaagggagtcgctgggcaagaacctacctttttttttttttaaaaaaacaaacacaggtgatgctaatacaatagtctctagactacatatattttgagaaaatagacctaaactataaagggaaattaagaaatccttagtaccacttagaagttgccatatcyatttctgtgatgctaaaggaaaattttactgtaagttgttttttttggcatcaccccagagcataacacacaattagtatctaactcaatcatttctcttcttaaaagcactttgctgtccctcttggatgggcagggccactttccaatgtgctgcaatagcattttgttaaaaccaacatctcatgttaacacaactatttgtgggcttacacaacaagaatagatggagaaatatatcccgggaaggaaaatattattattaaagaaaaacctcaactgactagccacatttttatcctgtagggatagcagaattcacatcatggaaatttttatgttttcctttagaaaaactacttacggagccctttggttataaaacaaaaaggcccggacccatctagattagagaagaagaaagggagctaaactgatcttcatgatgaacttcaacggagtcattcctgaggatggagggaatgatctatgctggaaagggctatgtgagttttctttaaccaggctccagaaggaataggtttccaatccctggaacttagagaagccagtgcagaaatgggctgaagcaacgtgatgaaagagtgagatgctacagaagagacaaccagggagaggttccctggggcagagaatggtggatgagatttaggatcagtgttgccagattctgtctgttgcagattattgcctttttatcctagtcctttgtatacaatagccttgtgttagtgggtcatgttttaaagcacaagaacaaggcagattggacagacctaaagcagtataaggaggtagagtcagatggcccaaaatgatgaaagagaggattggagtaggagtcgggtctgggactcctcagaattataggtgagtgtgctggatatcct

SEQ ID NO: 68720 - DNA, 513 bp, Homo sapiens
tcctgacagtagtgataaaatgttaacatcagttatcaaaggttactaatgctgcctccttgaaaggattacaggggttcttatttgtctaagatggttaaaatattgtgcctctttaagataaaaagatgagctgtaagaactaccaagcacctagccagttttattgcaaggtagcttcgagtatcccactttctaaacaatgcacaaaacacacagccaggttcatctttcaggtctacatcactgcaaccatgctcctgctgccctttcctactccccagcccacaaaagcagagatttaccaagggccaagcatgagagtccttccacattatccacctatcggagagtggtggcttttccctatggaggagggaaggatgtactyccaaccaccatcactaatcacattcagggagctccaagcaaatttgtctaagagaatatgaggtgttcaagcaggaaagatgagcattttactcccccatcagatgctcctgcagcaaacta

SEQ ID NO: 68721 - DNA, 603 bp, Homo sapiens
cagtgagccgagattgcgccactgcactccagtctggggacagagcgagactccatctcaaaaaaaaaaaaagacaccaaagctaactcttcactttcaacaagctttccatttgaagttctaaagagcctcaaacctcccagaacccacctcaaacctcccagaacccaccatctgctgagtcttttgaatgaggtcaaaggtagcccrctctgtaggctgagataattgcttcttcaggcttagttaattaggacagttatttcattattagccaagctccttttatacatacagcccacatgaactgagtctgaagagtcatctcagaaaccaggccagggcaggaaaacccaaataccgctcagcaatattcctgtttttagcaatgttgacaatgaaagacaaagtcttgagttttatgtagaaaacagtaaaacataaactcatacagttaaaggaatatagtaaatgaaagaaatactcaaggaaagaatttggcaacattttcattctttcatttgagcataaatatatgtaaattcctccttgttgactaatctgaagttactatattcctaaccacccttgtgaagttgccca

SEQ ID NO: 68722 - DNA, 633 bp, Homo sapiens
gagtacatctccctctaagaacaccactgtttgtttatttttgcagacaaggatggcaacattcaatgtacctagttgagtaaggaggatggcaagaatgctcagtccctggaagctgaacacctcattatagtaccagagcctggcatctgcataattcctggttcttatttgtactgaagaccaaatgaaactcaccaaggcccagtcctgcattgtgcactgggttgcayatactcaataagaatttgtagacttgcattttctcttcaactttttattcctcttgatgatcactttaaccaactgctcaagaaaattttaaaaacaagtggagctcaactcaaatttatttttccaaccttaaaatatcaattatttaattttaatgtgcataaaaatcacctgtgggatgtctcaaaaatccatattccacctgttaccgtatgagggcttccataatgaagtaccatatactgggtgtcttaaacaacagaaattaactttctcacagttccagaggctatatgtccaagatcaaagtatctgcaggtttgatttcttctgaggcttctctccatggcttataaatggctgtcttcttcctcttccttcacgagatctttctatgca

SEQ ID NO: 68723 - DNA, 582 bp, Homo sapiens
atctgctggctccctgatcttggacttcccagccaccagaactgtgttgtttacatgccacccagtctgtggtattctgtgacagcaacccaaacagatgaagacacccactaagaacactgtaccccaactgcctgtcactttgcgtgtcccccacaggactccacaaagaggcttctgggctggggactgtgtgtgctttgctccccggttcatctgcaggcacatacccgcaggtatgagctcaatacgtcaacacctgctggttgaattggcacaatggagctagcactgtgggtggcctccaaacccagcttgcctctgcctccggggcagggacattacttaaacagcagctcttaaccaatgtgaaaatcagggagaaacacacaaagraaggactgaggaaggctgaaagagcaaactactatgggtttcaaatcctttagtagtaaacctactcaaggcccagctattaaagcaggccccaaagtccacagcactgtgcatcctgtaatctcagcttcctgctcctccaggaagggaggcctgagagactttctaggaccgtgaccccagcca

SEQ ID NO: 68724 - DNA, 742 bp, Homo sapiens
aagtactttaaaaatagatattatcttttctaaatttttttcatccttgatgttccttgaggaaagaagtccttggaggaagcaataacctctaccttgtatttatatccatccttttatttcacttacttgagataaaaatataaaaaacaccaattttttttamaaaagataaacattacttgaataccctttatttccttctcctgcctaattgccctggccagaactaccaacactatgttgaataggagtggtgagagagggcatccctgtcttgtgccagttttcaaagggaatgcttccagtttttgcccattcagtatgatattggctgtgggtttttcatagatagctcttattattttgagatacgtcccatcaatacctaattcattgagagtttttagcatgaatggttgttgaattttgtcaaaggccttttctgcatctatggagataatcatgtggcttttgtctttggttctgtttatatgctggattacatttattgatttgcgtatattgaaccagtcttgcatcccagggatgaagcccacttgttcatgggggataagctttttgatgtgctgctagattcggttttccagtattttattgaggatttttgcatcaatgttcatcaaggatattggtctaaaattctcttttttggttgtgtctctgcctggctttggtatcaggatgatgctggcctcataaaatgagttagggaggatcc

SEQ ID NO: 68725 - DNA, 742 bp, Homo sapiens
aagtactttaaaaatagatattatcttttctaaatttttttcatccttgatgttccttgaggaaagaagtccttggaggaagcaataacctctaccttgtatttatatccatccttttatttcacttacttgagataaaaatataaaaaacaccaattttttttacaaaagataaacattacttgaataccctttatttccttctcctgcctaattgccctggccagaactaccaacactatgttgaataggagtggtgagagagggcatccctgtcttgtgccagttttcaaagggaatgcttccagtttttgcccattcagtatgatattggctgtgggtttttcatagatagctcttattattttgagatacgtcccatcaatacctaattcattgagagtttttagcatgaatggttgttgaattttgtcaaaggccttttctgcatctatggagataatcatgtggyttttgtctttggttctgtttatatgctggattacatttattgatttgcgtatattgaaccagtcttgcatcccagggatgaagcccacttgttcatgggggataagctttttgatgtgctgctagattcggttttccagtattttattgaggatttttgcatcaatgttcatcaaggatattggtctaaaattctcttttttggttgtgtctctgcctggctttggtatcaggatgatgctggcctcataaaatgagttagggaggatcc

SEQ ID NO: 68726 - DNA, 742 bp, Homo sapiens
aagtactttaaaaatagatattatcttttctaaatttttttcatccttgatgttccttgaggaaagaagtccttggaggaagcaataacctctaccttgtatttatatccatccttttatttcacttacttgagataaaaatataaaaaacaccaattttttttacaaaagataaacattacttgaataccctttatttccttctcctgcctaattgccctggccagaactaccaacactatgttgaataggagtggtgagagagggcatccctgtcttgtgccagttttcaaagggaatgcttccagtttttgcccattcagtatgatattggctgtgggtttttcatagatagctcttattattttgagatacgtcccatcaatacctaattcattgagagtttttagcatgaatggttgttgaattttgtcaaaggccttttctgcatctatggagataatcatgtggcttttgtctttggttctgtttatatgctggattacatttattgatttgcgtatattgaaccagtcttgcatcccagggatgaagcccacttgwtcatgggggataagctttttgatgtgctgctagattcggttttccagtattttattgaggatttttgcatcaatgttcatcaaggatattggtctaaaattctcttttttggttgtgtctctgcctggctttggtatcaggatgatgctggcctcataaaatgagttagggaggatcc

SEQ ID NO: 68727 - DNA, 680 bp, Homo sapiens
ttacaattaagtgtaaataatttaacaataaatgcttgtttgtccagtccacctcaaaacagcaaacgaaagtttttcctttaagaataatttggtacttcctattctatttttaggctcgtgttmctctctgtgaaatgaattaccattgacacatctttaaatagtagttaagaaaaaatcgcactgttagcattatatatacctacacacacattaacaggcaggtaatcattgacagcaataagcttccattttagcttttgtccttattaagctcttgagaaaatatagtggactatacagggaaatttgaagtgaaaaatgaaagccatcagtctataatatagctaaaacagctctgaacatcaggcacaaaaacagattctgctggtttgactcaaataggctttagtgtcacttcagctccaattacaaccatttgaaataatttgaagacattccagaagctgtttttatttttgtttactttatttatttattgagatggagtctcgctctgtcaccaggcttgagtgcagtggtgagatattggcttactgcaatctctgcctcccaggttcaagcaattcccctgcctcagcctcccgagtagctggtaccacaggtgtgcaccaccacgcccagctaatttctttttttatttttattttcttact

SEQ ID NO: 68728 - DNA, 605 bp, Homo sapiens
tggctyagttaatgagaacaccatcactgttgctgtatcaagggggaaccttggcttctggagtaactctgcagtagacgggacaatagctcagtgatttgacatctgcagtacaaatagctgatacaagataaggagagactaactcagtactgagacatatgtttgctaatattgccctgtttacagttagtattgatcttctgagatgggagcagtgtggagtctccaaaataggattaagcaaatttgaagagctaggcaaattatttcattggaaccctccagaacacaagacctctccactgctcaagagtaacagtagcagccacagttttcaccacactgaggaatctggactgtttggacacctaccatccctaacttgagtgaccctaagctccttgggatatgagcagtagattctctttgaggtcaagctggggatctttgctttagaatctagaaactttcataatgatgtttgacttaggatgaaattaaaattcgtaagctttccctgagcatacatcagctggggagtgggaggaaggaaatagaatgcagtggctgagagacgctgggaggaagaggcagctgaccct

SEQ ID NO: 68729 - DNA, 605 bp, Homo sapiens
tggcttagttaatgagaacaccatcactgttgctgtatcaagggggaaccttggcttctggagtaactctgcagtagacgggacaatagctcagtgatttgacatctgcagtacaaatagctgatacaagataaggagagactaactcagtactgagacatatgtttgctaatattgccctgtttacagttagtattgatcttctgagatgggagcagtgtggagtctccaaaataggattaagcaaatttgaagagytaggcaaattatttcattggaaccctccagaacacaagacctctccactgctcaagagtaacagtagcagccacagttttcaccacactgaggaatctggactgtttggacacctaccatccctaacttgagtgaccctaagctccttgggatatgagcagtagattctctttgaggtcaagctggggatctttgctttagaatctagaaactttcataatgatgtttgacttaggatgaaattaaaattcgtaagctttccctgagcatacatcagctggggagtgggaggaaggaaatagaatgcagtggctgagagacgctgggaggaagaggcagctgaccct

SEQ ID NO: 68730 - DNA, 605 bp, Homo sapiens
tggcttagttaatgagaacaccatcactgttgctgtatcaagggggaaccttggcttctggagtaactctgcagtagacgggacaatagctcagtgatttgacatctgcagtacaaatagctgatacaagataaggagagactaactcagtactgagacatatgtttgctaatattgccctgtttacagttagtattgatcttctgagatgggagcagtgtggagtctccaaaataggattaagcaaatttgaagagctaggcaaattatttcattggaaccctccagaacacaagacctctccactgctcaagagtaacagtagcagccacagttttcaccacactgaggaatctggactgtttggacacctaccrtccctaacttgagtgaccctaagctccttgggatatgagcagtagattctctttgaggtcaagctggggatctttgctttagaatctagaaactttcataatgatgtttgacttaggatgaaattaaaattcgtaagctttccctgagcatacatcagctggggagtgggaggaaggaaatagaatgcagtggctgagagacgctgggaggaagaggcagctgaccct

SEQ ID NO: 68731 - DNA, 327 bp, Homo sapiens
ccattcttggcttaaatatcacctcctcagataggttctccctcacccrccagtctaaagcagtgacccattctctctttcttcattcaccctacctggactctctatgaaacatttcccagtagttggtattacacaccaaccacattatgtccttaataaaccatttactttcatatttcatctagtgacataatttcattaatgagatcattgagctggtgtaccatacctctttgggattacagaatacaagaaatgaatacagaaaatgctttaaaaaataagcaatgacatgggttgtaatagaaatagccacaacctgtt

SEQ ID NO: 68732 - DNA, 808 bp, Homo sapiens
cccagcactttgggaggctgaggcgggtggatgacttgaggtcaggagtttgagaccagcctggccaacatggtgaaaccccatctctactgaaaatacaaaaattagctgggtatgttggcacacgcctgtagtcccaactactcaggaggctgaggcaggagaattgcttgaacctggaaagtggaggttgaagtgagtggagagcttatcttaccctgggcgacagagcaagactctctgtctcaaaaaaaaaaaaaaaaaaaaagaaaaaagaatgggaaagagctaatggaaacagagcaggagattggcaggacttatatcctggtcccgacagaatggaaaaaagaaactcgaaccagcaaaatggcacggaaggcaaactctagttgctttcactgcacgtaagacgctcccaccaatgctatgacagtttacaaatgccacagcaacacccagaagttactgcttcttttctagagatatctgaataacttgctcctttatttgcatataattaaaaatgagtgtaaacactgctagccaacagcttgtatgctgctactctggtcacaccacctacggatttgccctgctctacaaggagcagtcagtgtgtgtattccagtgcttcagtatacctgctttcttccaccaacagctcactcataaattctttcctgagtgaagcaaagaacmctcccaggctaagctccaattttggaggtgggcagaggggacactcttccatccatctgtgtctgatttgactttatgcaaagagaaagtttgtccagtttttgga

SEQ ID NO: 68733 - DNA, 808 bp, Homo sapiens
cccagcactttgggaggctgaggcgggtggatgacttgaggtcaggagtttgagaccagcctggccaacatggtgaaaccccatctctactgaaaatacaaaaattagctgggtatgttggcacacgcctgtagtcccaactactcaggaggctgaggcaggagaattgcttgaacctggaaagtggaggttgaagtgagtggagagcttatcttaccctgggcgacagagcaagactctctgtctcaaaaaaaaaaaaaaaaaaaaagaaaaaagaatgggaaagagctaatggaaacagagcaggagattggcaggacttatatcctggtcccgacagaatggaaaaaagaaactcgaaccagcaaaatggcacggaaggcaaactctagttgctttcactgcacgtaagacgctcccaccaatgctatgacagtttacaaatgccacagcaacacccagaagttactgcttcttttctagagatatctgaataacttgctcctttatttgcatataattaaaaatgagtgtaaacactgctagccaacagcttgtatgctgctactctggtcacaccacctacggatttgccctgctctacaaggagcagtcagtgtgtgtattccagtgcttcagtatacctgctttcttccaccaacagctcactcataaattctttcctgagtgaagcaaagaaccctcccaggctaagctccaattttggaggtgggcagaggggacactctyccatccatctgtgtctgatttgactttatgcaaagagaaagtttgtccagtttttgga

SEQ ID NO: 68734 - DNA, 721 bp, Homo sapiens
gcattattattttttgttctggraaaagaaaaagtcctctatcatttattaattttaaaaattgagttttagtggcctgcataatcttacattagtacattgaatttgtaggtatacattcttgcaatatattcactatatattagaaaaatgtctatagacttcatgaaacacagctgtggtaaagtaggtcaaaattcttttcataacaaatctaatgtgtacttgaatataacatttattaagaaaattagaactctttcttataatccaggtcaatgccaagcttactttggaaatgtgaagtgaaacattaatttacttaaattatttatttgaaagcataaaatattttaagtactggtttggtaaactattcaaagaattgatgcgaaaaggtagtatttacttcatttataagataatttatctactctattttattaatagattttaaacttggccaaaaaaatggatagacatacattttgtaaagaagtgtgtttttaatttaccttctcatagcaatatagaataaacacaattatctaatgtgcttgagttttaaatattgaggccttatctgtctttttaaatgtaattatgtcaatatattttacattttttaagggttgtgttaaatattggtcaaaattgtagacactttaattttattgattgtagaaaaacaacacggaggagtttctgcactggaacacaa

SEQ ID NO: 68735 - DNA, 721 bp, Homo sapiens
gcattattattttttgttctgggaaaagaaaaagtcctctrtcatttattaattttaaaaattgagttttagtggcctgcataatcttacattagtacattgaatttgtaggtatacattcttgcaatatattcactatatattagaaaaatgtctatagacttcatgaaacacagctgtggtaaagtaggtcaaaattcttttcataacaaatctaatgtgtacttgaatataacatttattaagaaaattagaactctttcttataatccaggtcaatgccaagcttactttggaaatgtgaagtgaaacattaatttacttaaattatttatttgaaagcataaaatattttaagtactggtttggtaaactattcaaagaattgatgcgaaaaggtagtatttacttcatttataagataatttatctactctattttattaatagattttaaacttggccaaaaaaatggatagacatacattttgtaaagaagtgtgtttttaatttaccttctcatagcaatatagaataaacacaattatctaatgtgcttgagttttaaatattgaggccttatctgtctttttaaatgtaattatgtcaatatattttacattttttaagggttgtgttaaatattggtcaaaattgtagacactttaattttattgattgtagaaaaacaacacggaggagtttctgcactggaacacaa

SEQ ID NO: 68736 - DNA, 721 bp, Homo sapiens
gcattattattttttgttctgggaaaagaaaaagtcctctatcatttattaattttaaaaattgagttttagtggcctgcataatcttacattagtacattgaatttgtaggtatacattcttgcaatatattcactatatattagaaaaatgtctatagacttcatgaaacacagctgtggtaaagtaggtcaaaattcttttcataacaaatctaatgtgtacttgaatataacatttattaagaaaattagaactctttcttataatccaggtcaatgccaagcttactttggaaatgtgaagtgaaacattaatttacttaaattatttatttgaaagcataaaatattttaagtactggtttggtaaactattcaaagaattgatgcgaaaaggtartatttacttcatttataagataatttatctactctattttattaatagattttaaacttggccaaaaaaatggatagacatacattttgtaaagaagtgtgtttttaatttaccttctcatagcaatatagaataaacacaattatctaatgtgcttgagttttaaatattgaggccttatctgtctttttaaatgtaattatgtcaatatattttacattttttaagggttgtgttaaatattggtcaaaattgtagacactttaattttattgattgtagaaaaacaacacggaggagtttctgcactggaacacaa

SEQ ID NO: 68737 - DNA, 1057 bp, Homo sapiens
aatatcttcatgtttaattctgttataattttgggggtttatatttccacattcaatttttatgtttcttctttttgttattaacatacagatacgagagcaatttcctgaagaataactttcaaggcttctcccttgacaaagataaagttgttattacagggcatgactaaagtaatctcctttctgttgattcactagcacacaatgtgattttctcttaaaatttttatcaagattatttatgcacaatacgggcttaacaacccatagtgataagtgaaaatacaaaagtgcattttaccatgaacatataaaggtgttaaacttatttcaaggtacatcaataatttatttaaggcaatcttcataaagttaggacactagttttgtttttattgttctgcaaaactgcttgtctaaaactcatttttaaaagataatgtaggagttttaatggaaacatacaagtggattatttaatttatttttaattagtgtacttactattctcatgtcttatgatgtagattaatctttctctttatatatacctgatacatgtttcctgagtaaacttacagagattatttacgctctggtgtatgttgccacacacgggtgtaggaaaatattcttgatcactctattattttgttaatgattataatataaatggtcattaactttggtaccgaacactaggttaatgatgttcagatattccttttatagttccagttcaaagtctagtttataagaaragagttttaacataaacaaggtcattgaagtcagtgcttcttggtgatgaaattgagattaaatcatgctatttacacatcaaaagcctgattaacataaaatgcctgtaacaattacacagcccaggcacacagatcaactcatgaatcaacataaactacttttatcagaaccactaacattttaggagttgtgaatttatcactgatttacttttttaagaaatttcaagtatgacagtcaaaaacccttaaatttctaatttacaaggcagttgaacatagtcactaga

SEQ ID NO: 68738 - DNA, 501 bp, Homo sapiens
tggtaagtcactataaacatgaagggaaagactgccatccaaggaagcgcagaaaaggacacccctcaggtcctggatggaggaggatgacccccaatactggatggagaaggatgcccccagtcctagatggagaaggatgcccccctcagtcctggatggagacgtcatgagtaactgtcggtargaaacatcatgttcttcattctgcccttgctccttgggctccaacaggaaaaaccagaaattctgtggatataaaacatggaaacattcattctttaaagaaaaaggctgcagagacaagaacagcgaaaggatggtattgaatacatgcaaatggataaaatatgaatgattatgttctcatgttcaacccaatttttaaaagtggatgtatgagcagtgcgagcatttagtcaggccatggtgagcctgtgggcagcggtggcaaacccggactctgcccgccgacaccagcggccccgaaaccctagagcc

SEQ ID NO: 68739 - DNA, 501 bp, Homo sapiens
tggtaagtcactataaacatgaagggaaagactgccatccaaggaagcgcagaaaaggacacccctcaggtcctggatggaggaggatgacccccaatactggatggagaaggatgcccccagtcctagatggagaaggatgcccccctcagtcctggatggagacgtcatgagtaactgtcggtaggaaacatcatgttcytcattctgcccttgctccttgggctccaacaggaaaaaccagaaattctgtggatataaaacatggaaacattcattctttaaagaaaaaggctgcagagacaagaacagcgaaaggatggtattgaatacatgcaaatggataaaatatgaatgattatgttctcatgttcaacccaatttttaaaagtggatgtatgagcagtgcgagcatttagtcaggccatggtgagcctgtgggcagcggtggcaaacccggactctgcccgccgacaccagcggccccgaaaccctagagcc

SEQ ID NO: 68740 - DNA, 501 bp, Homo sapiens
tggtaagtcactataaacatgaagggaaagactgccatccaaggaagcgcagaaaaggacacccctcaggtcctggatggaggaggatgacccccaatactggatggagaaggatgcccccagtcctagatggagaaggatgcccccctcagtcctggatggagacgtcatgagtaactgtcggtaggaaacatcatgttcttcattctgcccttgctccttgggctccaacaggaaaaaccagaaattctgtggatrtaaaacatggaaacattcattctttaaagaaaaaggctgcagagacaagaacagcgaaaggatggtattgaatacatgcaaatggataaaatatgaatgattatgttctcatgttcaacccaatttttaaaagtggatgtatgagcagtgcgagcatttagtcaggccatggtgagcctgtgggcagcggtggcaaacccggactctgcccgccgacaccagcggccccgaaaccctagagcc

SEQ ID NO: 68741 - DNA, 501 bp, Homo sapiens
tggtaagtcactataaacatgaagggaaagactgccatccaaggaagcgcagaaaaggacacccctcaggtcctggatggaggaggatgacccccaatactggatggagaaggatgcccccagtcctagatggagaaggatgcccccctcagtcctggatggagacgtcatgagtaactgtcggtaggaaacatcatgttcttcattctgcccttgctccttgggctccaacaggaaaaaccagaaattctgtggatataaaacatggaaacattcattctttaaagaaaaaggctgcagagacaagaacagcgaaaggatgktattgaatacatgcaaatggataaaatatgaatgattatgttctcatgttcaacccaatttttaaaagtggatgtatgagcagtgcgagcatttagtcaggccatggtgagcctgtgggcagcggtggcaaacccggactctgcccgccgacaccagcggccccgaaaccctagagcc

SEQ ID NO: 68742 - DNA, 806 bp, Homo sapiens
tgcatacaaaaatactacttatctttataaatgaatgaaattctgtcatttgcaaaaacgtggatgaatttagaggacattatactaagtaaaataagccagacacagaaagacaaatatctcatgataccacttacatgtgaaatccaaaaatgtgcactcatagaagttaagagtagartggtggtttatcagaggctgagcaggtcgggtggcgggggtggaaaaaggggaaatattcaatgggataatgcttcagttaggagaaatacattctggtgatatggtacacagcaaagtgactgcagttactcataatatagtgcatatcttaaaagcgctaaaatagtacattttaaatatttcaccataatgtaataaatatctgaggtgaaggatatgttatttagcctaatttgtccacttcacaatatttacatgtattgtaccacattgtaccccatatatatttatcaataaaaacaaaattttcaaaagttagaaaaacagatgtgctagatcttcatctaaagacatttctgagaaaaatgtatctgttttctttcagaagaaatttacacttaatagatattatggtaactaaagtaaggcagataattttggccatcagcttatattgtgggataatctctttttgctgaccttgaaaagctgtggcatattcacaacaagtaggaaaatttttttatcatgatcaggtaaaggttctgcatgcttctattttgaataatattttccccttagaatcacaaagtgtgaatgccttttatttcagaggtctagcc

SEQ ID NO: 68743 - DNA, 806 bp, Homo sapiens
tgcatacaaaaatactacttatctttataaatgaatgaaattctgtcatttgcaaaaacgtggatgaatttagaggacattatactaagtaaaataagccagacacagaaagacaaatatctcatgataccacttacatgtgaaatccaaaaatgtgcactcatagaagttaagagtagagtggtggtttatcagaggctgagcaggtcgggtggcgggggtggaaaaaggggaaatattcaatgggataatgcttcagttaggagaaatacattctggtgatatggtacacagcaaagtgactgcagttactcataatatagtgcatatcttaaaagcgctaaaatagtacattttaaatrtttcaccataatgtaataaatatctgaggtgaaggatatgttatttagcctaatttgtccacttcacaatatttacatgtattgtaccacattgtaccccatatatatttatcaataaaaacaaaattttcaaaagttagaaaaacagatgtgctagatcttcatctaaagacatttctgagaaaaatgtatctgttttctttcagaagaaatttacacttaatagatattatggtaactaaagtaaggcagataattttggccatcagcttatattgtgggataatctctttttgctgaccttgaaaagctgtggcatattcacaacaagtaggaaaatttttttatcatgatcaggtaaaggttctgcatgcttctattttgaataatattttccccttagaatcacaaagtgtgaatgccttttatttcagaggtctagcc

SEQ ID NO: 68744 - DNA, 806 bp, Homo sapiens
tgcatacaaaaatactacttatctttataaatgaatgaaattctgtcatttgcaaaaacgtggatgaatttagaggacattatactaagtaaaataagccagacacagaaagacaaatatctcatgataccacttacatgtgaaatccaaaaatgtgcactcatagaagttaagagtagagtggtggtttatcagaggctgagcaggtcgggtggcgggggtggaaaaaggggaaatattcaatgggataatgcttcagttaggagaaatacattctggtgatatggtacacagcaaagtgactgcagttactcataatatagtgcatatcttaaaagcgctaaaatagtacattttaaatatttcaccataatgtaataaatatctgaggtgaaggatatgttatttagcctaatttgtccacttcacaatatttacatgtattgtaccacattgtaccccatatatatttatcrataaaaacaaaattttcaaaagttagaaaaacagatgtgctagatcttcatctaaagacatttctgagaaaaatgtatctgttttctttcagaagaaatttacacttaatagatattatggtaactaaagtaaggcagataattttggccatcagcttatattgtgggataatctctttttgctgaccttgaaaagctgtggcatattcacaacaagtaggaaaatttttttatcatgatcaggtaaaggttctgcatgcttctattttgaataatattttccccttagaatcacaaagtgtgaatgccttttatttcagaggtctagcc

SEQ ID NO: 68745 - DNA, 1303 bp, Homo sapiens
tgtcgtcccagttggtgatgatgccgtgctccatggggtacttcagggtcaggatgcctctcttgctctgggcctcattgcccacataggactccatctgacgcatgccccccatcatgttctggtgcctggggcaccccacgatggaagggaagacagcccggggggcatcgtcacctgcaaagccggccttgcacatgccagagccgttgtcaatgacgagcacggcagtatcatcatccatggtgagctcattcagttgtagaccctttaaaagattatcattctttttttccacactttcaatttcctccaaatatttcttttctcttagctggctctgatgtttcattatgtctagttccagtcttagcatgacaatttcttcctgcaacgtactattttcatgcaagaggtctttttctttcttataactaagagaaagctaagtaaacaaagggaacttttagttagcactcaatagattgatatatcatgatttcttctgaaattaaaaaataacatctgtatttgtataatgaaagaatccccatagtggatatttaactggaaaaaactggacaaaactccaaacctagcagagtgtaaattcctctagtgatttatttttcatagtctttaaataaagatttaaacttttaggaatctgctcctgaattcctaaaagtttaaatatttatttaaagactatgaaaaataaatcactagaggatttttaagaatctcagaattaaaaaagcctttctctgagttacaaaaaacccagaggcataaaatataagattaatacatttgactatatttttaagattaggtttrtactctgatatctaacctatcaaccacaccatcctaagagccttagctatgcatatatttggacagaagcaatttctcaaagttctttaagtttcttttactgaagaacgttttaccgatattctacatttctaatatttttatactcagttataagaattatatttattcataacttaaatctaagcactgtacccttctacactgtacacatctgtatctaagcattgcactcctacatacaacactgaactcatttaagatcgtgattcttaaaaggagaagtcaaaaaatatatacaagatgcaggattttccccaggtctgctgatgctacttctagtgatcctccacaaaaccacagttacttctgtggtgtaaatatataaatacaaaagaagccttttgtttcaaaatatgaatggtaagtaagatgcaacttatagagattttcttagaaatca

SEQ ID NO: 68746 - DNA, 649 bp, Homo sapiens
attttgtctgttttgtttgaacctatacagtaccttgaaaagtggctgacaggtaatcagtgcctaataaacattttttgactaaacgaatcaataaatatctcagcaacatacacttactttccttttctgaaatctatatcaatccttcaatccttcctttagccatttcaaatatatttatttagcatttaacacttgccaggcactgtggtagatgctgaggtaaaaaaaattacatatgatatattgtctttagagaactggcaatctggtgggagatgtggacaattcgtgattacaatattttgcctgagtattctgctagaggccagtacaatatgcactggaggaatacaaaagaagcatctagytctgtctgggtgccaggaaggggaggggtggggctgggttaggaaaggctttctgagaaagctgtccaaatggtaatagcaagcatttactaaagtgttcactgttctaaccactgtactaagcactttatctcactacattctcccaagagctccctagaatagaataattattattctcattgacagataaaaaaattgatttacagggagaaactgagagactttttcaaactgatacaactaataagtagtggagtctagtaaatggtggg

SEQ ID NO: 68747 - DNA, 1365 bp, Homo sapiens
tggtatccacctggggcctggtatccacctagggcttgatattcacctggggcctaggaatccacttgataactggtgcccatcagggtcctgatgttcaccttgggaacaggtaaccacctgaggcttgatgcccacttagggtataagtgtttatctggggtctagtgttcacatggggcctgatttcaaccttgggcctaggtattcaccagkggactagtgttcagctggggccagatgttcacttggggcctggtgtcaacttgaagcatggttgtcagcctgggacctgatgtccagtccagtgtctcccttgggcctattttctaactggggcctgtgtgtccacatagaccctggtgtcaatctggggcctgggtatttaccaggggcctggatattcattagtacattatgtctactggcgtctttgtgtcaatctgagctctgatgtccacctagagattgggtatccacctaaggcccggtgtttacatggggcctgtaacatgaggttccagatgaactcagatgtccacctgaggcctcatgtccacctgagttctgagtgttcacatagggcctgctgtcaacttgggacctaagtatttacctagggcttgggtgtccacctggggcctgacttccaactggatcttgtgtcaacatggggcctgatgtccactttgggcctaggtaacttcctgatgactaatgcccacatggctcctaaggaccatctgaggcctggtattaatttagagactggtatccatctggggtccaggtatccacttgggacctgatgttcacctggagtgtaggaattcacgtggggcctggtgtccaccttgagtgtgtgtatccaactgagtgctggtgtccacctggagtccagtgtatacctggggcctgatgtacatatgggacctgggcatccatctaggacctgatgttcagataagggctggcattctcctggcctggtgtccatatggagcctgggcatacacttggagcctgatgtcccaggtggatcgctgggccccagttgtcatcagatcctaggaaactctcaggccccaggtgcacataaagctccaagtggccacctaggccacaggttgatacacagggtccaggtggacactggttgcaagatgaacaccaggtctctggtggacaccaagccccaggtgtctacctagtcctcaagtggacaccaggcactagattgacacacaggtaccaggtggacatcaggccgcaggtgaatatcaggcctcaggtggttgggttacttatagcataggtggccatcaggtcccaggtctatatccactccccacctgaaaatcagga

SEQ ID NO: 68748 - DNA, 1365 bp, Homo sapiens
tggtatccacctggggcctggtatccacctagggcttgatattcacctggggcctaggaatccacttgataactggtgcccatcagggtcctgatgttcaccttgggaacaggtaaccacctgaggcttgatgcccacttagggtataagtgtttatctggggtctagtgttcacatggggcctgatttcaaccttgggcctaggtattcaccagtggactagtgttcagctggggccagatgttcacttggggcctggtgtcaacttgaagcatggttgtcagcctgggacctgatgtccagtccagtgtctcccttgggcctrttttctaactggggcctgtgtgtccacatagaccctggtgtcaatctggggcctgggtatttaccaggggcctggatattcattagtacattatgtctactggcgtctttgtgtcaatctgagctctgatgtccacctagagattgggtatccacctaaggcccggtgtttacatggggcctgtaacatgaggttccagatgaactcagatgtccacctgaggcctcatgtccacctgagttctgagtgttcacatagggcctgctgtcaacttgggacctaagtatttacctagggcttgggtgtccacctggggcctgacttccaactggatcttgtgtcaacatggggcctgatgtccactttgggcctaggtaacttcctgatgactaatgcccacatggctcctaaggaccatctgaggcctggtattaatttagagactggtatccatctggggtccaggtatccacttgggacctgatgttcacctggagtgtaggaattcacgtggggcctggtgtccaccttgagtgtgtgtatccaactgagtgctggtgtccacctggagtccagtgtatacctggggcctgatgtacatatgggacctgggcatccatctaggacctgatgttcagataagggctggcattctcctggcctggtgtccatatggagcctgggcatacacttggagcctgatgtcccaggtggatcgctgggccccagttgtcatcagatcctaggaaactctcaggccccaggtgcacataaagctccaagtggccacctaggccacaggttgatacacagggtccaggtggacactggttgcaagatgaacaccaggtctctggtggacaccaagccccaggtgtctacctagtcctcaagtggacaccaggcactagattgacacacaggtaccaggtggacatcaggccgcaggtgaatatcaggcctcaggtggttgggttacttatagcataggtggccatcaggtcccaggtctatatccactccccacctgaaaatcagga

SEQ ID NO: 68749 - DNA, 1365 bp, Homo sapiens
tggtatccacctggggcctggtatccacctagggcttgatattcacctggggcctaggaatccacttgataactggtgcccatcagggtcctgatgttcaccttgggaacaggtaaccacctgaggcttgatgcccacttagggtataagtgtttatctggggtctagtgttcacatggggcctgatttcaaccttgggcctaggtattcaccagtggactagtgttcagctggggccagatgttcacttggggcctggtgtcaacttgaagcatggttgtcagcctgggacctgatgtccagtccagtgtctcccttgggcctattttctaactggggcctgtgtgtccacatagaccctggtgtcaatctggggcctgggtatttaccaggggcctggatattcattagtacattatgtctactggcgtctttgtgtcaatctgagctctgatgtccacctagagattgggtatccacctaaggcccggtgtttacatggggcctgtaacatgaggttccagatgaactcagatgtccacctgaggcctcatgtccacctgagttctgagtgttcacatagggcctgctgtcaacttgggacctaagtatttacctagggcttgggtgtccacctggggcctgacttccaactggatcttgtgtcaacatggggcctgatgtccactttgggcctaggtaacttcctgatgactaatgcccacatggctcctaaggaccatctgaggcctggtattaatttagagactggtatccatctggggtccaggtatccacttgggacctgatgttcacctggagtgtaggaattcacgtggggcctggtgtccaccttgagtgtgtgtatccaactgagtgctggtgtccacctggagtccagtgtatacctggggcctgatgtacatatgggacctgggcatccatctaggacctgatgttcagataagggctggcattctcctggcctggtgtccatatggagcctgggcrtacacttggagcctgatgtcccaggtggatcgctgggccccagttgtcatcagatcctaggaaactctcaggccccaggtgcacataaagctccaagtggccacctaggccacaggttgatacacagggtccaggtggacactggttgcaagatgaacaccaggtctctggtggacaccaagccccaggtgtctacctagtcctcaagtggacaccaggcactagattgacacacaggtaccaggtggacatcaggccgcaggtgaatatcaggcctcaggtggttgggttacttatagcataggtggccatcaggtcccaggtctatatccactccccacctgaaaatcagga

SEQ ID NO: 68750 - DNA, 1365 bp, Homo sapiens
tggtatccacctggggcctggtatccacctagggcttgatattcacctggggcctaggaatccacttgataactggtgcccatcagggtcctgatgttcaccttgggaacaggtaaccacctgaggcttgatgcccacttagggtataagtgtttatctggggtctagtgttcacatggggcctgatttcaaccttgggcctaggtattcaccagtggactagtgttcagctggggccagatgttcacttggggcctggtgtcaacttgaagcatggttgtcagcctgggacctgatgtccagtccagtgtctcccttgggcctattttctaactggggcctgtgtgtccacatagaccctggtgtcaatctggggcctgggtatttaccaggggcctggatattcattagtacattatgtctactggcgtctttgtgtcaatctgagctctgatgtccacctagagattgggtatccacctaaggcccggtgtttacatggggcctgtaacatgaggttccagatgaactcagatgtccacctgaggcctcatgtccacctgagttctgagtgttcacatagggcctgctgtcaacttgggacctaagtatttacctagggcttgggtgtccacctggggcctgacttccaactggatcttgtgtcaacatggggcctgatgtccactttgggcctaggtaacttcctgatgactaatgcccacatggctcctaaggaccatctgaggcctggtattaatttagagactggtatccatctggggtccaggtatccacttgggacctgatgttcacctggagtgtaggaattcacgtggggcctggtgtccaccttgagtgtgtgtatccaactgagtgctggtgtccacctggagtccagtgtatacctggggcctgatgtacatatgggacctgggcatccatctaggacctgatgttcagataagggctggcattctcctggcctggtgtccatatggagcctgggcatacacttggagcctgatgtcccaggtggatcgctgggccccagtkgtcatcagatcctaggaaactctcaggccccaggtgcacataaagctccaagtggccacctaggccacaggttgatacacagggtccaggtggacactggttgcaagatgaacaccaggtctctggtggacaccaagccccaggtgtctacctagtcctcaagtggacaccaggcactagattgacacacaggtaccaggtggacatcaggccgcaggtgaatatcaggcctcaggtggttgggttacttatagcataggtggccatcaggtcccaggtctatatccactccccacctgaaaatcagga

SEQ ID NO: 68751 - DNA, 1365 bp, Homo sapiens
tggtatccacctggggcctggtatccacctagggcttgatattcacctggggcctaggaatccacttgataactggtgcccatcagggtcctgatgttcaccttgggaacaggtaaccacctgaggcttgatgcccacttagggtataagtgtttatctggggtctagtgttcacatggggcctgatttcaaccttgggcctaggtattcaccagtggactagtgttcagctggggccagatgttcacttggggcctggtgtcaacttgaagcatggttgtcagcctgggacctgatgtccagtccagtgtctcccttgggcctattttctaactggggcctgtgtgtccacatagaccctggtgtcaatctggggcctgggtatttaccaggggcctggatattcattagtacattatgtctactggcgtctttgtgtcaatctgagctctgatgtccacctagagattgggtatccacctaaggcccggtgtttacatggggcctgtaacatgaggttccagatgaactcagatgtccacctgaggcctcatgtccacctgagttctgagtgttcacatagggcctgctgtcaacttgggacctaagtatttacctagggcttgggtgtccacctggggcctgacttccaactggatcttgtgtcaacatggggcctgatgtccactttgggcctaggtaacttcctgatgactaatgcccacatggctcctaaggaccatctgaggcctggtattaatttagagactggtatccatctggggtccaggtatccacttgggacctgatgttcacctggagtgtaggaattcacgtggggcctggtgtccaccttgagtgtgtgtatccaactgagtgctggtgtccacctggagtccagtgtatacctggggcctgatgtacatatgggacctgggcatccatctaggacctgatgttcagataagggctggcattctcctggcctggtgtccatatggagcctgggcatacacttggagcctgatgtcccaggtggatcgctgggccccagttgtcatcagatcctaggaaactctcaggmcccaggtgcacataaagctccaagtggccacctaggccacaggttgatacacagggtccaggtggacactggttgcaagatgaacaccaggtctctggtggacaccaagccccaggtgtctacctagtcctcaagtggacaccaggcactagattgacacacaggtaccaggtggacatcaggccgcaggtgaatatcaggcctcaggtggttgggttacttatagcataggtggccatcaggtcccaggtctatatccactccccacctgaaaatcagga

SEQ ID NO: 68752 - DNA, 1044 bp, Homo sapiens
aggctagaaaatcaggcatatcttgccaaaagtatttccaaggtaagaactctcccaccagcaaatatcayctatttgtttgccaggatgacagtcattattttagtctccaggcaccaaattctgattaaaggagaaaatgtattttatgcttgctgtttaattatttcctttctaggattataagataaaaacaaaatttggcaaatagtgggcccattaactgaatgaagagtgaagtgtgaggctgttgataaattgtgaccacttgaatagagcagagtcaggaccaataacagagtaaagatcaagatacacctgcacacaaggcaagtaggcaaccaggaattgacatcatgccagaaaaggaagttgagacaaagaagtatatctaagcaggcagtaaataagaaaaactagaagaacataggcatagaaaggaaaaaaaatcaaaggatttgaaggagtcagactgtaggtctaggtagagtcagaaatcattcaagccatcagggcatcgatggcaccataagcagccatccgtcgctctatattctccaagagcagaggcccgtatcaagcaggtgggagcagatgtgcagtcattgcaacctgggaaggaagctgtctacgtgaaaactgtacctttatgccaaacctttcaaccaaatattacacaatcaataaccaaaaggctatacaatatagtgacaataaccaattaaagagagcttgaggagctaaaaacaaaatattcctcagttgcttcctcctgctacttgttccttgctctttattttatgcctatatttaactccccacctgcttttttggtaagattttaatgtcattcatagaactttattcattatttgatgttggtagtagatccaacttctctactcttcattttcttttttatatggatttttttatttccaacttttaagtttaagtgtacatgtgcagatgtgcaggtttattacataggtacatgtgtgtcatgggggtttgctgcacagatcatcccatcacctaagtatt

SEQ ID NO: 68753 - DNA, 1587 bp, Homo sapiens
tggatataaaacatttatcttcaatgatggggttttaccatgttggtcaggctggtctcgaactcctgacctcaaatgatccacccacctccaccttccaaactgctgggattacaggtgtgagccactatgcctgactgattattttcataaccaagaaaagaaataaatacaattaatgctggtgcatggtattaaatctagtttttaaaaaattcacacataaacaaggcagaaccctataccctccatgataaatgcagtagcagtgtatgtgggtctgtggargttgaaagggacttggtagatgtcaagaagctagtggcagtcctgctgggcttttaaagggtctgaagaagtgacaggatgctgtggttgaatcctagcatgtattttagcatttgttcatttggagttgattatttcacgttgctttcatttgccattacctggaaagccaagggctctactctcatttccttgctgctctttctttgccttccttggtccgtgaagaagatggtccaggagaagctcattccatgcttgttaaccaggcacgcccctaagttccagtccctgagtcattcatgagtagcactgccaatgaactgacagccatgctgtgtccctccacatcccctaggtgactcgaagaagccttccaaaaagcatgtgaaaaggaagccctactctactaccaaggtaaagtagcctgtctttgcctaagatgtaaatgttgttttcttggatcctttatttttcagttgatatcagctatgggaaaattctccactacattataggtgttagataatatttccttggggatggaggaggtgtattttaccaactgacacctgattccagaggacgtgcaaaattggcagtgtcagatagtacactgggtgttaagggatgttttcttcaggaacaagctttccactttagataagaattctgcaattgctactcaaaaattacctagacagaaacattcttcaagaaaagctcctgtgctttcctaagggaactctactctagagttggggcttttgacttgaaccttatttccagtcttggttacccagagtttccaagtgaacaaaagacctgtgtgagccatccatagcatagcctgattctcagagtgttttccttctctaattacaggtgacttcagggagcacattcaatggtacgtattctggaatcactcactggttgttagaaaaggattctacaggaaatctggagcttaactgctggcttttgtctggagagcctccatgatccaagacatctggtgggaatgaggatgtagggtatagtaaaagaaactggttttcctggtgacatactctttttatctatgtatagtttctgggaacatgttcacattaggttgtgtgtgggtatgtgtgtattagggcgggggtggggtgaggtggtctgtgtgcaagtctgcatgatttgcttgtgaatgtgtgtctatgtgtgtttcccctaggaaaaaaatgttgtgtttacccagcacaactctcagtgccatttttcttaatttaacaaatcagaccacatacttta

SEQ ID NO: 68754 - DNA, 1587 bp, Homo sapiens
tggatataaaacatttatcttcaatgatggggttttaccatgttggtcaggctggtctcgaactcctgacctcaaatgatccacccacctccaccttccaaactgctgggattacaggtgtgagccactatgcctgactgattattttcataaccaagaaaagaaataaatacaattaatgctggtgcatggtattaaatctagtttttaaaaaattcacacataaacaaggcagaaccctataccctccatgataaatgcagtagcagtgtatgtgggtctgtggaggttgaaagggacttggtagatgtcaagaagstagtggcagtcctgctgggcttttaaagggtctgaagaagtgacaggatgctgtggttgaatcctagcatgtattttagcatttgttcatttggagttgattatttcacgttgctttcatttgccattacctggaaagccaagggctctactctcatttccttgctgctctttctttgccttccttggtccgtgaagaagatggtccaggagaagctcattccatgcttgttaaccaggcacgcccctaagttccagtccctgagtcattcatgagtagcactgccaatgaactgacagccatgctgtgtccctccacatcccctaggtgactcgaagaagccttccaaaaagcatgtgaaaaggaagccctactctactaccaaggtaaagtagcctgtctttgcctaagatgtaaatgttgttttcttggatcctttatttttcagttgatatcagctatgggaaaattctccactacattataggtgttagataatatttccttggggatggaggaggtgtattttaccaactgacacctgattccagaggacgtgcaaaattggcagtgtcagatagtacactgggtgttaagggatgttttcttcaggaacaagctttccactttagataagaattctgcaattgctactcaaaaattacctagacagaaacattcttcaagaaaagctcctgtgctttcctaagggaactctactctagagttggggcttttgacttgaaccttatttccagtcttggttacccagagtttccaagtgaacaaaagacctgtgtgagccatccatagcatagcctgattctcagagtgttttccttctctaattacaggtgacttcagggagcacattcaatggtacgtattctggaatcactcactggttgttagaaaaggattctacaggaaatctggagcttaactgctggcttttgtctggagagcctccatgatccaagacatctggtgggaatgaggatgtagggtatagtaaaagaaactggttttcctggtgacatactctttttatctatgtatagtttctgggaacatgttcacattaggttgtgtgtgggtatgtgtgtattagggcgggggtggggtgaggtggtctgtgtgcaagtctgcatgatttgcttgtgaatgtgtgtctatgtgtgtttcccctaggaaaaaaatgttgtgtttacccagcacaactctcagtgccatttttcttaatttaacaaatcagaccacatacttta

SEQ ID NO: 68755 - DNA, 1587 bp, Homo sapiens
tggatataaaacatttatcttcaatgatggggttttaccatgttggtcaggctggtctcgaactcctgacctcaaatgatccacccacctccaccttccaaactgctgggattacaggtgtgagccactatgcctgactgattattttcataaccaagaaaagaaataaatacaattaatgctggtgcatggtattaaatctagtttttaaaaaattcacacataaacaaggcagaaccctataccctccatgataaatgcagtagcagtgtatgtgggtctgtggaggttgaaagggacttggtagatgtcaagaagctagtggcagtcctgctgggcttttaaagggtctgaagaagtgacaggatgctgtggttgaatcctagcatgtattttagcatttgttcatttggagttgattatttcacgttgctttcatttgccattacctggaaagccaagggctctactctcatttccttgctgctctttctttgccttccttggtccgtgaagaagrtggtccaggagaagctcattccatgcttgttaaccaggcacgcccctaagttccagtccctgagtcattcatgagtagcactgccaatgaactgacagccatgctgtgtccctccacatcccctaggtgactcgaagaagccttccaaaaagcatgtgaaaaggaagccctactctactaccaaggtaaagtagcctgtctttgcctaagatgtaaatgttgttttcttggatcctttatttttcagttgatatcagctatgggaaaattctccactacattataggtgttagataatatttccttggggatggaggaggtgtattttaccaactgacacctgattccagaggacgtgcaaaattggcagtgtcagatagtacactgggtgttaagggatgttttcttcaggaacaagctttccactttagataagaattctgcaattgctactcaaaaattacctagacagaaacattcttcaagaaaagctcctgtgctttcctaagggaactctactctagagttggggcttttgacttgaaccttatttccagtcttggttacccagagtttccaagtgaacaaaagacctgtgtgagccatccatagcatagcctgattctcagagtgttttccttctctaattacaggtgacttcagggagcacattcaatggtacgtattctggaatcactcactggttgttagaaaaggattctacaggaaatctggagcttaactgctggcttttgtctggagagcctccatgatccaagacatctggtgggaatgaggatgtagggtatagtaaaagaaactggttttcctggtgacatactctttttatctatgtatagtttctgggaacatgttcacattaggttgtgtgtgggtatgtgtgtattagggcgggggtggggtgaggtggtctgtgtgcaagtctgcatgatttgcttgtgaatgtgtgtctatgtgtgtttcccctaggaaaaaaatgttgtgtttacccagcacaactctcagtgccatttttcttaatttaacaaatcagaccacatacttta

SEQ ID NO: 68756 - DNA, 1619 bp, Homo sapiens
caacactttgggaggccaaggtgggcagatcacaaggtcaggagatcgagaccatcctggctatcatggtgaaaccccgtctctactaaaaatacaaaaaattagccaggggtggtggcgagcgcctgtagtcccagctacttgggaggctgaggcaggagaacagtgtgaacccgggaggcggagcttgcagtgagccgagatcacgccactgtactccagcctgggcgacagagcgagactctgtctcaaaaaaaaaaaccacaaaaaacaaaaaaaacaaaaaaaaaccacaaaacaccccaaaaccaaaatacattatataattacaaccacacagaagcttgcacacattagtgcaaaaaaagtgaaaggttactgtgggatcctggtgatcaatatcttactcccttaccattcctcccatacttcttaactgtctacaatgatgaaattcttctacctttatatgaaagattaaaagaaaatttctcccattttcaaaagaaattcatttctaaacaaccaagtatttctcaaccttcactcaggtcaatacataaaaccaattcaacatttaagtagacagttgttaaatatacatatacacatatattcatatgcatgtatagataaacacatacagataaaataggaagttagaaatagctaaatttctaacagaacactggataaaaatgctataaaatcattaacgataacctagatctatgyactgatgtggaaaagatattcaagacacaattctattaaccatgacatttagggaataattataaaagaattttaccttcttaaatatttctataatttctgaatttttaaaaaagttaacctttataataattatttttaaaaaataaattatagagaaaatatgcacatgtatgtagataaagatatggaaggacaagcaccctattcagattccctcctcaacttttaaggaaccctgtttttataaatgggcccacctagataatccacctacctagacaagacaatccaggataaccttcctatctttaaagtcagctgatgggcctattcggggcataccacactgcccgtggattagccctgctctgtaaggagcagttaaaaaaaaaataaggtcagctgataaacaatcttgattgtatctgcaaccataattcctgtttgccaggtaacctaacatagttataggctctagaaattagaatacagccatgggggtgggtggggggtcattagtcggcctatcatggttttataacagcatgaagttttaaaaactagctgcctaatatatttaacaggtacacgttaaatgggaataaagaataatacaattattaaacgaagctaacctaaaaaaaaaaaaggataaaaaaatcaaatgtatcacttttttttttcatgggtactctaaaaaatctttgcttaacataaggtcatgaagattctctcctgttttcttcttgaaggttaataactttaggccttatatttaggtttatgctccattttgagttttgtaaattttgcatatgggtgtctaattgttccagcaccatttgctgaagagactgacacaaacaatgacatggattttt

SEQ ID NO: 68757 - DNA, 1619 bp, Homo sapiens
caacactttgggaggccaaggtgggcagatcacaaggtcaggagatcgagaccatcctggctatcatggtgaaaccccgtctctactaaaaatacaaaaaattagccaggggtggtggcgagcgcctgtagtcccagctacttgggaggctgaggcaggagaacagtgtgaacccgggaggcggagcttgcagtgagccgagatcacgccactgtactccagcctgggcgacagagcgagactctgtctcaaaaaaaaaaaccacaaaaaacaaaaaaaacaaaaaaaaaccacaaaacaccccaaaaccaaaatacattatataattacaaccacacagaagcttgcacacattagtgcaaaaaaagtgaaaggttactgtgggatcctggtgatcaatatcttactcccttaccattcctcccatacttcttaactgtctacaatgatgaaattcttctacctttatatgaaagattaaaagaaaatttctcccattttcaaaagaaattcatttctaaacaaccaagtatttctcaaccttcactcaggtcaatacataaaaccaattcaacatttaagtagacagttgttaaatatacatatacacatatattcatatgcatgtatagataaacacatacagataaaataggaagttagaaatagctaaatttctaacagaacactggataaaaatgctataaaatcattaacgataacctagatctatgcactgatgtggaaaagatattcaagacacaattctattaaccatgacatttagggaataattataaaagaattttaccttcttaaatatttctataatttctgaatttttaaaaaagttaacctttataataattatttttaaaaaataaattatagagaaaatatgcacatgtatgtagwtaaagatatggaaggacaagcaccctattcagattccctcctcaacttttaaggaaccctgtttttataaatgggcccacctagataatccacctacctagacaagacaatccaggataaccttcctatctttaaagtcagctgatgggcctattcggggcataccacactgcccgtggattagccctgctctgtaaggagcagttaaaaaaaaaataaggtcagctgataaacaatcttgattgtatctgcaaccataattcctgtttgccaggtaacctaacatagttataggctctagaaattagaatacagccatgggggtgggtggggggtcattagtcggcctatcatggttttataacagcatgaagttttaaaaactagctgcctaatatatttaacaggtacacgttaaatgggaataaagaataatacaattattaaacgaagctaacctaaaaaaaaaaaaggataaaaaaatcaaatgtatcacttttttttttcatgggtactctaaaaaatctttgcttaacataaggtcatgaagattctctcctgttttcttcttgaaggttaataactttaggccttatatttaggtttatgctccattttgagttttgtaaattttgcatatgggtgtctaattgttccagcaccatttgctgaagagactgacacaaacaatgacatggattttt

SEQ ID NO: 68758 - DNA, 693 bp, Homo sapiens
cccctcctgcaggacccagagctctgggggtgggagggaacccctcgtttcctggcggcagctgcccaaggctttggtgggccrgtattgaaagcccaggcctgcagcttgggtgagcccttaggcagtgaaacctctggagagggaaggccatgtggtcaggccaggcgggctagggggctgggccctctgggcagggaggcggtgagagcagatcaggaagggaaggaacgggggagccaaaagcggttgagactggttcttataaatagcccttgcacaagtggctccaattttgaccttttgttatgtaaatgtggccagcttgggaagggccctgcccaggcctcctgctaccacacccgcaggccaagaattgtgtgtctgccaccagcgccccctggcctaggtggcccctgggtgtccttaatctcctgtgtgtgttagaggggcaggcattgcacccaccgaactccctagacctgttcgctggtccttactcttcctggctgtcagatccaactaccaggctctgtggccacagtctcctgctgggctgcccctggtgccccagccagagacccccaggtgcgtcccttcatcgcccttccctcccttcttcgctgatggctgtctgggtgactgtgttcgtcttctcttccccaggtgaccaggcattgatgcacccccagg

SEQ ID NO: 68759 - DNA, 563 bp, Homo sapiens
catatttcaaaaaaggacattgattaaaaggcaatatagtgccagaaaacaaaaatctgaaaatttatatgccacagcagcattaataaccataacataaataaggaaaatatttwaaaaattctaataaaattagacaaaaaatatgattaaaaatgccaaattttcaatatcttaaaatgtctaataatagtcgttattgtttatatttaataattccaaaaatattatttttcaatgatagtcttttacatagaaaacagattacaaaatggcaactctattatgatacttaaaaaaaattatcttatgtgtgtatttgtggctctatgtggcggcagaaccaaatatgcatgtacattacctgtctgtccttaagaaaacattcagaaggataaacctcaaatactagttatgtcatctgtgtgtggtttcatgtctatttactgctagttaagaaatgcttcagagagggaacaaaaggcaaacagatgtataacttgcccaaagatacagcataagttattagcatggagctggaattaaaagccagattttcttga

SEQ ID NO: 68760 - DNA, 563 bp, Homo sapiens
catatttcaaaaaaggacattgattaaaaggcaatatagtgccagaaaacaaaaatctgaaaatttatatgccacagcagcattaataaccataacataaataaggaaaatatttaaaaaattctaataaaattagacaaaaaatatgattaaaaatgccaaattttcaatatcttaaaatgtctaataatagtcgttattgtttatatttaataattccaaaaatattatttttcaatgatagtcttttacatagaaaacagattacaaaatggcaactctattatgatacttaaaaaaaattatcttatgtgtgtatttgtggctctatgtggcggcagaaccaaatatgcatgtacattacctgtctgtccttaagaaaacattcagaaggataaacctcaaatamtagttatgtcatctgtgtgtggtttcatgtctatttactgctagttaagaaatgcttcagagagggaacaaaaggcaaacagatgtataacttgcccaaagatacagcataagttattagcatggagctggaattaaaagccagattttcttga

SEQ ID NO: 68761 - DNA, 538 bp, Homo sapiens
tgacgggtcacaaccagtggtactgcaggtcttgggctcacagctgggagatttgcaggttggtgcttcaccgtaggattcttggcagtaatccaggagccagagatttccttggtagctactgggtaagcagtgtccaaaggtagggcttaaatcactggagctaagagtaacagaagaggtcactgggatataacagtgagttctgtatgatgtggtactgcagacmccaggatagcctgtagtagacatggagcctgcaggcatgctcagtggtcgctgtgcagtgtgtctgtggcctaaggacgttttataccttccctggtgattgtcaaaagcctctccagactctttcttctgtctgcttggggcaataacacagcaacatctcattagtgtgttggttagccacagaggctaatgttttcacacgtgtaaaaataagtttattttaattcttcaaagtatccataatcaccactttgaccatcacccatcactcatcatctgtagaccataccttcagcaaatagtgatt

SEQ ID NO: 68762 - DNA, 538 bp, Homo sapiens
tgacgggtcacaaccagtggtactgcaggtcttgggctcacagctgggagatttgcaggttggtgcttcaccgtaggattcttggcagtaatccaggagccagagatttccttggtagctactgggtaagcagtgtccaaaggtagggcttaaatcactggagctaagagtaacagaagaggtcactgggatataacagtgagttctgtatgatgtggtactgcagacaccaggatagcctgtagtagacatggagcctgcaggcatgctcagtggtcgctgtgcagtgtgtctgtggcctaaggacgttttataccttccctggtgattgtcaaaagcctctccagactctttcttctgtctgcttggggcaataacacagcaacatctcattagtgtgttggttagccacrgaggctaatgttttcacacgtgtaaaaataagtttattttaattcttcaaagtatccataatcaccactttgaccatcacccatcactcatcatctgtagaccataccttcagcaaatagtgatt

SEQ ID NO: 68763 - DNA, 482 bp, Homo sapiens
aaaggaaggaaagaacatgccagaataggctgttttaggctaggtaacttgctatgatgtgtataaattatatgttgatcttagaaattaaatttggaggaattgaataagttgaaggcatttaccaccatttatatgggaaataaggatcccagagagggcatactccataaaggtacacaccattaaagttagtccagctagagagaaaggctgggtggggctgtggcagagaggaaatacttttatttgaagtttagatttgtcattctagaattgaagattatggtcaccaagtaattgataacttccaagtggcttctagattagccaaaacctgaataaataaaaatagagataatatgaaagacaatgaaaagtctttgaactataacttatgtgggtcttctggcaagtttcttgacctatttgrattttcttatctgtaacaatggggatgatagtatcttttcatacgtgca

SEQ ID NO: 68764 - DNA, 624 bp, Homo sapiens
tggtgcatttcatgccaaggatggccatcatgaaagccaagaaggacatcacggaagcagcacacatcagtcctctggctgcctgtaggtccggagaaagagccagcagggaatcatagattttgcactgcatcctgatgttagcctgcctcacgcaattcatccacagtccttcccagaagttttcaaaaaccacgatgttgttttcaatgaaggccgacactctccactgaggcatgacagygacagccactgtgcccaccattccaacaccaccaagaaacagcccagcgatttctaaggcatgggttgccattatcctctgggatgagttttagccagctggactccggaactgctacttctgctttgaagcagggttctctgtgccacagaagagaacagtttttcctgtagtaatgaactcggaacccagtggtttttcaaataagagctgctttgctacttctggccagatagtatccagtgctggctggctgagatggccctgctattggctgcaacaggtaaacttacaaatcaggtgtggcaactttctcagccaataaaaggtggatggtaatccaggtgtgtctaaaccaacacttgggtacttggaacagc

SEQ ID NO: 68765 - DNA, 624 bp, Homo sapiens
tggtgcatttcatgccaaggatggccatcatgaaagccaagaaggacatcacggaagcagcacacatcagtcctctggctgcctgtaggtccggagaaagagccagcagggaatcatagattttgcactgcatcctgatgttagcctgcctcacgcaattcatccacagtccttcccagaagttttcaaaaaccacgatgttgttttcaatgaaggccgacactctccactgaggcatgacagtgacagccactgtgcccaccattccaacaccaccaagaaacagcccagcgatttctaaggcatgggttgccattatcctctgggatgagttttagccagctggactccggaactgctacttctgctttgaagcasggttctctgtgccacagaagagaacagtttttcctgtagtaatgaactcggaacccagtggtttttcaaataagagctgctttgctacttctggccagatagtatccagtgctggctggctgagatggccctgctattggctgcaacaggtaaacttacaaatcaggtgtggcaactttctcagccaataaaaggtggatggtaatccaggtgtgtctaaaccaacacttgggtacttggaacagc

SEQ ID NO: 68766 - DNA, 624 bp, Homo sapiens
tggtgcatttcatgccaaggatggccatcatgaaagccaagaaggacatcacggaagcagcacacatcagtcctctggctgcctgtaggtccggagaaagagccagcagggaatcatagattttgcactgcatcctgatgttagcctgcctcacgcaattcatccacagtccttcccagaagttttcaaaaaccacgatgttgttttcaatgaaggccgacactctccactgaggcatgacagtgacagccactgtgcccaccattccaacaccaccaagaaacagcccagcgatttctaaggcatgggttgccattatcctctgggatgagttttagccagctggactccggaactgctacttctgctttgaagcagggttctctgtgccacagaasagaacagtttttcctgtagtaatgaactcggaacccagtggtttttcaaataagagctgctttgctacttctggccagatagtatccagtgctggctggctgagatggccctgctattggctgcaacaggtaaacttacaaatcaggtgtggcaactttctcagccaataaaaggtggatggtaatccaggtgtgtctaaaccaacacttgggtacttggaacagc

SEQ ID NO: 68767 - DNA, 624 bp, Homo sapiens
tggtgcatttcatgccaaggatggccatcatgaaagccaagaaggacatcacggaagcagcacacatcagtcctctggctgcctgtaggtccggagaaagagccagcagggaatcatagattttgcactgcatcctgatgttagcctgcctcacgcaattcatccacagtccttcccagaagttttcaaaaaccacgatgttgttttcaatgaaggccgacactctccactgaggcatgacagtgacagccactgtgcccaccattccaacaccaccaagaaacagcccagcgatttctaaggcatgggttgccattatcctctgggatgagttttagccagctggactccggaactgctacttctgctttgaagcagggttctctgtgccacagaagagaacagtttttcctgtagtaatgaactcggaacccagtggtttttcaaataagagctgctttgctacttctggccagatagtatccartgctggctggctgagatggccctgctattggctgcaacaggtaaacttacaaatcaggtgtggcaactttctcagccaataaaaggtggatggtaatccaggtgtgtctaaaccaacacttgggtacttggaacagc

SEQ ID NO: 68768 - DNA, 669 bp, Homo sapiens
ccatgacaggcctgaagatattactacttaccatttgctactgtacataaacaatgatgccctgctccagggagattttgaggtaaagatatggagaattgctgaagggcattctttcccagtgagtctctggggcaggctgcttcaatcccagcctaactcaactgggctctgtccccctggttgggtggcaattccaatatttctgctttctttgattctccttttatgtgtagttgtctctcttcagactctcagcccagaagaaaattctcctgataaaacaacagctcgatccaaattgtgcttctccccagaattcacgcctctccctaggagaagagttgaggaactgtacagaaaagggcggcttcgttagaccgctctcttttctgtacttcctgagtggccagggaatctaatatccccaaattagggcaattggaacaaagtgaaggacatagaggtatattggaagaggcagagcctgaggtggtaggaggaggaccctggaaatggactggtttgagattgccccaggtctgggaagctgagggcaaatccagtcccartggtcctgactttgggcgctgggtattggaaatggatgcaaagtacaatgtgtttttctccagtgctgtccatgcttctcatcttgtgaaatggcca

SEQ ID NO: 68769 - DNA, 1563 bp, Homo sapiens
cctccccaggtggtaggattacaggtgtgagccactgagtctggccagtactaaatcttattagttaaaaaaactttgataatatataaataaaatgtacattattctaatttaaatttctttaagtatccatacagttgaacatggcccaatttagaaattttaaattataaaataatttctttgtatatttacgtatacatatatacatgcacccttaaagtagatacaaatttgcatatatatacatatatgtaaatgtgtatgttatctatacccatatacctattgtggaaaaactggaaatgtagaagactagaaagaaaaaatygggctggattaactttaagctctgagtgctatgaccctaatatcagaaatttcgtatctaaggctatatagctaaagtcatgataaggaggctgggctcaaaaccatctctaattagaacagccttattttttattcttaaataaaaacctaggtacttttcttttcagatatgggggcttgctctgtcacccaggctggagtgcagtggcatgatcatagctcactgcagcctcaaattcctgagctcaggcaatcctcccacctcagcctcctgagtagataggactacaggcatgtaccaccatccccagctaagtttgtattttttactttttttagagatagggtctcattatgtcacccagacttctggacacattttaatctaattgaaagccatcctgaacgagtggatcctattattatgtgtctataagttatatctacaaataattactgctctaaagataaacagattctcttagatagaattcctctatctagaataccagagctttgggaggctgaggcgggaggatcaactgaggccaagagtttgagactctgtctcttcaaaaaaaatttaattagctgattggaaggcatgtgcatgtagtcctacctactcagaaggctgagtggagaggatcacttgagcccaagaatttgaggctgcagtgagctatgatagtgccactgcactccagcctgggtgacagagcaagatcttgtctttaaaataaataaatgaaaagtgcaatacaattataaaaaaagaattccattaaacactcaatgatgaaattttacttatacttttagttgtatctcactgaaaaggttacagtttctttgttattttgagcacctcagaaagccttgcttgttcttgcacattctgaatattgtttggggaacatttcattttggaacaagcaacaatggaaagtctgatgactctaattcaggagtgtttgcgtcccaggaggctcatcttatcccaaaatgtatcactgtgtttacactttccaactctagttgttctccatctttcatacagaaaaacaaaatgcctattgctccctctcaaagtctcagagaatactaatgctatgtgtgtcaagccttgctaagactggaacatttctccaccaagtgtttatttctaaccaagcttttaatgtcagtccttgggccagttaacaccagcctatcttaggttggctcccc

SEQ ID NO: 68770 - DNA, 1563 bp, Homo sapiens
cctccccaggtggtaggattacaggtgtgagccactgagtctggccagtactaaatcttattagttaaaaaaactttgataatatataaataaaatgtacattattctaatttaaatttctttaagtatccatacagttgaacatggcccaatttagaaattttaaattataaaataatttctttgtatatttacgtatacatatatacatgcacccttaaagtagatacaaatttgcatatatatacatatatgtaaatgtgtatgttatctatacccatatacctattgtggaaaaactggaaatgtagaagactagaaagaaaaaattgggctggattaactttaagctctgagtgctatgaccctaatatcagaaatttcgtatctaaggctatatagcyaaagtcatgataaggaggctgggctcaaaaccatctctaattagaacagccttattttttattcttaaataaaaacctaggtacttttcttttcagatatgggggcttgctctgtcacccaggctggagtgcagtggcatgatcatagctcactgcagcctcaaattcctgagctcaggcaatcctcccacctcagcctcctgagtagataggactacaggcatgtaccaccatccccagctaagtttgtattttttactttttttagagatagggtctcattatgtcacccagacttctggacacattttaatctaattgaaagccatcctgaacgagtggatcctattattatgtgtctataagttatatctacaaataattactgctctaaagataaacagattctcttagatagaattcctctatctagaataccagagctttgggaggctgaggcgggaggatcaactgaggccaagagtttgagactctgtctcttcaaaaaaaatttaattagctgattggaaggcatgtgcatgtagtcctacctactcagaaggctgagtggagaggatcacttgagcccaagaatttgaggctgcagtgagctatgatagtgccactgcactccagcctgggtgacagagcaagatcttgtctttaaaataaataaatgaaaagtgcaatacaattataaaaaaagaattccattaaacactcaatgatgaaattttacttatacttttagttgtatctcactgaaaaggttacagtttctttgttattttgagcacctcagaaagccttgcttgttcttgcacattctgaatattgtttggggaacatttcattttggaacaagcaacaatggaaagtctgatgactctaattcaggagtgtttgcgtcccaggaggctcatcttatcccaaaatgtatcactgtgtttacactttccaactctagttgttctccatctttcatacagaaaaacaaaatgcctattgctccctctcaaagtctcagagaatactaatgctatgtgtgtcaagccttgctaagactggaacatttctccaccaagtgtttatttctaaccaagcttttaatgtcagtccttgggccagttaacaccagcctatcttaggttggctcccc

SEQ ID NO: 68771 - DNA, 814 bp, Homo sapiens
ctatattctcctgtaaccttcatcacaggactttagttgaaaagaaaaagggagatgcctcagaataaagctgtttttaatcttagtggtgtcttaactttatatagcacttcaaggaataaaatcactatgttaaatgatctatatgatagaataacaggtaatattaatttttacaaaatataaaatatatttgttaaattaaaatgttctaattagtttgaatggaagcatagtgtaccggtcaagaccatgaacttagaacacagatacctgggtttaaatctcaaccagagccaagacctcactgtggggctgtgggccaattctttaattatgttgtgatgatcacctctgtttcctcaattacgagatgttaataagaacagtaggtatataagtgacaaatttaggtatcctgtgtttctggatacctcaaatatgtatctatgttttacctcatgtagattttaaattatttacagaaaattttgatgaatcaaactgtgcccaacgttagtttgcacatactttgtgtctaacaaataacaattgagtgcttgattttgaaatttaaaaaagctaaatttattattaattttgtcatacaaattttgtgctgatcatgatagcagagtttggctaattgggaaaatattctttaaaattataagggagatgttcttggtagccagccactcccgaacatacttsttataaacttccaggaaattctgctatgactgttgcaattaagggtgtataataaagaactacattggcagagtatcccatatgtctttgtcttggtctc

SEQ ID NO: 68772 - DNA, 750 bp, Homo sapiens
cttctaggcaaagagaggaagttatctacctcagttacattctgatatttctcctccttctagaacacttctccaagagaggagagtatggcctagcagttggtggtgtatcttaagcaaaaaggaaaaaaacaaactatatattgttcaatctgttagcactgtgttgctcagaaaaatgaaagttaatattaaatggtaaccgtaactaaatccaacttcaagtttcaattgttcatgccctccatgagataggcaagatattatgtaaggtgctttcacagggatcataaacttaagtaacttctgggtccaggtagtataagccagacttttaagacaaggggaagtaatggggactgtggtagaccaaagaaggcatatttacctttaagatatttcaaaataggccaacgccgtggctcacgcctgtaattccagcattttggggggccgaggtgggcggatcacctgaggtgaagagttcaagatcagcctggccmacatggtaaaaccccctcgctactgaaaacacaaaaattaactgggcgcgatggtgggcactcgtaatcccaactactcaggaggctgaggcaggagagtcgcttgaactgggaggcagaggttgcagtgagttgagatcacgccactgcactccaggctgggccacagagcgagactgtctcaaaaaaaaaaaaaaaaaaaaaaagatattttaaaataactcttgttagtatgaatttggatccc

SEQ ID NO: 68773 - DNA, 723 bp, Homo sapiens
ttgtatttttagtagagacggagtttcaccggtttagccaggatggtctcggtctcctgacctcgtgatccacccgcctcggcctcccaaagtgctgggattacaggcatgagccaccgcacccggccattttttttctatttcacctacaattgacttgagaaaatatgctctgattttgaattcacttgtttcttttctattgtaattttttttttttttttttttttttttttttttgctacagagtttcactcttgttgtccaggctggagtgcaatggtgtgatcttggctcaccacaacctcagcctcccaggttcaagcgattctcctgcctcagcctcctgggtagcttggactacaggcgcatgtcaccacggctggctaattttgtgtttttagtacagaaggggtttctccatgttggccaggctggtctcgaactcccgacctcagtcgatctgcctacctcggcctcccaaagtgctgggattataggcgtgagccaccgcacctggccatattgtaaatttaaattataattgtatttagaaatagaatgtatattatgaatccatttgtagagaagttatttatttatttaattwattaattaatttatttatttatttattttgagacagggtctcattctgcagtcaaggctggagtatagtggcacaatcatggctcactgcagccttgaactcctgggctcaag

SEQ ID NO: 68774 - DNA, 723 bp, Homo sapiens
ttgtatttttagtagagacggagtttcaccggtttagccaggatggtctcggtctcctgacctcgtgatccacccgcctcggcctcccaaagtgctgggattacaggcatgagccaccgcacccggccattttttttctatttcacctacaattgacttgagaaaatatgctctgattttgaattcacttgtttcttttctattgtaattttttttttttttttttttttttttttttttgctacagagtttcactcttgttgtccaggctggagtgcaatggtgtgatcttggctcaccacaacctcagcctcccaggttcaagcgattctcctgcctcagcctcctgggtagcttggactacaggcgcatgtcaccacggctggctaattttgtgtttttagtacagaaggggtttctccatgttggccaggctggtctcgaactcccgacctcagtcgatctgcctacctcggcctcccaaagtgctgggattataggcgtgagccaccgcacctggccatattgtaaatttaaattataattgtatttagaaatagaatgtatattatgaatccatttgtagagaagttatttatttatttaattaattwattaatttatttatttatttattttgagacagggtctcattctgcagtcaaggctggagtatagtggcacaatcatggctcactgcagccttgaactcctgggctcaag

SEQ ID NO: 68775 - DNA, 723 bp, Homo sapiens
ttgtatttttagtagagacggagtttcaccggtttagccaggatggtctcggtctcctgacctcgtgatccacccgcctcggcctcccaaagtgctgggattacaggcatgagccaccgcacccggccattttttttctatttcacctacaattgacttgagaaaatatgctctgattttgaattcacttgtttcttttctattgtaattttttttttttttttttttttttttttttttgctacagagtttcactcttgttgtccaggctggagtgcaatggtgtgatcttggctcaccacaacctcagcctcccaggttcaagcgattctcctgcctcagcctcctgggtagcttggactacaggcgcatgtcaccacggctggctaattttgtgtttttagtacagaaggggtttctccatgttggccaggctggtctcgaactcccgacctcagtcgatctgcctacctcggcctcccaaagtgctgggattataggcgtgagccaccgcacctggccatattgtaaatttaaattataattgtatttagaaatagaatgtatattatgaatccatttgtagagaagttatttatttatttaattaattaattwatttatttatttatttattttgagacagggtctcattctgcagtcaaggctggagtatagtggcacaatcatggctcactgcagccttgaactcctgggctcaag

SEQ ID NO: 68776 - DNA, 571 bp, Homo sapiens
tatcatgakgctatgttggagaattatgggacttctttaacgcaatgttccaaagtgaacatcattgctatttctagtttctatatctttgctgttgtgctacataggcaaggttgttagcatatattttaatattaataaactgcttagcttacatttgtaatgggtacagtgtcaagcactgtagttcagagcacttaaaatatcactgattgattcacaaatgctagcaaatttctgtcttgcatgtagtatccgtgtgtgtgtgtaaacaaatcagatgccatatttttattatttttcttaagtttggctaagagtcttcccccttttaaatattattctcatatgaattgcctgagacttctcttagaggaaaaaagtatcatgtttgttcactgcggaacattctgttttcacattttgagcttaagaaaaaaagtactaaaaataatttgaaactacacatttgacaggggactaatattcagaatttacaaggaactcaaacagttcaaaaataaaaacaacaatgaaaacaacaccattaaaaagtgggcaaaggacctga

SEQ ID NO: 68777 - DNA, 571 bp, Homo sapiens
tatcatgatgctatgttggagaattatgggacttctttaacgcaatgttccaaagtgaacatcattgctatttctagtttctatatctttgctgttgtgctacataggcaaggttgttagcatatattttaatattaataaactgcttagcttacatttgtaatgggtacagtgtsaagcactgtagttcagagcacttaaaatatcactgattgattcacaaatgctagcaaatttctgtcttgcatgtagtatccgtgtgtgtgtgtaaacaaatcagatgccatatttttattatttttcttaagtttggctaagagtcttcccccttttaaatattattctcatatgaattgcctgagacttctcttagaggaaaaaagtatcatgtttgttcactgcggaacattctgttttcacattttgagcttaagaaaaaaagtactaaaaataatttgaaactacacatttgacaggggactaatattcagaatttacaaggaactcaaacagttcaaaaataaaaacaacaatgaaaacaacaccattaaaaagtgggcaaaggacctga

SEQ ID NO: 68778 - DNA, 903 bp, Homo sapiens
tttatattttttgcagaattaaaaaatatcagtattatcttgaacttagtaaaataaatgagcctattcacagatagcagtgtttaatgcagtataattatatggataattagaataacaatatggtacacaggamagacctaggaattcttgttgaatagtcagaaccatagaagtgagctgtagttgacacaggatgtaatgtatatatagtgtaaaaaggaaaaataagaaaaatttctataatagctaatgttagtttctgaatattatgaaatgacaacatacaacatatatccaactgaacaatgcctagagatgaattttagtaataaagttcctgttaaatgacattaccataaaggaaaaataatctatagtgttcataaagctcataattcatttaatgtttcctttatgaagtgtagcctgctagaggctttcagtccagtaaaaaatgacacctattattatatttgttattttgcatttgataaaatgttcatttacagctatatttctgcctactataagtgagtgatgagttcatactataaagtttaaaaaaccaagacttatttccataccatgacagtgaaatcaaagttttcccctctaaataacagattatgatatatgaaatatactaaagcccagtaagtcaggattcaaattcatgactgtttttttttcagctgtaagttagtttaccttcacattccatctagcaaattgaggtttatagctgtgtgccctagaacagaatattatgtattttatttatttatttattgagacagagtctgtcacccgggctggagtgcagtggcacaatcacggctcactgcagcctcaacttcctgggctccagcaatcctcccacctcagcctcccaagtagctg

SEQ ID NO: 68779 - DNA, 903 bp, Homo sapiens
tttatattttttgcagaattaaaaaatatcagtattatcttgaacttagtaaaataaatgagcctattcacagatagcagtgtttaatgcagtataattatatggataattagaataacaatatggtacacaggaaagacctaggaattcttgttgaatagtcagaaccatagaagtgagctgtagttgacacaggatgtaaygtatatatagtgtaaaaaggaaaaataagaaaaatttctataatagctaatgttagtttctgaatattatgaaatgacaacatacaacatatatccaactgaacaatgcctagagatgaattttagtaataaagttcctgttaaatgacattaccataaaggaaaaataatctatagtgttcataaagctcataattcatttaatgtttcctttatgaagtgtagcctgctagaggctttcagtccagtaaaaaatgacacctattattatatttgttattttgcatttgataaaatgttcatttacagctatatttctgcctactataagtgagtgatgagttcatactataaagtttaaaaaaccaagacttatttccataccatgacagtgaaatcaaagttttcccctctaaataacagattatgatatatgaaatatactaaagcccagtaagtcaggattcaaattcatgactgtttttttttcagctgtaagttagtttaccttcacattccatctagcaaattgaggtttatagctgtgtgccctagaacagaatattatgtattttatttatttatttattgagacagagtctgtcacccgggctggagtgcagtggcacaatcacggctcactgcagcctcaacttcctgggctccagcaatcctcccacctcagcctcccaagtagctg

SEQ ID NO: 68780 - DNA, 903 bp, Homo sapiens
tttatattttttgcagaattaaaaaatatcagtattatcttgaacttagtaaaataaatgagcctattcacagatagcagtgtttaatgcagtataattatatggataattagaataacaatatggtacacaggaaagacctaggaattcttgttgaatagtcagaaccatagaagtgagctgtagttgacacaggatgtaatgtatatatrgtgtaaaaaggaaaaataagaaaaatttctataatagctaatgttagtttctgaatattatgaaatgacaacatacaacatatatccaactgaacaatgcctagagatgaattttagtaataaagttcctgttaaatgacattaccataaaggaaaaataatctatagtgttcataaagctcataattcatttaatgtttcctttatgaagtgtagcctgctagaggctttcagtccagtaaaaaatgacacctattattatatttgttattttgcatttgataaaatgttcatttacagctatatttctgcctactataagtgagtgatgagttcatactataaagtttaaaaaaccaagacttatttccataccatgacagtgaaatcaaagttttcccctctaaataacagattatgatatatgaaatatactaaagcccagtaagtcaggattcaaattcatgactgtttttttttcagctgtaagttagtttaccttcacattccatctagcaaattgaggtttatagctgtgtgccctagaacagaatattatgtattttatttatttatttattgagacagagtctgtcacccgggctggagtgcagtggcacaatcacggctcactgcagcctcaacttcctgggctccagcaatcctcccacctcagcctcccaagtagctg

SEQ ID NO: 68781 - DNA, 2197 bp, Homo sapiens
actacacatagaaagatggatagatgagggagtgatggggaagagagagaaaagagcaaatgacaaagcaaatgggtgaataaataataggggaatctgtgtataggtatttgggtgtcatttgtattatttttattttcaacaatttttcaagtttggaattaaactatttaatttgaaatttttagggtaaccacagtaacagaagtggaatgacggtttccactaagagtcttcagacacagtgaggcttgagctgggtcaccaaggagacaaagcaggaaaaggcttgacagttgtgacaatgggctgtgctatttgaagtatgtgacacagaatatagcagtccccttgctctgaacttccctttcatttggtgcccttgacatcaagatgaagaaggctccaaaacgagtttaaacagagattaaatgtgaaaacaaggaggctgtacactgatgtacctccattaacaaatcaataaagagtcctctcctttttgatatccctggaagttatgctgttatgccttgctgaacatgaaagataaaatcaaacttacattgtataagaagacaaaaattcccatctgataatgcctctacacatattgcaaaggatgtaacatgtgttagagaattcttttttcaatcactgaaacataatccagtttttaaaaacagtatgttttagatgtctcattcaccacatactaatatcaactattaatatgtgcctgccttggtcgcttacattttagaagatttttttccagttttattttataaaatataggaaaaatatcactaacactagagaagcataacaaactaaaatgtacactcttggataactcaaggatatttttaaacatgctaccactatgttttgaatccactagaaacacagatttttgtacatggcctcatttttctgtttaacaaaatgtctattctayaatcctgtttaagaggaaaaacctaacaggaaggttgatccgatagtcaacagctcacttcagaaagccaataataattagtctaccaaaaaatatggatgaaaacacttagtgatttgtggtcttttaaaaataattaattataaattgttgagacacctggcttcttttttaaaaaatcctcgtgctgctttcaactgagcacttaacgctataaaaattaaatatttaatgtctattttatttgtagtattacagctggaatccattttgcaaacatgtttgtttcaccagtcatgcatacagatagagctttactattttcaggtgtctgcgctctctggttcctgcctctcagcagcattttgctgtgggcctgccctggcatgttccaccctacaactgattcctctaggtaatttccaagcattagaatttgcaaaaccatcaacgccccatattgtggcctttctaatagcattcttcattcattaaatattctgggttgttaactatgatacacatagttatagacaataatctgtaccaggaggaaaccctcaactgcagaacttcaacccctagaaagcgtagacaaatatgttaagagtaacctatgttataaatagtttgctgtctcctgaacactcagtgtattagagacaaggcctcttgattgagatagaaatagaccctcaaaatgggacttagagaaagtgtctatcactagaaattactttgcccccattgtaataattccaggagaccccagggaagatatgtgatggtgcaaccagctttggaatattccacttacaatttggaattctatctccagttttgtactttttgagcaacagccaggagtgatggaaaggtgagggggtgtcccattttgaacttagacttctgcagggttttagatgtattacatgtaagtggaaagagataacatatacatatacacacaaacacacacacacatacatatatacatacaatgatacaatgtcaagtttacttagcaaagtttgaagaacttttgaaaatggaggctacacaggcaggacctaacgcagcacgtctcagtatgactgtcctaatgggacaaatttcagggaacatctcagtacacataaggatcttccagagctaaggaaatcaccaaactgttgttacacagcagaacttttatacctactgtttatatttacatcctaagtggccaacgctcccaat

SEQ ID NO: 68782 - DNA, 996 bp, Homo sapiens
caatgtaaaatgcagttttaagattgcattttaacttgagagggtcgtgaagctcttgccttcccattaagcccccaggaataatctccaggtgtgtcttctggcactccacgctgcctgccttctgatgcttcctatgaattgttggaaccagccatatccttctcacttctgccacaaaaactcctggtggttttgtactttgccaccttgtttaggtttcataggygattggttcaaggcagtgcctatctgcacttccctgtaactctcactttttttctttaatgtggcctgcatatgaatatatcaacactttttaaattaaaggctaatgagctcactgcacagcctgagtacgtttggtatttggccttcttggagatgctctgcatgtgtcaaatgttattttcagaaaactggctaaacttttaatgggacctgttgttaaatcaccctgtgtttcccccataaacacgaatgttaatttacatttttaacctaactgaatgagttgtttttcttaaattcctttgcagtttgaaggaacataccttgcaacaggaaagctttaagaaagaggacgaaaaggctttataatctttcttgaagagaccctgttgctaaaaagaaaaaaaaaaagaaagtcaaaataaacacatagaagagagagaggctgcatttgtctggtgtgccctgtactttcttatactcatgtttgatatttgctatctattgtgggacatctttttgtatgctttgctgaggtagaattcacatactgtgaaagttactcacttttggtgaagagttcgatgaattttggtaacgacatacagttgcataatctacaccacagtcacagaacagtcttatctccctgaaaagttggctcatgttccttgatacccagtccccagtcccgaccccaggctccaggccacctcggacctgctgtcactctacttttttctcttctggaatatagtacagtag

SEQ ID NO: 68783 - DNA, 1917 bp, Homo sapiens
ataacctattgccctttaataatattttatttagggaatactaatattcaggaacattatagcagaaattattttaatacctttgaccattaaaaataagattttagtgatatttccactctcacgttttcaaatggtaatctgtaatttatgtagacactctgccctcaaagagggagcctaaccctggctcctgacatgcggactgtgcattgtgacgcccttccacatgtacagcatgaaaggaggaaagagcagctgtatggtagagaaacctgacaaacactccaggtgatcacgccaacactgacgttggcgttacagtgctataatgtgccggaagtgacactctaccctgtggccctcctctcccaaacccttaaagttagtctaatcatgagcgaaaacagcagacaaatcccagtcaaggagaattctgcaaaatacctgattgttattcctcaaacttgtcaagatcatcaaaaacagagtcaaagacactgtcacagccaagaggagcctaaggagacacagtgactaaaggtgatgagacatcctgggtgggatcctgggacggaaaagggacattaggtgaaaacgcagaaaatagaaataaactatagactttagttaactttttaaaaagataatcagcaagaggaaagaatgtcattcagtggaaccatttaacctcagcactatctttctgcagtagttggggatacattttaagtctgattgcaaataacacagaagtaaaatgagtcacagcctaccttctccctccttcccctcatctcttactcttctttttctctttgtagaaatgattcagctgstttacttttgattaaagagcttaggttctcttacctatggaattcaatattagataaattgttgattttcagatcactgttttcatttaaaatgggctagaaaatgcaaactataagtgtctattatttgttatttagccctataaggcatatagcagttgctaccctagggtgcaaagcaatgtgatcagttggtttttgagttgaaaaattacatggtctatctcattaagtaaagccaggtgtgtctcagagaaactcactgtaattagtcaaagacacagaactgcagatggaaagaagtttataaagtatataataattaaggtatagatgaggaataattgggacttcttggattattacttagagcttgtttgggagttgtattattttctaagaaggtgggaaagcagtttttgtgtgtgaattattcttaccttatttttaatagcttcattggtgtcttccttgcagcttattatagagagaatgtgaatctgtggtaagcattagatttattctccatctagcatgacccagatggtagttttggaatgcattcctgcccaaactactcggagtcactgagatttatgatttgtgaactcataaattggataaataaaactcatcttctacagcttcagtgtatgttattttctagagttcatcgtgtctggaaacttgatttcagttaagctatgtattaagtacttggaatttctgagtctattgcattgttgtttctaggagagtggggaactttttttggtgaacagagcttaccttcttgtgactggtcattgtcatttctacatgttatcaggaggccctagggccttgctggaacaagtacttctgagttgacagaaattggattgctataaactctgctttcaagagccttaccatccagtgaagacacatgattacctgcagtatatctaagtctctttaattgtgtgaaattcatgggtgaggtttaaggtgggtgcactgggagagtgaggcttggtgcttggctatgcccgaatccagagaggcttttataaagaaaaatcatgagcccagatca

SEQ ID NO: 68784 - DNA, 1917 bp, Homo sapiens
ataacctattgccctttaataatattttatttagggaatactaatattcaggaacattatagcagaaattattttaatacctttgaccattaaaaataagattttagtgatatttccactctcacgttttcaaatggtaatctgtaatttatgtagacactctgccctcaaagagggagcctaaccctggctcctgacatgcggactgtgcattgtgacgcccttccacatgtacagcatgaaaggaggaaagagcagctgtatggtagagaaacctgacaaacactccaggtgatcacgccaacactgacgttggcgttacagtgctataatgtgccggaagtgacactctaccctgtggccctcctctcccaaacccttaaagttagtctaatcatgagcgaaaacagcagacaaatcccagtcaaggagaattctgcaaaatacctgattgttattcctcaaacttgtcaagatcatcaaaaacagagtcaaagacactgtcacagccaagaggagcctaaggagacacagtgactaaaggtgatgagacatcctgggtgggatcctgggacggaaaagggacattaggtgaaaacgcagaaaatagaaataaactatagactttagttaactttttaaaaagataatcagcaagaggaaagaatgtcattcagtggaaccatttaacctcagcactatctttctgcagtagttggggatacattttaagtctgattgcaaataacacagaagtaaaatgagtcacagcctaccttctccctccttcccctcatctcttactcttctttttctctttgtagaaatgattcagctgctttacttttgattaaagagcttakgttctcttacctatggaattcaatattagataaattgttgattttcagatcactgttttcatttaaaatgggctagaaaatgcaaactataagtgtctattatttgttatttagccctataaggcatatagcagttgctaccctagggtgcaaagcaatgtgatcagttggtttttgagttgaaaaattacatggtctatctcattaagtaaagccaggtgtgtctcagagaaactcactgtaattagtcaaagacacagaactgcagatggaaagaagtttataaagtatataataattaaggtatagatgaggaataattgggacttcttggattattacttagagcttgtttgggagttgtattattttctaagaaggtgggaaagcagtttttgtgtgtgaattattcttaccttatttttaatagcttcattggtgtcttccttgcagcttattatagagagaatgtgaatctgtggtaagcattagatttattctccatctagcatgacccagatggtagttttggaatgcattcctgcccaaactactcggagtcactgagatttatgatttgtgaactcataaattggataaataaaactcatcttctacagcttcagtgtatgttattttctagagttcatcgtgtctggaaacttgatttcagttaagctatgtattaagtacttggaatttctgagtctattgcattgttgtttctaggagagtggggaactttttttggtgaacagagcttaccttcttgtgactggtcattgtcatttctacatgttatcaggaggccctagggccttgctggaacaagtacttctgagttgacagaaattggattgctataaactctgctttcaagagccttaccatccagtgaagacacatgattacctgcagtatatctaagtctctttaattgtgtgaaattcatgggtgaggtttaaggtgggtgcactgggagagtgaggcttggtgcttggctatgcccgaatccagagaggcttttataaagaaaaatcatgagcccagatca

SEQ ID NO: 68785 - DNA, 711 bp, Homo sapiens
ggatccagtggaaagcagccccatgtgagatgaaattatcacaggggcgggatgtgccagaggggaagcaggcagcccaggcatgtgtgcgtggatgtggagcccctttctgaagtgagtttggttttattttgggcaggcctcataggctgtacatctggcaggagatgagaaaggaaagactggctcttgttttaaaaaaaaaaaaactaagtaaaaaataattatttaaaaatgactcaaaagaaataattatgagactagttatgatagagtaaaatgatttgttcattttccagattttatgtaacatggatatactatatttaaagatttatttttttaataacattactaatgataggcaaggctcatatagtacataatacatgccaggcgctttgtagaaatgaactcatgtagtcctcctcacagctctataaagttagcataattactgtctccaccctagaggtgagggagagaggctcacgcaagtcacatatctcgccttgaatcacccaagtggtaagcagtggagccaagaactgagctgggcaatctggccccaragtctgttcgctgacccccatgctacaccccctctcaaaaacagagacttggacaccagatccaaattcaaacaagacagttccctgcttttatcaacctaaagcattactaatgggttgctccggttcacaggtgtgg

SEQ ID NO: 68786 - DNA, 711 bp, Homo sapiens
ggatccagtggaaagcagccccatgtgagatgaaattatcacaggggcgggatgtgccagaggggaagcaggcagcccaggcatgtgtgcgtggatgtggagcccctttctgaagtgagtttggttttattttgggcaggcctcataggctgtacatctggcaggagatgagaaaggaaagactggctcttgttttaaaaaaaaaaaaactaagtaaaaaataattatttaaaaatgactcaaaagaaataattatgagactagttatgatagagtaaaatgatttgttcattttccagattttatgtaacatggatatactatatttaaagatttatttttttaataacattactaatgataggcaaggctcatatagtacataatacatgccaggcgctttgtagaaatgaactcatgtagtcctcctcacagctctataaagttagcataattactgtctccaccctagaggtgagggagagaggctcacgcaagtcacatatctcgccttgaatcacccaagtggtaagcagtggagccaagaactgagctgggcaatctggccccagagtctgttcgctgacccccatgctacaccccctctyaaaaacagagacttggacaccagatccaaattcaaacaagacagttccctgcttttatcaacctaaagcattactaatgggttgctccggttcacaggtgtgg

SEQ ID NO: 68787 - DNA, 738 bp, Homo sapiens
ggccttccttgtgcacaacactggcgtgcattctttcttctgcctgcctctgttattacattggttttaaagaaaccaaaatccttggtgagctgcctgtaggcatragggaaggaaggatgagtatttctgactttgctttttgaaaagcttccaaatgtggagcaaagaacaggagacaaacaaggagtggtggtggttcttgcatgtcactttgaatgtaactttgaagccaggttgtcctagatggcttatggttataggacagttgtcttaaaaaacaaaaactaaaactacagcacatagacaccaacacagatgagcaaatgctaaattgtcatgtaatgcaagtgactgatcagatgtatagcactggtgaaaggttcctgctgttttgccagcctcttgaaggaatctcagtagacttacaaattcacgtttatgtttcatcatttaacaatggttctttattttacctttttaaggacctaataaataagtcagacaatgacacaagatttggagagctgaaacatttctaaattatattacgatcactactgcttgaggtatttatttgcattttatggggaatttcttaagcaacctgaaattttttgttttgtttcgtttcattttgttttgagtcagtgtctttctttgtcgcccaggctggagtgcaacctggagtgccacaattatagctgactgcagctttgaattcctgggctcaaggga

SEQ ID NO: 68788 - DNA, 1841 bp, Homo sapiens
caaaaattagccgggcgtggtggcaggcatctgtagtctcagttgctgaggcaggagaatcacttgaacccgggaggtggaggttacagtgagccaagatggcaccactgcactggcctgggtgacagaggaagactctgtctcataaaataaataaataaaataaacaattaaatccctcaaaagaaagagcccagaaacaggcccaagagtaaaaagaatttgcaaacactaaaaggtggcattttgaaccagtgtgaaaatagatttaataactagcagtagtgaggtatatcatctgaggaaaaaaaaattacctcacaacatacataaaatccagagtatagagctaaatgactggtaagacaaaacaaaacaaaaacctgtaagtagaatttttaacatcatcttcaagtggagaaaatattcttgaaacacaaaatccaaaagttacagaaggaacattatgcacagacatggaaaagtcttggcaacataaagacaaagaaagaatatctataatatattgaagagtccctaaaaacctgtaagaaaaagacaaataacccaatagtaaaactggtaaagattatgagcaagcagttcaccacaaggagagatgcatagtagccttcaattgaaaaagcaaattaaaataattttaagatatctttattcatatatataacaaaaataaaacaatgttctatcaatccccctaaaaaaactgggaaaatatagaaagagctttaaacctgctaacatccctggctctgtttatcaccaaaagaaaaagcaacacctatcatgccattagaacactttattatggaaagaggaaaaacaaaaccaaaaaaaaacacaggtagaaaagcaatcactgaaccttactgttagaagaaaactaagcttatcaggtctgaccactcactaacacaagaaagtaccactgacaatgacctatatgcagcatttactcaaactcgagacaaggtagttcaataaagcacttctaaacaactgttaaaaattacttctttataatcttcaaattgcttaaaaatgataaacatctttttaacaaactttaaaaattttgtcaggaatcaaaggcaactttcagtgtctgcatttattaacgttcaccttttaagacatcatctaatcattcttctaagatatctacctgtctccatgatttctctcttactggtagggccctggaagtatcagaaatacctttcagaaccttgagatataattcttctagacctagagacatgaactcatgtaaagctacatgcctctattttcttattatttatttgtttttaataatataaacttcacactatgatctcttaggacaaaaaatgacaggggaaagcacgaacacagtccctcactactacaaattctgcatttggggaaatcacaggggtcagcacaaccaaagtgcaatggatgagcctcactctgagaaccaccttcatgatcatggtatctccccagccagataagtgtattgtctattttctttttgtttgttctagtttttctaatttacagagcaacttcttgtttcagaaatgagaagataaaaaggagataaactatgtgttctgtgtcacctattatttcaagtttcctgaactayagattcatgacttcttactctagctataaatttatctctaagaatcatcaatattgtttttccttttctgaaacatcggtcattgtaaaaatcctattcatcttctgacaacatcctaagagcttcacaaccctcttttctacttgacatttgttatgagtttctccttctgacttacagtgca

SEQ ID NO: 68789 - DNA, 1841 bp, Homo sapiens
caaaaattagccgggcgtggtggcaggcatctgtagtctcagttgctgaggcaggagaatcacttgaacccgggaggtggaggttacagtgagccaagatggcaccactgcactggcctgggtgacagaggaagactctgtctcataaaataaataaataaaataaacaattaaatccctcaaaagaaagagcccagaaacaggcccaagagtaaaaagaatttgcaaacactaaaaggtggcattttgaaccagtgtgaaaatagatttaataactagcagtagtgaggtatatcatctgaggaaaaaaaaattacctcacaacatacataaaatccagagtatagagctaaatgactggtaagacaaaacaaaacaaaaacctgtaagtagaatttttaacatcatcttcaagtggagaaaatattcttgaaacacaaaatccaaaagttacagaaggaacattatgcacagacatggaaaagtcttggcaacataaagacaaagaaagaatatctataatatattgaagagtccctaaaaacctgtaagaaaaagacaaataacccaatagtaaaactggtaaagattatgagcaagcagttcaccacaaggagagatgcatagtagccttcaattgaaaaagcaaattaaaataattttaagatatctttattcatatatataacaaaaataaaacaatgttctatcaatccccctaaaaaaactgggaaaatatagaaagagctttaaacctgctaacatccctggctctgtttatcaccaaaagaaaaagcaacacctatcatgccattagaacactttattatggaaagaggaaaaacaaaaccaaaaaaaaacacaggtagaaaagcaatcactgaaccttactgttagaagaaaactaagcttatcaggtctgaccactcactaacacaagaaagtaccactgacaatgacctatatgcagcatttactcaaactcgagacaaggtagttcaataaagcacttctaaacaactgttaaaaattacttctttataatcttcaaattgcttaaaaatgataaacatctttttaacaaactttaaaaattttgtcaggaatcaaaggcaactttcagtgtctgcatttattaacgttcaccttttaagacatcatctaatcattcttctaagatatctacctgtctccatgatttctctcttactggtagggccctggaagtatcagaaatacctttcagaaccttgagatataattcttctagacctagagacatgaactcatgtaaagctacatgcctctattttcttattatttatttgtttttaataatataaacttcacactatgatctcttaggacaaaaaatgacaggggaaagcacgaacacagtccctcactactacaaattctgcatttggggaaatcacaggggtcagcacaaccaaagtgcaatggatgagcctcactctgagaaccaccttcatgatcatggtatctccccagccagataagtgtattgtctattttctttttgtttgttctagtttttctaatttacagagcaacttcttgtttcagaaatgagaagataaaaaggagataaactatgtgttctgtgtcacctattatttcaagtttcctgaactacagattcatgacttcttactctagctataaatttatctctaagaatcatcaatattgtttttccttttctgaaacatcggtcattgtaaaaatcctattcatcttctgacaacatcctaagagcttcacaaccctcttttctacttgacatttgttatgagtttctccttctgacttayagtgca

SEQ ID NO: 68790 - DNA, 644 bp, Homo sapiens
agaggctcagccatgtgagtttcctgtgagagggaaaaggcaggagcatagaggccactgaagttgttctcaaaagccccargatacctttggtctcagtggaggcatccaggacacagctgtcttcacttcttcactcagtcatttagaaattgttcagtgagcacccaccctgtataattcactgctgctgcagctgagctcaacatggtgtcatctaggggaggagcttgaagaggttgtgttaaggaagaaccacgagaggagtgcccagttggatgtgaccccggatgtgtaggcatccaggaggctgaaagaaggctgacccagggcctgatcacttgacaatggacatgctacctcacagagcataacaccacaactaacacatcctgagccctcaatcaatgttgtgcaataaaggaataaacctggatgtctttcctgtaaccaaacattggactattcatcaactgtgcactttttgttccccaacgagcacaagggtttggactgcaccatccccactctttcttgactctctctgtacaccataaatgcatggttcagggtgattttgctgggcaagggtgatggtttgactatttgtgtccctccaaaattcatgttgacacttaatgccc

SEQ ID NO: 68791 - DNA, 644 bp, Homo sapiens
agaggctcagccatgtgagtttcctgtgagagggaaaaggcaggagcatagaggccactgaagttgttctcaaaagccccaagatacctttggtctcagtggaggcatccaggacacagctgtcttcacttcttcactcagtcatttagaaattgttcagtgagcacccaccctgtataattcactgctgctgcagctgagctcaacatggtgtcatctaggggaggagcttgaagaggttgtgttaaggaagaaccacgagaggagtgcccagttggatgtgaccccggatgtgtaggcatccaggaggctgaaagaaggctgacccagggcctgatcacttgacaatggacatgctacctcacagagcataacaccacaactaacacatcctgagccctcaatcaatgttgtgcaataaaggaataaacctggatgtctttcctgtaaccaaacattggactattcatcarctgtgcactttttgttccccaacgagcacaagggtttggactgcaccatccccactctttcttgactctctctgtacaccataaatgcatggttcagggtgattttgctgggcaagggtgatggtttgactatttgtgtccctccaaaattcatgttgacacttaatgccc

SEQ ID NO: 68792 - DNA, 1243 bp, Homo sapiens
ggaatggtggcaaatttggctatttttctcagggttttgttcagcaccatttgctgccatgctaccagcatagtggtttgtgtggcctgtacatccagaatacctgggttcaaatcctgctccctgcctgtgtgatcttgagcaggtgatatgagctgcctgtgccaagttccgcatctgtaaagtgagggtggtaaaaggacctacctcgtagagttgctatgagaatgaagtaagttggcgggtgaaaaggtggtgaatattcgtattattgatgttattatcactgtaagcagcagtggcagcagctgccaagcctcacattccaacctgagaatttccaagagaaggcagatgatcttgtaaaactccaggaagtcacatctctgatttccagccctcctgtctacagagccaaacctttccgcagaactctccctgctaccataaaatgctgcctccacagagggaaccctccccaggcacaaggcagatggttgctccgttccatgtggcccctcactgcagtgcagtgatgatgtttgggctgagcaaaagacttcagtgctcagaggagaaggagcaggaggctttgccagcttccatttgcatgagaaaagaactgagaggagaggggagaagggggaagatgcttgcttcctccttccatcttggcattcacagagcaggctgcatttgaacactgccgtgctatgtacattggatccatgcaatgttacataagtatttcataagggacaaggtgactttgtgtttttttcacctgttcttctcctctgatcccagaagctgggaagtaggctggatgcagagaaaagagcattgttctyaagtctgcttcactgcttaaagactaagaaggaaaaaaaatagaaaggaaaacaagaatcattgtctcttttgttttctctttaaaatataaaaggaactctgaaaccaaagttcggatgacatcgtatgacattttcctttccacatggaaaaattttgaataaaagatctgttttctgggttgacacttctgggctctttcaatctccagtagcagcaaactgctgtcatttctggaaataaggatggcaagactcagggggttaatctgcctgattttgctctccaagggtgacagcgtaaagctctttggctctgcatccacagtaatagctgagggcagcgctgcccaacagaactttctgtggtgatggaagccttctctaatctg

SEQ ID NO: 68793 - DNA, 1243 bp, Homo sapiens
ggaatggtggcaaatttggctatttttctcagggttttgttcagcaccatttgctgccatgctaccagcatagtggtttgtgtggcctgtacatccagaatacctgggttcaaatcctgctccctgcctgtgtgatcttgagcaggtgatatgagctgcctgtgccaagttccgcatctgtaaagtgagggtggtaaaaggacctacctcgtagagttgctatgagaatgaagtaagttggcgggtgaaaaggtggtgaatattcgtattattgatgttattatcactgtaagcagcagtggcagcagctgccaagcctcacattccaacctgagaatttccaagagaaggcagatgatcttgtaaaactccaggaagtcacatctctgatttccagccctcctgtctacagagccaaacctttccgcagaactctccctgctaccataaaatgctgcctccacagagggaaccctccccaggcacaaggcagatggttgctccgttccatgtggcccctcactgcagtgcagtgatgatgtttgggctgagcaaaagacttcagtgctcagaggagaaggagcaggaggctttgccagcttccatttgcatgagaaaagaactgagaggagaggggagaagggggaagatgcttgcttcctccttccatcttggcattcacagagcaggctgcatttgaacactgccgtgctatgtacattggatccatgcaatgttacataagtatttcataagggacaaggtgactttgtgtttttttcacctgttcttctcctctgatcccagaagctgggaagtaggctggatgcagagaaaagagcattgttctcaagtctgcttcactgcttaaagactaagaaggaaaaaaaatagaaaggaaaacaagaatcattgtctcttttgttttctctttaaaatataaaaggaactctgaaaccaaagttcggatgacatcgtatgacattttcctttccacatggaaaaattttgaataaaagatctgttttctgggttgacacttctgggctctttcaatctccagtagcagcaaactgctgtcatttctggaaataaggatggcaagactcagggggttaatctgcctgattttgctctccaagggtgacagcrtaaagctctttggctctgcatccacagtaatagctgagggcagcgctgcccaacagaactttctgtggtgatggaagccttctctaatctg

SEQ ID NO: 68794 - DNA, 974 bp, Homo sapiens
atgtgtttggcaacaccgcgagccccttctccaggacggagctgggcctctgtgccttttgagttgttcctttgctcaatgagtgttccacagagaatgggacagaacctgctccctgagcacaagctgagggaggtgaattaaagtgcatttgcattcatgaggaaggatctgctcatccaggtgctctgtcctgtcgccgttagacgctccttggtccctcaaagagatgtcactctcacggccactgcattgcaccacctgtgagatacctttggaattgtggaaagttcagctagaaagttgtttctttttaatatttattcttttggtcccaaacctttaattaatgctcattttctaaaaatccccaaatttcataaaatgaaaaataaaaattgaaagagataagcattgttgataaatccttaatggatttattttggatataataattcacatttttttttaccagtgcagaatcatattatatttggtgatctacaatcagcttttcctccctcacttattgatatattgtggttacctttctaagtcagtacatatacatcttccgggttatttctgttataagtaaaaattttagccaagtgcacagagatcatacccatttaatcatcactaagatcaagaaacatatgaccagaagctcacctcaagcttctgacccctatcattcctcctgccagggtaactattctgattttgctcactctcagttacttttgccctgtttgcaaaattttataaatggaatcagatgttatgtacacttttatgtctgacttcttttgctaacattgtttataagatccattcaaatcatagtttgcttattctcattgctacatattattcagttttgtgaagataccacaatttatccatttttaggttgattgttttcagttttgcactgtttycactaggaacattctagtatgtgatttggt

SEQ ID NO: 68795 - DNA, 592 bp, Homo sapiens
ccattccagattgaggcaggggcggggattaggatgcagatgtcattggaattattctacctgccacacccacaatcaccaagcatgagactcttcagtattgtgttggacatggaaacaggtagtttataattttttaaaacattgcccaattccttagagttcaaaaggaaccaacaatctaaaccacttaaggaaagtggagtgatctcctctctgtttaagtaaggattcatctgtacttcctgtcagggcgtagggactcagagggctctcttacttccactacacccagagaggcccattgaggagactcctccctacccaagtggctacagtgctgtctgagtggatctggtggcaagcttgactacactgcagagactgctgtgtgctgggmatgagctctgtcctccatatgatcagctggctagaggcacctatattcaaattccatctggctcattgttttacctgtatgaaatacagaggtagaatgtgtattcctgtgttaataatctctgttaactgcatagcagcattattctaaaacttggttaattgaattaaaaagtatttcagatttacactg

SEQ ID NO: 68796 - DNA, 861 bp, Homo sapiens
tgatgctcaacaaatacctgttgagtggatgaatgaaggctgaatgaacgcacgcaggccagaaggcagggatatttttcatttactacaaaagcaaagaatgactttcaaaactaggttaggaactgttcagagttagagccactttctctaaaagtgtcgctgcccaaccccaaatcactcaatgctaaaggagtgtgyggcaacccagctgctgtttccttaccaggtcttgtgtcctggcagggaggactgagggaaccgagtttaggagtctctggactccggagggcatctttcaggcattcctctccaacctccaggggacagccagatccttggggctccggctgtcaggctttacaacagctctcaatgggtaaccttcccacctcagtcctgctccctcatccagggagaagtggtccctctgcactcaggccagcctcagccccactgcctgctccacacagtggcatctctgaggactgagaggcccctcctcccaggcgggcatgtgccctgtggtgcccagctcctccctgcaagctgcggctgttcctccaggcaggcctccgtctcctcatggtttcctcagtggctacccaaactaggccccagagtcttccactcacctctgcacatctctgtctccttccttggttccatccaggaactgagtcagctccctccctccccaaggggctgccatggcctcccctgtcctctgcgcttctcccacccaggctgactggcctggagcatcaggctccctgtgccttgctgccccaatgcaggctcttgcaaggggctgattggcaaacacagtagcatcctgagggaataagtcacttaatatgc

SEQ ID NO: 68797 - DNA, 861 bp, Homo sapiens
tgatgctcaacaaatacctgttgagtggatgaatgaaggctgaatgaacgcacgcaggccagaaggcagggatatttttcatttactacaaaagcaaagaatgactttcaaaactaggttaggaactgttcagagttagagccactttctctaaaagtgtcgctgcccaaccccaaatcactcaatgctaaaggagtgtgcggcaacccagctgctgtttccttaccaggtcttgtgtcctggcagggaggactgagggaaccgagtttaggagtctctggactccggagggcatctttcaggcattcctctccaacctccaggggacagccagatccttggggctccggctgtcaggctttacaacagctctcaatgggtaaccttcccacctcagtcctgctccctcatccagggagaagtggtccctctgcactcaggccagcctcagccccactgcytgctccacacagtggcatctctgaggactgagaggcccctcctcccaggcgggcatgtgccctgtggtgcccagctcctccctgcaagctgcggctgttcctccaggcaggcctccgtctcctcatggtttcctcagtggctacccaaactaggccccagagtcttccactcacctctgcacatctctgtctccttccttggttccatccaggaactgagtcagctccctccctccccaaggggctgccatggcctcccctgtcctctgcgcttctcccacccaggctgactggcctggagcatcaggctccctgtgccttgctgccccaatgcaggctcttgcaaggggctgattggcaaacacagtagcatcctgagggaataagtcacttaatatgc

SEQ ID NO: 68798 - DNA, 642 bp, Homo sapiens
attcacagacattccaattcagtaggtctggggcaagacccaagaatgtacatttccaacaagttcctgggtgatgctggtgctctcagtatggtaatcatactttgagaaccattggtctaagggaagcatggccactgcagtaatcgggatattgctttggctactttaggaagtttctgggtttttttgttgttttgttttgtttcgttttgttttttgagacagagtttyactctgttgcctaggttggagtgcagtggcgcaatcttggctcactgcaacctccgcctcctggattcaagcaattctcatgcctcagcctcccaagtagctgggattacaggtgcctgccaccatacctggctaatttttgtatttttagtagagacaggatttcaccatgttggccaggctggtctcgaactcccgacctcaggtgatccacccgccttggcctcccaaattgatgggattacagacataagccacagcacccgccactactttatttatttatttgtttatttatgagacagagtctcactgtgtcacctaagatggagtgcaatggcacaatcttggctcactgcaacctttatctctcaggttcaagcgattctcatgtctcagcttcttgag

SEQ ID NO: 68799 - DNA, 1231 bp, Homo sapiens
tgcatgactcattttatatcaacacatcaacaacgtacaatttccaatggacttatattagaaacaatttcagtatcacaaaaatacatacatgtgcatctgccacaaatggtaaatatgaagataagaggtgtgtgatttatagaaacaactgaacaagagtcttagaaaacacagtgtcaagacgtgggatatcttcaagttgctttgtcataaagaagcattattaaatgtggtataaacccaaaaaaaaaacaacagctaaagtctaaatagcaacttttgccattgaatatgattcatcttcgtttcatttgagtttgggtgctgctgaaaggacacctcaggagctttccctctctgatgcaggaggactgagtctaactggaggtgcctgggcagtgtgctcacaggcactgggatgctgaagatagtttcccatcaaacgattcatctgacagttttcttcttccccaaacaaagagaagtcaacagcttaaacacagatttcaggactcacccacattatccacgtcccaacaagcaaaggtaacgtatttccaratgattggcaggtccatattccatgttccaagtgagacaagaagggtgagcaaaaaagagagagaaaaaaatactttagacattgttcaacaactgatgctaccttatcccattctgagcacgagaatgacacttccctcctttctagaagccaccccactgccaatacagtgggagttaaggagaaagtttctgtagaaaaacagggtagataattcatgagacatccaaagtgatctctcatgaacattttcattaacagatgcaaataagagatatacacccaaaccacatttgaatatgcaatagatgtttccagaaagataacaggaaagatttgtataaacatacaggatcataaaaataaaacaagtctggactagaatggggatggggggacttctgcaaggtatagacttaggctgactcaaaataataatcagaaaatctagtataaagtgatttacacattccaacaagcatttgactaaaacaattctaattacacactcacaaatataaattataacccagtttagttgtgctaccagtcagaaccacagaatagaatttgcattcttcaaagaagataccaaaaagaaataagttattattatctttttatagaggcccaggaaaaataattaacatgtcattaaatttctag

SEQ ID NO: 68800 - DNA, 743 bp, Homo sapiens
atttaattcctgttttccagcatgttttttttcccctttccaactgtctcactggcttgcagatttcaacagtgagggtacaacctgaaaatgtcattccactgtagtccacagcttccagaatgctctgggaatcactgagaacatcatctagaatatctttgtcccttaaaataaatttgttcaataggtcaaagccatttgaaagaaagccttggctactaacactttcctatgcaagatgtttattagggatttgtctratatccaaggctgactcatttgtaaatgatacaaatctgaggataccagagtttctcaaactggcttatttgtgaacagttttctaagttttacgtttctgtgtcaataaaaatcttaaaaagaataaaactaccagatgcacaccatcgatatcagaatcattcaaagtacttgtgaatgatgcaaattttggggtccagccttaactgagtcggaagctctgggctggggtccagggagcagccatttttaacaagttccccaggtgattataaatcacaccaaatcttaagaaccattgatctaggcgaccagtccatatcaaaaatcccacaggtgacaaagtgcgttcagatagatgtttcatagaagttggaaccgaaaacgggtggaaaaacagcccactcagacatatacgagagctgaactgaagataatctacactacacgattcacagtttgcaggagttattgcttgg

SEQ ID NO: 68801 - DNA, 1306 bp, Homo sapiens
tatcattatccctatttaatagataagaaaactaaccttttatcctacttccttaaccttttaaattttacataatttcctagggccacagaagttacaagtkatggaccagccataaagaaacccaaggccgggcgccgtggctgacgcctgtaatcccagcactttgggaggctgagatgggcagatcgcaaagtcaggagatcgagaccagcctggctaacacagtgaaaccccgcctccactaaaatacaaaaaattagcaaggcgtggtggcgggcgcctgtagtcccagctccttgggaggctgaggcaggagaatggcatgaacctgggaggcggagctggcagtgagccgagatctcgccactgcactccagcctgggtgacagagcgagactccgtctcaaaaaaaagaaaaaagaaagaaaaaaagaaacccaagcattctgagtccaaggccaggtttctttgctctatgctaaacattttcttcaaccttagtactatttatttatattatatcttctttccaggttaaacgctcatttgacaatagtgaagaagctggaaagtcattaagacaaaagtcgttaagacagtgtgtctcaaaatgtggtcctgggaccacctggatcagatttcaccaaagtacttgtcgggacataaggaggtctggatccaactgcagatctattagatgataatccgtggattggtccccaaaaattcctttttaataaactcatcaggtaattctgttgtataaccactgtgtctcattctttgcaaacctctactggtatctggagtttcatactcaaaaaattctgcattctcatagagggccatcttttggattacgggttttgtggtggaatgtcacaaaattctacactcatcctgagggtcatctttggatcttacaattactaagacatgtccctaaaaacaagcaaagaggacaacagcatatactactgaaatgagaaaacatgtactatgtgtatactctcattagactggttctagatgtcttcaaacacagatctcatttcaacctggaggtaggcagcatcgtcatctgttcactctggggaaccttgcctagagaaatagagtactcctcccacagttacctagctcaaggttagcagatgtttccatctgtatcttctctagctctttgtattttctttattctgcaacaaggattccccaccactgggccaaggacagtggtggtgagcggtgggtgagtcagcattaccacctgatctccgcctcctgtcagatcagaagtggc

SEQ ID NO: 68802 - DNA, 1306 bp, Homo sapiens
tatcattatccctatttaatagataagaaaactaaccttttatcctacttccttaaccttttaaattttacataatttcctagggccacagaagttacaagtgatggaccagccataaagaaacccaaggccgggcgccgtggctgacgcctgtaatcccagcactttgggaggctgagatgggcagatcgcaaagtcaggagatcgagaccagcctggctaacacagtgaaaccccgyctccactaaaatacaaaaaattagcaaggcgtggtggcgggcgcctgtagtcccagctccttgggaggctgaggcaggagaatggcatgaacctgggaggcggagctggcagtgagccgagatctcgccactgcactccagcctgggtgacagagcgagactccgtctcaaaaaaaagaaaaaagaaagaaaaaaagaaacccaagcattctgagtccaaggccaggtttctttgctctatgctaaacattttcttcaaccttagtactatttatttatattatatcttctttccaggttaaacgctcatttgacaatagtgaagaagctggaaagtcattaagacaaaagtcgttaagacagtgtgtctcaaaatgtggtcctgggaccacctggatcagatttcaccaaagtacttgtcgggacataaggaggtctggatccaactgcagatctattagatgataatccgtggattggtccccaaaaattcctttttaataaactcatcaggtaattctgttgtataaccactgtgtctcattctttgcaaacctctactggtatctggagtttcatactcaaaaaattctgcattctcatagagggccatcttttggattacgggttttgtggtggaatgtcacaaaattctacactcatcctgagggtcatctttggatcttacaattactaagacatgtccctaaaaacaagcaaagaggacaacagcatatactactgaaatgagaaaacatgtactatgtgtatactctcattagactggttctagatgtcttcaaacacagatctcatttcaacctggaggtaggcagcatcgtcatctgttcactctggggaaccttgcctagagaaatagagtactcctcccacagttacctagctcaaggttagcagatgtttccatctgtatcttctctagctctttgtattttctttattctgcaacaaggattccccaccactgggccaaggacagtggtggtgagcggtgggtgagtcagcattaccacctgatctccgcctcctgtcagatcagaagtggc

SEQ ID NO: 68803 - DNA, 1306 bp, Homo sapiens
tatcattatccctatttaatagataagaaaactaaccttttatcctacttccttaaccttttaaattttacataatttcctagggccacagaagttacaagtgatggaccagccataaagaaacccaaggccgggcgccgtggctgacgcctgtaatcccagcactttgggaggctgagatgggcagatcgcaaagtcaggagatcgagaccagcctggctaacacagtgaaaccccgcctccactaaaatacaaaaaattagcaaggcgtggtggcgggcgcctgtagtcccagctccttgggagkctgaggcaggagaatggcatgaacctgggaggcggagctggcagtgagccgagatctcgccactgcactccagcctgggtgacagagcgagactccgtctcaaaaaaaagaaaaaagaaagaaaaaaagaaacccaagcattctgagtccaaggccaggtttctttgctctatgctaaacattttcttcaaccttagtactatttatttatattatatcttctttccaggttaaacgctcatttgacaatagtgaagaagctggaaagtcattaagacaaaagtcgttaagacagtgtgtctcaaaatgtggtcctgggaccacctggatcagatttcaccaaagtacttgtcgggacataaggaggtctggatccaactgcagatctattagatgataatccgtggattggtccccaaaaattcctttttaataaactcatcaggtaattctgttgtataaccactgtgtctcattctttgcaaacctctactggtatctggagtttcatactcaaaaaattctgcattctcatagagggccatcttttggattacgggttttgtggtggaatgtcacaaaattctacactcatcctgagggtcatctttggatcttacaattactaagacatgtccctaaaaacaagcaaagaggacaacagcatatactactgaaatgagaaaacatgtactatgtgtatactctcattagactggttctagatgtcttcaaacacagatctcatttcaacctggaggtaggcagcatcgtcatctgttcactctggggaaccttgcctagagaaatagagtactcctcccacagttacctagctcaaggttagcagatgtttccatctgtatcttctctagctctttgtattttctttattctgcaacaaggattccccaccactgggccaaggacagtggtggtgagcggtgggtgagtcagcattaccacctgatctccgcctcctgtcagatcagaagtggc

SEQ ID NO: 68804 - DNA, 1306 bp, Homo sapiens
tatcattatccctatttaatagataagaaaactaaccttttatcctacttccttaaccttttaaattttacataatttcctagggccacagaagttacaagtgatggaccagccataaagaaacccaaggccgggcgccgtggctgacgcctgtaatcccagcactttgggaggctgagatgggcagatcgcaaagtcaggagatcgagaccagcctggctaacacagtgaaaccccgcctccactaaaatacaaaaaattagcaaggcgtggtggcgggcgcctgtagtcccagctccttgggaggctgaggcaggagaatggcatgaacctgggaggcggagctggcagtgagccgagatctcgccactgcactccagcctgggtgacagagcgagactccgtctcaaaaaaaagaaaaaagaaagaaaaaaagaaacccaagcattctgagtccaaggccaggtttctttgctctatgctaaacattttcttcaaccttagtactatttatttatattatatcttctttccaggttaaacgctcatttgacaatagtgaagaagctggaaagtcattaagacaaaagtcgttaagacagtgtgtctcaaaatgtggtcctgggaccacctggatcagatttcaccaaagtacttgtcgggacataaggaggtctggatccaactgcagatctattagatgataatccgtggattggtccccaaaaattcctttttaataaactcatcaggtaattctgttgtataaccactgtgtctcattctttgcaaacctctactgktatctggagtttcatactcaaaaaattctgcattctcatagagggccatcttttggattacgggttttgtggtggaatgtcacaaaattctacactcatcctgagggtcatctttggatcttacaattactaagacatgtccctaaaaacaagcaaagaggacaacagcatatactactgaaatgagaaaacatgtactatgtgtatactctcattagactggttctagatgtcttcaaacacagatctcatttcaacctggaggtaggcagcatcgtcatctgttcactctggggaaccttgcctagagaaatagagtactcctcccacagttacctagctcaaggttagcagatgtttccatctgtatcttctctagctctttgtattttctttattctgcaacaaggattccccaccactgggccaaggacagtggtggtgagcggtgggtgagtcagcattaccacctgatctccgcctcctgtcagatcagaagtggc

SEQ ID NO: 68805 - DNA, 1745 bp, Homo sapiens
aattaaacaacaaccattaaaagtacttttccaaattctgttttccccctaatttaatgacacagatttattacttagcagacatatctataaaacaaacatggggttcatttattaatcagtagaaggatgtgctattgggctttggctgttagttacatttaaaaaccacaaagattaaggcaatgaaaaaatacactgtattttatttgtgttaatgtcaaagcacactgatgaattgagtttctcaggctgtacaactgaggaaaaccttatgtgggatgaggggctcttgctgagattagccttgctgagatgagatcctatttgccctggatagatgctctcaccctggaagaagagagaggaagatgagagaagcatcttcctccagcatagaaggctctcacctctctgtcacagcaaattaaatcacagaatttgccttgctcatattttagagcccgctgcaagtctcatcttcccctaaaccatattcagataattcattcagtattctctttctctgaacatttaaacaattattgtccctagtatctgttctagcacttaatcatttgctattttgtattatttaacagtttatgcatttatgtctcatttccttgttcaaattttcttttttttccttgttcaaatgtctaagctcttacaaaatcatatctactgagcccagggctgggaaaataacaaaaactcaatagtagatgtttgaatggatagatgaatcaggatggatccagactgagaaatggggtggcatcagtgtgtggtgacttcgccagttaggaatacttctcagtctactctgagaatgacttggagaactttgtactttgagaccatcagcagttaaggaagatactgctatggacaggaggcaaggaaatactgggtagaagagggtggttccctgggaaaggccccacccccaacactggaaaccctcagccctaaatgggagcagccattcctgtttgtgcatccatatgttgccttttgacctgccctatcctgcacccatataaaccccaaaccccaggctccatgagcagaagagcagaggagcagaagagcagcacagcagagaaggagagaagagaaggagcatctgaaagctgagagtaatttggctggggacggttggagaggagattgtccatggggcaaccaaactccaggggcagatcatcttcccactccatcccctttccagctccccatccatcctgcttagagccacctccatctggcattaaaatcccccayatttgccctccttcaatttgtctgtgtgacccaattcttcttggatgccagacaaggacctggataccaagagggcactgagttggttaatacttaagccgtctgtggatggcagagctaaaagagcactgtaatacatccactggggctttgggagttgcaggcatccacccctagatgctacagtggggccagagcccaaaagtgctccccttggctcttgcacctgcccgtctgcgtgctccccctcccataaggggttgagtgcacagcggccaaacaaagccacacccaccgcatgtcctgtgagggaggtcagggaactctcccatttcaatactacacaggagtttggttactgccctgagatgatattgaaaagacttacattcaatatgctctggaaatgaattataggacgtcattaaaagaaactgatttactttttttccaat

SEQ ID NO: 68806 - DNA, 562 bp, Homo sapiens
tttggtatctgggaatctacatgtttcaagacctaaaaaggtcaacattacaagtgaaatgtttgctccattgaactggatcagagtttttgtagaaacaatgtgcaactgggakgcagtcatataaatggaccgaagaacttagaaaagaacaaagtggatgccagtagccaatgcacaccattctgtgcagtatttggttgggacaatgctaactgcacataggcagtcctgggtaaacattaactgatgacaataaccagcagagtcccaaagtgaggcccttgcattattgttttgaggaaattctgcctaatgagaatggattgctagtaaatcatagagcaattttattctcctttcagtaagacatggatgaccgagcagctggtgggagcagccctgtctgtccccatctgagagagtggtgtattagtctcaaatagggaaattacgcagcaatgtggaagcctggctagccgtcattaaagtaattcagtgtttgggctgcctgtgtttcaggcagtgataggagccattaacagctcacttttagtttcag

SEQ ID NO: 68807 - DNA, 725 bp, Homo sapiens
caggtctttcacttattctattcatttaacaaacatttattgagcaccaacttcgcttatcactgaggacgcaataaagaacaaggcagtgaaggtcttgtttcccatggacttgacagtcaagtgggaaagacaggaaaactaataaaaccatgattaatatagatggaagtaactgagcagctactctagtccccaggattcctcctcttaatgtgtcatctttttccccatcagttgggtcccacccccacagaagcaggccacactgaccactcatgccaacataatcacaataaggcactgcgtaaagccagagccagacttctctgaccacctcaacctgttgttaggtagggcagacatcacaggtgaggagatggcggcccagagaaggtgagtagcagattctggcctagaggcaggaagtgatcagcagggagccatgactcacgcctgtaaccccggcactttgggaagccsaggctagaagattgcttgaggccacgagtttgagaccagcctgggcaacataatgagaccccatctctacaaaaatttaaaaatgtagctgggtgtgggagtgcatgtctgtactcccagctaccctggaggcaggaggatctcttaagcccaggagtcaaggctgcagtgagctatgattgtgccactgcattccagcctgggcaacagagcaaggccctgtctcaaaaaaaaaaaaaaaa

SEQ ID NO: 68808 - DNA, 1357 bp, Homo sapiens
ctttaggccctctgaattacggttttctcatttgtaaaatgggataataatagtatctttttcataagattgttttgagtatcaggtgggattacgtattgaagcacttaggatattgcctggaatataataagcactctataaaggtttgctattatttaggaagaacaactgaactgttgtgaggattaaatgggtcacacactattaatacccacacagctgtgatgcaagggttacccaaggagggtggagtttgaacctcattcttactgctcacatcccttcttacaaacatcatgcggactcccttgtaaccctggtgttcatgctttttactgcaagaatatgaggtgatatgaatccatatggccattttcaaatactcaaactgaaagaaaaattctcaccctaacttgctgagattgtaccctctgcaaatacaatgttaggaagtgctggagtagaaaatatttctaatcattttggatatctatagaatgtaggaaataatcattatattcaatgattcatgttaaggcatgctattttaataaagtgaaaagtttaaaaagaggggaaaggctccatatatctcactctgccattccctctggtgactgtcatgtctcttttccttcacaataaaagaagagtctgcaattgctgtcttctcctcctggctttgatttacttctcagcctgctgcagtctggctccggatcccagaacaccacagtcgccttctctagggttggcagtggctttggaattgccacacctaatctacgtgtttccgctctatccctatctgacctttcttgggtgttggacattctcattctctccttgaaactctctcctttccaatttcccacactattttwggtaggttttcctcctccttctttgctgttccttctgggtctccacccacctctcctgttggaggcatctccaggtgcatgtccagtctgtccactctccctgggcgtcctcagcctttccttgtcagttatcactccaaatccccatgtttaatctcggctcctccctgcagtgcctgtggcttgctgcccccatctctggacatgcagttatccacagccatctcctgagccgcacacctcaactaaattccgtggagagttctcactgcctgccccacaaatgcaagcttcctcttgacctccattccctctttttcctaagggctctcaacccttggggagcctgaggtggaaactttggaattattttgactgttttctctccttcaccacccacatgtaattgctcatcaaattctgttgtttgtaccttggaaatatctcatgatatttaccgcctcttctcc

SEQ ID NO: 68809 - DNA, 523 bp, Homo sapiens
tgtcattctgaagtgtcagagcatactttcttaaactgtgaaggatctccaggacaaccaagttcagcctctcatttacaaatggagacaccgagtcacaaatatgtaacactcaaggatgcatggctgggtagacacagaggtggctccagaccccaccatgctgcccctgtggtgattggcacaatggtcaacttcaagcttacgggggacaatggctctaatgccagttactactcattgaatagcattatgtgccaaagagtgagctggctgctttaagkgtttatatctcatttaatctttaaaatgaggtcaaggaaatcattggtagactgagaagataccctacactgaactgaaccaaaccaaactgaaacaccccaagactcctgaggttcctttcaaactgctggtacaatcataaagaggcctaaggagggatgggaaagaggattctcagggcaatggaaacctctgggaagagtagtacacatgaggtttcatctccacttaccttgca

SEQ ID NO: 68810 - DNA, 1443 bp, Homo sapiens
ttattgtagggatcaaataagatatatgtgagaagcacattaaaatctgaaaaaagctgagtgtggtggctcaagcctgtaattccagctactcaggaggctgaggcagaaggatcacttgagcccaggtgttcaaggccagctgggacaacacagcgagatcctctctcaaacaaataaataataaaattaaaaaatttaaaacaaaaaaataaaatccaaaccatcataacacctaaggtaagccttgtgtggttttctgagaatcttactatctaacacagtttttgagtctggaaaaatagtggtggggagcctcccataatctattgttgattcctctttcctaaattaagaaaagcttcaagcagcttgggaaatgcaatttgtgaaacaacaattaatgtttaggagatcaaactctggctggtgccggaatgatgacctggattctggggtctgagcacactcactgctggccaacggggcttcaagcagagaacagactcgaatctgcagtctcagaacggctcagcagtcattgagcaggatttggagactgcagcagtcacactggagacaatgtaggggacaagagggaatgaattcataaacttctcaattattatcttggtatcttctaatgcaaataccttgagcccatcattgaaaagatgcatcctacccataacaactggattaggatctagacctcaccaggcacacattgcctgctttccagcaggggtagggggatgcctgttgctaggaacagctcccaggaccacatccacccttacttatgggccaaggtgaaggcgccaaggagcatgcaagacagcgctcacaggctccatcactatccagctttagtgagacagagaaagagacaagactcccaaarcttcccctaatacagacaaaatgagaaaattcaaggtctgttttatttcgaaacactctgtctttacagatagaattagctcactttaactgtatgtattatttatactttttcctgtaggaatgatctgcattatttacatgagcccccaaagtcactcaggctcaggaatcagtatcccaatgatattattcattctgtattgttcttttttcaatattgttcaatttttccctaacctttaaggagctgccatacacccaaacatttaagaaagctctacctttcaaaacccatatgtggtatgtacatatatgtttgaatgtgcatatgatatctctggaagaatccacaagaaaatgttaacagtggctgtctctaaagaggaaaatgggggattggcagtcagaaataggaggcagagtcatttttcatggtatatttttaaattttaacatgtacatgtgttaaattttaagacattttttaatttaaaaaaaaatctaaaggcacaaaccgcatatgctcttctggagtca

SEQ ID NO: 68811 - DNA, 557 bp, Homo sapiens
tagttgccctattcagaagggctcttcctaaatttgtttggtgaggtcacctcattgacaccaagtgggaggatcaggatacrgtttagctgtgaacagcggcctcccaagctgatctcattctccaaagctaatcccacgattctttagcattacaaatatggatgaagcatttcacaaacaagtgcttgcctttgttaacagtttcttttgattccatcagtaataccttagctgctttcttttataagaatgggggagaaaggcctgatttcttgacagacctatctggagagtggtagttggaaggaaagtgtgtatcccagagaacaaagatctcagcccttgagcaattcattcagattttgagtggtatgctgggatgaggatgggctgaataaggcaggatgtaatcacaccataaaggctacacataacctaacaagtgagaagaggcggctttgtcaagaaggaaagagattctgagtctatgagtcaggatcaattccttttttattctttttctttttcttttctttccttcttttttttttttt

SEQ ID NO: 68812 - DNA, 557 bp, Homo sapiens
tagttgccctattcagaagggctcttcctaaatttgtttggtgaggtcacctcattgacaccaagtgggaggatcaggatacggtttagctgtgaacagcggcctcccaagctgatctcattctccaaagctaatcccacgattctttagcattacaaatatggatgaagcatttcacaaacaagtgcttgcctttgttaacagtttcttttgattccatcagtaataccttagctgctttcttttataagaatgggggrgaaaggcctgatttcttgacagacctatctggagagtggtagttggaaggaaagtgtgtatcccagagaacaaagatctcagcccttgagcaattcattcagattttgagtggtatgctgggatgaggatgggctgaataaggcaggatgtaatcacaccataaaggctacacataacctaacaagtgagaagaggcggctttgtcaagaaggaaagagattctgagtctatgagtcaggatcaattccttttttattctttttctttttcttttctttccttcttttttttttttt

SEQ ID NO: 68813 - DNA, 546 bp, Homo sapiens
ctccaagttctcaagcctgagtgatggagaaaaagagggtgtcactatctcaggcaggaagaatggctgggaggagaaaatatttgtgagcagacaatgatgtgttcggttttggatttgtcactctttaggtgatgaagagacattcaaatagaaaaatttactagactgttgcaaacatgttactcagagaatccctatctttgataggcaggctgtctgcaaaaacaaatctatgtgattagtacagaaataggaactccttaatttatagcygtagctattgtttgcttctcactgcttttagtgtcatatctttgctccgaaggagttgtaattttgagtatcacatgcatgggtgagcacacacacgtgcgcacacacacactctctctcacacaaacacacaaagcctatttgctgcagttgtatcccggagtcttgatactaaattgctcaaagttttgctttcctgtgtcctgggagagccctttggtcttctgtcttgtctccctgaagccactcgcttcagctccccgacaggca

SEQ ID NO: 68814 - DNA, 546 bp, Homo sapiens
ctccaagttctcaagcctgagtgatggagaaaaagagggtgtcactatctcaggcaggaagaatggctgggaggagaaaatatttgtgagcagacaatgatgtgttcggttttggatttgtcactctttaggtgatgaagagacattcaaatagaaaaatttactagactgttgcaaacatgttactcagagaatccctatctttgataggcaggctgtctgcaaaaacaaatctatgtgattagtacagaaataggaactccttaatttatagccgtagctattgtttgcttctcactgcttttagtgtcatatctttgctccgaaggagttgtaattttgagtatcacatgcatgggtgagcacacacacgtgcgcacacacacactctctctcacacaaacacacaaagcctatttkctgcagttgtatcccggagtcttgatactaaattgctcaaagttttgctttcctgtgtcctgggagagccctttggtcttctgtcttgtctccctgaagccactcgcttcagctccccgacaggca

SEQ ID NO: 68815 - DNA, 1049 bp, Homo sapiens
caagtcactcacaaaaaggtgatacccatttgtggttcctgcaataggtattaaagtgctcttgtccccacacgctcactgacactgggtattaatggaggatctgctcttktttgtagccctaggaaaaaatccagtttagaggaggagtttgtgagttataagaaaaagagatgattgacaggccatagtcacagaggggatgggtcaagatggtatcaagagtgcaaataaaaggtaaaattttttgagacatgaagagaggaatagtagatgggtgaatatggaaataaatacaaatgaaggaagaaatttttcatatagtcatctttattttagggaaattagaagccaagtttccagttgtgatggaggattaccaaggtggaattttgaataaaggtacagaaaagcttctgtgaaaatgctgtaaagaagcagaaggcagtcagtattgggagtctggctgagctgagaatgaatcaaatttggggaagccaatggttggggtcacattcatttttctacagaacaagcagagatgtagtcactggatttgcctgggtttggggcctctgggttgacgtaaatttatataacattcacaataaggtacttttattttccgtatttccctgttccgtgagtgcaatttgtataaccctaagttatacatcttctggtgggtctgagaggaaaatggtctctgtgttctgatttaaaaaaaaaagaagagtatcacttttatacattttcttgtgcctactttataaagccatataactaatgattttattttctttatataattgtgaacataaagccatttactttcttggtttttgttaataaattatgatatgagcaaacactgctaaaaattctgatcgatataaaccagagacatttatagaagattatgtgatttgaatcctggtcaaaggccacctggagtaagtgatagacctggcaacactccattcagcttgttcttgtctagagattccctttgcttctggggagtttaaacgttttaattttagaatctt

SEQ ID NO: 68816 - DNA, 1049 bp, Homo sapiens
caagtcactcacaaaaaggtgatacccatttgtggttcctgcaataggtattaaagtgctcttgtccccacacgctcactgacactgggtattaatggaggatctgctcttgtttgtagccctaggaaaaaatccagtttagaggaggagtttgtgagttataagaaaaagagatgattgacaggccatagtcacagaggggatgggtcaagatggtatcaagagtgcaaataaaaggtaaaattttttgagacatgaagagaggaatagtagatgggtgaatatggaaataaatacaaatgaaggaagaaatttttcatatagtcatctttattttagggaaattagaagccaagtttccagttgtgatggaggattaccaaggtggaattttgaataaaggtacagaaaagcttctgtgaaaatgctgtaaagaagcagaaggcagtcagtattgggagtctggctgagctgagaatgaatcaaatttggggaagccaatggttggggtcacattcatttttctacagaacaagcagagatgtagtcactggatttgcctgggtttggggcctctgggttgacgtaaatttatataacattcacaataaggtacttttattttccgtatttccctgttccgtgagtgcaatttgtataaccctaagttatacatcttctggtgggtctgagaggaaaatggtctctgtgttctgatttaaaaaaaaaagaagagtatcacttttatacattttcttgtgcctactttataaagccatataactaatgattttattttctttatataattstgaacataaagccatttactttcttggtttttgttaataaattatgatatgagcaaacactgctaaaaattctgatcgatataaaccagagacatttatagaagattatgtgatttgaatcctggtcaaaggccacctggagtaagtgatagacctggcaacactccattcagcttgttcttgtctagagattccctttgcttctggggagtttaaacgttttaattttagaatctt

SEQ ID NO: 68817 - DNA, 1418 bp, Homo sapiens
ttatactaatgcctcataagatgaatttgacccaaggagctgtgttttaaaacaacaaacaaaggatcattggtctccaggagtgaattttgttctattttatatatgttagttttatttacttaatttctaaactggaattcagaagaggtctcatattcagtaataagtctctgactcttccaattttgacatttgtacgatacaaacaaaccaaccaacaaaggaaggattcagaaatatgaagaatgcaaatccaaatttcttaccagggctctcagatttgatttaaaatatcttaacaggatcactttagttcatactgatatgtagattcattgtcagatttaagacttaggaagaaataatagctaggccatggggaaggataaaaactgactgtttaatcaagagagagggaaagaaaaaaataaactgatgttttctaaacaccgagtgaaaatttaaacaaacaacttatcttctaaggatactctgttcaatattcttcccttgtgctattttaatatggccattaaaataactgtgtgccttgttttgtcacccagagaacaaccttcacatggcattctttgggtacagaacagtgtcataatgaatcacttcctcctcattaatgtcttttactaagtgtacaaaacattatacttctcattaatgtctttcattaaattgaaaaaaccctgaatgcatatatttctattaaaaccaatgggatcctaaattcacatgctacacatttttatcagcataccctaaccatagcaaggcagaaatagtttyctgttataacatcaagacaaattgtgcaaagtgggagagcagtttggggaatgggctatgagaactcccaatcccctcctgtacatcttctagtaagcaaaggcctgtttcaaaaacaccactgatgatagagagttttctaattactccttcaccaagttaagtactccagtctgcttcattccatgtatttccacacaggaggtgcactgacccatcttgcatttttcagagttcacaccgtgttcatctctttttggcccaattcacctggtacttgcctgctcacccttttcaaaagctggcagatagggagcttaaaaacaaccttaattgttcaggatttctgctagccttagattgtggcaccctctgcttctcttggactggaattattgcaattttaattatgggtatgatgtgtacattttcaaccatagagtaacatcccagaagacagggccaagtctggcttgttcagcattgtatctggtacatggaggtactcaatatctgttgattgactggcatggactagaagagcaaactgggtaacttgttgcccatgtgcataatatcaccaaatttctggcactcccctcactctaggatgg

SEQ ID NO: 68818 - DNA, 730 bp, Homo sapiens
cagcctaaccaccagatgctatccacattgcttttgaacaatgaaggattaaatgagtagttctcagtttttttattttactagacaatcaccaacatttatgcacaaccaatttttcacgttatatttayattgtattctcctagagaaaaggtaacacatattcaaatcactgagtaaaacttcctttagaaactaacattcaccaccatccccactcagtcctaggaatgatgacgaactaaggggacagagataatagaattttctttgcggccagcagaagctaaacaaaatgtacagttgacacctgaatgtataaaacttacaaaacacaagaagggactaagatgataggccttgccattttagtcatgtgaacttttatactgattattttgtagggaaggctgatgcatacctgaaaaagagagggacaggtaccctgcatgaagtaaatcttaaaacactgctagaagaaaagattgctagaagagaagggtgagaaaatggtgtctttcttcttggtgaagtgtgaaaagttcacaaagtcaggccaagagatcaatacattacactcttccccttcccctcagttcagatttggggcaattgtttaaattgttcactattcagggcagcgagttgggaaatctatctgcagaaaaccacctagtagaacactggggaagctgaatccctgactttcttctctttttgtatcacaaag

SEQ ID NO: 68819 - DNA, 555 bp, Homo sapiens
aaagcctattaaaattatgttcagttacataatcttattgctaatmcctcttatgagttttaatctcacatttatatttgtttgtgggcaatttctagttaaatatttttcacataaaaataggctcatgtaatgtaagctttttagcaatgtctttgtatgacctcatttcagttaaaagtgattttcaatttctactcttctaaaattaatttttgtttttgttgaagtgtagaaaaattgtgagctaagaagtagcaaacctacctagaagtattgtctcgctacccaggcaaattgtttagactttctgaacctcactattatcatctacataatgaaaaattgaaataagagacataccacggctactttcagtgcaaatttttttttattttttaattaccatttcttcaacaccctcattcaatcctcttagctgttttgcatcagtccaaggaatatctaatacactcctgttttttcattctcattgctactggtccctgcctacaacttaccatgattctaccctctgttaaaattaacactatt

SEQ ID NO: 68820 - DNA, 555 bp, Homo sapiens
aaagcctattaaaattatgttcagttacataatcttattgctaatccctcttatgagttttaatctcacatttatatttgtttgtgggcaatttctagttaaatatttttcacataaaaataggctcatgtaatgtaagctttttagcaatgtctttgtatgacctcatttcagttaaaagtgattttcaatttctactcttctaaaattaatttttgtttttgttgaagtgtagaaaaattgtgagctaagaagtagcaaacctacctagaagtattgtctcgctacccaggcaaattgtttagactttctgaacctcactattatcatctacataatgaaaaattgaaataagagacataccacggctactttcagtgcaaatttttwtttattttttaattaccatttcttcaacaccctcattcaatcctcttagctgttttgcatcagtccaaggaatatctaatacactcctgttttttcattctcattgctactggtccctgcctacaacttaccatgattctaccctctgttaaaattaacactatt

SEQ ID NO: 68821 - DNA, 1355 bp, Homo sapiens
tgcatctgttgagcttaggatcatcatcatttctattctaaggtgccaagcagcgagttggattgatacatgctaatgtgtttaaggagaaacttggtgatgtctagttcctttgtcccagacacttctctgctctttatatttcaacaatggcctcttagagaggtcatttatattagattcagaattggtaagagtacctttatgtaatttcctcatttgaatcctcctaataatmagctggtgagatgagtaccattaccccttcgtaccagcaatctggcctaaatatcagaaagcttacattatctgctgggccacagagctggtctgtgctatagtccagaatcagaccacattgaatatatgtatatatatatgggctttttccacactatcatatagactcttctccatagccttcaagaatgtgcagtccagaaaatatcctaataaaaaccttttacaagacaagaataataattaaatgtgaagcaaatgttatagaggaaatttaactgctttcaccttgcagagctccaaatattcatcctcaaaattaggaacagtctcaagtttgaccatgggtttttttactgtttttttaataaaggaattttggtgcaataatgaattgaagtataaattatttcaatgattgactgaatcaaattataaagtaatgttgtgataatgagtttctaggactgagaaaaaaatgtttaccaagaacatcaaaagcaaaatgtgtaggcctggctactaaaatataagcaaccttcctcagctgaaaagacaagcaaacattgaattatagaactttcttctatgacatacctctaacagaacaaagaagattttcaactaagaacataatcttgatcctaaagaaagtgagataagactttttcaattcttcattatttgagtaacttatgaaatatgtatttttgtctgtttagcaattttgagaaatagaggtcataataaattctaccacctttgccaacccctctaccacacatcactgtgttttggttctggaaatcaagaaattaaacttatccctatgatgtcaaaattggtaaacttaacaaaacttgagatatgaaagatatgttacatttcatgctcaaattgaactaaagcaaatatgagattcaattaattctccatttgcttttgaaggtatgtgtgtatatctgtatggctacaaaaataacaatgtaattcaatttgtggtttagcattttcaagtgatcttatttgattgatagaaacacacacatatgtatatgaaagatattttgtataaataagggcaaaggaaaatcatattaactgaggcaggcaaa

SEQ ID NO: 68822 - DNA, 741 bp, Homo sapiens
ttaaggagtaacttttgggctgggtgtggtggctcacgcctgtaatcccagcactttgggaggccgaggcgggcatatcacaaggtcaggagatcgagaccatcctggataatgcagtgaaaccccatctctactaaaaatacaaaaaattagcagggygtggtggcaggtacctgttgtcccagctactcgggaggctgaggaaggagaatggcatgaacctggaaggcggagcttgcagtgagccaagattgtgccactgcactccagcctgggcgacagagcgagactccatcaaaaacaaaaaacaaaaacaaaaaaacaaaaaacaaaaaacaaaaaaaaaaaaaaaaaaaaaggattaactttagcaatggcagaggtgcagtcacttataattgtaaattccaggacctggagtaggtgcagtcacttataattgtaacttccaggatcttgatagtagcattctcatgctgctatagagaactgcctgatactgggtagtttataaaggaaagagaattaattgactcacagttcctcattgctgggcaggcctcaggaaacctacaatcatggcagaaggcacctcttcacagggtggcaggacggagtgagaatgagtgccagcagggggaatgccagatgcttataaaaccaccagatctcatgagaactcattcactatcaggagaacagcgtggggaaaccacccccatgattcaattacctcccatt

SEQ ID NO: 68823 - DNA, 611 bp, Homo sapiens
accgcacccggccaagaagtacatagacatttttaaaaagagataagaggaaaaagataagcagacatgggagacacacggctcctacgtgtacagagaatcaggctgtttgtttacttcacctccgttggtctttggggctccacgctgcccgcctttcctacccttcccccgamccttccttggcctttttgccgggtcctcctctgaagcttgagttcttcagggtttgagtgggggtgctctttttttaaggattaatattaatgctttttatttttgtgttttttcttacatttaaactaatttttaattgtggtaaatacatgtaacataaaatttacctctttagctatttttaagtgtgtggttggtggcattaagtattacacattcacatcacagcccttcatccccagaactctttccatcctgcaaaactgaaactctgtatccgttaaacacaaatactcccttttatcctcacccagcccctggcaatcaccattccactttttgtctctgtgaatttgactacttttatagataacatcatataagtaggatcatacaatatttgtctttttgtgattggcttattagacttagca

SEQ ID NO: 68824 - DNA, 611 bp, Homo sapiens
accgcacccggccaagaagtacatagacatttttaaaaagagataagaggaaaaagataagcagacatgggagacacacggctcctacgtgtacagagaatcaggctgtttgtttacttcacctccgttggtctttggggctccacgctgcccgcctttcctacccttcccccgaaccttccttggcctttttgccgggtcctcctctgaagcttgagttcttcagggtttgagtgggggtgctctttttttaaggattaatattaatgctttttatttttgtgttttttcttacatttaaamtaatttttaattgtggtaaatacatgtaacataaaatttacctctttagctatttttaagtgtgtggttggtggcattaagtattacacattcacatcacagcccttcatccccagaactctttccatcctgcaaaactgaaactctgtatccgttaaacacaaatactcccttttatcctcacccagcccctggcaatcaccattccactttttgtctctgtgaatttgactacttttatagataacatcatataagtaggatcatacaatatttgtctttttgtgattggcttattagacttagca

SEQ ID NO: 68825 - DNA, 1237 bp, Homo sapiens
tctttcttctaatccttcctttcataattatcactctttatttagaaaagaaatccatatcttttacccactgtgaaatagaaacttcactgtttctttactcttgagtaaaaagtctgaagtgtgccaagcaaaggaacaattcaaaacactgatgtttgtgaggactcttttattcaaaacatcacaaatccatggtaggactgattttgcatttttacacacataggcacacactcatatacaccctattaaagtggaaaagtggcattacaaatggtatattctgacctattccacaatatctgaattaaaacttattatgtaagaaattctgggagtgatatcaattcctctttcattcctgtgttaatcaacgcactcattgttcctgagaaagagaaccatggggaattaaaattgtctatagaaattttagatgatgtattatttatgtaatgattctgtagacattaaattaataatgcaaacttgaccgcataactccattctcagcagtattgataatgacaaatagtctgctcaattctgttattcatgtataccacagacatatgggatcccacatttttcatgaccttaagaaagatgtaaattcgtccttttaatttttttaatattcatttagaatcagaagagaatcatctctttcctaagctccagtattatcattttggccaatctaccaacttcccttatctggatcccttatctgcaatcacctcttcattttttttctacttgtacaccaggtccactattttctatttgcaaaaagagcagccagaatgatctctgtgaaacaaatttcgttattccacttttctgcttcaaacacccatagtaaatctcaaggccgtaccataccaaggggctggcccccrttacctccttgacagtccccttaactaccttccttatctgtttattcccattaaggcacatcatgccagaatatgttcacctcagaatgtttgcaaggctttatttaaaccttttcattatgggtggtgggatgacaatatttagttaagcaaatcaagtgcttatgtttttatctcagaactataacagcggtgctggtttaaaaaatttgtaaacaaaaagtaagatagggcagggggagatcatttagggtattattgcaaatataggagtaaatttatatgaactaaagcgaaaataattgtaacagaggatcatagactttgatgca

SEQ ID NO: 68826 - DNA, 1237 bp, Homo sapiens
tctttcttctaatccttcctttcataattatcactctttatttagaaaagaaatccatatcttttacccactgtgaaatagaaacttcactgtttctttactcttgagtaaaaagtctgaagtgtgccaagcaaaggaacaattcaaaacactgatgtttgtgaggactcttttattcaaaacatcacaaatccatggtaggactgattttgcatttttacacacataggcacacactcatatacaccctattaaagtggaaaagtggcattacaaatggtatattctgacctattccacaatatctgaattaaaacttattatgtaagaaattctgggagtgatatcaattcctctttcattcctgtgttaatcaacgcactcattgttcctgagaaagagaaccatggggaattaaaattgtctatagaaattttagatgatgtattatttatgtaatgattctgtagacattaaattaataatgcaaacttgaccgcataactccattctcagcagtattgataatgacaaatagtctgctcaattctgttattcatgtataccacagacatatgggatcccacatttttcatgaccttaagaaagatgtaaattcgtccttttaatttttttaatattcatttagaatcagaagagaatcatctctttcctaagctccagtattatcattttggccaatctaccaacttcccttatctggatcccttatctgcaatcacctcttcattttttttctacttgtacaccaggtccactattttctatttgcaaaaagagcagccagaatgatctctgtgaaacaaatttcgttattccacttttctgcttcaaacacccatagtaaatctcaaggccgtaccataccaaggggctggcccccattacctccttgacagtccccttaactaccttccttatctgtttattcccattaaggcacatcatgccagaatatgttcacctcagaatgtttgcaaggctttatttaaaccttttcattatgggtggtgggatgacaatatttagttaagcaaatcaagtgcttatgtttttatctcagaactataacagcggtgctggtttaaaawatttgtaaacaaaaagtaagatagggcagggggagatcatttagggtattattgcaaatataggagtaaatttatatgaactaaagcgaaaataattgtaacagaggatcatagactttgatgca

SEQ ID NO: 68827 - DNA, 1237 bp, Homo sapiens
tctttcttctaatccttcctttcataattatcactctttatttagaaaagaaatccatatcttttacccactgtgaaatagaaacttcactgtttctttactcttgagtaaaaagtctgaagtgtgccaagcaaaggaacaattcaaaacactgatgtttgtgaggactcttttattcaaaacatcacaaatccatggtaggactgattttgcatttttacacacataggcacacactcatatacaccctattaaagtggaaaagtggcattacaaatggtatattctgacctattccacaatatctgaattaaaacttattatgtaagaaattctgggagtgatatcaattcctctttcattcctgtgttaatcaacgcactcattgttcctgagaaagagaaccatggggaattaaaattgtctatagaaattttagatgatgtattatttatgtaatgattctgtagacattaaattaataatgcaaacttgaccgcataactccattctcagcagtattgataatgacaaatagtctgctcaattctgttattcatgtataccacagacatatgggatcccacatttttcatgaccttaagaaagatgtaaattcgtccttttaatttttttaatattcatttagaatcagaagagaatcatctctttcctaagctccagtattatcattttggccaatctaccaacttcccttatctggatcccttatctgcaatcacctcttcattttttttctacttgtacaccaggtccactattttctatttgcaaaaagagcagccagaatgatctctgtgaaacaaatttcgttattccacttttctgcttcaaacacccatagtaaatctcaaggccgtaccataccaaggggctggcccccattacctccttgacagtccccttaactaccttccttatctgtttattcccattaaggcacatcatgccagaatatgttcacctcagaatgtttgcaaggctttatttaaaccttttcattatgggtggtgggatgacaatatttagttaagcaaatcaagtgcttatgtttttatctcagaactataacagcggtgctggtttaaaaaatttgtaaacaaaawgtaagatagggcagggggagatcatttagggtattattgcaaatataggagtaaatttatatgaactaaagcgaaaataattgtaacagaggatcatagactttgatgca

SEQ ID NO: 68828 - DNA, 844 bp, Homo sapiens
tgcatatattacatttcctyattgataggtattttaattgtgactagatcatctatattaataaaatgctgtaataaatgtgtttttacatatgggtttataatagattttatttctacaggaaagtttagtgaaatttttactgtcaaattgtcttccacaacttttttatcaccagtatgatggaagtgtatatctactcccttggcaacaaaaaatattgtcaatctttgtaatttttagaagacacttgaaataaaattactagttattgtttttaattcagattactataatttgtattgaaggtgtattaatatgtttattggagatcattgttcaattttgctactattttcttctgattttcttatttgggggtaattatagatgacagatgtaatttcggctggtctgtgtattatgttttttttttttttcagacatggcttttaaattaatggtttctatttattttgccattttaaatttctatatagtaaaaaatgtaacattgcttgtcttatttttattatttccctttaagttctgggatacatgtacaggacattgcaggtttgtttcataagtatacatgttccgtggtggtttgctgcacccatcaacttgtcatccaggttttaagccccgcatgcagggatagcattaggacaaataaaaaacattgcttatctttacagtacctgtcatctgtgccagtcctagatatcatatctcatatccagtattttaaaaatgcggactcatattttcttcacacttttatttattttcatttaatgttatctgcctgaattttctctgctattatataaagcagaaa

SEQ ID NO: 68829 - DNA, 844 bp, Homo sapiens
tgcatatattacatttccttattgataggtattttaattgtgactagatcatctatattaataaaatgctgtaataaatgtgtttttacatatgggtttataatagattttatttctacaggaaagtttagtgaaatttttactgtcaaattgtcttccacaacttttttatcaccagtatgatggaagtgtatatctactcccttggcaacaaaaaatattgtcaatctttgtaatttttagaagacacttgaaataaaattactagttattgtttttaattcagattactataatttgtattgaaggtgtattaatatgtttattggagatcattgttcaattttgctactattttcttctgattttcttatttgggkgtaattatagatgacagatgtaatttcggctggtctgtgtattatgttttttttttttttcagacatggcttttaaattaatggtttctatttattttgccattttaaatttctatatagtaaaaaatgtaacattgcttgtcttatttttattatttccctttaagttctgggatacatgtacaggacattgcaggtttgtttcataagtatacatgttccgtggtggtttgctgcacccatcaacttgtcatccaggttttaagccccgcatgcagggatagcattaggacaaataaaaaacattgcttatctttacagtacctgtcatctgtgccagtcctagatatcatatctcatatccagtattttaaaaatgcggactcatattttcttcacacttttatttattttcatttaatgttatctgcctgaattttctctgctattatataaagcagaaa

SEQ ID NO: 68830 - DNA, 844 bp, Homo sapiens
tgcatatattacatttccttattgataggtattttaattgtgactagatcatctatattaataaaatgctgtaataaatgtgtttttacatatgggtttataatagattttatttctacaggaaagtttagtgaaatttttactgtcaaattgtcttccacaacttttttatcaccagtatgatggaagtgtatatctactcccttggcaacaaaaaatattgtcaatctttgtaatttttagaagacacttgaaataaaattactagttattgtttttaattcagattactataatttgtattgaaggtgtattaatatgtttattggagatcattgttcaattttgctactattttcttctgattttcttatttgggggtaattatagatgacagatgtaatttcggctggtctgtgtattatgttttttttttttttcagacatggcttttaaattaatggtttctatttattttgccattttaaatttctatatagtaaaaaatgtaacattgcttgtcttatttttattatttycctttaagttctgggatacatgtacaggacattgcaggtttgtttcataagtatacatgttccgtggtggtttgctgcacccatcaacttgtcatccaggttttaagccccgcatgcagggatagcattaggacaaataaaaaacattgcttatctttacagtacctgtcatctgtgccagtcctagatatcatatctcatatccagtattttaaaaatgcggactcatattttcttcacacttttatttattttcatttaatgttatctgcctgaattttctctgctattatataaagcagaaa

SEQ ID NO: 68831 - DNA, 651 bp, Homo sapiens
acgtgttgtgccaaggcaggatttttaaaaatgatgttttgctttaatcttaagacatacttggatgattctgaatataattattgagtaattaatgtgacacattttgacaaaggtatgtattctagagtatgttttaaattcagacaagcattctcttaacgaatcatatcagcatattcaagagggyaggcatcatttgaaaaggaaattgatctgttacacattttgacaggctttagagcatttagctgtgttctctcaattgaaaggtggtgagagtgggtaaaaaaaaacgctgtaagggtacagtttatcttgttttgttttgatttgattttaaagtggcaaacatctttctagtcacttttgcaaagacactcattttgtcaatcaggggctgtcttcaccattgatagaaaggattcctgtgggattattattacgttccatacttagttgtgtttcaacttcaatctgtttcaccaaagcaaagatacaggtgatagaagatcatcgatgttaaaggaaatcgtcgtgacaacaaatttttcttattcaccagcatggttctcaaacacttggttaggagcaataaattctcatgtaaagaaggtatatagaaagatcaatatctccttttaaacagtt

SEQ ID NO: 68832 - DNA, 651 bp, Homo sapiens
acgtgttgtgccaaggcaggatttttaaaaatgatgttttgctttaatcttaagacatacttggatgattctgaatataattattgagtaattaatgtgacacattttgacaaaggtatgtattctagagtatgttttaaattcagacaagcattctcttaacgaatcatatcagcatattcaagagggcaggcatcatttgaaarggaaattgatctgttacacattttgacaggctttagagcatttagctgtgttctctcaattgaaaggtggtgagagtgggtaaaaaaaaacgctgtaagggtacagtttatcttgttttgttttgatttgattttaaagtggcaaacatctttctagtcacttttgcaaagacactcattttgtcaatcaggggctgtcttcaccattgatagaaaggattcctgtgggattattattacgttccatacttagttgtgtttcaacttcaatctgtttcaccaaagcaaagatacaggtgatagaagatcatcgatgttaaaggaaatcgtcgtgacaacaaatttttcttattcaccagcatggttctcaaacacttggttaggagcaataaattctcatgtaaagaaggtatatagaaagatcaatatctccttttaaacagtt

SEQ ID NO: 68833 - DNA, 647 bp, Homo sapiens
cctgaggtaaagagttcgagactagcctggccaacatggtgaaaccccgtctctactaaaaatacaaaaattagcctggcgtggtggcaggcacctgtaatcccagctattcrggaggctgaggcaggagaatctcttgaacccagaaggctgaggttgcagtgagctgaaattgcaccactgcactccaggctgggctacaagagtgagactccgtctcaaacaaataaacaatcaaaatgaattacactttcaagatctgggtgatgtgatatatataaaataattttgcaaaactaagagctataaacaagtataattactaaaggaaaagcctttaagaaatattttcaagttgtatatgttacctggatttatttccattaatatattgatttccccagtagttgttttaatccctgacagtgtaattggggtatcggctccacaacttcactgggatatttcccagttgagtggaatttagcatgaattttttttctatcaaggaatttagttactgatgtggcccccaaaccttttgaaagtagattcctttgtaaggcagaccccacagcagggagcccaagagcaaggctgtttgttgttatgtcagcatcctggggtcttcacattggctcaaacag

SEQ ID NO: 68834 - DNA, 1231 bp, Homo sapiens
aagacaaggcatgtagaacagaagcagctttaatgaagctcagtctgggttgtatgaaagccattgtcacattctgacacaatgatatgctggaagcactctttccttagtcaggaagtaggttccattgtacctgatcccaaatcccacaaagaattagaaacttaatttctccatgcaaacttccaagctacaaaatcaaagtttagaatctaaattagtccataaaatattgtgataatatagcaccttgaagggatcataataagccacacatcattactgttttagtccctttatgttgctgtaaaggaatgccagaggctgggtaactgataaagaaaagaggttgaggctgggcacggtggctcacgcttgtaattccagcactttgggaggcgacggcaggtagatcgcctgaggtcaggagtttgagaccagcctggccaacatggtgaaaccctgtctctattaaaaatacaaaaaaaaaaaattagctgggtgtggtggtgggtgcctgtaatcccagctactcaggaggctgagacagaagaatcgcttgaacccaggaggcggaggttgcagtgagccaagatcgcaccattgcactccagcctgggcaacaagagtgaaactccgtytccaaaaaaaaaaagaggtttatttggctcatggttctgcaggctgtacgtgaagcatggcatcagcatctgcttctggtgagacttcaggctgcttccacttatgacagaaggcaaagggaagctggtttgtgccaagatcacatgaggagagaggaagcaagccacagacaagaggtgccaggctacttttaacaaccagccctcaagggaactaatagagtgagacctcactcattgctgtgagaatggcaccaagccattcatgagggatctacccccataacccaaacacctcccattaggacctatttccaacattgaggatcaaatttcaacatgaagtttggaggggtcaaatattcaaaccatagcaatcactattttcacagcaactcaagagaaaaaatttcactttgctgcctctcttcaagcttggaagctggagaagaggttctggtggaaagtacttcaagtgaaaagactttaaagacacaagttttaagtgaaacctgtctcccagtcaactctcgaggttcttgattcatttcattttgaaagagtggctatttttgtcttgttttcatcat

SEQ ID NO: 68835 - DNA, 737 bp, Homo sapiens
tagagactgtcccaggatcaatcgatatttagcccaatttcctgcaacttctccatgtaaaatatcctacaatgagaatttatagtctgactggcaaccctcaggcactgtaaaattcttaatcatcaaaaatgcaattatgctcactatactgtaattactaaggaaagagtgcactcatacattttacaaagattttctaaagagaggaaatggtaggtggtggggggagagtttctaattaactttcaattaatcagaaattcaagtataaccagaaaactccacttcttaaacattccatgagcacttgctatgcaccaagcactcaattacaataaattggtaaagtgcaaaaaaaaaaarggccatttcctaattgatagatggaacccctttctggaaattcagtttaacagatgattccactctgggtttgtacatcaagggaggtcatatgtaagtacccaaagctttgaaatttttcaacattttagacgtctacatccaaatgagatagcaagaatagtttacaagttttatcttctgaaatcatgaagggtttctgtttgccataggaatgttttaactgtaatgcagcgtttcagtagggacacaccatttatgctgcaagtgacacacacacacacactcaaaaaccctcaactcggactaaattaataaaggatatttgttgaatcgtagctgagaaggctggaggaagatgcggtgagttt

SEQ ID NO: 68836 - DNA, 645 bp, Homo sapiens
cattactaaaaggaagaaggggagattgaatactgggaaacaaataagtccctgattagccatatctgtaaatactgctgtcacctccaactaaataataaggtcttaaagggtagggctgcattttacactctcagtgccttcaaatgataagttcttaataaatatttcctgattgggtgatttggtgaatgcactttcatccaagagattttctggagagtttttattatactgccaaaaccaaacactattcaatcccagggtaaacactgcaggaaaaaaaatgtcacagggcaacatagtcataagtgggttctccccatgctcacacgcccttcattctaagctgggggaggctgctgtagtaacacagatgcaaaaaataaactttgactaaatggcttcatgttccagatgattggatgcctcgttaaagcacccaaagatgaagctactgctccrgcaaagttgctgacctaattttgagaactaaaagacagagctaagtgtgttttcatggcatcccacattcctttcttaattcatcatgattcatgggaaccaggatctcaggctgcccctcccccaggtagcagttaagctggtggaattgttctctctagtccataaggacatggaaac

SEQ ID NO: 68837 - DNA, 1080 bp, Homo sapiens
cagagggatgactttgaataaaatgggagacaggtttggcctgagcagtttccagcttgaattttcctttcagcttcgtgattttgggggcccaagatattttcctttcacrgtgtctttttgtaagttttgaaaatttcttcattctcttcaaatattgcttattctttatgctccttttctctcatctttcaaattcacattagcctttcatcatattccaatgtctcttacatttttctgtattttctattcttcttatcatgcttcagtctagatattgtctgctgatctgtctctttcattagttttctttttttgtgtatgttctctgctcttaaacccatctattgtacttttaccttccattgtattttttagtgacttaattttaatattttccttttttaaaatttcatttttgcgtgaggattctccagtttgccatatattttcttgaacatacaaattagagttattttaaagtccctgtctgatgattacagaaaatgaataacttgagtctacctatattgcctattttttcctcagagattgtggtcagttagacctatttcctggcatgcttagtgatttgggattgaattgaaaatggtgtatgaaaaattttagaggttctgaaagatgtcatcttcctttaaagagggtcgatttttctggaaggtagtcagaaagggggaaaattatcttgatccaattagagagtgtaatgattctagggtggatcctggcttttgtgagtcctcatctatttcctgtttttcatttcttctaggacttagcctttcagttttgagatatgaaaacttaggtttaccaggttccaactccttggagaatctgaactataattttggtctccctgtcactacacgactgccaaactctgcctttctgttttagcctctttgctgcattttgtgcttcacttcttgtcctcttgtcttatgccgtttaggaattgggaaatgcttcaaggggaaaacggtacagattgttggaatatcttctctgtgattccatttttttctctctgtctacaatcttagtccctcaagt

SEQ ID NO: 68838 - DNA, 1349 bp, Homo sapiens
tctggggcttgtgtttcgaatgccaaaatagcctaatgtcgactgattttgattctacttttctctgagctggggatatgatatgtcataagatattatataattgtatggatcacaggacatactatcaaccacattatataccagattaagtgataggttatactgcatatatataacctatatataaaagtgttttggtcatttaaagttgaaccatgcatcttgtgcactgtatcatagaagttaaattatgtattttatttatattatagcatgccttctatttatatagcattttaatctgtaaaatactttcttatatagtacctctttttatccctattgcaaccaggtacagttgatacctttttyataaagaaaaatgaaaaagggatcatgaaggaaaattacaacctagtcaaatcctgccaggatacggcagaatggcttggctcaggatgtgtgccagcaaggcagggaaggggtcaccagtgaatcagggatcaggggcaaaggtgtacctgctgaccaggcaggcagattcgtaaggcctggcctgcggggcagcccctggccaaagggcaacctttcgttcaaggagtaggagtttttttccctgtctcaaacctgcccaaagttaaatgtacaagtgagtgcaccccttccaagccctcttgctatgagactagtcccatacagtaacaggaggctgccttctcctctgttctccagggtcctggtcatactgctctaggatggtttggatttcagaaaaatagcaaatgctacttacagtcaaatcctttaaataaagtgagtgatgaggctaataaatctggctttgggcacccacaacagcgtagactgtttgggagaagggtagtctgcttcctgctgataatcaggaccagctctgggagcgactggccccgcttcaccagtcacccctctgattcctgaggggagggctgtttccacgcatctgttcggtggacggtccgcatgtgactggggctcatgcacaggcccctccagcttggccctgatcattcaggggtggcctggatgttgcagggctcctgggggtgggcagtgtttcgtgccttggacactgcctgctgcagaggtagctggcacgccaaggatgtactccacgtaggagccacatgcctgggtccttgccccatgccggctctggctcccgcacggaccagtgtcctcacctccttgctcagagcctgggccttctgctctcacatcactgcagcaacacctgctcaacccattgcttagggtcattgtgaggatcatatgagaagggaaaacacggtgcaaaagttaaaatg

SEQ ID NO: 68839 - DNA, 1349 bp, Homo sapiens
tctggggcttgtgtttcgaatgccaaaatagcctaatgtcgactgattttgattctacttttctctgagctggggatatgatatgtcataagatattatataattgtatggatcacaggacatactatcaaccacattatataccagattaagtgataggttatactgcatatatataacctatatataaaagtgttttggtcatttaaagttgaaccatgcatcttgtgcactgtatcatagaagttaaattatgtattttatttatattatagcatgccttctatttatatagcattttaatctgtaaaatactttcttatatagtacctctttttatccctattgcaaccaggtacagttgataccttttttataaagaaaaatgaaaaagggatcatgaaggaaaattacaacctagtcaaatcctgccaggatacggcagaatggcttggctcaggatgtgtgccagcaaggcagggaaggggtcaccagtgaatcagggatcaggggcaaaggtgtacctgctgaccaggcaggcagattcgtaaggcctggcctgcggggcagcccctggccaaagggcaacctttcgttcaaggagtaggagtttttttccctgtctcaaacctgcccaaagttaaatgtacaagtgagtgcaccccttccaagccctcttgctatgagactagtcccatacagtaacaggaggctgccttctcctctgttctccagggtcctggtcatactgctctaggatggtttggatttcagaaaaatagcaaatgctacttacagtcaaatcctttaaataaagtgagtgatgaggctaataaatctggctttgggcacccacaacagcgtagactgtttgggakaagggtagtctgcttcctgctgataatcaggaccagctctgggagcgactggccccgcttcaccagtcacccctctgattcctgaggggagggctgtttccacgcatctgttcggtggacggtccgcatgtgactggggctcatgcacaggcccctccagcttggccctgatcattcaggggtggcctggatgttgcagggctcctgggggtgggcagtgtttcgtgccttggacactgcctgctgcagaggtagctggcacgccaaggatgtactccacgtaggagccacatgcctgggtccttgccccatgccggctctggctcccgcacggaccagtgtcctcacctccttgctcagagcctgggccttctgctctcacatcactgcagcaacacctgctcaacccattgcttagggtcattgtgaggatcatatgagaagggaaaacacggtgcaaaagttaaaatg

SEQ ID NO: 68840 - DNA, 1349 bp, Homo sapiens
tctggggcttgtgtttcgaatgccaaaatagcctaatgtcgactgattttgattctacttttctctgagctggggatatgatatgtcataagatattatataattgtatggatcacaggacatactatcaaccacattatataccagattaagtgataggttatactgcatatatataacctatatataaaagtgttttggtcatttaaagttgaaccatgcatcttgtgcactgtatcatagaagttaaattatgtattttatttatattatagcatgccttctatttatatagcattttaatctgtaaaatactttcttatatagtacctctttttatccctattgcaaccaggtacagttgataccttttttataaagaaaaatgaaaaagggatcatgaaggaaaattacaacctagtcaaatcctgccaggatacggcagaatggcttggctcaggatgtgtgccagcaaggcagggaaggggtcaccagtgaatcagggatcaggggcaaaggtgtacctgctgaccaggcaggcagattcgtaaggcctggcctgcggggcagcccctggccaaagggcaacctttcgttcaaggagtaggagtttttttccctgtctcaaacctgcccaaagttaaatgtacaagtgagtgcaccccttccaagccctcttgctatgagactagtcccatacagtaacaggaggctgccttctcctctgttctccagggtcctggtcatactgctctaggatggtttggatttcagaaaaatagcaaatgctacttacagtcaaatcctttaaataaagtgagtgatgaggctaataaatctggctttgggcacccacaacagcgtagactgtttgggagaagggtagtctgcttcctgctgataatcaggaccagctctgggagcgactggccccgcttcaccagtcacccctctgattcctgaggggagggctgtttccacgcatctgttcggtggacggtccgcatgtgactggggctcatgcacaggcccctccagcttggccctgatcattcaggggtggcctggatgttgcagggctcctgggggtgggcagtgtttcgtgccttggacactgcctgctgcagaggtagctggcacgccaaggatgtactccacgtaggagccacatgcctgggtccttgccccatgcyggctctggctcccgcacggaccagtgtcctcacctccttgctcagagcctgggccttctgctctcacatcactgcagcaacacctgctcaacccattgcttagggtcattgtgaggatcatatgagaagggaaaacacggtgcaaaagttaaaatg

SEQ ID NO: 68841 - DNA, 744 bp, Homo sapiens
atttctgttcgtctaaccaagactaaaggcaggacctggagaaattttgggcaggccttccaagagccacccagccccaggcactggctatagacagctctcakgtaggtaaggggaggcctgtgagcagaagaggcagcctccagggggtggcaactgggaaggaaggagaggagcagggtaggtctacagctgcagcctctcctggtgaccagcattcaggctacctctggctgtggctgagtgagaaagaaggtttttgtacacccagccctcagccgtccacccaaggctgctccagcctgggggggctcctgttggctcatgggaacacatttggaagagaagatggccctgctcagctgtattaagagaatacacacacacacacacacacacacacacacacacacacaccacacacacacacatatacactaagcaaagggttaattgttgtaaggagttcgccagggaacaggaaacctatggttttcttttctttaaaataaaatcctgaggatccaggaatgacttctctgtttcctccatctgctggataagctgaccatttggaagttgagtctgtcccgggatgatggggcagccttctttcgcagtactgacttgagctacatgtgctggacaggagagatgaggggttgtcactggaggtactgcatgtgttgccctgtcctgcgtagacaaactgtgccagctggctgcaaggggtgaggcttggtg

SEQ ID NO: 68842 - DNA, 744 bp, Homo sapiens
atttctgttcgtctaaccaagactaaaggcaggacctggagaaattttgggcaggccttccaagagccacccagccccaggcactggctatagacagctctcatgtaggtaaggggaggcctgtgagcagaagaggcagcctccagggggtggcaactgggaaggaaggagaggagcagggtaggtctacagctgcagcctctcctggtgaccagcattcaggctacctctggctgtggctgagtgagaaagaaggtttttgtacacccagccctcagccgtccacccaaggctgctccagcctgggggggctcctgttggctcatgggaacacatttggaagagaagatggccctgctcagctgtattaagagaatacacacacacacacacacacacacacacacacacacacaccacacacacacacayatacactaagcaaagggttaattgttgtaaggagttcgccagggaacaggaaacctatggttttcttttctttaaaataaaatcctgaggatccaggaatgacttctctgtttcctccatctgctggataagctgaccatttggaagttgagtctgtcccgggatgatggggcagccttctttcgcagtactgacttgagctacatgtgctggacaggagagatgaggggttgtcactggaggtactgcatgtgttgccctgtcctgcgtagacaaactgtgccagctggctgcaaggggtgaggcttggtg

SEQ ID NO: 68843 - DNA, 711 bp, Homo sapiens
gatgttctaaccactgtcatcacgtataggcacgtccttcaacacagcaccctccttcctgtgtgtgtgtgtgtacgcgcgtgcagcgtgcacgtgtttgtcagggacacacgtgtgagagcacgtcttcttcattgggtttattttctttgtgctgctaatgcttttggcctctgggggtgctatatatatacagatacggaatttgagaaacacaggattttcaacctgaaaggaaccgtaggtattttctaatctacttttctcattttwcgcctttggcaatgtccagagagttgaggtgacttgttcagggttagatagagaatgtagatctgtctctgtctttctcacgtgcacacatgcacatccacactcactgtctggtaatggtaatggatggctgtttcctctctttttctccccctctccatgtgcctcctttcctccatcagtctgtctctctttcctcctctccttctgttctgtggtcctggctggcagctgaggatggcacagggcgtgcagaggctagctcccagggaggctgccccagcagctggctgtgccccaactcccccctcctccctgagttgggaaatggaggcacagtgtgttccctggcttccctattagtcaggaacctaagggagcactacctcagtcctggggaagagcaaagaggaaggacagatgactctgtttgcaacc

SEQ ID NO: 68844 - DNA, 711 bp, Homo sapiens
gatgttctaaccactgtcatcacgtataggcacgtccttcaacacagcaccctccttcctgtgtgtgtgtgtgtacgcgcgtgcagcgtgcacgtgtttgtcagggacacacgtgtgagagcacgtcttcttcattgggtttattttctttgtgctgctaatgcttttggcctctgggggtgctatatatatacagatacggaatttgagaaacacaggattttcaacctgaaaggaaccgtaggtattttctaatctacttttctcattttacgcctttggcaatgtccagagagttgaggtgacttgttcagggttagatagagaatgtagatctgtctctgtctttctcacgtgcacacatgcacatccacactcactgtctggtaatggtaatggatggctgtttcctctctttttctccccctctccatgtgcctcctttcctccatcagtctgtctctctttcctcctctccttctgttctgtggtcctggctggcagctgaggatggcacagggcrtgcagaggctagctcccagggaggctgccccagcagctggctgtgccccaactcccccctcctccctgagttgggaaatggaggcacagtgtgttccctggcttccctattagtcaggaacctaagggagcactacctcagtcctggggaagagcaaagaggaaggacagatgactctgtttgcaacc

SEQ ID NO: 68845 - DNA, 949 bp, Homo sapiens
tgcatggaactgtgtgagccaacgtgtgggggtgggacccgtgctgggagcactgggtggaggggcactctgtctacctcctggctgkggggatgtctgcctggcaggctgtggcagggagagggtgcaggtgcttgcaggatagcccagcctctgctagagaacaggtgactcgttctccaagcatggggcctggaacctggctagtggaatcattgcttcaccacaaaggtggagccacaggcttcctgcatcccacagagagagctttctgagcacaaactgcaagccaggcacaagccaccaatctctccagtgccctgccttcccatggatcagagactcccagcttcttggaagccctgcctcatggtctacctggcagccttgagggaccaaatgaccttgcttttcccattaagagcctcatgccatgttttgtagtcctgttcccatccaattcaggtaagaacttggcttgaacctaggacattcctagtctctgtagccaaggttcttccctcctcctcttctttcctttccaactccttgactcaagtgtaggagctgctgagtctttggtcctgatctttctgcctcttccccatcccctccccaacatccctctccgggcataggcccattcacatactgccaagtgtctcacagttccctgcccgggtcatggggcagggctaaccccactctctcagtctgttgagatggaaactaaggttcagagagattgaacacgaagcatgttatgagtagggctgggattagaacacagggctcccagctccctggccaaagcatttcctactcagctgccttctctccctccttgcgcactggctggcctggccacaggggctgtggggctgtgcagcctccttaaacacagggcggttttatcactaacaccctgggctccgcacagctttcttct

SEQ ID NO: 68846 - DNA, 949 bp, Homo sapiens
tgcatggaactgtgtgagccaacgtgtgggggtgggacccgtgctgggagcactgggtggaggggcactctgtctacctcctggctgtggggatgtctgcctggcaggctgtggcagggagagggtgcaggtgcttgcaggatagcccagcctctgctagagaacaggtgactcgttctccaagcatggggcctggaacctggctagtggaatcattgcttcaccacaaaggtggagccacaggcttcctgcatcccacagagagagctttctgagcacaaactgcaagccaggcacaagccaccaatctctccagtgccctgccttcccrtggatcagagactcccagcttcttggaagccctgcctcatggtctacctggcagccttgagggaccaaatgaccttgcttttcccattaagagcctcatgccatgttttgtagtcctgttcccatccaattcaggtaagaacttggcttgaacctaggacattcctagtctctgtagccaaggttcttccctcctcctcttctttcctttccaactccttgactcaagtgtaggagctgctgagtctttggtcctgatctttctgcctcttccccatcccctccccaacatccctctccgggcataggcccattcacatactgccaagtgtctcacagttccctgcccgggtcatggggcagggctaaccccactctctcagtctgttgagatggaaactaaggttcagagagattgaacacgaagcatgttatgagtagggctgggattagaacacagggctcccagctccctggccaaagcatttcctactcagctgccttctctccctccttgcgcactggctggcctggccacaggggctgtggggctgtgcagcctccttaaacacagggcggttttatcactaacaccctgggctccgcacagctttcttct

SEQ ID NO: 68847 - DNA, 984 bp, Homo sapiens
atgccgatcttcagcagctctgtcttgcagcttttgccttgggttggctgtgctcacactcagtggggagcgggtggaggtcttggcatttgttgtgcaaggttgtcgttggccattactggaacaccccaatctatcctcatagactttggacactcagcccctaacaacacaccaacttgttttttgtgtgtgtgtgaagatgctttcttctaaatacatacgtccttggaaggcagagtttgaatggcatgatgtgcagtttatcatattgaaagacttttcagaaaaccaaaaggaaaatcaaatagcaattcccaggtacttgttacaaaaacctagcagttcaaattctgaatggatgggcagtattggccaagggggaggaagtcgaaggaatagacccaatatcactggtgcttctttgggaagtttcctaagaatcaccatggccccagggctcgccatgtctgaacatgagtgggtctgtgtagagatcttaaccctaaaagtttytgtacttaggaagtctgtgatatgaaaactcaagtccagagatgatcacccactttatataaggagttattcaaataactccctggacacatttaaaatggaacacggtcctctctgtagtccaaccaggaacacagctcttatgctgagcgaggggttcctgaattacccttgtttcttttccaggaggttgcagctgaggacatcgtgcagcccaactactaacagtgatgaggtctggattttcctgactttctctgcttctgtgctatggaatggccagaagttcagcttgtggaacacagaatggtctgcaagcaaactctttcctctccttgaaatcttgctattcctgtcctttgttcttagaagaaactgagctctagatatgtctcactgttggctttgtccacagggccccaaggtaagcactgctgctcaggagataattcagagtgctaatggcat

SEQ ID NO: 68848 - DNA, 612 bp, Homo sapiens
atgaagggtataataaatgaagcgtattactccatttttagtcaggcattacattgataaccaaaaactcagagatgtgacttgctgaaagttgactaattctttttccaaaattactttgaatttcatggaacaacagaatcatctagaatgaagtgctgtctttcatcttagctcacattaaataaactgaggcgtgaagagcaagcctccctcataaagaggtaggcaaatttgtctacaaacgcacacgccaygtactgcaagcatcaaaatttagtacttttattttttacttttttgagatgaagtctcactctgtcacccaggctggagtgcaatggcgtgatctcggctcactgcaacctccgccttccgagttcaagtgattcttctgcctcagtctcccaagtagctgggattacaggcatgtgccaccacgtctggctaattttcgtatttttagtagagacggggtttcaccatgttggccacgctggtcttgaactcctgacctcaggtgatccgccttccttggcctcccaaagtgctgggattacagctgtgagccactgcacccagcctaaaattcagtacttttacatatgcacg

SEQ ID NO: 68849 - DNA, 612 bp, Homo sapiens
atgaagggtataataaatgaagcgtattactccatttttagtcaggcattacattgataaccaaaaactcagagatgtgacttgctgaaagttgactaattctttttccaaaattactttgaatttcatggaacaacagaatcatctagaatgaagtgctgtctttcatcttagctcacattaaataaactgaggcgtgaagagcaagcctccctcataaagaggtaggcaaatttgtctacaaacgcacacgccatgtactgcaagcatcaaaatttagtacttttattttttacttttttgagatgaagtctcactctgtcacccaggctggagtgcaatggcgtgatctcggctcactgcaacctccgccttccgagttcaagtgattcttctgcctcagtctcccaagtagctgggattacaggcaygtgccaccacgtctggctaattttcgtatttttagtagagacggggtttcaccatgttggccacgctggtcttgaactcctgacctcaggtgatccgccttccttggcctcccaaagtgctgggattacagctgtgagccactgcacccagcctaaaattcagtacttttacatatgcacg

SEQ ID NO: 68850 - DNA, 694 bp, Homo sapiens
agggctcccatctgcttttgcagaatcagagaatgtgatcactgcaacggttgaggggagggcgcaggggaaggaagggggagggccaaaggctggagggacaatagctcaccctggaatattttcaagtttagtggggacgactctggaaacaagctgactctgaaaatgacacagaatttacagtgttattgcttctttgaaaggtgggcggtccgtggtttttcctcagcattcattcatatacttctaggaagtgccatttagtttcatacagtttacatatacctggttttgctgcatctggagagattcaggatagttcttgttaatgagaagtcatagggtgaagctataatgcactatccattgtgaaccctgataacttgagataggtctcagtgaatttagaaagtttatctggccaagattgaggacgcacacccrtgacacagcctcagtaagttctgaggacgtgtgcccaaggtcatcagagcagtttggttttatacattctaggaatacagaagacatcaatcaatgtgtacaagattaacattgggtcagtctgcaaaggcgggacaacttgaagcaaaggcgggaattctcaaagcaaggagggcacttctgggacataggtagttgagagacaaatggttgcattcttttgagtttctgattacccttcccaaag

SEQ ID NO: 68851 - DNA, 694 bp, Homo sapiens
agggctcccatctgcttttgcagaatcagagaatgtgatcactgcaacggttgaggggagggcgcaggggaaggaagggggagggccaaaggctggagggacaatagctcaccctggaatattttcaagtttagtggggacgactctggaaacaagctgactctgaaaatgacacagaatttacagtgttattgcttctttgaaaggtgggcggtccgtggtttttcctcagcattcattcatatacttctaggaagtgccatttagtttcatacagtttacatatacctggttttgctgcatctggagagattcaggatagttcttgttaatgagaagtcatagggtgaagctataatgcactatccattgtgaaccctgataacttgagataggtctcagtgaatttagaaagtttatctggccaagattgaggacgcacacccgtgacacagcctcagtaagttctgaggacgtgtgcccaaggtcatcagagcagtttggttttatacattctaggaayacagaagacatcaatcaatgtgtacaagattaacattgggtcagtctgcaaaggcgggacaacttgaagcaaaggcgggaattctcaaagcaaggagggcacttctgggacataggtagttgagagacaaatggttgcattcttttgagtttctgattacccttcccaaag

SEQ ID NO: 68852 - DNA, 538 bp, Homo sapiens
taatcctcatcgccatattttatcactgaagtatttaaacagttttatcaaaactcatcttatgaggaatgatgggatttcttatagggactcccttcaaggttattaaaaaaaaaaaamaaacaacaaccagaaaacattcgaataactctgctcatttaaatctccagtctattaccccaatgtgtctttaacagataaaatttaatttaactgggtattaaggatatactaatctcaaagtaaacacaggctgcacagatgtgtctacttttggaaataagagtatcaatattacaaagacctcttgaaaatttaatagacatgaaattattaataacattatcaatctatttgcttttcttttttttttgagacaggatcttactctgtcacccaggcttgagtgcagtggcacaatcatggctcactgcatactgaaactcctgggttcaagcagttctcccacctcagcctcccaagttgctgggactacaggcatgtgctgccacacctggctaatttattattttttgta

SEQ ID NO: 68853 - DNA, 879 bp, Homo sapiens
tgaacaaaataacacagtaaacgaagctagaataacagaatggagccagattctaaaagtctgaaacggtgtgttggaaagtttgaactgtactctgcaaccaacaaagaactgacacaatcaacctattatacaggaagggagaggacttaaaaacctggaagactattcaaagagctacttcagtaataaaggagtatactaggatcaatgacaaattggattaaagcatagattttagacagtatggactaattataaaatataaaaagaaaaagaagaagttttatgaccactaaagagattatgaggccaggtgcgatggctcatgtctgtaatcccagcattttgggaggctgaggcaggcgaatcacttgagttcaggagttcaagaccagcctggccaacgtggtaaaacctcgtctctactaaaaatacaaaaactagctgggcgtcatggcgggcacctgtaatcccagctatttgggaggctaaggcaggagaatcacctaaatctgcgaggtggaggttgcagtgagccgagattgcgcccctgtactycagcctgggtgatggagcgagactctatcccccccaaaaataagaagaacttacttgttttggaataggagttaaaagaaattaaagaatgtgtaagcagaaactcagttctatgtaagaaaacccaattccccctgagaaagagaaagagctggagccctttaaaaattatctgcctgtttttctgtggctagtaagccttatctctcctcctttcccaggcattgtgaagaccctgtttctctagctgtgcagctgcaaggtcactagacagataaactcaagccataaaacacattttttccttggaaagtaaga

SEQ ID NO: 68854 - DNA, 541 bp, Homo sapiens
ctgcaagttgggaattttcaaactgcaaagacgctttctcagtttggagatstttgatttgtcctgtgagctcttcattcattgattttttttcccacaattgtcaagctatttcttgatttttcttgactttcacagaacacatttaagtcaccatcacccaggacgctcttcagatggccttctgactgatagttgggcgggaggggctggggcaggcagtcttcattttctgctttcctctttagctgtactttcgagtcctcgtcactgtggtccctagagaaatctcccaactgcatggtgtccagcaggttttcagccatagattttaattggctcatggtatctttcatgacctgttttatttgtgcattcaaaggtttccagcttttctttctctccttcctttcctgtactgtctgcttccatcttgcaatttcttggtcgagcacttctggactttctgctaaatgagtgttttcattcaaactgttatttccttctgaagtttttctccatccttctttgatccttttaa

SEQ ID NO: 68855 - DNA, 693 bp, Homo sapiens
agtgtctgcaggatgagtgagtacatttatgaatgaatcttccatttaaatattgagttccttatctcatacctgcagtgcaagagaaagcccctcgtgttgcagtcagaaaaccattgctgaccttggttgaccttagatgggtcacctaacctttcgaggctcaactccttcattcataaaaatgaatggatgctttcttgaggttgctgtgaggacatccctgagatgatgcctgtgaagaaagtctgcaaactgtgaagcactatacagattaacacagcaacatactgcatgtgcatggctgtgcatgcgtgtatgtgggtgtaaatgtgaggctttttgttcttggcaactgttcataactgtacctcggtgaactcttaggtaggtcaggaagctaaggtttactattgtgcagtgttcagcatgcaactgytttttggaatgtcactgtctttctgaatgttccttttggtttattaggttagttcacattaagaagaacttggtgaggaagccacatggaagaaatggaaaggctttctttggcagctctaccctaagagggcaaaggggtcagttctgcgagagaacccccacaaggaggctggcccgggacaagcattccaggcctgtctcaagtctgaatacaaataaatcccttctcaggtggttttcttcataaggatc

SEQ ID NO: 68856 - DNA, 1365 bp, Homo sapiens
aagccagccaacaaggaatctgagattatattctccaggcatatgttcttctcctttggcacagttggcctctcatttatcgggttctgggataatcctttctgcatatctctgtgctgtaaatggtgtcctcagagccttcacagaagctccttaaatgtctgctcatgtttcagacaagtggttagatcatacatcaatgcatgatcttctcataacagattacctgcctctgaactccaaccttcacaaaatgcggtatttgattctaacctatcactcataggcagcgtgacaactcttaaaagaaggagacgaactctatatagttcattccttactgacatttttaaatgaacatctgttatgtaaactcaggtgaagttttcaaaaattcagctttactttttcattaattctgataactggttgactggtttccttgactcctggttcattaatcttcagctatgatgatatttctctttagacatattttctgaataggttgtgcatgkggggattagttaagaatgtcctttcttcctctgtaactggataagccctagattttttaaattggcagttaagtgatgttcaatcccaaaataaccacaaaggttgagctgatttctgcattatgacaaggcagtaaggagtagacattaaaatcgcaacgtgtcttagctttaattcatttgatgaacagtcagtcaggtatagccatgggttaggagtctgagtctctttgggatgctggtgatttgtttttttttttctttctgaacacccatctcaattaattgtctcagcaaaatgagaaagtcaaatttcgatgggcctcattttaatttctaccctagtcaaaacattctacttattgatttctgctctaattcccctaaggggttataagaaattttctgtcttggaaaaaatgctccacagtgtcacagagctagtgggaacttcagagatcatatagttcaatgtcctcatttcacagatgagaagactagggcctagaacgatcgagtgatctgaccaaggtgactcagaaagttagcagcaaagccaggccaaggcccttccagtgctctgtttatcataccatgttctctgccccggtatagactgccttgctgctactatctcctatttattctagtctcttgtactcatcctcccatttcctgtgattcagctatttcctgaccacctattttatattctggccacccattttaccatgaaacatttcacctgatgtcttactcattgccttcctgaattgtggtataaatttagtgctctcattttggcttacatccatggtgtctgctttaccctgacagttaaatcctg

SEQ ID NO: 68857 - DNA, 626 bp, Homo sapiens
tagggtccttttcgctcttggttgggttccatgaggcacacttataatgacctcctctccacatgcttaagccagtttgagycacttcctgtcacaactgaaagagccttaggggaaccgggaaataattcatagtcaatctattttactctcttcctctttcttttcttttgtctgtttccaacttcagagttcaagtcactatcccgctttccccagtgctgcatgttgttgagtgggcagtattgcttggaagtggaatccattgcactggaagaaggaaaatatcatggcgaattagtaaaactaaagtgagttgaggcagtggctttaggaaagaacatgtggcttgatgcaggctgacacaggcatagatgggaaacgatgaactctagaatgttttgtgcccttccagttggaggattagggagaactaagaacgctattagagtttgaccaagtagagttaaggcccgttggccaaaggccacctggattgcccaggaaatgatgctgtaaccttacgataatgatcctacaggaaattcatatgcaaatgaagtgcaaagtaattagagtaattagtggcaaagcaatatgtggttccaacagctctgccttggggg

SEQ ID NO: 68858 - DNA, 626 bp, Homo sapiens
tagggtccttttcgctcttggttgggttccatgaggcacacttataatgacctcctctccacatgcttaagccagtttgagtcacttcctgtcacaactgaaagagccttaggggaaccgggaaataattcatagtcaatctattttactctcttcctctttcttttcttttgtctgtttccaacttcagagttcaagtcactatcccgctttccccagtgctgcatgttgttgagtgggcagtattgcttggaagtggaatccattgcactggaagaaggaaaatatcatggcgwattagtaaaactaaagtgagttgaggcagtggctttaggaaagaacatgtggcttgatgcaggctgacacaggcatagatgggaaacgatgaactctagaatgttttgtgcccttccagttggaggattagggagaactaagaacgctattagagtttgaccaagtagagttaaggcccgttggccaaaggccacctggattgcccaggaaatgatgctgtaaccttacgataatgatcctacaggaaattcatatgcaaatgaagtgcaaagtaattagagtaattagtggcaaagcaatatgtggttccaacagctctgccttggggg

SEQ ID NO: 68859 - DNA, 2106 bp, Homo sapiens
agttcacactcaccaggatggctataataaagacagacaataacaagtgttggtgagaatatgaagaaatcagaaccctcatatgctgctggtgggaatataaaatggtgcagcagctctggaaaacactctggcaattcctcaaaaggtttaacatagagttgccatgtgacccaggattgctactcctgggcagatacccaagataaatgaaaacctagtccacacaaaaacttgtacgctgactgacacaaagaacaacctcaccctttctagcttaagtcacaggatgcagtcatcttccagaggactcgtctcaacctgtgtagaaagagtctcaaaaatgacctcctcaggacagcaccacaacacataatgactagcaagtgtgcaatggcagagggactaattggtgactactgggattgcaacctaggagatgaccacgtggagcagaggagagatgaccatacagacccctgagtacccacctgcacccccatcagacaggcacctttcaaactcttctagactttatggcattaaaacccagagaggtggccctagggatatggactaaaccagcagaagcctaaattgatatggtttggacattcatttcctccaaatgcatgaggtttgaatttcaactggttacaatgcttaaatgccaactttccttcctctcctggctttaaattaagctcaaggcaccaagaggtgagttaataagggaggagctgccccaccctcggcatcaggtagaaaggggcaggaaaaaatggcaacatactggaactaaggattggggtcactggctctccccaccccaggaactcagaaggcagcgactctcacttaatggtgcctcagctactctggggagctgctgatgggtctatagtggccttccattaggtttgtcctttaaaggcccatatagaaaagtaggatacacaatacaatactattaagggcttgcaaaaagatccaagcactttgttaacacccttttttttgagacaaggtctcaccctgttacccaagctggagtgctgtggtgagatctcggttcactgcagcctcgacctccccaggctctggtgatcctcccacctcagcctcctgagtagctaggactacaggtgcctgccaacatgcccggctaatttttgtatttttagtatagacggggttttgccatgttggccaggttggtcttgaactcttgggctcaagtgatttgcccaccttggcctcccaaagtagctgggtttacagatatgagccaccggcacctgaccaacacttttaacagtctagaaccccttcaaatttaaggagtttttcaatctttctttcccttcaattcaagcagactcagtttgtctcatccgtttatctgtggatgggcttccatgagttacaagaaggaggctctgacaagcatgttttcaaaagttgtccaggtaattctgaggctctagaggttgagagctgctggtcttatgtctttatatccagcagaactcctcaccccacaagtaaatgataagcacagtcagggactctcggtatggagagtcaggcaaaggggttggctttctgcccaacaggaggtcaaatcagataaagctgataaaaatatacatgcatcaaactaattataccaagttattattctttggcaatttattttgccaaagaataacatttattgcctataatatttattgcctataataattaatgcaacagatgttgtatgtcttcagaggctaaaatgtgacctggtgttgagggcaaggtacagaagaagaagcaccgaccgagagtgacgatgttttatccgtagaggcacccactcaccaagcctagttctggtccctagtatgacacagggcaaggctgtcactcatccatcacacatttcctgatacacctctataccaggagccttgccagggctgggggataccaaatgagatagactgactcatggtagttgatatggtttggacgttcatttcctccaaatctcgtgttgaaatgtgattcctaatgttggaggtggggcctggtgrgaggtgactgggtcatgggggt

SEQ ID NO: 68860 - DNA, 1306 bp, Homo sapiens
acctgcgcagccctgggcacacagagatactcaagggccagcagagttgggtggaggagggcaggtaggggcctgctgcccccagcaggactctgccgcacctccctgctcctaacagcctctgttcctggagtactcctcctgcaggccagattccagctttccaggcaggaataatggagcaagaactgcatccaaacagccctaaatgaggacctgtaatcccctcgtcctcattcccagggtgcaaaccatctgtaaaccaaaaataaaatcctaaggccccccaccatctgaagggacttcctcctcagccagggctcttttaatgtttaacctgagagactgtttcaggccacgataggaagtgggggtcggatgtgcctcattatacctctccatcattaacaycaacatagactttaacaaatcccaaactcataactcagcatcatcccgtctcagatgttagtgcctgcattttactacggcctttcatggctggtgctttaacccaaaggcacagctcactggaggactgtaggcacccactgcagtgattcttggggagggccggaagtagagcgcatcagcgctgaaagggaacaagtgcagggatcctgggctccacccacctcctttcccacaccagagagacactgactcctgcgccaggacccagggtctccagaccttgaactaaagctcctttccagcctccagccccccaccccccagggaggggctgctggggctctgtctcagaggttcacctcacctctgtcgtccccgtaaagctacagactgcagagctctctagggtggggcacgcgaagctgactcacacaagaaagttaggattaatgaatgcccaggccaccagcctcacagggccatactcccagaattcttaattctgtaacaagccaggcactattgacaaagataaaagtagagaactgtgcagcccaggcagcccacagtgctcaggaaatcagacacacgagtaaactaaaaaccagtcaaccaacttgcttcagccgttggttcccagaggaaagaacccctggaggagctcctccagctccacttaggccattatgggccaaggccagggagggagcgccacctcctggtgggaaaagaaaaagcccaaactacttggctcaggattttttgttgaaaatgtaagtgcttgatatcaattaataaatctacaaatatttccagagagaccactgtgacacacagagataagttaactcactgcagtcagtctccagccacagggggcagtgaggctcgg

SEQ ID NO: 68861 - DNA, 1306 bp, Homo sapiens
acctgcgcagccctgggcacacagagatactcaagggccagcagagttgggtggaggagggcaggtaggggcctgctgcccccagcaggactctgccgcacctccctgctcctaacagcctctgttcctggagtactcctcctgcaggccagattccagctttccaggcaggaataatggagcaagaactgcatccaaacagccctaaatgaggacctgtaatcccctcgtcctcattcccagggtgcaaaccatctgtaaaccaaaaataaaatcctaaggccccccaccatctgaagggacttcctcctcagccagggctcttttaatgtttaacctgagagactgtttcaggccacgataggaagtgggggtcggatgtgcctcattatacctctccatcattaacatcaacatagactttaacaaatcccaaactcataactcagcatcatcccgtctcagatgttagtgcctgcattttactacggcctttcatggctggtgctttaacccaaaggcacagctcactggaggactgtaggcacccactgcagtgattcttggggagggccggaagtagagcgcatcagcgctgaaagggaacaagtgcagggatcctgggctccacccacctcctttcccacaccagagagacactgactcctgcgccaggacccagggtctccagaccttgaactaaagctcctttccagcctccagccccccaccccccagggaggggctgctggggctctgtctcagaggttcacctcacctctgtcgtccccgtaaagctacagactgcagagctctctagggtggggcacgcgaagctgactcacacaagraagttaggattaatgaatgcccaggccaccagcctcacagggccatactcccagaattcttaattctgtaacaagccaggcactattgacaaagataaaagtagagaactgtgcagcccaggcagcccacagtgctcaggaaatcagacacacgagtaaactaaaaaccagtcaaccaacttgcttcagccgttggttcccagaggaaagaacccctggaggagctcctccagctccacttaggccattatgggccaaggccagggagggagcgccacctcctggtgggaaaagaaaaagcccaaactacttggctcaggattttttgttgaaaatgtaagtgcttgatatcaattaataaatctacaaatatttccagagagaccactgtgacacacagagataagttaactcactgcagtcagtctccagccacagggggcagtgaggctcgg

SEQ ID NO: 68862 - DNA, 910 bp, Homo sapiens
tccaccaccaccatcctcagcccccatcagggccagctgcaacatttctctctggggtggtactgagggactatgctctatttggaagggcttgcatgacactttgtatgtatgacactgagaaaatttagttgtactgaagaatggaaagggtagagacatggagtgggctgaatggagcctgtgtccatcgctattacctcgttggtattactggccctttcccattcactatgagctcaaatacctccttctaggacatcatcctccatattcacagcccttccacctcatctgtttttcctttttcatgaaacttctcctcctctctgaattaagactgtggtctcagaaatcagactgtctgggttcacacactgcctctgcctaccgactctctggccttgggcagcacagcttattcagtctccctgcccatcagtttcttcagccacaggatgggattaataataaggcctaactcttggctgctggrggcattactcagaacttgtggagcacttgggcttagtgttctgtgggctctcattagtggggccactgccgtccatttggtgcattgggcagtatagaatgagaagaggtgtgtgtgtgtgtgtgtgtgtgtgtgtgaaaagaagtgtgtttgtatgaaaagaagtgtgtgtgaatgagaagagatggaaaatgtccatctcttcttcataggcttctgcccttctcacccctcagcctgatgctgctgtggagcatataaggtgggctgcaagcatttgtagctaaagctgccaatgtgtgtataatgttgccggcatggtgagtgtgaccacatccatcctgttgcctgggtcttatctgcacatccagttggtcatttgaggccctctcatccacatcttccttcatgccc

SEQ ID NO: 68863 - DNA, 2160 bp, Homo sapiens
ggatggggtgagtgctgacttgtcagcctggagagtgcctggcagcattgggagggtaaggtttagaggatctgggttttatcaattacctaacttctttagcctctggtttcctgctcgatgataggggttcatctaatctgcaaaatctctcccagtggagtggttgattgctaaaaggggtaaatatataccagttcctccagggatggaaacactaatcaacaggtataaaagccacatgattcttgctattgcaagggaaagaacccacttgcttttactttctgctctcccacatcttgcctgtaaaggcttaagtgtggcttgatggtttggtaggaagtgtttcctttcagaagggctctcctagttttgttgcctttgaaaatgaaagggaaacagtagaagacagagaaaaatataccagttctacagcttgcatatttttttttaacctcctgaaggtttttagcatttcactagagatgtgggcttcatcccgagaatcggtatccaagcagagataatctctcagtgtagcaagtgtttgtccaggcttgcctaacctgaggggtagcagtaaaggtaaaacaattgtccctagattgagtagcattggctaaatggctgaagtcacagcctaggccatcctgctgttcatgattcacttttattttcttggtttcagcatccactactaccacctcccttcccaaactcagccaaggtcatgctccttttccccagtctcttttgagattcccatcagtaaccgtctcctccagctccatacccccgaagctaaaggcagcgccatgtcttgtgtccaacccaggcctctgggatgctaagctggtgtggctccctggggccagtactcaaggaggaccctggcttttcactstcctcccaagtggtgaaggtgaaggtcgtatacagttctcagggcacatggagtaggcagtttgtcctacacaggtttgtggaaagcctgggtttcctgccaatcaggctggtgggggctagacatgtcaagacattgggtggtactgtggatgtgacacgtgtaaactcacactggtggccaagaagatgagttcaacaccacattagggaataagacaaaagtccacaatgtggagactttttgtaacaggtttaattgttctggaaattcaggatgatttagcatagtctgatagagcatcagtaacaggtggattttaagccaacaggtgttattacatttgtcaaaactcactgaactgtatgcttcagtgaaagggtgcattttactgcatggaaattattctgcaatgaacctgactttaaaacatagtagggcctggaagcacccatgtctctgagcctgaggaggttagggaatccccctgggtttgccgtggctgggcaacgcggtgctccttgggaaggatcctgttgggctgtggaagcagcctcagacacgtcctttcttccctgtctctcagatactttgcagggtgagagtgaataatacattgcactgtgaacagttgagttctgtgaccccatgagacaggacataaagtcagatgaaggattggactcatggtgcagaagcagcctgtgggaaaatcacttttcttggggaagctgtgcagtggcaggcagggtagtgagctggggtttagataagaagtgtggagatggggtggctgtgagtttaaagggggagtgtgcagggagcactccccagggcctgtgactggtgccacagctgcagaggagagtgcagactggaccagggtatttattaaaccacctgaggtggaaaagcccctttgcagacaggccccaaacaagccacagactaaaattgttcctccgttacccaagcccactcctccaagaaggtgtttgagtgtcagcaatgttaatttccaggctgctcgtaacaagactctccaaagatgtctggtggcgggtggggagtaggtgcccaccagcccctgctgccttctaagccctatttgggttgggatttcctaatatcctcttcccattcatcagtccactttctctcagaggaacaggcaaccttgaacactggaagcaattctagtaagtgaagcccaggcgctgtatcaagttggaggtgttggagcaatcaacggc

SEQ ID NO: 68864 - DNA, 2160 bp, Homo sapiens
ggatggggtgagtgctgacttgtcagcctggagagtgcctggcagcattgggagggtaaggtttagaggatctgggttttatcaattacctaacttctttagcctctggtttcctgctcgatgataggggttcatctaatctgcaaaatctctcccagtggagtggttgattgctaaaaggggtaaatatataccagttcctccagggatggaaacactaatcaacaggtataaaagccacatgattcttgctattgcaagggaaagaacccacttgcttttactttctgctctcccacatcttgcctgtaaaggcttaagtgtggcttgatggtttggtaggaagtgtttcctttcagaagggctctcctagttttgttgcctttgaaaatgaaagggaaacagtagaagacagagaaaaatataccagttctacagcttgcatatttttttttaacctcctgaaggtttttagcatttcactagagatgtgggcttcatcccgagaatcggtatccaagcagagataatctctcagtgtagcaagtgtttgtccaggcttgcctaacctgaggggtagcagtaaaggtaaaacaattgtccctagattgagtagcattggctaaatggctgaagtcacagcctaggccatcctgctgttcatgattcacttttattttcttggtttcagcatccactactaccacctcccttcccaaactcagccaaggtcatgctccttttccccagtctcttttgagattcccatcagtaaccgtctcctccagctccatacccccgaagctaaaggcagcgccatgtcttgtgtccaacccaggcctctgggatgctaagctggtgtggctccctggggccagtactcaaggaggaccctggcttttcactctcctcccaagtggtgaaggtgaaggtcgtatacagttctcagggcacatggagtaggcagtttgtcctacacaggtttgtggaaagcctgggtttcctgccaatcaggctggtgggggctagacatgtcaagacattgggtggtactgtggatgtgacacgtgtaaactcacactggtggccaagaagatgagttsaacaccacattagggaataagacaaaagtccacaatgtggagactttttgtaacaggtttaattgttctggaaattcaggatgatttagcatagtctgatagagcatcagtaacaggtggattttaagccaacaggtgttattacatttgtcaaaactcactgaactgtatgcttcagtgaaagggtgcattttactgcatggaaattattctgcaatgaacctgactttaaaacatagtagggcctggaagcacccatgtctctgagcctgaggaggttagggaatccccctgggtttgccgtggctgggcaacgcggtgctccttgggaaggatcctgttgggctgtggaagcagcctcagacacgtcctttcttccctgtctctcagatactttgcagggtgagagtgaataatacattgcactgtgaacagttgagttctgtgaccccatgagacaggacataaagtcagatgaaggattggactcatggtgcagaagcagcctgtgggaaaatcacttttcttggggaagctgtgcagtggcaggcagggtagtgagctggggtttagataagaagtgtggagatggggtggctgtgagtttaaagggggagtgtgcagggagcactccccagggcctgtgactggtgccacagctgcagaggagagtgcagactggaccagggtatttattaaaccacctgaggtggaaaagcccctttgcagacaggccccaaacaagccacagactaaaattgttcctccgttacccaagcccactcctccaagaaggtgtttgagtgtcagcaatgttaatttccaggctgctcgtaacaagactctccaaagatgtctggtggcgggtggggagtaggtgcccaccagcccctgctgccttctaagccctatttgggttgggatttcctaatatcctcttcccattcatcagtccactttctctcagaggaacaggcaaccttgaacactggaagcaattctagtaagtgaagcccaggcgctgtatcaagttggaggtgttggagcaatcaacggc

SEQ ID NO: 68865 - DNA, 743 bp, Homo sapiens
ggccctccaggaggcaggggtgggtggatggaagaccagccaggagggagacctttgttccatgagaaggacagaaaggtgggatggctgtgggtgcagatgagtttctgcacgttaggacaggaatttgggatttcctgcttgacagcttctatttccccatgaaggaagagacgaggcatctgctgagaggcagcagggtcagaagcttgaagagaatggaggaaggtgggaatggctgcccagtaaacagaaagagaaattgcagagtgcgcagattgtttggctgtggttaaagaccataaattggggtttaggagttgtcgagatcaacttcctccatagatctaggaacagtgtcttaatccatagaagtgattctccgagtgaaattcagttttattttttggctgcagtacttgtataaaagtataatggcagggcttggttaaaggaagatgagttgatgtgtggtctcatccagccacccaggtatgggtaaggagagaatgggtagttggatttatctagaattaatgttttgctgagcgtgcagaggggtattttgtaaaggtgaaaaataaaggcctggaagcagcactgggggtggctggcaggtgaggaggaaggagctgcctccattctagagagcagtgaggactgcagagtcctggggggggccagctgggcttctgtgatggcaragaggggaggggccagagggtactccttaaagaggctgg

SEQ ID NO: 68866 - DNA, 695 bp, Homo sapiens
tgaacatgtatggttgaatcattctttgcaccgtccagttaaggtcctggttcgagggctgaatcaaccttcacrgagccagcctactggtcccatccctctgctgcaacccagggcttccttcttcctcttcacaaagcgctctgccctatcttgtggttctgcaggtccccaaaggaactgaccagaactgggctcagaagctctatgaccggcactccagcagccagcacttccagaagccccgcatgtccaacacggccttcatcatcgtccactttgcagacaaggtggctctcctctctgttggcttgggtattcccttggcccctctctaagtagactcaatgggctctagacctagagagaaatctgtcccttctgaattcaaatggcctgaagcctcagctaggttccccttccatcctcttttacccacccctctacttctaggggataccaagcttaccacaaggcataacttcacagggggtactatagttgcccagtcattcatatatatatatgaatacacacacacacacacacacacacacacacacacacacacatatatatacatacacacatatatgtctgtgtatatatatagtctatacacacacacatacacacacacacatgtctgtatatatatagtctacacacacacacacacacacacacacacacac

SEQ ID NO: 68867 - DNA, 695 bp, Homo sapiens
tgaacatgtatggttgaatcattctttgcaccgtccagttaaggtcctggttcgagggctgaatcaaccttcacagagccagcctactggtcccatccctctgctgcaacccagggcttccttcttcctcttcacaaagcgctctgccctatcttgtggttctgcaggtccccaaaggaactgaccagaactgggctcagaagctctatgaccggcactccagcagccagcacttccagaagccccgcatgtccaacacggccttcatcatcgtccactttgcagacaaggtggctctcctctctgttggcttgggtattcccttggcccctctctaagtagactcaatgggctctagacctagagagaaatctgtcccttctgaattcaaatggcctgaagcctcagctaggttccccttccatcctcttttacccacccctctacttctaggggataccaagcttaccacaaggcataacttcacagggggtactatagttgcccagtcattcatatatatatatgaatacacacacacacacacacacacacacacacacacacacacayatatatacatacacacatatatgtctgtgtatatatatagtctatacacacacacatacacacacacacatgtctgtatatatatagtctacacacacacacacacacacacacacacacac

SEQ ID NO: 68868 - DNA, 695 bp, Homo sapiens
tgaacatgtatggttgaatcattctttgcaccgtccagttaaggtcctggttcgagggctgaatcaaccttcacagagccagcctactggtcccatccctctgctgcaacccagggcttccttcttcctcttcacaaagcgctctgccctatcttgtggttctgcaggtccccaaaggaactgaccagaactgggctcagaagctctatgaccggcactccagcagccagcacttccagaagccccgcatgtccaacacggccttcatcatcgtccactttgcagacaaggtggctctcctctctgttggcttgggtattcccttggcccctctctaagtagactcaatgggctctagacctagagagaaatctgtcccttctgaattcaaatggcctgaagcctcagctaggttccccttccatcctcttttacccacccctctacttctaggggataccaagcttaccacaaggcataacttcacagggggtactatagttgcccagtcattcatatatatatatgaatacacacacacacacacacacacacacacacacacacacacatatawatacatacacacatatatgtctgtgtatatatatagtctatacacacacacatacacacacacacatgtctgtatatatatagtctacacacacacacacacacacacacacacacac

SEQ ID NO: 68869 - DNA, 695 bp, Homo sapiens
tgaacatgtatggttgaatcattctttgcaccgtccagttaaggtcctggttcgagggctgaatcaaccttcacagagccagcctactggtcccatccctctgctgcaacccagggcttccttcttcctcttcacaaagcgctctgccctatcttgtggttctgcaggtccccaaaggaactgaccagaactgggctcagaagctctatgaccggcactccagcagccagcacttccagaagccccgcatgtccaacacggccttcatcatcgtccactttgcagacaaggtggctctcctctctgttggcttgggtattcccttggcccctctctaagtagactcaatgggctctagacctagagagaaatctgtcccttctgaattcaaatggcctgaagcctcagctaggttccccttccatcctcttttacccacccctctacttctaggggataccaagcttaccacaaggcataacttcacagggggtactatagttgcccagtcattcatatatatatatgaatacacacacacacacacacacacacacacacacacacacacatatatatacatacacacatatatgtctgtgtatatatatastctatacacacacacatacacacacacacatgtctgtatatatatagtctacacacacacacacacacacacacacacacac

SEQ ID NO: 68870 - DNA, 633 bp, Homo sapiens
gggtggtagagtcaggggaagcgtgtgcactggcattctaaaagccgactctgatgcagatgccgttactggctttagccctgcagaggaaacccagggccgggggtgggggaaattcccaggatttaggaggctttctcccagaccacwtgatactgaactcactgcaggggcctgataacattggagaaatggcagattaatttctctttgtgataagctttagatgaatgcaataggatgagatgatagaatggagaaaatatatccagcaaaatggacccaggacataaagccaagtaaaccctgttctatcacgtggtgaggggtttagggaggatttgagtcagtagcagcatgcagactgccaagaacagacccctgcccagtgtgatctctggatatctggaacatcagagaattagtcatcactgggacaaattggccgtgggtaaaagtgaatatcactttggagttcaatgcaagattgaccttgcagctccctaagtttttagatctccagtctgtggtggttaatgtgactttttccattttttcatgaggatggtggcatagggaggagccccaaggcacagggaaagagagtagatggaagtgttctgagcactagga

SEQ ID NO: 68871 - DNA, 633 bp, Homo sapiens
gggtggtagagtcaggggaagcgtgtgcactggcattctaaaagccgactctgatgcagatgccgttactggctttagccctgcagaggaaacccagggccgggggtgggggaaattcccaggatttaggaggctttctcccagaccacttgatactgaactcactgcaggggcctgataacattggagaaatggcagattaatttctctttgtgataagctttagatgaatgcaataggatgagatgatagaatggagaaaatatatccagcaaaatggacccaggacataaagccaagtaaaccctgttctatcacrtggtgaggggtttagggaggatttgagtcagtagcagcatgcagactgccaagaacagacccctgcccagtgtgatctctggatatctggaacatcagagaattagtcatcactgggacaaattggccgtgggtaaaagtgaatatcactttggagttcaatgcaagattgaccttgcagctccctaagtttttagatctccagtctgtggtggttaatgtgactttttccattttttcatgaggatggtggcatagggaggagccccaaggcacagggaaagagagtagatggaagtgttctgagcactagga

SEQ ID NO: 68872 - DNA, 633 bp, Homo sapiens
gggtggtagagtcaggggaagcgtgtgcactggcattctaaaagccgactctgatgcagatgccgttactggctttagccctgcagaggaaacccagggccgggggtgggggaaattcccaggatttaggaggctttctcccagaccacttgatactgaactcactgcaggggcctgataacattggagaaatggcagattaatttctctttgtgataagctttagatgaatgcaataggatgagatgatagaatggagaaaatatatccagcaaaatggacccaggacataaagccaagtaaaccctgttctatcacgtggtgaggggtttagggaggatttgagtcagtagcagcatgcagactgccaagaacagacccctgcccagtgtgatctctggatatctggaacatcagagaattagtcatcactgggacaaattggccgtgrgtaaaagtgaatatcactttggagttcaatgcaagattgaccttgcagctccctaagtttttagatctccagtctgtggtggttaatgtgactttttccattttttcatgaggatggtggcatagggaggagccccaaggcacagggaaagagagtagatggaagtgttctgagcactagga

SEQ ID NO: 68873 - DNA, 737 bp, Homo sapiens
tccccaaatcacctaaccaaaccccaaatcctaccacccttttactgagatgtgctgcagttcccaaaggcacacccatgatgtgcaatctcccttcttccaaagaacattaaacccaacttgttcaactataggtgtgtttctggaggtttctggctggaaggcaacaacagcattgtctccttctaccaacattagtattttgcagagtaaacttagatccaaggaagatttgcctaaggttatgctactaaatgaaagttgagccaaagatatagaagctgcaaataactttcagacaagtagagaaaaaagaaaaacaaatatctatcttaagtttgagacagtgccttagggttactgggaacacatcaagacttagggtaaacttaacatgagggagtttggcgtattggtgtctttattacttcctgtctacaytcccttagaataggtagctaggcagacttgggcagggcaggagaaaacctcccccaccccgcccaggaatgtcaagcgactatcaggtgatggtcaggcaagttgttaaactatctaaaataatcattcgtctcaactggcgtcagggaaaggcattctcccaatagatggaaaatactagaatctggtgatcagcagcttgtggataagattttgggagagtgggctcaaacatgctcactaagaggcaaaatggtagagtttaactggtatatgagcttcctctaggaacaaga

SEQ ID NO: 68874 - DNA, 711 bp, Homo sapiens
cgggaacctgacaaaaggccaggctgtgcggcaccatcttggccgtggggccagtcctgggcgtgaccagtgcccggacccccgaccgggcagyacggcggctctgcgcaaacgtcccccctgcagggtcaagcagaactgtggtcgctgccaggctgcctggcacctcagcacctcggccctcactgcccacaggaatctgtcaggagccccaccccggccatgagctcggggggctggcgcccctgggctgggcatggcgcccctgggctgggcatggcgccgggcagaggctcatggatctgttgagtggatggacagacacagcccacaggtgagcgatggccttgccagtgtggacctgtgttcctgcaaggctgctttaaattgcttttgataaattgatttcccactgacttgttatattttcagaaacatttcctctgttttcactcatgactgagctttccgtcggccgtggcccccacgtgtagcaggcacctgcaggctgcccatcttcaccacatgtgctccccacctaagcaatgcagagaggccgctgtgggggtcgtccctactcaaggaaaaggactgggctggaggctggagccctgagttagagctccacgttggccgtggcttgtgcggtctcctcttgggtagggtgttggccacttctcagggcacccggctggagcctcattcactgtg

SEQ ID NO: 68875 - DNA, 711 bp, Homo sapiens
cgggaacctgacaaaaggccaggctgtgcggcaccatcttggccgtggggccagtcctgggcgtgaccagtgcccggacccccgaccgggcagtacggcggctctgcgcaaacgtcccccctgcagggtcaagcagaactgtggtcgctgccaggctgcctggcacctcagcacctcggccctcactgcccacaggaatctgtcaggagccccaccccggccatgagctcggggggctggcgcccctgggctgggcatggcgcccctgggctgggcatggcgccgggcagaggctcatggatctgttgagtggatggacagacacagcccacaggtgagcgatggccttgccagtgtggacctgtgttcctgcaaggctgctttaaattgcttttgataaattgatttcccactgacttgttatattttcagaaacayttcctctgttttcactcatgactgagctttccgtcggccgtggcccccacgtgtagcaggcacctgcaggctgcccatcttcaccacatgtgctccccacctaagcaatgcagagaggccgctgtgggggtcgtccctactcaaggaaaaggactgggctggaggctggagccctgagttagagctccacgttggccgtggcttgtgcggtctcctcttgggtagggtgttggccacttctcagggcacccggctggagcctcattcactgtg

SEQ ID NO: 68876 - DNA, 711 bp, Homo sapiens
cgggaacctgacaaaaggccaggctgtgcggcaccatcttggccgtggggccagtcctgggcgtgaccagtgcccggacccccgaccgggcagtacggcggctctgcgcaaacgtcccccctgcagggtcaagcagaactgtggtcgctgccaggctgcctggcacctcagcacctcggccctcactgcccacaggaatctgtcaggagccccaccccggccatgagctcggggggctggcgcccctgggctgggcatggcgcccctgggctgggcatggcgccgggcagaggctcatggatctgttgagtggatggacagacacagcccacaggtgagcgatggccttgccagtgtggacctgtgttcctgcaaggctgctttaaattgcttttgataaattgatttcccactgacttgttatattttcagaaacatttcctctgttttcactcatgactgagctttccrtcggccgtggcccccacgtgtagcaggcacctgcaggctgcccatcttcaccacatgtgctccccacctaagcaatgcagagaggccgctgtgggggtcgtccctactcaaggaaaaggactgggctggaggctggagccctgagttagagctccacgttggccgtggcttgtgcggtctcctcttgggtagggtgttggccacttctcagggcacccggctggagcctcattcactgtg

SEQ ID NO: 68877 - DNA, 572 bp, Homo sapiens
atgtacagctaaaccctataaagcagacaatatgaaacaacacatggactgtctaatggggctaagacaataaagataaaacaaaatacaacacacaagcgtgcatggagcaggggagactgactttagactggaagggtcagtaggcagtgaaatgaccaagaagacaggaagggcaggacacataactttcacactcattcaggggaaggaatgagggaagtgtgatttattcaaagaaagcaagaaaggagagaaaaaaggaaaagagaaggtgagatgactatacrgtataaaacagacagctgggtgcagtggctcatgcctgtaatccccacactttggcaggccaaggtgagcagatcacctgaggtcgggagtttgagaccagcctggccaacatgcagaaaccccgtctctactaaaaatacaaaaaaattagccaggcgtggtggcgcacacctgtagtcctagctacttgggaggctgaggcaggagaattgcttgaacctgggaggcagaggttgcagtgagccgagattgtaccactgcactccagcctgggcaacaga

SEQ ID NO: 68878 - DNA, 922 bp, Homo sapiens
aaatttcactctagggcaatctaactttccaacttcttggactaagtcttactataaattccattaacaagaatggctaataatttatgatgcctttgcatgtgtgcctaggttttagaaattkctgctaagacttttaacttatatcatctaaactacaaaaatattttttattctaaatacatttcaatggctggtgtcacatttgttattcttaaaaaacaaactaataagctatcaatgaagtaaatattttggttgagaatttttaaaggaatgaaccaaatggtgtgcgaaatgcaagtggagaatataaatagccatttatttgtttgtgctaccctacaagtctgctttgttttattatttatttatttatttattttttagaaggggtctccctctttcgcccaggatagagtgcagtggcgtgatctcagcttactgcaacctctgcctcctgggttcaagagattctcttgcctcagcctctcaagtagctggaattacaggcacctgccacagcacctggctaattcttgtatttttagtagagacggggtttcaccatgttggccagctggtctcgaactcctggcctcatgtgatccatccgcctcggcctcccaaaatgctgggattacaggtgtgagcccctactcccggccttcacctttaatttttaaccctactaagttcagtgagcagtcaaaggtcttgtgtgcgaacgagatgtagagaggtgcaaattcaaacaataaaaacaaatgattttgtaaactcaaataaagcaaatcaaagaaagtaaaacattgttccgaactgaagcaaacctagggattgatacattgtatagcacgatgatgtgcagcaaacaatgtcagagtacatatttcaccttagttctcattgatgtgtctct

SEQ ID NO: 68879 - DNA, 922 bp, Homo sapiens
aaatttcactctagggcaatctaactttccaacttcttggactaagtcttactataaattccattaacaagaatggctaataatttatgatgcctttgcatgtgtgcctaggttttagaaattgctgctaagacttttaacttatatcatctaaactacaaaaatattttttattctaaatacatttcaatggctggtgtcacatttgttattcttaaaaaacaaactaataagctatcaatgaagtaaatattttggttgagaatttttaaaggaatgaaccaaatggtgtgcgaaatgcaagtggagaatataaatagccatttatttgtttgtgctaccctacaagtctgctttgttttattatttatttatttatttattttttagaaggggtctccctctttcgcccaggatagagtgcagtggcgtgatctcagcttactgcaacctctgcctcctgggttcaagagattctcttgcctcagcctctcaagtagctggaattacaggcacctgccacagcacctggctaattcttgtatttttagtagagacggggtttcaccatgttggccagctggtctcgaactcctggcctcatgtgatccatccgcctcggcctcccaaaatgctgggattacaggtgtgagcccctactcccggccttcacctttaatttttaaccctactaagttcagtgagcagtcaaaggtcttgtgtgmgaacgagatgtagagaggtgcaaattcaaacaataaaaacaaatgattttgtaaactcaaataaagcaaatcaaagaaagtaaaacattgttccgaactgaagcaaacctagggattgatacattgtatagcacgatgatgtgcagcaaacaatgtcagagtacatatttcaccttagttctcattgatgtgtctct

SEQ ID NO: 68880 - DNA, 557 bp, Homo sapiens
catctttttctacgtttaactttggctacgctggggatagcagggcgggtgccttaatggggccccaagctgatcgctttctctgggagggaaccatgagggtccagagcttgatggaggttcttagagtggcaataatcctctggaaggaatttcagaattgcccggcaacaatacccattgccgtgtgcctgggaacaccctctggagtcttgtgaggggcagatgtawcatcttgttttaacttataaataaagaaatcactggggccttagggacacccaacagcccctgatagattctgaaatacatcaggaccagggaggaagttactattgctgaaggccattgctttataattccacaatgcctcagcctctcagtggccagttgacccaggccaatgctaacagctggatgggtcagaataggaggttccagccattttctctatcccaccaaggcctttgagccttgcattagccgttctcttttgtggtccttgctttgcacctacaaatagcaaacttttatctttttaaccagttacagtgaaa

SEQ ID NO: 68881 - DNA, 557 bp, Homo sapiens
catctttttctacgtttaactttggctacgctggggatagcagggcgggtgccttaatggggccccaagctgatcgctttctctgggagggaaccatgagggtccagagcttgatggaggttcttagagtggcaataatcctctggaaggaatttcagaattgcccggcaacaatacccattgccgtgtgcctgggaacaccctctggagtcttgtgaggggcagatgtatcatcttgttttaacttataaataaagaaatcactggggccttagggacacccaacagcccctgatagattctgaaatacatcaggaccagggaggaagttactattgctgaaggccattgctttataattccacaatgcctcagcctctcagtggccagttgmcccaggccaatgctaacagctggatgggtcagaataggaggttccagccattttctctatcccaccaaggcctttgagccttgcattagccgttctcttttgtggtccttgctttgcacctacaaatagcaaacttttatctttttaaccagttacagtgaaa

SEQ ID NO: 68882 - DNA, 634 bp, Homo sapiens
atactttaagttttgggatacatgtgcagaacgtgcaggtttgttacataggtatacacgtgccacggtggttttctgcacccatcaacccttcatctacattaggtatttctcctaatgctatccctcccctagccccccaccccccaataggcctcaytgtgtgatgttcccctccctgtgttcacatgttctcattgttcaactcccacttatgagtgagaacatgcagtgtttggttttctgttcctgtgttattttgctgagaatgatggtttccagcttcatccatgtccctgcaaaggacatgaactcattcttttttatggctgcatagtatcccatggtgtatatgtgccacattttctttatccagtccatcattgatgggcatttgggttggttccaagtctttgcgattgtgaatagaagcacagacatttttaaggcctctaaaattagtagaagaaatatttttaagaaaaaattatgtaagagtgattaaatgtcaatgtactaaataaatatggtttctgttttataatctatgattgtgttttgaggtgttaaccacacaattttttaaaagttgatgttaatcagcaaatataaaattttgccagtatttaatatg

SEQ ID NO: 68883 - DNA, 634 bp, Homo sapiens
atactttaagttttgggatacatgtgcagaacgtgcaggtttgttacataggtatacacgtgccacggtggttttctgcacccatcaacccttcatctacattaggtatttctcctaatgctatccctcccctagccccccaccccccaataggcctcactgtgtgatgttcccctccctgtgttcacatgttctcattgttcaactcccacttatgagtgagaacatgcagtgtttggttttctgttcctgtgttattttgctgagaatgatggtttccagcttcatccatgtccctgyaaaggacatgaactcattcttttttatggctgcatagtatcccatggtgtatatgtgccacattttctttatccagtccatcattgatgggcatttgggttggttccaagtctttgcgattgtgaatagaagcacagacatttttaaggcctctaaaattagtagaagaaatatttttaagaaaaaattatgtaagagtgattaaatgtcaatgtactaaataaatatggtttctgttttataatctatgattgtgttttgaggtgttaaccacacaattttttaaaagttgatgttaatcagcaaatataaaattttgccagtatttaatatg

SEQ ID NO: 68884 - DNA, 813 bp, Homo sapiens
tgtaatacagccccagtcttcagcttgattccaagggtagccaaattcagctccttaatcagccagcttccagctgacctgcaagcacacgaacttgaacaagtgattgttgtaagccactagtttttagggagtttttctcttccaagacattattgctgcaattggtggtttatgtacatacgttcaagaaatgccttcaaaactcttgtatgttagacactaacctagatgttgattaaatagtagatgaaagaatagtgatatatgttctcataaactaccrtttagagagtgatagagacaagttgatggataataaaatataatatgggtaaatgttttgatcagagcatggtgttgtgggaatatatgagcctggtgcctcatttatacctgtgggtttgccttaactctccataagaagtcatgactatgtcaacagtgggactggtaaaaactgtataaaggaatgacatttactccaaatagagttagcagtgtgagtgatcagagggcatagagtactcgatgagctggaaggagatgagattggctatagtgaatgttggaggaagagtggagggagaagcttgtaatgtatgtgctttagctaatgcaacaccatggtaactattatagtgtttggacttgactcaagagcaatggtactggtggtgttgttaggagggaattctagttttcctttactacacctgttattatttagttgtctttcccatgagaagatgagaatatcggtatcctcagtgccagacaaattgctttttcctggagcatacatttaatgca

SEQ ID NO: 68885 - DNA, 813 bp, Homo sapiens
tgtaatacagccccagtcttcagcttgattccaagggtagccaaattcagctccttaatcagccagcttccagctgacctgcaagcacacgaacttgaacaagtgattgttgtaagccactagtttttagggagtttttctcttccaagacattattgctgcaattggtggtttatgtacatacgttcaagaaatgccttcaaaactcttgtatgttagacactaacctagatgttgattaaatagtagatgaaagaatagtgatatatgttctcataaactaccatttagagagtgatagagacaagttgatggataataaaatataatatgggtaaatgttttgatcagagcatggtgttgtgggaatatatgagcctggtgcctcatttatacctgtgggtttgccttaactctccataagaagtcatgactatgtcaacagtgggactggtaaaaactgtataaaggaatgacatttactccaaatagagttagcagtgtgagtgatcagagggcatagagtactcgatgagctggaaggagatgagattggctatagtgaatgttggaggaagagtggagggagaagcttgtaatgtatgtgctttagctaatgcaacaccatggtaactattatagtgtttggacttgactcaagagcaatggtactggtggtgttgttaggagggaattctagttttcctttactacacctgttattattyagttgtctttcccatgagaagatgagaatatcggtatcctcagtgccagacaaattgctttttcctggagcatacatttaatgca

SEQ ID NO: 68886 - DNA, 774 bp, Homo sapiens
ggtgccaaacttctrttggtggtagagcagggggagtagtctggacctgggaagtccctgagttatcgttacgtctgtcccttagaaaataggcaagggccaggatcaaagacaggatgaatacataagctggtaggtatgggaggattttatatgatgcgtaactaggtctacaacactatcattttttattgtttttaaaaaaccttgatatccttcttcacacagagttagtggttttgttcttcagctacttgcactgaggctataaacttgttcagactttaccttctgtctcacagtatcagctatattgatgatggtggcaattgctgtaaaatacaaccccctagatgttagtggagagtaaaatttattcttgctccatcaagttcagtgcagatatagtcagccttcagtggtgctcttccccatggtgagccaaagttccaagctcctcttatgtagttatcttctactgttgctaagtatttcagagtcatctggagtcctgaagtcttctacaaatcccttccatttggacatcaaacaagagaagaaggacctttaatgaaataacttacattttttctaccaatatcccatcagccgaaactactctctctccccactcctccaacactctggaatataaaacagatttatgagtaaccaccactctgttaggtgcactttgaatttagttctttcaaagagaaacgggaatgggactgtagccacctcaagaaatgatactggcaaaagacacatttg

SEQ ID NO: 68887 - DNA, 774 bp, Homo sapiens
ggtgccaaacttctgytggtggtagagcagggggagtagtctggacctgggaagtccctgagttatcgttacgtctgtcccttagaaaataggcaagggccaggatcaaagacaggatgaatacataagctggtaggtatgggaggattttatatgatgcgtaactaggtctacaacactatcattttttattgtttttaaaaaaccttgatatccttcttcacacagagttagtggttttgttcttcagctacttgcactgaggctataaacttgttcagactttaccttctgtctcacagtatcagctatattgatgatggtggcaattgctgtaaaatacaaccccctagatgttagtggagagtaaaatttattcttgctccatcaagttcagtgcagatatagtcagccttcagtggtgctcttccccatggtgagccaaagttccaagctcctcttatgtagttatcttctactgttgctaagtatttcagagtcatctggagtcctgaagtcttctacaaatcccttccatttggacatcaaacaagagaagaaggacctttaatgaaataacttacattttttctaccaatatcccatcagccgaaactactctctctccccactcctccaacactctggaatataaaacagatttatgagtaaccaccactctgttaggtgcactttgaatttagttctttcaaagagaaacgggaatgggactgtagccacctcaagaaatgatactggcaaaagacacatttg

SEQ ID NO: 68888 - DNA, 642 bp, Homo sapiens
actataactgtcttctaataagaaattatgtgtctggacttaaccacatttgctgtctatgccaggtcaagtaaattaaaaaattgttgagattgtaaaaagggagtcaaaacaatcagaaactcatgtggtagagacatcacaccatttggagagacagatatgactaaatttgcttagtacttaatctaatcttggagaaattaccaaatctttctgaccttcattttgttatccttaaaataaaggtgaaaatgaacctagttcataaggctcataaaaaatcaataagatagtgttttagtttgttctcatgctgctaataaagacayaccagagactgggtaatttataaaggaaagaggtttaatggactcacagttccacatgactgggaaggcctcacaatcatggtggaaggcaaaggaagagcaaaggcacatcttacatggcggcaggcaagagggcatgtgcaggggaactcccatttataaaaccatcagatctcatgagacttattcactatcacaagaacagcatgggaaaaacccgcccccatgattcaattacctcccaccaggtccctcctaagacatatggggattatcaaggtagatttgagtagggacacagagccaaacc

SEQ ID NO: 68889 - DNA, 747 bp, Homo sapiens
ttgatgtaacgaatgggaatatgctttatagggccatgtctgactaagactactctgtcttcataattaattttatattttcactacctcttataaagtaaagaaattaaatttctgtaagtttaatacataataakaattattcaactttatatgctttaacatctttggaaatttcattgtatttcaacatatttgtgaggtgacaggggagtctcaattttattctcattttattttccatttctttgtaattaaaaatctcatgtgacataactacacctcactataggacatatccaatcctgacaatttttatttgtttgaatcaatctttacaagaaataataacaatctgacagaattctgtaaaagacggccaatcagcaatcaactttataaggtactacaatatcctgtaaatacaagttaaaccaattttgaaataagactgtcagtgcttctattcttgtttgatttgtttggcctgggtgcaaacatcttctatataaggtattttatatatcttaattgatgtggcagtaaaaaatattttaggaatttccttgtctgccaataagattctgtgatgtattatttacaaacatatgttcttgctgtgagagttactattaaaaagaaatatgtgaatttttcgtgaactccaattataggagaaattgctttatatgcctgtctggaatatagtttaccttctctctgtaccaaaattataataggcttaac

SEQ ID NO: 68890 - DNA, 747 bp, Homo sapiens
ttgatgtaacgaatgggaatatgctttatagggccatgtctgactaagactactctgtcttcataattaattttatattttcactacctcttataaagtaaagaaattaaatttctgtaagtttaatacataataataattattcaactttatatgctttaacatctttggaaatttcattgtatttcaacatatttgtgaggtgacaggggagtctcaattytattctcattttattttccatttctttgtaattaaaaatctcatgtgacataactacacctcactataggacatatccaatcctgacaatttttatttgtttgaatcaatctttacaagaaataataacaatctgacagaattctgtaaaagacggccaatcagcaatcaactttataaggtactacaatatcctgtaaatacaagttaaaccaattttgaaataagactgtcagtgcttctattcttgtttgatttgtttggcctgggtgcaaacatcttctatataaggtattttatatatcttaattgatgtggcagtaaaaaatattttaggaatttccttgtctgccaataagattctgtgatgtattatttacaaacatatgttcttgctgtgagagttactattaaaaagaaatatgtgaatttttcgtgaactccaattataggagaaattgctttatatgcctgtctggaatatagtttaccttctctctgtaccaaaattataataggcttaac

SEQ ID NO: 68891 - DNA, 1034 bp, Homo sapiens
ttaaatcaaattggaaaagacaggttattttttgaacttacaaactaaaatcttgagtagtgggatatgattcctgcttatgtgattccactgactttttatttcctcctttattctacccatgcttcctcctgccttttctccctttcttatttctttgtactctgcttctttatttttcttcatctccctttctctttcattcatccagtcttttaaaatatataaaatgtcagcaaatatggtattattaaacatattcttccacagaatcagaggccatttttggcttacagtcgaaatgatcaaatatacacctctgacaacagccaraaatattcatgtgttacttaaatttatctgaaatttatttctacagaatgattttagaaaaatatccccttctttaaagaatctaaaacagagcctgttctatttgatccataatgccctatgtgtcctattcaaacccttgtattttgactttctcttctagtctcagtggttaattaccattccatcccaagaggaaaataattttcttatgatccagttttaataacatattttactccatggaatgccaacatttatgcttgagatatttttgtaacaaaagaaaatagctaaaggtgttgtcatcacttgaacctaatggaatttgcgttttttttttttttgacatgactctaagaattcagtcagtgtgacaaatcccatatcctccattgtctatgctatgtttcaaaaaaaggtaaggtgttctcaaatctggtaaactaatttattactttgaaaaaacaaaacaaacctcttaacaactagaaagtatgtgtaagcgtgtatgtatgtatgtgtgttttatcagaatgaaattattttcctgttaccaatgatccatacaagttttagtttaaactaacttttcctgattatttttgaatgaatcactgaaatacttatgtaggtaaattgaaattccttaatctttgatcttcttaagcttaattgcaatcttcatggcaaatttgcgt

SEQ ID NO: 68892 - DNA, 870 bp, Homo sapiens
ttttccctcttctgccatgccatctccaaatgtgaataatttggtctttgtttcattacatcattaaaacatcgagtagtattgtaagacacaaggagtgccattgaaaaacatttattgctatattaaacagaacaggttttcactactagtagtctaatttttatagaaaagctacaaaatctactctgtgtgagacctggagatttaatcagcagccacaaaacagcactcagtctaacttttaagcacagaaataaacattacatatattcaagtagttcagagagcaatgtaagaatgtgatttatgtttaatcataaaaatccttaggcttagtttgaagaaacttaaagacatataagagagggttactttagtatactaaccctgcttgtcaatatcatgaactagcatttttgtggcagctttaatttttgagacttcttttattttaattagaatatagacatatgttgaaggtggaaaaagttaaattgagcatcaataataaacacaaataccagatgattcaactgttatgaaatgacactatttgtgaatgttcatcactgtgaaattttaaatagtctgaaatattagtttgagaataaaaggcatagattaatgcttttctttttctagtaaattttaagaactgttttaaaaaatgtacagaaaaaaatawgaagataaaacatggagttctcataacccccaaatccagattcctctattactaacatcttatactagtatgatgtgtttgttacaatgaataggccaatgctaataccaatcattaactaaaatctatagtttattcacattttcttagatttcacttaatgacctttatctgttccagga

SEQ ID NO: 68893 - DNA, 870 bp, Homo sapiens
ttttccctcttctgccatgccatctccaaatgtgaataatttggtctttgtttcattacatcattaaaacatcgagtagtattgtaagacacaaggagtgccattgaaaaacatttattgctatattaaacagaacaggttttcactactagtagtctaatttttatagaaaagctacaaaatctactctgtgtgagacctggagatttaatcagcagccacaaaacagcactcagtctaacttttaagcacagaaataaacattacatatattcaagtagttcagagagcaatgtaagaatgtgatttatgtttaatcataaaaatccttaggcttagtttgaagaaacttaaagacatataagagagggttactttagtatactaaccctgcttgtcaatatcatgaactagcatttttgtggcagctttaatttttgagacttcttttattttaattagaatatagacatatgttgaaggtggaaaaagttaaattgagcatcaataataaacacaaataccagatgattcaactgttatgaaatgacactatttgtgaatgttcatcactgtgaaattttaaatagtctgaaatattagtttgagaataaaaggcatagattaatgcttttctttttctagtaaattttaagaactgttttaaaaaatgtacagaaaaaaataagaagataaaacatggagttctcataacccccaaatccagattcctctattactaacatcttatactagtatgatgtgtttgttacaatgaataggccaatgctaataccaatcattaactaaaatctatartttattcacattttcttagatttcacttaatgacctttatctgttccagga

SEQ ID NO: 68894 - DNA, 611 bp, Homo sapiens
ctacagaatcaaagacaaatatgtgatgattgtttttgccactaagcattggagtattttttaatatgacaaaatgcatttatcatcattatattttcaataaaacagaaaatacaaaagaaagcaatttgtggtgagcttattaatctgatctttattcttaccttaatatgtatttccaagaactgagttttgacaaattctcacatttgcacatttatacactaatggaacatgcagtcttacatacaacttttttatagaatgacttgaacactacaactagctaaattaaatttttaaaaatggttcatgtataattctgaattaaaattttaaaattaatttttaaaagccatcttaatacattttatgtactgaaattatgtttatgttactatgaaatggaatctttgtttagagcttttatctttggataatctgttgtttgtatcactctacccaagacagaatttgcatgtgattttgaatgccctatagggatgcaagatttttctagacttctttgtcagacttgcaatgggggtgcctcatttacttggcccaccktgctcaaccacttgcgggagggagcacatgagtgagccact

SEQ ID NO: 68895 - DNA, 681 bp, Homo sapiens
ggatcccctcatgtgcacatggtgaggtcagagtcccctcctcacagtgtcccctccaccctcccgtgaactgttctttccttccaggaggccagcaagcgcatctccagccacatccctttgatcatccagttcttcatgctccagacgtacggccagcagcttcagaaggccatgctgcagctcctgcaggacaaggacacctacagctggctcctgaaggagcggagcgacaccagcgacaagcggaagttcctgaaggagcggcttgcacggctgacgcaggctcggcgccggcttgcccagttccccggttaaccacrctctgtccagccccgtagacgtgcacgcacactgtctgcccccgttcccgggtagccactggactgacgacttgagtgctcagtagtcagactggatagtccgtctctgcttatccgttagccgtggtgatttagcaggaagctgtgagagcagtttggtttctagcatgaagacagagccccaccctcagatgcacatgagctggcgggattgaaggatgctgtcttcgtactgggaaagggattttcagccctcagaatcgctccaccttgcagctctccccttctctgtattcctagaaactgacacatgctgaacatcacagcttatttcctcatttttataatgtcccttcac

SEQ ID NO: 68896 - DNA, 968 bp, Homo sapiens
aagaaacatctcccaccataccctctttaagaggccaccagcacttctgttagaagttgcagcagagaaaggatcctwtaggcacatctcccagatccttgcgaagaggggcaaagggaacttggaggaggccaagctcctgggagaagaactgtatctaaatgcagatgtcctattgttgccgtcagagaagacacacccgaagctgagacagggctctcccagaagtgaaggaagatttcttagtaaaagtttgcaggtggggctggaaagataggcttctgaaatagggggcttctaacatccttgggtgagcccctaaagcaggtgggggcggggagagggtacttgcagtgagtgaggatagttttaaggtaatcaatagttagatcttcattttacaaatgggcctcccaacccaaagcaccctgccagagaggcatctgaggacacagcccccctccacttccacctcctgacctcacccagctccccctccccaaaagcgggaggaggtgattggggtgtggagacagcaagcaccccatgactaggtattgatcctgcaaaccagaaagtttccagttcttggctttaagcagggcagatgaaagccctacattcgttgccccctgagagaccattaaaatcacattgatcgttactgaccataggacccacgaatcctccccatcccataaggcaggcattgccagatgacagatggggaaactgaggcacaggaggctgtaatagcctgcctgaggttgcacacctagtaaatgatggagcagggctgggaacttaaaagtgtggctttcatcgtgaattctggggtgtaacctgggaggacttcacagagtgagtaggatgactgcaaagtccccgtgttcccatccacttgtccaaggcaagcttgtttcctcagcacttacactgatacatcagagaacagaggccaaattggt

SEQ ID NO: 68897 - DNA, 720 bp, Homo sapiens
actctgagaaccatggctcccaatcagtgctgctgctgggcctcctcaccatgaggccagggcaggctcaagggcaggaaatcgaacagtggactagatggatggggcaggagaggaccggacactctgtcccttaaggggagagttgaaggatcaggattgccccagcctaggaaagagaaggccaaaaggcaacaagagagatgaagtgtgagcaccaaggtgtgacatcctctggggaggtatattctagatgatcagtgtggggaatgggggtactttctacagaggggcccccggatggcatggcttcctcaagagctgtgaggtcccaggcagtgggggcatcaggccaagctgcacagctgcttgtcaggttgggggtgggggctggaccagcaacaccatcctctcccctctggaccacgcccccccatcccagatctcttctgactcttgggactgtgtaattttcaattcttcgggaagtttgagaatacatttataagagaggatgtccggagagcagtggacatttcacaagcccaggtcagcagctgccgctgggcagcaactttatggttcccccaggtgctgaagtgcacctgcaggttgacttgatctactgttaacagagggtgatcagtttgaytcatgcttaagggagagacgacaccaacacacacacagaggtttgcaagagtaaggcagggtggatcc

SEQ ID NO: 68898 - DNA, 485 bp, Homo sapiens
catcgtgttgtgcagagaaatgagaagtcgagaattcatcctgctccaccggcttcctcaccttctcttgcattttctttttaatctagcatccaatgcatttttttttttaatttaagcttccttcctttgtgtgctaacattttacatgtagatcctagcacatttctttaggcaaggaaacagaccctttgytgagcaccgtcatcgtggccactgcagttgcctgggaggctccggaaggttttttgactcctgaagccagctgaggcagccacctgagcaagggggttgttcatcccagggctcaccctcattcagggccatgaccttttctagtaagtgtgcactctcttaggtcccaccctgtgtcacccggactctcttggagttcggtatgtggagatgactttcttcctcactctggatgcaatttgggaactacaccgaggattgtggccaggggctcttccctcacctctgac

SEQ ID NO: 68899 - DNA, 746 bp, Homo sapiens
gttaagcccaaccaggaggttgaggctgcartgagctatgattgcacaactgcactccagcctgggtgacagagcaagactctgtctcaaaaaaaaaaacaaaaacaaaaacaaaaaaagggcttctttttttccccccctcataaaaggcatatcctacaccaagttttcctcaaatatgaataggcccaagaaccacctgtagatcttgtagagctgcagattcggattcagtaagtctgggacagggcataggagtctcgcaagctcccaggtgacactgatgttgctggtctggggccacactttgaacagccgggccccaagcctctctcgactccaggagacatccagggctggcttgctcattgcttctccttagcatggtgcggtgcccactctgggtgccggggtccacgtccccatcattattatggtcagcatatagctgtgacctttctgacatcaatgtggatgtgcgataagtccatgtttgcgggaacctaaggaaagacccacttactcatcatctatgaaggtgtgggtaggagacaagagagccgtgcagagaaacgagagtcaggaagagaatgaggagctctgggcatggagatggacaccagggaccagtggggaagctgaacggggcctgggcctctgcaaagagacctggcggggagggggcagaagtagggtgctcacctgttggcatgtccagggcggggtggtggcagattcaggctgaa

SEQ ID NO: 68900 - DNA, 567 bp, Homo sapiens
tagctgtctgaaagatcaaaagtaattaccctctaaaggaagacaaatgtatgcaatctgtcaatcaaccaccaggaccagtatacaaacaacacatacaaaaaagtagaraatgttgatcactagttttaatagttgttatttagcttcctagttattatccatatacataattatgtcatttgcaaataggggagtttaatttctctctcttttctctaatttttacaactttttcatgccttattgaatgggttaaatgatatatattcttttttttttttttttgatatgatgtctccctgtgctgcccaagctggagtgcagtggcacaatcttggctcactgcaacctccgcctcccaggttcaagtcattctcctgcctcagcctccgagtagctgggactccaggcaccctccaccacacccagctaatttttgtatttttagtagagacagagtttcaccatattggccaggctggtcttgaactcctgacctcgtgatccgcccacctcggcctccccaagtgctggaaatacaggcgatatatactgtattctttt

SEQ ID NO: 68901 - DNA, 567 bp, Homo sapiens
tagctgtctgaaagatcaaaagtaattaccctctaaaggaagacaaatgtatgcaatctgtcaatcaaccaccaggaccagtatacaaacaacacatacaaaaaagtagagaatgttgatcactagttttaatagttgttatttagcttcctagttattatccatatacataattatgtcatttgcaaataggggagtttaatttctctctcttttctctaatttttacaactttttcatgccttattgaatgggttaaatgatatatattcttttttttttttttttgatatgatgtctccctgtgytgcccaagctggagtgcagtggcacaatcttggctcactgcaacctccgcctcccaggttcaagtcattctcctgcctcagcctccgagtagctgggactccaggcaccctccaccacacccagctaatttttgtatttttagtagagacagagtttcaccatattggccaggctggtcttgaactcctgacctcgtgatccgcccacctcggcctccccaagtgctggaaatacaggcgatatatactgtattctttt

SEQ ID NO: 68902 - DNA, 1008 bp, Homo sapiens
tacctcacattgctataatatcaggatcagcaatgaactctttataaccagttgttttcaaatataagttaaatatttggcactcaaagatagtccacaagcaagaatatcagcaacagttgaaaacttatcaaaaatgtaaaatcctttattaaacttcttaaaaatgcctctcctgcaaactactaaattggaatctgcattttaacaggcctttgtatacatatgaaatttgagaaacaccaggttatgtgctttaacagcacagagggatgctttaaaagggaccttcttgtgtatggaattgaactagacgttcaattggttcttctaatcctgagattatatgggatctctgacgggataaaagaaatgaatcttaaatttttacgtaatctgccactttcttgtcccataacttctctaatttgaaggaaaatattatttcattcatttgctcttctttattagtattttctctcaggaaaccaaataaaaaaagtacaaaaggaatttctcattttctgtcattttcaaagtataagtcaaaccttgatccaggcagcaaaagacaatttaataattgacagccagtttaaccagagagattttgcctttaatatcaaaaatacaaagccaccaatttcttcaattgtcaagaaatttttattaacattggcccacagtgaattctttcatacttcttcctgttttccattcccaatactattccgctggggtacacgataatgattatcatctcaattcccacaatactacctaactagtttctgaattttcacactattctctctgatccattttgtataatgtagccatagtaaaatttctgaaataggaaactgatcatgttatcccctgcttgaaactctgcaaaygttttcatttttaggaaagagctcaaactctgcaatagccttcagtaaatatccctggtgatcataacttcgctctcctttggcctagtctctttgcttccctctcttg

SEQ ID NO: 68903 - DNA, 600 bp, Homo sapiens
actgaaaaggtggaaaaccccataatatggagtgtttgaggtagcacagcaactgaaatttacacctgccwttgggtacaacaacttgagtaacctcactggcattaattacaaacctgaatataggcacatcatatgatccagtaatttcattcctgcccagcagaaacgtgcacaaaatcatgaacttaaacactagcaacagcattactaatgatagtcaaattaattttcttaatagtaaaacagataagcaatggtattatatataatgtcatacaatggattactatataattaattttcttcaatagtaaaacatataagcaatgatattatatatagtatcatacagtggattactttactgcaataaaaatgaacaaactataggtacacgatgtcttgcttgaatctcataaacattgctatggtttgaatgcttttttccccactaaaatttatgttgaaacttaatccccaatgcaatggtattaagagaggtggccttcaggaggtaattgagtcataagaggtctgtcttcattaatgacattaggtgcattataaaagggcttgaaggaaggagtttacaccttt

SEQ ID NO: 68904 - DNA, 505 bp, Homo sapiens
tttataattacaaaataatataagtgtgttcagagtactacagtttattctcttcttcaagttatttgataatattagcagaataagaaaaaataccactgcacaaaggacaaaaacatacaattggtactctctgacagaaagaaacacatctataaacacttactgtttattgggtgaaatawtaaatattattgatctacagttacatgtctaaaacatttcattgattttgttttgtatttttgttgctcacactatgaatgcgaaagtaattacacacaccacaaaaatctcttgtattcataaacaaaattattcctaatagaaaaaataaaacctacactgtcaccaaaagtgtataagtgttgactacctgagggtggatggtgagaggagggagaggatcaggaaaaataactaatgggtaccaggcttaatacctgagtgaggaaataatctgtacaacaaatccccatgatgcaagtttacttatgtaacaaac

SEQ ID NO: 68905 - DNA, 960 bp, Homo sapiens
gtgggtcacaggtcatgagactgttcactgaaaaagctttttctgacaaaagtttttatggttgtttatacgaatttaaaattttaccatgaatgtatgagagttcagttattccatacctacattaagtttttccatatttatatctaaagttagaatattctttcttttgaatgttaaccaattgtgtacttgcgtggaggtatatcacgttggttgctaaaaaataattttattgaaaagaagtttatgtgtttattggaccttgaaattgtatttagtttcatgtgtgtgaattccctcctttcctattttcattttgatctttgtcttttttatgaacgttagatttttttacagatttttacacagcattagatatgagtgttacaaaacaaagcatgatttttttcaaaaagacttaagagtacttatgaattcctttattcactctcttaggtaggtcttcctttagcaaacaaaagttcttaattttaatgtaatcaaatgtatatcttttatatctgatactatttaccttctatttaaaaaaactttacctcatgttactcatgcttaaaaagatattgttttatttttatttttacaagctttattgtcttacattaccagtctggattcaccaagcttttttgcatagyatttagcaccgcagctacctctatttactgaaattcttggtgtttcatctagcatattagtaggttacaggtaggcatatatttgaagggcaaaaagctgtcacactttcagattatgtttcatcagagcattttcctctctgtaattttatcttctatttttagctgctgtggctaaatataaatcaagtcttaatttcatcagcccatttttttctttcttgtacctaaaatttctaccttttctggatttttctatatcatgtagacatacttggatgttctttataatgaaata

SEQ ID NO: 68906 - DNA, 960 bp, Homo sapiens
gtgggtcacaggtcatgagactgttcactgaaaaagctttttctgacaaaagtttttatggttgtttatacgaatttaaaattttaccatgaatgtatgagagttcagttattccatacctacattaagtttttccatatttatatctaaagttagaatattctttcttttgaatgttaaccaattgtgtacttgcgtggaggtatatcacgttggttgctaaaaaataattttattgaaaagaagtttatgtgtttattggaccttgaaattgtatttagtttcatgtgtgtgaattccctcctttcctattttcattttgatctttgtcttttttatgaacgttagatttttttacagatttttacacagcattagatatgagtgttacaaaacaaagcatgatttttttcaaaaagacttaagagtacttatgaattcctttattcactctcttaggtaggtcttcctttagcaaacaaaagttcttaattttaatgtaatcaaatgtatatcttttatatctgatactatttaccttctatttaaaaaaactttacctcatgttactcatgcttaaaaagatattgttttatttttatttttacaagctttattgtcttacattaccagtctggattcaccaagcttttttgcatagcatttagcaccgcagctacctytatttactgaaattcttggtgtttcatctagcatattagtaggttacaggtaggcatatatttgaagggcaaaaagctgtcacactttcagattatgtttcatcagagcattttcctctctgtaattttatcttctatttttagctgctgtggctaaatataaatcaagtcttaatttcatcagcccatttttttctttcttgtacctaaaatttctaccttttctggatttttctatatcatgtagacatacttggatgttctttataatgaaata

SEQ ID NO: 68907 - DNA, 520 bp, Homo sapiens
tgggtatggttaaacatggaagtaaaattgaagttatctgagaaaaagtaattatattaacataccttgaattctaagttgggtaaggaggggaggatgaagagtggtaaaggtgatagagttaatagactggagttcaaggtgaagtcaaagtttttctttttgtttcaagtaggaagagtaagagaaataagttgaaagatagaaattttaaatcatagccgagatccatgaatctraatttctgaagatggtggagtaattggcaatgataaacactaaagtatgagaacactagactatgaagtatggaagaagaaaattgtatgattgatgaagagcttaaggaattagaaggcccaagaggtgcataaatggcacatatatgaagcagaccttacatgtctcattttatattttctgtctgtttagtttcacagggaaaaaatgaaattattacttttttttattgaacccccatgataaatagcaaaaatgactacaaattatttcatttatc

SEQ ID NO: 68908 - DNA, 556 bp, Homo sapiens
ggtatatgtcagccatctgactacattttgcctaatgtttgtggggtagtggtaaagtaagcatgcacrctcactcagagccaacaaggtggtatgagtcagtgctgtgctttttccagaacagtattggtggagctcagcggtaagttcaacataaatacctatgcagctgtgatgccacacctcaactggtgtactgcaaacttaaaaacataaagtacaatccacaatgtgatgtatatatttgttatgtaacataatcgtaaatactcactaaaggaaattctcaaaatagaaagattaattggaaaaaggcttgaaccatagcaaggaaaataaggagatatgggttctggacaagctggtacagagcagtgttttcctatcctccctcaagaaataacctatgaatccttgaaataatgtgagtgacaaccaaaggagcactctgtcaggcaggcagaggaaggaaaagtggtctgagaccacgtaattggaggaaaagcaatcaaagggcatcataagctttccccaaaacccaaagaggagaaagtga

SEQ ID NO: 68909 - DNA, 556 bp, Homo sapiens
ggtatatgtcagccatctgactacattttgcctaatgtttgtggggtagtggtaaagtaagcatgcacgctcactcagagccaacaaggtggtatgagtcagtgctgtgctttttccagaacagtattggtggagctcagcggtaagttcaacataaatacctaygcagctgtgatgccacacctcaactggtgtactgcaaacttaaaaacataaagtacaatccacaatgtgatgtatatatttgttatgtaacataatcgtaaatactcactaaaggaaattctcaaaatagaaagattaattggaaaaaggcttgaaccatagcaaggaaaataaggagatatgggttctggacaagctggtacagagcagtgttttcctatcctccctcaagaaataacctatgaatccttgaaataatgtgagtgacaaccaaaggagcactctgtcaggcaggcagaggaaggaaaagtggtctgagaccacgtaattggaggaaaagcaatcaaagggcatcataagctttccccaaaacccaaagaggagaaagtga

SEQ ID NO: 68910 - DNA, 640 bp, Homo sapiens
tatatttggtagcagaattgctatatcatattttaggcatgtcttcataattgaatgagtgttgcaaaataatatcaatacatattaataacaagaayaaataagacattctaatattctcaatctttatgctatttgatattgtcagattctaaaatctttgctcatctgagtttgtaaaatgatatccatttgtagttttattttgcattttcctatttggcagttgatcattattttatatattcatttgtaactaagtttcctattttgttaattgtcttttcaaaactatttcctctgttggagaggaactccacaggagggatttgagaatttttgtctttgtctagttgatctataagagggtgtgtatttgtgtgtgtgcatcatggggttttttattacttcaaatagcaaaaatgtggttttctttaatagtagggaattgatattgcttttatagaaattatgagatagctttattttttcctagataattgtctaagcaatattgatggataaatctttacccttatgtttgtcataaattgatgttttgtaaataattacaattctgtttctcagctgctttgttccaatattctatttttcattctgtacctatactacatggctt

SEQ ID NO: 68911 - DNA, 640 bp, Homo sapiens
tatatttggtagcagaattgctatatcatattttaggcatgtcttcataattgaatgagtgttgcaaaataatatcaatacatattaataacaagaataaataagacattctaatattctcaatctttatgctatttgatattgtcagattctaaaatctttgctcatctgagtttgtaaaatgatatccatttgtagttttattttgcattttcctatttggcagttgatcattattttatatattcatttgtaactaagtttcctattttgttaattgtcttttcaaaactatttcctctgttggagaggaactccacaggagggatttgagaayttttgtctttgtctagttgatctataagagggtgtgtatttgtgtgtgtgcatcatggggttttttattacttcaaatagcaaaaatgtggttttctttaatagtagggaattgatattgcttttatagaaattatgagatagctttattttttcctagataattgtctaagcaatattgatggataaatctttacccttatgtttgtcataaattgatgttttgtaaataattacaattctgtttctcagctgctttgttccaatattctatttttcattctgtacctatactacatggctt

SEQ ID NO: 68912 - DNA, 640 bp, Homo sapiens
tatatttggtagcagaattgctatatcatattttaggcatgtcttcataattgaatgagtgttgcaaaataatatcaatacatattaataacaagaataaataagacattctaatattctcaatctttatgctatttgatattgtcagattctaaaatctttgctcatctgagtttgtaaaatgatatccatttgtagttttattttgcattttcctatttggcagttgatcattattttatatattcatttgtaactaagtttcctattttgttaattgtcttttcaaaactatttcctctgttggagaggaactccacaggagggatttgagaatttttgtctttgtctagttgatctataagagggtgtgtatttgtgtgtgtgcatcatggggttttttattacttcaaatagcaraaatgtggttttctttaatagtagggaattgatattgcttttatagaaattatgagatagctttattttttcctagataattgtctaagcaatattgatggataaatctttacccttatgtttgtcataaattgatgttttgtaaataattacaattctgtttctcagctgctttgttccaatattctatttttcattctgtacctatactacatggctt

SEQ ID NO: 68913 - DNA, 640 bp, Homo sapiens
tatatttggtagcagaattgctatatcatattttaggcatgtcttcataattgaatgagtgttgcaaaataatatcaatacatattaataacaagaataaataagacattctaatattctcaatctttatgctatttgatattgtcagattctaaaatctttgctcatctgagtttgtaaaatgatatccatttgtagttttattttgcattttcctatttggcagttgatcattattttatatattcatttgtaactaagtttcctattttgttaattgtcttttcaaaactatttcctctgttggagaggaactccacaggagggatttgagaatttttgtctttgtctagttgatctataagagggtgtgtatttgtgtgtgtgcatcatggggttttttattacttcaaatagcaaaaatgtggttttctttaatagtagggaattgatattgcttttatagaaattatgagatagctttattttttcctagataatkgtctaagcaatattgatggataaatctttacccttatgtttgtcataaattgatgttttgtaaataattacaattctgtttctcagctgctttgttccaatattctatttttcattctgtacctatactacatggctt

SEQ ID NO: 68914 - DNA, 1680 bp, Homo sapiens
ttattctgctttgtgctcactaaacatttttgaacttatgattggtatctgttattatggtgcaaaattcataaccattaatgcctcaaataatttttatgatagcttctttttccttcttttccatttagaagtatgttacacatgtagctattgctccacaatttctgtatattctctttttttatttttaaaaattttagtccctgaaatttctattgacatctcttcatgtatctgattctttcactggctgtgttgagtatattgataagcccatctaagacagtcttcacttatattactgtgctttatgtttagattatatggggattattttagattatatggggattatcgtcaacctgcttacccatctgctcttgcatcttgtccatgtttttccattcaagccattaaaatagtaatcataactattttaaattccgtgattgataatgcaagcatctgtttcatatctgagtatggctgtgatgtttgcattgtccatttcagttgtgtttttttcttgtccttaggaatgctttgcaattatcttttgaaaattgggtgtgatgtatctggtaatagaaatgcatatataggctttcattgtaagcatttttaataacctggctaggtgttgggcaatgatcaatatatgttttaactatagtcatcaaagtcctaacatttgcctaatatccttggatttaattttttgtgttktttttgttgttgttttgtttgtttgttttctcctctcttgaatttggcatttttctgtgtacaactcagagtggtctgtcttgaaattctctcatttgtaatccactgaatctataatccacctaaaattaggtttctgaattgtatttaggtaaagttatttttcctgtatagcagcccattattataaagctgcgggtgtatttcacaattattattcttcccctccactctcagatcttataggggctctttcttggagactcaccttgtggtcctactggagtttctggaggcatagcgaattagtgaactccaaagattgtggccctaagattctctaactttcatactagtctacactagcaacttatcaaaattaccacttgaatgtttataccattttatgagtccagttatttctgctttaggtaagcatgtcttagatactgtagatgcacctgtctccagatgcaattgcagctttctaacagatctgaaaaaagttgttgattttatatatattttatttttgtatggacaggaatgacaaatgacaatttctttgttcattgaatgttagagctaaaacctcaatgttttataatattttatttgttccttcatgtattgagcctttatttgttgggtgttattttagctttatttttaaattcttttaaacttttttttctggaaaacatatgagttatttggacatagtttgatgctttctaattttgcttttaagatttgttggtcaggatagaacctcaaactagggctaattattttatactatgaggacaagactttcctgtgtaatctaacctgtttcattaatcttacaatttttcagtcaaactgatggcaatggtcactcttcttagccctgtgtgaccacaaggaccgttcaccataacgcttttggataactctttcaccagcttc

SEQ ID NO: 68915 - DNA, 1680 bp, Homo sapiens
ttattctgctttgtgctcactaaacatttttgaacttatgattggtatctgttattatggtgcaaaattcataaccattaatgcctcaaataatttttatgatagcttctttttccttcttttccatttagaagtatgttacacatgtagctattgctccacaatttctgtatattctctttttttatttttaaaaattttagtccctgaaatttctattgacatctcttcatgtatctgattctttcactggctgtgttgagtatattgataagcccatctaagacagtcttcacttatattactgtgctttatgtttagattatatggggattattttagattatatggggattatcgtcaacctgcttacccatctgctcttgcatcttgtccatgtttttccattcaagccattaaaatagtaatcataactattttaaattccgtgattgataatgcaagcatctgtttcatatctgagtatggctgtgatgtttgcattgtccatttcagttgtgtttttttcttgtccttaggaatgctttgcaattatcttttgaaaattgggtgtgatgtatctggtaatagaaatgcatatataggctttcattgtaagcatttttaataacctggctaggtgttgggcaatgatcaatatatgttttaactatagtcatcaaagtcctaacatttgcctaatatccttggatttaattttttgtgtttttkttgttgttgttttgtttgtttgttttctcctctcttgaatttggcatttttctgtgtacaactcagagtggtctgtcttgaaattctctcatttgtaatccactgaatctataatccacctaaaattaggtttctgaattgtatttaggtaaagttatttttcctgtatagcagcccattattataaagctgcgggtgtatttcacaattattattcttcccctccactctcagatcttataggggctctttcttggagactcaccttgtggtcctactggagtttctggaggcatagcgaattagtgaactccaaagattgtggccctaagattctctaactttcatactagtctacactagcaacttatcaaaattaccacttgaatgtttataccattttatgagtccagttatttctgctttaggtaagcatgtcttagatactgtagatgcacctgtctccagatgcaattgcagctttctaacagatctgaaaaaagttgttgattttatatatattttatttttgtatggacaggaatgacaaatgacaatttctttgttcattgaatgttagagctaaaacctcaatgttttataatattttatttgttccttcatgtattgagcctttatttgttgggtgttattttagctttatttttaaattcttttaaacttttttttctggaaaacatatgagttatttggacatagtttgatgctttctaattttgcttttaagatttgttggtcaggatagaacctcaaactagggctaattattttatactatgaggacaagactttcctgtgtaatctaacctgtttcattaatcttacaatttttcagtcaaactgatggcaatggtcactcttcttagccctgtgtgaccacaaggaccgttcaccataacgcttttggataactctttcaccagcttc

SEQ ID NO: 68916 - DNA, 1184 bp, Homo sapiens
gtaattttattttctttttcttttttctttttycttttttttttgagacagagtctcactttgttacccaggctagagtgcagtggcacaatctctctcactacaacctcctcccaggttcaagtgatcctcctgcctcagcccccctagtagctgggattgcaggcacccatcaccacgcctggctaatttttgtatttttagtagagacagggtttcaccatgttgaccaggctggtctcaaactgctgacctcatgttctgcccgcctcaggttcctaaagtgctgggattacaggcgtgagccactgtgcccgcctgagtcctatataatattttaactacttgcttgttttctccttacctatgctgaaaagaaagattcatattagactccttgatgatagccttttcaatatgaaacatgaggcatgcaaagaagtagtaaaatgatatattaattaaatcttaatattattaaagaagtttaatttagatggaaaacattaattatatgtttagtggaggcaagagacagtttacctgccatatgtggagcatctaatagttttccattttgtaaaaagtgtctctctaattgtacatataattaaatgcttatatatacactgattttaaagtatccaggaatctacacactgcatgttaaaaaatgggtgtatacttttcatgcaagttatatcatttttttctccttttcttatctaggtattttgagattccctcaatgcacttgtataacttggacattacagaaatactaaaagagatactcacttgctaattatcttggtcccttctggctgcttagcaaaatatcttagactggacaatttttaaacaacataatgtatttatcaagcttctagtggctagggagttcaagatcaaagtgtggaaagattcaatgtctataagaacattttgtttcaaagatggtggcaaaagttagggaagagggaggggtaaataggcagggcacagggaggtttcagggcagctaaactactctgaaaatattataatggtgcaaacatggctttatatatttgcccaaacccataggttgcataataccaagatatctttgttggactttggatgattatggtgtgtcaatgtagactcatcccttttactatatatacgaccctggtgggaga

SEQ ID NO: 68917 - DNA, 860 bp, Homo sapiens
tcagaactctatattctcctgtaaccttcatcacaggactttagttgaaaagaaaaagggagatgcctcagaataaagctgtttttaatcttagtggtgtcttaactttatatagcacttcaaggaataaaatcactatgttaaatgatctatatgatagaataacaggtaatattaatttttacaaaatataaaatatatttgttaaattaaaatgttctaattagtttgaatggaagcatagtgtaccggtcaagaccatgaacttagaacacagatacctgggtttaaatctcaaccagagccaagacctcactgtggggctgtgggccaattctttaattatgttgtgatgatcacctctgtttcctcaattacgagatgttaataagaacagtaggtatataagtgacaaatttaggtatcctgtgtttctggatacctcaaatatgtatctatgttttacctcatgtagattttaaattatttacagaaaattttgatgaatcaaactgtgcccaacgttagtttgcacatactttgtgtctaacaaataacaattgagtgcttgattttgaaatttaaaaaagctaaatttattattaattttgtcatacaaattttgtgctgatcatgatagcagagtttggctaattgggaaaatattctttaaaattataagggagatgttcttggtagccagccactcccgaacatacttsttataaacttccaggaaattctgctatgactgttgcaattaagggtgtataataaagaactacattggcagagtatcccatatgtctttgtcttggtctcaacttagatggtatctcataatcaggagttctgatttt

SEQ ID NO: 68918 - DNA, 732 bp, Homo sapiens
gctcactattttctttcaaaaaaacaaagttttctatgtcaaagaaggtgttttatttttaccatgctaagggtattagcacaattgcatctgttttagatagatattgtcatatatgatcagtatttgtactaataatgtagtcaaaattataatattattttatgttaaaacagtttatcacaataattgttaatattttcctttgaattgtactttctgcttgtttggaggctttgtgctacactctttatgtgcataacaagagaataaatacattgttatattcatataacagaataccactcaatgataaaaaaagaaatgaattattaattgacacaaggacatagatatatttcagaaacacttcatgaaacaccttcaaaaggcatttgctggaagaaaacatacacacacacacacacacacacatacacattcatactgcatgattgcattcatatgacctacaagaataatcaatttatgataatggaagtcagaaaaatagtacttccgtggatagagaaaattgactcgaagagcacataagagattttgtgataaaaatatgtttattggagtggcggttatgtggatgtatataattgtcgaaggtaatccaattgaacctttaagattcacgcttttgtattttttgtgcttttttyctcaataaaaataaataaataaaaggcatctctgcaagaacatgtactcggttctctg

SEQ ID NO: 68919 - DNA, 1092 bp, Homo sapiens
actgaagatcctgatttatttgggcaagggagtcgctgggcaagaacctacctttttttttttttwaaaaaacaaacacaggtgatgctaatacaatagtctctagactacatatattttgagaaaatagacctaaactataaagggaaattaagaaatccttagtaccacttagaagttgccatatctatttctgtgatgctaaaggaaaattttactgtaagttgttttttttggcatcaccccagagcataacacacaattagtatctaactcaatcatttctcttcttaaaagcactttgctgtccctcttggatgggcagggccactttccaatgtgctgcaatagcattttgttaaaaccaacatctcatgttaacacaactatttgtgggcttacacaacaagaatagatggagaaatatatcccgggaaggaaaatattattattaaagaaaaacctcaactgactagccacatttttatcctgtagggatagcagaattcacatcatggaaatttttatgttttcctttagaaaaactacttacggagccctttggttataaaacaaaaaggcccggacccatctagattagagaagaagaaagggagctaaactgatcttcatgatgaacttcaacggagtcattcctgaggatggagggaatgatctatgctggaaagggctatgtgagttttctttaaccaggctccagaaggaataggtttccaatccctggaacttagagaagccagtgcagaaatgggctgaagcaacgtgatgaaagagtgagatgctacagaagagacaaccagggagaggttccctggggcagagaatggtggatgagatttaggatcagtgttgccagattctgtctgttgcagattattgcctttttatcctagtcctttgtatacaatagccttgtgttagtgggtcatgttttaaagcacaagaacaaggcagattggacagacctaaagcagtataaggaggtagagtcagatggcccaaaatgatgaaagagaggattggagtaggagtcgggtctgggactcctcagaattataggtgagtgtgctg

SEQ ID NO: 68920 - DNA, 1092 bp, Homo sapiens
actgaagatcctgatttatttgggcaagggagtcgctgggcaagaacctacctttttttttttttaaaaaaacaaacacaggtgatgctaatacaatagtctctagactacatatattttgagaaaatagacctaaactataaagggaaattaagaaatccttagtaccacttagaagttgccatatcyatttctgtgatgctaaaggaaaattttactgtaagttgttttttttggcatcaccccagagcataacacacaattagtatctaactcaatcatttctcttcttaaaagcactttgctgtccctcttggatgggcagggccactttccaatgtgctgcaatagcattttgttaaaaccaacatctcatgttaacacaactatttgtgggcttacacaacaagaatagatggagaaatatatcccgggaaggaaaatattattattaaagaaaaacctcaactgactagccacatttttatcctgtagggatagcagaattcacatcatggaaatttttatgttttcctttagaaaaactacttacggagccctttggttataaaacaaaaaggcccggacccatctagattagagaagaagaaagggagctaaactgatcttcatgatgaacttcaacggagtcattcctgaggatggagggaatgatctatgctggaaagggctatgtgagttttctttaaccaggctccagaaggaataggtttccaatccctggaacttagagaagccagtgcagaaatgggctgaagcaacgtgatgaaagagtgagatgctacagaagagacaaccagggagaggttccctggggcagagaatggtggatgagatttaggatcagtgttgccagattctgtctgttgcagattattgcctttttatcctagtcctttgtatacaatagccttgtgttagtgggtcatgttttaaagcacaagaacaaggcagattggacagacctaaagcagtataaggaggtagagtcagatggcccaaaatgatgaaagagaggattggagtaggagtcgggtctgggactcctcagaattataggtgagtgtgctg

SEQ ID NO: 68921 - DNA, 581 bp, Homo sapiens
aaaatttaagggaccaaccatggataggctgttgccaggtcatgagcaccttgaagcatctcttgatggccattcattagcctaagtatttgttgtctgggagaactgagcaagatgagctgcacagttcagttgtccatagggtcatgtttcttcagcacagagacctggtctccctgatcattgtgggttatggaaaaacgtgacyacacttaaggcagaagtttcaattccctctgcaatttttcctgcagcactacctgcctaaacacttcacatatatgtcaattcccttccagattctctattgttgaacacgaatgtgtgtggttttaaactattatgaataatgccatcaatatcccaaatcacatatttttgcatattcttcattttttccccatgcacattttacatattgtgttttgccagcatacctccagaaaagttgcttcttcctcagacttagtgtaattttacttaattttttttaaaacacagcaaatataacaaatggaagaaatgacagggtcatttcagcctctttttatttgaatatctgtatttcttaaggttcattt

SEQ ID NO: 68922 - DNA, 809 bp, Homo sapiens
tatgcatacaatagaatatcactcggcaataaaatgaatgaaatactgatacatgagaaatatggacaaatcataaaatggtgatagaaatcattgtactgatcagctctgttattgtggggaactgcctgacaagggtgcaaatgaactttctgggttaatgtaaatgttctgtgtagcttgaaagttgggaattgttaacaggtgtatgtgtttgtcaaaattcattaaacagtacatttgaaggtatgtacattttacagaatgtaaattacacatcaattttttaacaaaagagtacaggaggaaagtgaaattgtgagatcaaagaaaaagcattgaatatgaacatccacaatttttcttcccactcccacattaaaagaaaaactccgttactgtttaatagctttcaggactttttttctatttgttatttttttttctttttttctttttcttttttttttttttttttttgagrtggagtcttgctctgtcactcaggctggagtgcagtggcgcaatcttggctcactgcaacctccgcctcccaggttcaagtgattctatgcctcagcctcctgagtagctgggattacaggtgcccgccaccacacttggctaatttttttgtgtttttattaaagatggggtttcaccatcttggccaggctggtcttgaactcctgactttctgatccacccgcctcggccttccaaagtgctaggattacaggtgtgagccaccacgcccggcttatttgttaatttttaataaacacatttttaatttgtaatttttgtag

SEQ ID NO: 68923 - DNA, 646 bp, Homo sapiens
ccaagatccccagttgccatggcttgacgtctgaaatagagaatagaatatattttaactccaatgagagaaaaacattgaaagtgtgcatttggaaatcacctgcatttaatgacaaagtggaaactttgtcacagatacagttatattttcactgaatttaacatgatcatgctttggaaatgcaacacatttccagtgctaagcaattcatcttttccaccctcccaactccagcactagaagatctgaaagcatcatcctaagtactgagcacaccacaaagattatcaccttttggtttctacggaccattgtaaattatgtcttctaatatggtccatctctgttaatatcactgaaccatggtaactttttgtccactctgatgttggatctttattgaaacgtataatgctgaaggatctgcatggcactgggcattatttaattgtgtttgcatctcttcagcagtaaaactctgcagtccctttgttgacatcccacatcctgtctgtgacygactccatgacgttcataaatgtaccggacccaacttggcttaattcctaattagatgtgacagatactgaaatgcactcacgccatacatgcagacacaccccttagggaaggaagagccctt

SEQ ID NO: 68924 - DNA, 745 bp, Homo sapiens
cctgataattagtaatgttgagcatttttccatatgtttgttggccaaatgtatatcttcttttgagaattgtctattcatatccttagctcactttttgatgggattatttgtttttttcttgctgatttgtttgagttcttcatagattctggatattagtcttttgtcagatggacagattgtgaagattttctcccactctgtggattgtctattaactctactgattatttcttctgcagtgcagaagctttttagcttatttagttcccatctatttaatctttgtttttgttgcatttgcttttgggttcttggtcatgaagtcttggcytaagccaatgtctagaagggttttttcaatgttatcttctagaatctttatggtttcaggtcttagatttaagtctttgatccattttgagttgattttcatataaggtgagagatgaggatccagttttattcttctacatgtggcttgccaattatcccagcaccatttgttgaatagggtgtcttttccccactttatgttttcgtttgctttgttgaagatcagttggctgtaagtatttggctttatttctgggttctttattctgttccattggtctatgtgtctatttttatttttaaagttgaaaaatattccagatataagccctggttatatctgtggttgtagatattagaaatgtctttttgccatttggtgatttgtattttcactctattaatg

SEQ ID NO: 68925 - DNA, 745 bp, Homo sapiens
cctgataattagtaatgttgagcatttttccatatgtttgttggccaaatgtatatcttcttttgagaattgtctattcatatccttagctcactttttgatgggattatttgtttttttcttgctgatttgtttgagttcttcatagattctggatattagtcttttgtcagatggacagattgtgaagattttctcccactctgtggattgtctattaactctactgattatttcttctgcagtgcagaagctttttagcttatttagttcccatctatttaatctttgtttttgttgcatttgcttttgggttcttggtcatgaagtcttggcctaagccaatgtctagaagggktttttcaatgttatcttctagaatctttatggtttcaggtcttagatttaagtctttgatccattttgagttgattttcatataaggtgagagatgaggatccagttttattcttctacatgtggcttgccaattatcccagcaccatttgttgaatagggtgtcttttccccactttatgttttcgtttgctttgttgaagatcagttggctgtaagtatttggctttatttctgggttctttattctgttccattggtctatgtgtctatttttatttttaaagttgaaaaatattccagatataagccctggttatatctgtggttgtagatattagaaatgtctttttgccatttggtgatttgtattttcactctattaatg

SEQ ID NO: 68926 - DNA, 596 bp, Homo sapiens
ggtgtgtgtgtgtgtgtgtgtgtgtctgtgtgtgtgtgtgaatatatcttcattatccctaatggatccttttttatggcaatttgcttttgtttcataaattcaacattagcttaattaatttcacttgttttaaagtcttcttctgagtgctttagtwttatttccttgtgtgtgagtactttggtttgttatttgtttatgtggtcttcatgcttctcagataatttggaatcattgaccttgagcttatctttgcgttcacaattccttaacaactgcttactgctgtttactgcagagttcaccaaagtgagtgagaaaaaaattacttctagagctcttgttcctcactttttcagtaagatgagaaattgttggaacaatagctttacatctggtcttctttatcttctctcagctttgcctggtttagacctttcactgggtggtccttgtcagttacctctctctcaccccagcttccaccacctcaagatatagagatttttgagataatcccactttatttggcattgttttccacaggcttgatcacctgccatttttctctttgaatctcatcttcttcaaca

SEQ ID NO: 68927 - DNA, 649 bp, Homo sapiens
atgaaagcaaaacagaagaaaacaaagcccaaaccacaagcctgttaaaagttatttcagatgactcaagaagccagggattagagaattctatgtacaagtcctattcactatgctctgtttctatcttgaaaagatgtgaaaaccctaagacaacatttagaatagtagttgcttaagactgaaattaatttcagttgcctatactcaaaatatactattagaatgccaaatttttgtgtattaaacttttttcttttttaaaaacatagccatgtttattacctaagcaacatctactgctttcggattccatgagtgatggataatagatatgttaacagaggattattttgattgatagacagattcattcattaatttataaacactttacacgtgtatttactgaacatatgttatgttctaaatacttatctaggagctaaacatacaatggtgacaaaattggtraagattttcaagtggcttccattgcagcagaggtggccacacgttaaaagataagcaaattatcatgaaggcaatgacagataaagtgataggaagtgttgatggtaaagaggcaggaaagcataacagcaggtggggtgggaaatgtagctggggtcagatcagggcctctggg

SEQ ID NO: 68928 - DNA, 460 bp, Homo sapiens
tttctaacatgagtcatctctttttaaaaatgtaaattatcccagcaccatttattaaataggaatcctttcccccatrtccaaggatgatagactggattaagaaaatgtggcacatatacaccatggaatactatgcagccataaaaaatgatgagttcatgtcctttatagggacatggatgaagctggaaaccatcattctcagcaaactatcgcatggacaaaaaaccaaacaccgcatgttctcactcataggtgggaactgaacaatgagaacacatggacacaggaaggggaacatcacacactggggcctgttgtggggtgggggcaggggggagggatagcattaggagatatacctaatgttaaatgacaagttaatgggtgcagcacaccaacatggcacatgtatacatgtgtaacaaacctgcacgttgtgcacatgtaccctaaa

SEQ ID NO: 68929 - DNA, 563 bp, Homo sapiens
caaatatccattcaaaaattctctgataaagacaattttcaaagcaccaccaaagagagatgactcaaaggaccagcaagcaatttaaatatctcatgtaatacttaattttaagtatctctttgcatatctatcggtctcattattttccaaaagtctgaccctggagttctgatacccaaactcatttgaatgtatggatttttccttcctcattagagtagaatgtaaagatttttctttccttattatggttcagctcacttatacctattaaataactggtgagaatgttttgacttcatctttacccttaaatttaacatttaaatataaatatcagttgcactttaaaaattcacatatccactaagcattcagtttagaaagtgttgtgtacatcatgagaaatagaacygtatgatgtaagatttgtgctttatttagcatgggtgataaatgtatttatattacagcgtacatgtttgcttttgaccatttttgttttgtccaaattttcacaataaggcccaaaatattcacttgtatgttctcttcaatcc

SEQ ID NO: 68930 - DNA, 912 bp, Homo sapiens
ctctgtgggcctgcatatcacctaaaatctgaaactgctccacttctaaaatcttaatcctcaacataccaatrttggaatacatcttcttcttccacattcttattttcattacatccccttcttgcgcttaactagatgcttgtttctgttccccccacattcacagaataaattgccaatcctctttcagccttgcttcctactatgtgcctcttggctacatcttatgactttatactataatgacgctgccaccactaatcctgactgctttccctctgtgggtccgactaatctgtttttaaatcctctatggttgggtaaagccaactattccacctttttgttccaagacctaggctactcagaactggtttagaacatcagaaaatggtgacaattgacaacgccgcaaattcccaaactccagctctggactggcacttcaatactgcccagaaccccttctataagtgcgatcagctctctctgctttgccatctaataattttctgcttagtacaagaatagtttaaaaactcttggatttctaaaacaaggactatcacaaccaattcctactcagcctgtctaaatctataatcaactactttgcagtaaaactgatttttttctcctacattatccattataataaaaggcaacataatgtatttagtaacccttgtgaaacttctggtatagccttctccttttctccattcaaacagtcactaagcatatgaattgcacttctttattattcctcctctcagtctcctgccctgccagatttctggccaccattgcttctgacacggtcccaaggacactggctatcctcacactgctgtctgataaatattcctacaatgcaaaccaggctcaattataggactgtgcataatt

SEQ ID NO: 68931 - DNA, 912 bp, Homo sapiens
ctctgtgggcctgcatatcacctaaaatctgaaactgctccacttctaaaatcttaatcctcaacataccaatgttggaatacatcttcttcttccacattcttattttcattacatccccttcttgcgcttaactagatgcttgtttctgttccccccacattcacagaataaattgccaatcctctttcagccttgcttcctactatgtgcctcttggctacatcttatgactttatactataatgacgctgccaccactaatcctgactgctttccctctgtgggtccgactaatctgtttttaaatcctctatggttgggtaaagccaactattccacctttttgttccaagacctaggctactcagaactggtttagaacatcagaaaatggtgacaatygacaacgccgcaaattcccaaactccagctctggactggcacttcaatactgcccagaaccccttctataagtgcgatcagctctctctgctttgccatctaataattttctgcttagtacaagaatagtttaaaaactcttggatttctaaaacaaggactatcacaaccaattcctactcagcctgtctaaatctataatcaactactttgcagtaaaactgatttttttctcctacattatccattataataaaaggcaacataatgtatttagtaacccttgtgaaacttctggtatagccttctccttttctccattcaaacagtcactaagcatatgaattgcacttctttattattcctcctctcagtctcctgccctgccagatttctggccaccattgcttctgacacggtcccaaggacactggctatcctcacactgctgtctgataaatattcctacaatgcaaaccaggctcaattataggactgtgcataatt

SEQ ID NO: 68932 - DNA, 2322 bp, Homo sapiens
ccagtgttttctatacatatcctttttgaaaatgtttgtttctattagtatgtgggtgcatgtttctctaaaatatagccagaacccattagactatgctgtcgtagtcggtggtaggattttgtgtcatttcccttttgacttgaaaaatagcattttgaaaaaaatattttccatacacgacatttttctccctattcactttgatagcaccacctgcttcgggaaatatatattttccacaaaccactgaaatgaactaatccattttcactatgtgtcctttttggcaaaatatctacagaatttgctttcataaagataaattctgttgctttkcttctgtcttttctttctctctctctctctctctttatgaaagcaaaatatttttttttctggtggggaaatacatacaaaaataaaatagtaaaaattaaaaccaatgagtgaaattctaattttggacaaattttctctctctcatttttttaaatttgtaaatgaaaagttgaaggcaactgaccctcaagtttcattttcttaagattaggtgattttttgctcattttattttacctggaatcagaggtagaggtaatatgggctttttgatgttctaatgctgatatggtccagtattatgtaatatgtgcaactagtggtaccatcaaacttgtaggtaattttcccatgtcaaaaagaagaggttgggatcctctctttggaattttaggtgtcctaatgaaggagcaggaatcgagagaagggaggccgggcagggctcaagtagactgaatttcttacaggccattcaaaggggttagtcattcacaaagtcctctttgacgaggatgtgcagatgggctccctgggagcctgcacccaggctgggttccaagaacgaaaaattcacctgaaagtttcctagtcagagtggcaaaatattaaaggaaaagaagactacacctcaatgtgtaatgtatttaagaaaaaggaacatctccatttaccttgaaatttgagaggattaatttttatgaaactaccatacaccatatatatatgtgtgtgtgtagtttgtgtgtatatgtatatagatgcacatatgaatatacatatatacatacatacacacacatatacatacttatatatacgtatcacatatatatacacacacacacatattttaatggattttatctgttaataaagatggctacaagacataccttctttgggtatagagcagaaattataagttctagatggatacagactgagcacataatattacacgtgacaagtccatttttagaatcatcttgtgttgcagagcctaccatctcataggcatttggacaattttaattctggaataccaaccaatgctttgaaaatagcatagaggcctatctttaaatctaacattgctcaggcatttcctgttgtggtgacatgagcagcgtcacttctgatagtgtcccagctccctggtaagggcagtggaaaaggacagaatgagggggaaagcgtccactgagcgcttaaccgtgaacatgctaagccttttatatgcactgccattttaaaatatcgctacctcagaaggtaggtgttattattaaccccacttcaggaaggaagagctataaacgctaaatgatagtctcaaggtcacatgctactaaatatcacaccctggaattaaacacacacagcttgaccacagaagttgaggttatagacacttctctaaacagcttttcttttccctatttcctaagccaaattcagtgtaagggagattgacttccaatcaggattttagagctaatttcaacctgggtaccattaatccctccattggacaacttcatgcccacttgctcactcaatgctattggcagcccgtgaagtagggccccagctgtggtacaacaaaactgttcagtggcaggcttctgtttgaactgtgatcattggtgtatttaaaaatacactgaaccaagcgttagaagtcctgggccctaattctgttgctaccattaactactttcatgacattaggtaaggcatctaatttctcaggtttagttttctcattcatagaatatagaaatattattacacctactttcagatgagatgctttaaaccaatgacagagaatgtatataatcaaatatagccatttctatcagttatgatccctattttaccaatgagataacggaccagagagataactgataaggtaacaaagcaaactagcagtataagtatgctgcttatgatgggtggtgagggttacaaaga

SEQ ID NO: 68933 - DNA, 2322 bp, Homo sapiens
ccagtgttttctatacatatcctttttgaaaatgtttgtttctattagtatgtgggtgcatgtttctctaaaatatagccagaacccattagactatgctgtcgtagtcggtggtaggattttgtgtcatttcccttttgacttgaaaaatagcattttgaaaaaaatattttccatacacgacatttttctccctattcactttgatagcaccacctgcttcgggaaatatatattttccacaaaccactgaaatgaactaatccattttcactatgtgtcctttttggcaaaatatctacagaatttgctttcataaagataaattctgttgcttttcttctgtcttttctttctctctctctctctctctttatgaaagcaaaatatttttttttctkgtggggaaatacatacaaaaataaaatagtaaaaattaaaaccaatgagtgaaattctaattttggacaaattttctctctctcatttttttaaatttgtaaatgaaaagttgaaggcaactgaccctcaagtttcattttcttaagattaggtgattttttgctcattttattttacctggaatcagaggtagaggtaatatgggctttttgatgttctaatgctgatatggtccagtattatgtaatatgtgcaactagtggtaccatcaaacttgtaggtaattttcccatgtcaaaaagaagaggttgggatcctctctttggaattttaggtgtcctaatgaaggagcaggaatcgagagaagggaggccgggcagggctcaagtagactgaatttcttacaggccattcaaaggggttagtcattcacaaagtcctctttgacgaggatgtgcagatgggctccctgggagcctgcacccaggctgggttccaagaacgaaaaattcacctgaaagtttcctagtcagagtggcaaaatattaaaggaaaagaagactacacctcaatgtgtaatgtatttaagaaaaaggaacatctccatttaccttgaaatttgagaggattaatttttatgaaactaccatacaccatatatatatgtgtgtgtgtagtttgtgtgtatatgtatatagatgcacatatgaatatacatatatacatacatacacacacatatacatacttatatatacgtatcacatatatatacacacacacacatattttaatggattttatctgttaataaagatggctacaagacataccttctttgggtatagagcagaaattataagttctagatggatacagactgagcacataatattacacgtgacaagtccatttttagaatcatcttgtgttgcagagcctaccatctcataggcatttggacaattttaattctggaataccaaccaatgctttgaaaatagcatagaggcctatctttaaatctaacattgctcaggcatttcctgttgtggtgacatgagcagcgtcacttctgatagtgtcccagctccctggtaagggcagtggaaaaggacagaatgagggggaaagcgtccactgagcgcttaaccgtgaacatgctaagccttttatatgcactgccattttaaaatatcgctacctcagaaggtaggtgttattattaaccccacttcaggaaggaagagctataaacgctaaatgatagtctcaaggtcacatgctactaaatatcacaccctggaattaaacacacacagcttgaccacagaagttgaggttatagacacttctctaaacagcttttcttttccctatttcctaagccaaattcagtgtaagggagattgacttccaatcaggattttagagctaatttcaacctgggtaccattaatccctccattggacaacttcatgcccacttgctcactcaatgctattggcagcccgtgaagtagggccccagctgtggtacaacaaaactgttcagtggcaggcttctgtttgaactgtgatcattggtgtatttaaaaatacactgaaccaagcgttagaagtcctgggccctaattctgttgctaccattaactactttcatgacattaggtaaggcatctaatttctcaggtttagttttctcattcatagaatatagaaatattattacacctactttcagatgagatgctttaaaccaatgacagagaatgtatataatcaaatatagccatttctatcagttatgatccctattttaccaatgagataacggaccagagagataactgataaggtaacaaagcaaactagcagtataagtatgctgcttatgatgggtggtgagggttacaaaga

SEQ ID NO: 68934 - DNA, 919 bp, Homo sapiens
agaatgtaattgacaaattattctctgtggagatctaaacattctattgatttaaagagaagagtcaggcatggtggctcacgtctgtaatcctagcactttgggaggctgaggcgggcagattgcctgagctcaggagttcgagaccaccctgggcaacagggtgaaaccctgtctctactaaaatgaaaaagaaaaaataaatagcctggcaaggtggtgagcgcctgtagtcccagctactcaggagaggcatgagaattgcttgagcctgggaggtgaaggttgcatttagccatgattgtgccactgcactccagcttgggtgacagagtgagactccatctcaaaaaaaagaaattaaggagaagaaagagggagaaaggaaggaaggaagaaaggaagagaggaaaggaaggagggagggaagggaaggggaagggaagaaaaggaaaaggaaggaaggaagggggaaagaaagaagaaaggaataaggaaggaaagaaaatgaattgccagtcaccaggaaaatatagctcatttagctttgttcccaatttgtgtggatcttggtcatgtatcacataaaaagcaatacccaascagctaggaagtcaccaagagcctattcctgtttgttgaaagagaaatgatctccagaaagttattgacaattaatgcactctacaattgggggagatttttattctgtttttttcatttcctgtttcttatcttacattctcaaattgaggccattccttggccagaataacacatttctgcatgatctgccttctgccatttatcaaaactttgtcttgacccctttcagttaatcaaaaacaggaggcaaaatttcacaaacggacagagctatatatttttttacatcaggagcagttactctgtgtgtgtg

SEQ ID NO: 68935 - DNA, 846 bp, Homo sapiens
aaaaataaatccatgtgattttatagccatgactcagacacataaacttctgaaggtgaaaatgctttagggagagatagagaaaactttaaaatggtttactttttaagtacatgcttaggggaaaaataattatattgccttccccaccatgcacaaaagagtgagatgagaactattcaatttctcccaaagctgctgttttgcagagagacttacrgaagagttgagaacagaaatgagaataacgcagaagtggtgatgaccaggaggcctgtaactcagtttatgatttgggaaccatgttattctcctccatcattcaacaccatctttcccctacaaaagcccttaggccagtaacctaaagatccagcaattgtgagtttaacatcacggatagtccagaccccaaataaaacatagaattgcttgcatttatacgttgctctttttttttttttttttttttttgagagagtctcgttttgtcacccaggctggagtgcagcgacatgatcccgtctcacggcagcctctgcctcccaggttcaagtgattctcattcttcagcctcccaagtagctgggactgcaggagcctgctgccacgcccagctaatttttgtattttttgtagaaacggggtttcaccatgttggtcgggctggtcttgatctcctgacctcacgtgatccacccgccttggcctcccaaagtgctgggattataggcatgagccaccgtgcgcagccgctttaggttttttacagaacttccttgcatgattcttctgagaagtgggcagaacaaggttttcccccctttaaagatggaggttttaatt

SEQ ID NO: 68936 - DNA, 846 bp, Homo sapiens
aaaaataaatccatgtgattttatagccatgactcagacacataaacttctgaaggtgaaaatgctttagggagagatagagaaaactttaaaatggtttactttttaagtacatgcttaggggaaaaataattatattgccttccccaccatgcacaaaagagtgagatgagaactattcaatttctcccaaagctgctgttttgcagagagacttacagaagagttgagaacagaaatgagaataacgcagaagtggtgatgaccaggaggcctgtaactcagtttatgatttgggaaccatgttattctcctccatcattcaacaccatctttcccctacaaaagcccttaggccagtaacctaaagatccagcaattgtgagtttaacatcacggatagtccagaccccaaataaaacatagaatkgcttgcatttatacgttgctctttttttttttttttttttttttgagagagtctcgttttgtcacccaggctggagtgcagcgacatgatcccgtctcacggcagcctctgcctcccaggttcaagtgattctcattcttcagcctcccaagtagctgggactgcaggagcctgctgccacgcccagctaatttttgtattttttgtagaaacggggtttcaccatgttggtcgggctggtcttgatctcctgacctcacgtgatccacccgccttggcctcccaaagtgctgggattataggcatgagccaccgtgcgcagccgctttaggttttttacagaacttccttgcatgattcttctgagaagtgggcagaacaaggttttcccccctttaaagatggaggttttaatt

SEQ ID NO: 68937 - DNA, 1312 bp, Homo sapiens
gatgcaatgggccaagatcgcacctctgcactccagcctggatgacagatcgagactccatctaaaaataataataataaataaaagtttcctgcctgaagtggtacatgtcattttcatttgtgcttcattggtcaaagcaaatcatatggtctgccgaacatcaagggggccagatagtacattccttttatgcttggaagcaggagagccaggaatattggtgaacagcactcatgactgttagagtctgtgctttttgctactgaatattcatttcattttcctttctgcctgcaaaatacactcaccctttcctccaaaaataaaaccagaaaatttcattccgacatgacttttagttgtaagcccaagattttgggagacacacagacgtttttaaatcaagagaggatatagcacctattgattcagagagctataaatgagaagttgaatgttcttccccactccacaatggtgtccacagtcacccttcaatggtgtaacagaaacaggataattacaataggtagccctattcagaaatgaggatagtaagagacatacagcaggtggtggtccacagcaattctaaatcccactgggcagacattgtaagggctcctatcaggggtagggaaagttcctcgattagggtcaggtcctgctccctgggaaaagctctgttatccagtcatyctcctgaagcctggatccaacttctgaaccattcttttttcatgatgattctctgtggctgcatttctgtagcgcctacattctctgtaggtgctatggtctgaatgcttatgttcccccaaaattcatatgttgaaaccttaaaccctaaggtgatggtagtacctagatttgtgtccccacccaaatctcatgtggaattgtaatccccagtgttggaggtggggcctggtgggaggtggtcgtattatggggacaaatttccccctttggtgctgttctcttgatagaattctcatgagattgggttgttttctctcttcctcccactctgacctagtgaagtgctgacatctccttcacctcctgccataattgaaagtttcctgaggcctgcccagaagccgagcagatgccagcatcatgcttcctgtacagcctgtggaaccgtaagccaattgaacctcttttctttataaattacccagtctctggtatttctttatagcagtacaagaatggactaatataggaggtgactacatcatgagggtggagccctcatgaatgggattagtgcccttataaaagaaaccccagagagctagcc

SEQ ID NO: 68938 - DNA, 1123 bp, Homo sapiens
aatttcacttatttggaatgattagtccattcatgcttgctggaataaagttagctcttccttgactattaaaataaaattgacaatattaaaatttaaaaaatattagcgtttttattagtgaggaccattaggattacctctttagctgcataaataatattaatgggtcattaaaaatggctcctctaaatagattagtatgtctttgttttgttaaaatcttaaaacttgttccaagaattccctccaactttagagcagcatcactttcttactctataataaacaaaggttctctacataaaatctttcattaagtttttatttttcacctatttaatagagtaaatttacagaattctactgggctgcattactgtctatgaaaattaatcatttttatattaaatttgtagattgtcacttatttactggcctgaggcaagacatgttttacttttcttatccaagtatttaagaagtcccatagaataaatgagtttctaatattagatattctagagaagtgaaggaagaaactattctgtgagcaggaacataaatggttcgtctatgttaggctgcattaaaatatactcaaatggaagtaagaaaacttactttataacatgattttctttggcaaaatgacaggagttacagaagaygtgttacatgggtttcttggatacagaagtacgtgaaaaagattacatgtcttgaatgctcttctacctttattttgctttattttgtcattacaaaccctacctcctatgactgtatgtatgtatgtttatgtgcctgtgctttcatattacaacttacaagcctatgaaggcttaatgtgtcactattcctgaagactataactggggattcatataaagtatgaatactaagacaaaacatgtcaaacatttttttttcttaataaactttttttttcacacaagttgatatttactgaaaaatggtagagatgatactgggatgccatatgcctctcactcatcttcctttattattaacatcaatattcctttattatgatgaatttgtcacaatgaataaattaatattgatgtattactattattaactaaaatcaatatggtat

SEQ ID NO: 68939 - DNA, 516 bp, Homo sapiens
tgatgagctctccaatacattgaattgaaacaaacaaataaaaaatggtagaggtgycattcccatactaatcctgattaggttctctgaagtaaacaattgaaacgccatgcccttctcaacctggccttctttcaaatatgtgaaagcacatattacccttttctcagtaccaaactccttcaatttccttatttgacaactgtgctcttgtagttgtttttctctggatgcaatctactttgaccactcctctttttaaatgtatttgcttatatttaaacacagaagttctcccattttaaagttagaatgcagttagactattatttgtttgacctgtatataatacttctaattatgcctgccaatattacttttcttttttcttgtagtggttgtttcagactaggggtacttaagattacaaactgctggtttgttttattggttcttgaatacaaagaaaccaacagcataaaattttataatcaagaagccaccatctatgtttct

SEQ ID NO: 68940 - DNA, 710 bp, Homo sapiens
tggttgtgttaggggggcgggcgcgggagggcaccatctggtagagaacttactgcrgtttggctgagttgtataggtgaagctttcattctcaaataaattttaaaagattcttgctcaatataaggatatgggatatagagacaaatgttccagaaaaaaaaaaaaaaaagattaaaaatccacataggcaacaatccttcatcttcttagggcagtctagtccaggaagcttctcctgcttttgaaggtttttctttgatcttaaaataaatgaggccaggtgcagtggctcatgcctgtaatctcagcattttgggaagtcaaggtgggaggatcacttgaggccaggagcttgagaccagcctgggcaatatagagagatgccatctctacaaaaaaataaaaaaacaaaattagcggccaggcacagtggctcactcctgtaatcccagcactttgggagaccaaggtgggtggatcacttgaggtcaggagttcaagaccagcctggccaacatggtgaaaccccctcttcaccaaaaatacaaaaattagccaggtgtggtggtgcatgcctgtagtcccagctacttgggaggctgaggcaggagagtcacttgaacccaggagacagaggctgcaatgagccaaaattgcaccacagcactccagcctgggcaacagcctagatgttattttttaagatg

SEQ ID NO: 68941 - DNA, 792 bp, Homo sapiens
caacatggtgaaaccccgtctctactaaaaatacaaaaattagcctggtgcagtggtgcgcacctatagtcccaggtactcatgaggctgaggcaggagaattgcttgaacctgggaagcagaggttgcagtgagccaagatcgtgccattgcactccagcctgggcaacagagtgagactctgtctcaaaaaacaaaaagcaaacaaacaaacaaaaaacaccaagatctgcatcagcggcggtactgaacacaggtacaatttcacggcttcctaatgtgttgtatccatttacagtcctaacagcaggatgtgaaatcgctcatattttctaracctttcctacacttggttttatcactctgtttattctttgccaatctaaaactgttccaatacaatgtaaaatttaaatttaaataaaatgtgcatttcgctgattaatgtaagttggaatatcattatcttttcatagttcttgggcaattatatttcttctctcagatttacacagtcatgtcctccccatttttcaatgtgaccatttagttcttactgaaaagtaagtgcacattttataacaggaatattaaccctttgtcttttttttttctttttgtagaattttgcaaaatctttgtggctggtctctccactctgattttaatgatagtcttgttttgtttgtttttaaaaaaaacactatgctgcagttttaaatttctttgtagacaaatcttccgtctgtgacttgatagaaaagaagacagatgagtgtgaacagatggagg

SEQ ID NO: 68942 - DNA, 2793 bp, Homo sapiens
ctccccagcagcgctgggaataggcagcagcagggtgaggatggaagcaggaggagcaatcaggatgcttccacggtgtcccaagcaagagctgatggtggtctgcaccaggatggcagaaacaggcagtgaggtggggtataagagagtcaagaaggactccaaagtgtttggcctgaacacctgtaagagtggcgttgccgcttactgaaggaaatggttaattggaaaaaaccaaaagtttgttttatgacttgactaaacaggaggagaacaaagatgatgcaaaaggagaagtcagggacagcatctagattcctgaaggagaaaggggtctgcttctggccttggcagaggtggcttttcctcacaactgtgttcttgatcctttggaacatgggacaaccattggggtccctgaggctgctatagtcacatgtcttcttccactggagatactttctttaccttgtggtctcttcgttttgatgcctcaggtaacacaggccaggactgccctggaaatgagaaaactgaagggtcaatgcctcatcacaagtgacagccatgattgagaacacagggctgtcatatcttccatttcatcgagagggactagaaattcagatttttatgcaaaatcttccagtcttcaaatactgtcatgcaatagtgcagtggcataatcatggctcactgcagcctcaactgccccagctcaagtgattcttccacctcggcctcccaagtagctaggaccacaggtgggcatcatcacacccggctactttttttttattatttgtagagaccaagtcttgccatgttgcccaggctagtcttgaactcctgggctcagcctcccaaagtactggggttacaggtgtgagtcaccaattcaattttgtttaaaaaaattatatagaccacaaaacacaacagtggcctggaggtggcctgagggccgccactatgcaatcacagctttagatcatgagcttgtgttcctttctgactcactctccctgcctgtgaagcggcgttgaatatctcacacatctgctgggaggcagaagaattagaccgtgtgagggattaggcttatcaacttcaggatctaccgaaacagagtggcgttactgctgtgggttattaaagccatcaagcctgcggtgcaatatcccttcatgaatctttgttgacaccgccaacagtgcaagtctctacactagagtgcaattcagttactcacattactcagttatttagctgaaactcacttatttatttcccacagcacctaacagtgcctgactcacaatacataatctgaaagtagttgctgtaggtgacgttagtcatttattcactcattaactccactaggattttttttcctttggtaccaattatgtgcctactgttgcccgggggccactatggaaaatacccagcctcaaccgcacccaggtgaccatccaggtgtgaagaacacacggacccctgagcgctcagtggaaagaggactgtcactgccaaggaagtaaatccagctgtccaggtttgcctggaactgaggagtgtctcagaatatgggacttcaagtgctggaaccaggacagtccaaagtaaagcaggattgccggtcaccctgagtagaataactaatagtcacaaacatagactcaaaatcagacatcgcgcagtcacccctttcccactgtcctggctgtgtgatcttagacaagttacttaacctgtccaagcctttgttttcttagttataaaatgagaatctatcttgtgaagtgctttgaaggactaaatgagaaaatactcactgtaaacattcaataaatggcagccaccatcatcggcatgattcctggtaaagggggaaaactgtggttctccgacattcccaacacattgtgtttgtccttttgtggcgggatcctcaagacccagcagctgctctcatggtaataactctgtggcctactcctcttggggaggacaactctgatctgttttctgaggctggacgcaacatgaaggaggtcttagaacattttaaccaattaaagagctgaaaggagaagtcagttacaatggcaagcagctacctgggtgataacgaaatccacgcacaatcaagatattccaccttcgtagcagggatgtctggaggggctgcagagtccccycttctgccctctatattccaaatgggttgtaggcagcacatacaagacaacaggcaacattttgacccctccccaaattaaaaaccaaggacataacaatccattgagaacactcagagtgccccaccctggcagttgctgtatcctcatcccacactcctgagatattgtggttctctgcttctcatcgctctctggcaccacatctggctgtggtcctacccccatcatgtgccaccccatccttaacaactataacctttcttgacattttttttctttgagacagagtctcaccctgtcactcaggctagagtgcagtggtgcaatcttggttcactgaaacctctgcttcctgggctcaagcaatcctcccacctcagtctcctaagtagctaggaccacaagtgtgcaccaccacacccagctaatttttctgtattttttggagagacagggtttcaccatgttgcccaggctggtctcgaactcctggactcaagcaattcacccaccttgacctcccagagtgctaagattataggtgtgagccaccgcacccaggctcttgagtgactttttaaaa

SEQ ID NO: 68943 - DNA, 3248 bp, Homo sapiens
  misc_feature (1)...(3248): n = A,T,C or G
gttggaggtgaaggacatatggtgactctggtgtaaccgagaaaaatggtgcaagagcaaagggatctgaggttgctctgatcattgacctaaggccaatgtcttgtgaatagatgcttaagtgcgagctcaagcacattcccctcaggtacatagacccagaatagcttacttatttgttcccataactggtgttgtgggtggcaagggtgtgctgagtcttgtccttaccgggccatgaagaatcttaaaagggaagcagaagttaccagtgttgatttcacaaataggtgctaaccactcacaaataatatttccctcctcactgatgcctagaattttcctggtctctgtaagtgtgagttgcaggggcggggacacatcttaagtgctgtaataatctcagtctcctcatctggaaaatcaaggtgtcattccagctttcggtggctctgattctgctttcaggtccgttcttgagagtgggttttcatcagaagggcctggaagaatgttaagcaactgagagggaaggagggattctttggagggcaaagggctctgcctccctccctgcccccaggccacttgccatcccattgaggagtgaggatgaccacagcaagtcttaggtgattagaggtttaggtagagccatgtatatgtgctccaatgagaagtggttgtttggactagaccagttcagacctgccctgaaagtagcccataggccaatgaggtgggctgagaactctctggttctaccctgtgctgtaaccaacctttcaaggtaatctagcaccagagcagacccaaaactgcagggagaaaaggcagcctcctgggtgcccttcctggtgcatccttctctctgttctacagcaaagcattgaaggagcttctgcctgcaattggcaccgtgaagagcttaacccacgaaggcctggttttgagtcttggtgggtggagcagagattctgataaaactctgttctctcttttctttagccttgaagtttcaggcaggaaagaagagaagatgatgcatcgctgggctctgcaaagggcctgttttctaaaggcatttgcctctctgtctgtgcctagccttgggctgggcaaagaggggttgcccctaacatacttggtgattggctggataaattgtaagctgaaaaaacaaagtggttttcacgtttcctaaattatwtatattgaaatttgccatttcaatctgactctgaaggaagctcagattggttgtttgaacagggagctctgtgctctgggtccttttacttttgcagtgggatgtattcccagaccacctccatcaggccggctggagagcctggggatcccagggcaatgtttttccccacctggctcagatcaggcagggagagcatgttttgtgacttgctcagagcttgttccaggaagtgttcttatatcctgaaatggaagagaccttttctgatacactgttgccaaatgggcttggagagcatgaaagaattacagcatcttcagagtctgtttataacttcagatgcaaaaactacactctgtaaaggggaggccgtgcactttttaggaaaaagctgtgaattaaggagtcaggggctgggtgcggtggctcaagcctgtaatcccagcactttgggaggccaagacaggtggatcacaaggtcaagagttcaagaccagcctggccaagatggtgaaaccccatctctactaaaaatacaaaaattagccaggcgtggtggtgggtgcctataaccccagctactcgggaggctgaggcagagaattgcttgaaactgggaggcagaagttgcagtgagccaagatcgtgccactgcactccagcctgggcaacagagtgagactccatctcaaaaaaaaaaaaaaaaaaaaaaaaaaaaatttaaaaaccctgggggggttggnnnnnnnnnnnnnnnnnnnnnnnnnnnnnnnnnnnnnnnnnnnnnnnnnnnnnnnnnnnnnnnnnnnnnnnnnnnnnnnnnnnnnnnnnnnnnnnnnnnnttttttttgagacggagtctcgctctgttgcccaggctggagtgcagtggctcgatctcggctcactgcaagccccgcctcctgggttcatgccattctcctgcctcagcgtcccgagtagctgggactacaggcgcatgccaccaagcccagctaactttttgtatttttttttttttagtagagatggggtttcactgtgtttgccaggatggtcttgatctcccgacctcgtgatccacctcggcctcccaaagtgctgggattacaggcgtgaccacgcccagccccatatgaacaatttaagtgtacagttaggaagcattaagtgcaatcacattgctgtgcaaccatcaccaccatccatctgcagaactttttcatcttcccaaactgaaactctgcctccatgaaacaacagctccccattttccctcccccagctctggcaatgaccattctgctttctctccttatgaatttgattattctaggtatctcatataagtggagtcatatagtatttgtcctttggagtcttgcctgtcttatggttggttttaatttcattgagacagtcttggtctcatccaacaaattagtctattaagcacctcctgaaataaccacagctaatgttcactgggcacctaccttgtgctggcctgggcgccatgtaagcactgcacaggtattatcctctactccttatgggcactttgggcagcgagtgtttgaggaatgtgaggcacaactaggataacagggctgcagggggaacccaggccgtctgactcccgagtccagcatttcccactctctggccaagtcctgggttctgggatgtctgcttcatggccccctcaccaagccatggggcccccagttaatcacatccctgagtgacctcattttcttctgcacaactgctctgcctttcgcatatccagggagacagaacacccagtctcttccgccacttgcccaaatcaggaaaaagagagatccctgacccctgcttcaactagcatctagttcctaggatgttatctcaactacctgcaaattggtcccactaagactcatttctttcctttggtctgaattattatggtggcatccgaactgactttgttgccctgggctgacccccttccagtctaccctgatgaagaagctgggagcagccaggc

SEQ ID NO: 68944 - DNA, 767 bp, Homo sapiens
ggagctaaaaaccacatttcccagatcccttgcgaatcagtttgaatgaactattgcttgggaagctgggcagaagccctcgggttgtgtcacggatgcgggtggagatggtgctgttccgaggcctcagcaccctgatgtgaccctcctgaggaggctcctctgctccccacggttaggtaccactctcctggggtgaggagcctttgctgcaccagtgattcagaaagccacctcatcccggctgataagcctctgtttgcttaatctggctagaatggttcttactgtcagcaattgaaccctaaactaatacaattagagattattaaaattaattaactttaatgaataaaccagtgaactgtatttcagtttacaaataagttttcagcacttaagagttttctcggagaagcccttacccatttgtaaatgaaatttttatttccccaaacatgtctgtttcacagaacctccatgcacgctggaagcaggaatgggctctgaggttaatgtgtaagagggcacctctaactcccacacgtttttgttgttttccaccggagctaagggcaataaaagcttkgctcagaattggagcctgctctgttccaggacaagaaaagtcagagccagaaggtctcttcctgggcccggctagccgctggagatgagaaaacggcatcctccgtgtgcagtcagccccgagcctaggccctgcgggcagcacagagaggcaggaaagagcggccgtcagaggcagg

SEQ ID NO: 68945 - DNA, 716 bp, Homo sapiens
gcagacgttgcttctggacaattgtgtggtgcggggtgccattctgatcattgagagatgcttggcagcatccccgtctccayccattacagcccgcagaagggccttcccacgccacaatagtctgcgtggcctctggaccctgctgaagtcctctacacgacagtgacccttcgccgagagacactgctgtgaggcgattcagataggtggttgcacctgtttccagattttacttatagtatctaaatactgtaggcatgtggctattagcaagaggatatttgcataattaaatattgtagaataatgggaagcatacattttagattagtcgtatttttattattttgcttagattatatgtttttactatggggcaaactctaaggaggctgaataaattagctgggcataatttgagaagaaaaatgttaacagtggttcattttttagcttgatagagaataacatttcaaaatatcttaaatgtaaggatgtcctaaggaattttcagagacttctggagacaaaatcaaaaacaagtttttcttctagtgccctctattgctagcattgctcctatagaattacgcacttgctcatagcaatgaaaaactctggaaaaatacattttaaagataactgcttgaagacactggagagttacaaaacacagggacaatgcgcaaaacgttccagccacgaaatgagga

SEQ ID NO: 68946 - DNA, 716 bp, Homo sapiens
gcagacgttgcttctggacaattgtgtggtgcggggtgccattctgatcattgagagatgcttggcagcatccccgtctccatccattacagcccgcagaagggccttcccacgccacaatagtctgcgtggcctctggaccctgctgaagtcctctacacgacagtgacccttcgccgagagacactgctgtgaggcgattcagataggtggttgcacctgtttccagattttacttatagtatctaaatactgtaggcatgtggctattagcaagaggatatttgcataattaaatattgtagaataatgggaagcatacattttagattagtcgtatttttattattttgcttagattatatgtttttactatggggcaaactctaaggaggctgaataaattagctgggcataatttgagaagaaaaatgttaacagtggttcattttttagcttgatagagaataacatttcaaaatatcttaaatgtaaggatgtcctaaggaattttcagagacttctggagacaaaatcaaaaacaagtttttcttctagtgccctctattgctagcattgctcctatagaattaygcacttgctcatagcaatgaaaaactctggaaaaatacattttaaagataactgcttgaagacactggagagttacaaaacacagggacaatgcgcaaaacgttccagccacgaaatgagga

SEQ ID NO: 68947 - DNA, 1726 bp, Homo sapiens
tcttactctgtcatccaggctgaagtgcagtggtgcagtcttgactgactgcatcctggacctcccgggctcaggtgatcccccacatcagcctccagagtagctgaaactacaggcgtgcgccaccacacccagctaatttttgtatttttagtagagaccgagttttgccatgttgcccacactggtctcaaactcctgagctcaagtacattccacacagctggacctcccaaagtgctggaattacaggcatgagccactgtgcttggccaaatcctttttaacaaacaaacaaaaaaaaaacttcttgcttttgttgcctcctaaaacatatcaaagtcttacagtctgaaaagtacttttccgatacaagacaatttaatattttcatgccattttctcattgtaaacacacatcaatataaaattgtcatgaaaactacatttgaaattcaaatggtgatggttttaaccccaaattaacatttttagaggaaataatgtttggtggaaatgttcattaaacatcattacaaatttaatgaaaaagcatgcatttgtacaagataggataccccaggtatattcagtcccatgattttttttgaatgtcatctaaatcaaacatgaaatatgctttatgtacaggcatgaccattacttcatgtgacttactgaattctgtctagtctttggtcccatagaaattattatctacatcaacctcgctgattttttttcatctctctttttagtaggttccattcaaggcaaaatgaaaacttttgtcaagtactaatgtaaaatttcaaaatccagttttattctcaaaaacttatttgcatcttccactgttaagacagtggtctctgactctgttttgttaactctataaagccagtttcacaggataaatttgaatcaacagtgcctactactgcatcccaggtcaccagtacaacactgaattgactcctgaggtaaaccgactgtatctcataatgacaggcttccaaagctctgtgcgctagctacaattggaagcaaatgccacctgtgcaaacagacttcagaaagccttctttccacttaatagatatgtctatgtaaatggccaaaaaattcatcattgtgtgtccatgatcatattttaaaatacatagttcacaatattacttctcttaaaattaaagaattaaagctcaaatttttttttctaaataaattggctttaaaatgtagactgcaaatattcctgaccatattgatgggccagttcacaatctatgaagagttgaacatatatatggaatatatatgttccctttcatgtctgaagaggaataaaactgtacagcattgtcttttgtttctgaaacataatttagaactaaaataaaattgaaaaataattctcactagacctaggaatttcctaaatggatcaaagtactttttaacacacgtgggatttaattaaaacgacttgaattcttgttaagataacaagttgcagcatcgcttactagctcattctgtttgtttctgtgtctggtccacttatatggaaactcaaccataaggatactctatcttttatcacacatgagtacaattggttgatggtggggtgtctattcgacttttaytttctttagtatcactcaggtgtgaatctttgcgaatgtgacacttgaacacttgtttataggccttcctgaaa

SEQ ID NO: 68948 - DNA, 1018 bp, Homo sapiens
tgcatgtctaaaatagagacagaaacaaattaaaaaaaaaattgctggagacaactgtgccatccatggggaatagcatggggaaagtgtcttaaaagaaagacacttttcctcttttacaggcatttcatgtttaaatattctatgaaataagccaattcaattttgggaatggtttggcctcattcaattatttggtgaaaatttaaaactctgcaaggattaacccataaatctggctattcacattgccaggccaaagataatgttcacataataatcctgtgaccctaggacaattctgaatgctggtccrgtagaaatgatttttaaaatatccaggggcttttgtgagttatctaacttagttatacagggtggcatgaaatctggtgcattataattcataatttatgtgagaaatagattaactttgctcagcatttattggatctttcaatataataaaatattgtggttcttctataatctgtcattttgctgagtcaccagcgccttgttccaagaaaattgctggaagtgggagaggcaaatggtaattaaaccattattgcagttggcttttgcatagtgtaacagaaactaaacttaatgtgccccaaacaaaatttatttctctcgttcccacctcccaacctgcttccctcactatggcctgatttagacaggagacaacaaaatggaagtcagacagccaagccagaacctaaaatgcaagctcaaaaatttaataagttttaatttttagagcagttttaggtttacaggaaaaaaataaaatgcaagctcaaaaattttgccttttttccctttagcctcacatttaaaaatgttctaataagttttaattcttagagacattttaggtttacaggaaaatggtacacacagtacagagagttcccgtgtgctgtctctccttcctcccacaatctctcctattatcgtcttacattggtgtgtacattgattaccaccgatgaaccattattgatgc

SEQ ID NO: 68949 - DNA, 1018 bp, Homo sapiens
tgcatgtctaaaatagagacagaaacaaattaaaaaaaaaattgctggagacaactgtgccatccatggggaatagcatggggaaagtgtcttaaaagaaagacacttttcctcttttacaggcatttcatgtttaaatattctatgaaataagccaattcaattttgggaatggtttggcctcattcaattatttggtgaaaatttaaaactctgcaaggattaacccataaatctggctattcacattgccaggccaaagataatgttcacataataatcctgtgaccctaggacaattctgaatgctggtccggtagaaatgatttttaaaatatccaggggcttttgtgagttatctaacttagttatacagggtggcatgaaatctggtgcattataattcataatttatgtgagaaatagattaactttgctcagcatttattggatctttcaatataataaaatatygtggttcttctataatctgtcattttgctgagtcaccagcgccttgttccaagaaaattgctggaagtgggagaggcaaatggtaattaaaccattattgcagttggcttttgcatagtgtaacagaaactaaacttaatgtgccccaaacaaaatttatttctctcgttcccacctcccaacctgcttccctcactatggcctgatttagacaggagacaacaaaatggaagtcagacagccaagccagaacctaaaatgcaagctcaaaaatttaataagttttaatttttagagcagttttaggtttacaggaaaaaaataaaatgcaagctcaaaaattttgccttttttccctttagcctcacatttaaaaatgttctaataagttttaattcttagagacattttaggtttacaggaaaatggtacacacagtacagagagttcccgtgtgctgtctctccttcctcccacaatctctcctattatcgtcttacattggtgtgtacattgattaccaccgatgaaccattattgatgc

SEQ ID NO: 68950 - DNA, 747 bp, Homo sapiens
agtgtgtgtccattctgctcacacaggattggccaaagcaagtcacacaaacaagcctcaggaaactctytgaggaaggctgctccttccatgcgtgtgggaagccaagagcaaatatctgctggctgatacaatccactgcaggcctctctagctgtgaaatagttgccttctataaagcaatggagacctgaaataacagatggcaaaataaaggcatctggatgagaatgattgttttcttgaaggtgttgtcaatgaatatgagaagccccacaaggcaggactctgaatctgttacttgacatcataactcatcacctaagcattgattcattcccttctgttttagggtatcaagttaccatggtatgcatggcttcctattaggcatttaggagtgggagaggaggaatgaaaagactgaggccacaggcatgccgccctcgtggagcaccactggtggagtccggtcacgggcctgcagccactgtgtgcttctgcagaactgtcactgcagtcatcgtgtgtaagcagtgcacctgtgagcatgactgccgatgacaacttacaaaggcagctgtgcagatgctaatcgcaaactgaaagtgctaaagccgtgcagtaataaagagcatggatttgtgtcaggcacacctggactcatgccccagcttcctgctgtgtggcctagggcaacctcctccgtgtttctaggcctcacttaattcatctgtaaaataggtt

SEQ ID NO: 68951 - DNA, 655 bp, Homo sapiens
tcccatgtcttgctctgtcctggtcttcattgaccaaatttcagcaatcagtaccacggacaactccttcctttttgaagcactctctcctctccatgacatcctcccagatttgcctcattccacagtggcttttcctttattctgtctttactgattggggtgacttttctcctctggtagagtttccgtgttggcatcccttaggtctccatttctatctgtaggctctgcttacctaaacacattgtgtagaatgaataatcccaattttatatcttggtggcaatttccttcattgagctctgaactcaggtagacaaggtcctgctcagtatcaccatttgagtgtgtagcatgtgtttcaaactaacatggttgaaaccgaactcttggattctctaaatcttgacccaaaccttatgtcttctcctrctaccccattttaacctcttctttttgttggacatgaagtgagttctattcactaaaagaaaatttcaaaatatcatatgcttaatatagaaaacaagatccacaaatctgcaaataaccatcatcaatgtgttggtttagatcctcccaggtgcttttctatgtactttcactaaagaagtggtttcttattggctatgattctttcagtttcaaaaca

SEQ ID NO: 68952 - DNA, 772 bp, Homo sapiens
ccacagtgtggtgggaggaaggatcacagccctgtccaagcagagcctcctttcacattgggtaatttacaaggaaggctctagacatttacacttcaagggtcagcattctgtaagggtcaagggctccatgcacagttgttactggggcaaaataaaggccacatcttctctgggcctctttaggtgcactgactctgcatttcagtggcctttcttccatttccttctgtcattttggctttggatgtgtattgggcttctgtaattgaaaccaaaaacaacagcttaaataagatggaaatatttttctcttatgcacaaccgagtggtgtcacggatacaggtttcttgtgtattgatcyacatcactagggcattgacgtcacattgtccaaaatggctcatcacctccgcaatcacattcacactcatgggaaggagaaggggaaggagggagggagggcatgtgtcccatctgtttaagggcactgcctggaagttgcccaccatcagtcactcacatcctgttggtcagtctaatccataagaccatacctggtgggatgagaggctgggaaatgttaccttaattctgggtggttatgtgcccagctgtaatttggatttcggttaccatagataaaagggaatagcagatatgggaaaacggctctgtcacactagtgacctgaaaacgcagctgttgtaggtaatttggggcttctaccagagggaaaaaaaaatagaaggcaatattttaaaatatgca

SEQ ID NO: 68953 - DNA, 772 bp, Homo sapiens
ccacagtgtggtgggaggaaggatcacagccctgtccaagcagagcctcctttcacattgggtaatttacaaggaaggctctagacatttacacttcaagggtcagcattctgtaagggtcaagggctccatgcacagttgttactggggcaaaataaaggccacatcttctctgggcctctttaggtgcactgactctgcatttcagtggcctttcttccatttccttctgtcattttggctttggatgtgtattgggcttctgtaattgaaaccaaaaacaacagcttaaataagatggaaatatttttctcttatgcacaaccgagtggtgtcacggatacaggtttcttgtgtattgatctacatcactagggcattgacgtcacattgtccaaaatggctcatcacctccgcaatcacattcacactcatgggaaggagaaggggaaggagggagggagggcatgtgtcccatctgtttaagggcactgcctggaagttgcccaccatcagtcactcacatcctgttggtcagtctaatccataagaccatacctggtgggatgagaggctgggaaatgttaccttaattctgggtggttatgtgcccagctgtaatttggatttcggttaccatagataaaagggaatagcagatrtgggaaaacggctctgtcacactagtgacctgaaaacgcagctgttgtaggtaatttggggcttctaccagagggaaaaaaaaatagaaggcaatattttaaaatatgca

SEQ ID NO: 68954 - DNA, 1229 bp, Homo sapiens
tgcatgcaagtcttaatacctaggtgatgggttaataggtgcagcaaaccaccatggcacacatttacctatgtaacaaacctgcacatctcgcacatgtatcttggaactttaaaaaaggtaatgaaaaaaataagtaaatgcaaatttcaaggttaccctaattttaaggttacttatctatgtttcttttacacttattgaactttgcaagttttgaaaaattcttgtttctatccttctggttgaaggatagaatgcaaaggtttattacaagaaacatcttgcagatgtttattacaataaattaaaattttattttccaaatttcacaaaacaaagtgcaaaataaatataaatagtcttttgaataatagggtttttcgttttgttttgttttgtttttgagacaggatcttgctctgttacccaggctgtagtgcagtggcgcaatcttggctcactgcaaacttcgcctcctaggttcaagcgattctcstgcttcagcctccctagtaactgggattacgggcatgtaccaccatgtctggcaatttttatatttttagtggaaacgcagtttcatgatgttggtcaggctggtctcgaactcctgacctcaagcaatctgcctgcctcggcctcccaaagtgctgggattacaggcgtgagacaataagcccggcctgaataatgctttaaaagtttgtagccataaaggcttgtttcggtaaaggagctggactattgttaccttgctcctgggtggagaagttcagatagtcacagaaagatttctttaaatcaaatacatctagaagtacaaatatcttagggcttatcatagtatcacatcaccaatgcagaaggctgtgctgcacaaacatgtgacattgtgcagtgcagagggcccagggggaggagatgcaggatctgaaactttatcctggctcaccctttgtgaaccatagaatgcttcacttcttttagcttcagtttctcaatctccaagcgtttaacattatccaaccctgacctactcatgattgtcttcaaaataaagtgaaataaatttacatgaaataaccttgacaatcaagtgctaattcgttataaggttattacaatttatattttatagcaacaataatagaatgatagctgctatttagtgaaccagacactggctcactgctgtgagccagacactgttaagcatcttatatgca

SEQ ID NO: 68955 - DNA, 1229 bp, Homo sapiens
tgcatgcaagtcttaatacctaggtgatgggttaataggtgcagcaaaccaccatggcacacatttacctatgtaacaaacctgcacatctcgcacatgtatcttggaactttaaaaaaggtaatgaaaaaaataagtaaatgcaaatttcaaggttaccctaattttaaggttacttatctatgtttcttttacacttattgaactttgcaagttttgaaaaattcttgtttctatccttctggttgaaggatagaatgcaaaggtttattacaagaaacatcttgcagatgtttattacaataaattaaaattttattttccaaatttcacaaaacaaagtgcaaaataaatataaatagtcttttgaataatagggtttttcgttttgttttgttttgtttttgagacaggatcttgctctgttacccaggctgtagtgcagtggcgcaatcttggctcactgcaaacttcgcctcctaggttcaagcgattctcctgcttcagcctccctagtaactgggattacgggcatgtaccaccatgtctggcaatttttatatttttagtggaaacgcagtttcatgatgttggtcaggctggtctcgaactcctgacctcaagcaatctgcctgcctcggcctcccaaagtgctgggattacaggcgtgagacaataagcccggcctgaataatgctttaaaagtttgtagccataaaggcttgtttcggtaaaggagctggactattgttaccttgctcctgggtggagaagttcagatagtcacagaaagatttctttaaatcaaatacatctagaagtacaaatatcttagggcttatcatagtatcacatcaccaatgcagaaggctgtgctgcacaaacatgtgacattgtgcagtgcagagggcccagggggaggagatgcaggatctgaaactttatcctggctcaccctttgtgaaccatagaatgcttcacttcttttagcttcagtttctcaatctccaagcgtttaacattatccaaccctgacctactcatgattgtcttcaaaataaagtgaaataaatttacatgaaataaccttgacaatcaagtgctaattcrttataaggttattacaatttatattttatagcaacaataatagaatgatagctgctatttagtgaaccagacactggctcactgctgtgagccagacactgttaagcatcttatatgca

SEQ ID NO: 68956 - DNA, 1229 bp, Homo sapiens
tgcatgcaagtcttaatacctaggtgatgggttaataggtgcagcaaaccaccatggcacacatttacctatgtaacaaacctgcacatctcgcacatgtatcttggaactttaaaaaaggtaatgaaaaaaataagtaaatgcaaatttcaaggttaccctaattttaaggttacttatctatgtttcttttacacttattgaactttgcaagttttgaaaaattcttgtttctatccttctggttgaaggatagaatgcaaaggtttattacaagaaacatcttgcagatgtttattacaataaattaaaattttattttccaaatttcacaaaacaaagtgcaaaataaatataaatagtcttttgaataatagggtttttcgttttgttttgttttgtttttgagacaggatcttgctctgttacccaggctgtagtgcagtggcgcaatcttggctcactgcaaacttcgcctcctaggttcaagcgattctcctgcttcagcctccctagtaactgggattacgggcatgtaccaccatgtctggcaatttttatatttttagtggaaacgcagtttcatgatgttggtcaggctggtctcgaactcctgacctcaagcaatctgcctgcctcggcctcccaaagtgctgggattacaggcgtgagacaataagcccggcctgaataatgctttaaaagtttgtagccataaaggcttgtttcggtaaaggagctggactattgttaccttgctcctgggtggagaagttcagatagtcacagaaagatttctttaaatcaaatacatctagaagtacaaatatcttagggcttatcatagtatcacatcaccaatgcagaaggctgtgctgcacaaacatgtgacattgtgcagtgcagagggcccagggggaggagatgcaggatctgaaactttatcctggctcaccctttgtgaaccatagaatgcttcacttcttttagcttcagtttctcaatctccaagcgtttaacattatccaaccctgacctactcatgattgtcttcaaaataaagtgaaataaatttacatgaaataaccttgacaatcaagtgctaattcgttataaggttattacaatttatattttatagcaacmataatagaatgatagctgctatttagtgaaccagacactggctcactgctgtgagccagacactgttaagcatcttatatgca

SEQ ID NO: 68957 - DNA, 2369 bp, Homo sapiens
agaaacaggtgaaaagttcttctcccccagttaaagggaacttggaccccaaggtagctaaatagaatattccaggaatgccaaatacccaggattccttacaaataacaacagtgtaaaggcacaacttgttcatgggtgaatcaataaaagccagtttgatgccctgttcttagcttctttttctcaaaagggctttagcaatgttgtctacacccatttttcaaaaatgagaaaatagaagcacagaagtcaaaaataacttgtgtagtaccagaattccacctccaatgacctgtcccacctgctgtgccacactaagaagtgtgcactcttagcttccatgcttctatattgtgtggtttaagggaaactgcaaggaagaagaagtgatatacaagtgatctggctggccctggggagcttaatcagtatttggtttattttaagataacctgaactggagatagtgataagaaaggttacccggtgttttccaaggaagagctgagtggaaagttgaatttggacaaaggctctatctatcctggcagagagtggtgtggacagcttgcagacactcacctgtgtgttgtgtgtttgctgtgatgttctggccgctgtgcaggtgatcttacactcctgccacattctgccttccaagagtctgaagtctcaggaactaggtcatgttgtaaaaaccaattaaatagaaacttagttagcaagccaggaaggtccgtggtaatgagccaaatcatctcctaagaagagaaacagaccctgaagatgagtcataacaggaggtaaacaaagataaactgcagtgaccccctggactttccttttcagcacagattgttttgcccctatcagtggaatgttaatgactcacgtccatccacgaggtcctgttgcaacaacaaacactggcagctactatcggccacttgacatatttgctggcccttctcattttcactggctctttcttatcccccagccttaatgaaaagttgcagatacttgcattcctagcaaggaagaaaaagtagaggtctttttgaagaggaaagtctgtgtccttgtcccctttccttggcatcatggtatctatgtataaggacaactttgctctccagagttgataagaaaaaaaaaaacaaactgtaatcccagcactttgggaggctgaggcgggtggatcacttgaggtcaggagtttgagaccagactggccaacatggcaagaccccatctctactaaaaatacaaaagttagctgggcgtggtgggacatgcatgcaatcccagttattcaggaggctggagcaaaagaatcgcttgaacccaggaggcggaggtttcagtgagcagagatcgcaccactgcactccagcctggcgacagagtgagactccatctcaaaaaaataaaagtaaaagcacaaatgttgcttgagcatcaaaatagggcaagcacagttcttcagctttacttggattaccccttttgtcctctcctcaaacctgtaaagtagatcctcttactatgcccattttgcagataagaaaactgaggttcggggagattaacttcttgaagtcatagctggaaagtggcagaggcaggaaatgaaccaaggtagcctgacacctcagcctgtctcctctgctgcctcctcccctgcctatctctaaagatgactttatgagagttagaggggagcaacatagagccagcagagcttttaaggtagtgtttattgccccaaaataatttttcttactatttaattaattttcatcaaacttaaggattactttggacttgtgacaatccaggtgaactgctgctcaaagatagactcaaaatatcgtgcgtttcaggtctcagaaacttggaacatagtaactctgagaagacatgagcagaggagaatctcaacccagatttggaaatgataccatttatggacacattgcagctsaaggccatgcttaggagaagtggcccccctcctgggtgtagagacagtgcttagtacatgcctggcacatagtaggcatttaataaatagatgctatttttaagactcattgtgtttatgcctgaacaattgctcttcaaataaaacatgactgttatttgtgtagctacaatgccagctagcaaactttacagacagatgtgtggctcagcgcaaagaacgtgtaggttgcaaccgtgtacattttctactctgggcctcattctagttctcctctttcttcctacccttcttgttgttgcacctctgcacttcttacttctgttcccttgtgttttatgtattactttacatatccttatatcatctttggagatag

SEQ ID NO: 68958 - DNA, 1303 bp, Homo sapiens
ggatccagattcaactaacatccctgcctgccacatcccaggcatttgcttagatgatattgaattgacttaatcctcaccatgactttttggggaaggtgtttttttcctactgtacaaacaggcatgccgtagcctgtggctggagaagtaaagtgatatccgcacatccacacagctagtgatcatgttcttggaatctgtcttgtgccaaatggatttaaagagaatcatggctaatagacatggctaatagatgggggttgagcatagctctttgttttctagcaccattattcttcctgccacattgcactggggactcctgagccccatgcctaccgggaatggaacaggctggaatggccttaataggctgtggataggactcagatgagatgaaccaagaacttcctgaccgtggtgagtcataataataagaatagttaacatggggccaggcgcagtggcactttgaaaggacaaggcgggagggttgcttgaggccgggagttcaagaccaacctggccaacatagcaaggcccccatctctatttctaaaaaataaaaaaaaattaaaaagaatagttaacataacaggacttcctatgtcccaggcactgtgctaaaccctttgcaaacagtatcccagttaatcctcagaaggagctgtgaggtaggcagtatttaggcaacttgcccaggtcacacagagtgagaagaggagctgggctttgactccaggtggtccggctccatctggggcatagcactcgtagctaaggtcacggggcaggtgctttctgtcttgggcctgcctaggcccctctgctgatgcaacgctgtgtgctgcctgaggaagrggaaatgcatgttcttgtccttgcccagggaggtgttgctgggctttgtgtgagtctgctccaagcagagcagtgtacggagaaaatgtgcgtgtggagagagcagctggaccaggctttgtttttcagggagtgacgcatcactgagctacccaaggccattagctcctgagatgggggctgctctctgcttggttatttatcatgcccaagggcatgaaattgattccagaaagtctgtccatttcctctagctcttcccgtagaaggggtagagcgaggagtatgtgggcagggctggacaggatgagggacacccctgggttggcaacataacccccatgggaatatctctccaagggccctaggagcaccatctccatgtccaaggatggagaccttttccctggctgcaggtggaatgggagtgtgtggtggg

SEQ ID NO: 68959 - DNA, 1878 bp, Homo sapiens
gtgggccacaggttgattggacatggtgctggaggtctcaccaggaaactgtgcccacgacctctgcattttttctcatcccctagatgtagcggctttcacaggctcttggcagttttgtttcccagaagttacactaggactttgcgggcagggtggtgatgtccgtcakcatgctccccatcttcagagtccagcagaagtgtcctaactgacccctgttcccaggggaggacctcccatcccggtggcacgagctcccccatccccaccccaaccaatgctcagtgggtccaggtgcccttggctcagggcaccttcccgctctgcgatgtccatggacagcaccatccctggaaccttctctggtcaagggccaggtcagattccagggggcctcggctggtgccagccccagtcccagtcccaggcaggcggcagacaccctccagcccacccttcctttcaaaagcctgaaccctggatcacagtcaggagcagcctctggaaaccagcccaagaccaggccgtggggagaggacatcagtgggggaaagaggcgcagcgggcctcattgcaggctggttacctccacagccacggccatgacctctgcctgcctcctggccccaagcctggcagtgacctccctggaccacacagcccactgcttctctggtggggctggaagcacttcctatctgtcctgctcgctgggcatttatcaccagcagcctgcccacacctcttgtgctttgtctcatctttgttatttaactttgtttcacgtaggattattcctgtctctcccattagttctcagcttctggaatgcaggggcaaagtctttttcatccctatggttcccccaatcccctacacagcaccaggcccttgagagccacgttgcacaggtgtcggagtgaatgcatgaacatgcggggcctggggcagccccttgggtcggaccccaacgcccagccagccctggcactgcccactgcctcaatgggagctggcactggccgagggcacctgctccgcacctgcccagaaccaaatgggattttacaagtatctaaccttccccactaccatcaaggcaggcgtgtctctcccatcgaacagatgacaacactgaggctcagcacttgcccaaggtcacccagccgacaagtagcagggccaggaacggcagcatcctcgctggcacctccaaaagccagctgtgaggagccctgagccgagggcctctcctggctgctgaggaggctcagagctggatgcaggccagggcaggacaggtcccatggctgagagcaagagcaggcgggcacggaaacctcaaccctgtcccagggcccaggaaagactcgggcgtccaaccaaatccactcggcttccagaggctgccccggacagacgtcaccgggcctgggatcagggtggtgttggtgaccctcaccagcccagaaataagcacaggttccccggagtcctgccagagatgagaaaggcagcaggttgacctgggggcgcacacggccgtacctccgcgccccccacccgcagcgcgttgcctccgaagcgggaagtcccaggtgcattcattcctgagaagaggccgggcagccggagcccgccatttctgcagtcacagcgccacctcctggccgaccgcggcgtggccgtaggggccgctccaccatcggagaacttccagaccgcaggccttgaatcaggcatccagcaaatattgactcagcacctcccttgggacaggagtgatgttagaggttgggtatacagtagtgaagaaacagactaaaagccctgcccttgcagagattacatcctaatgggggaaagaggtaatgc

SEQ ID NO: 68960 - DNA, 1878 bp, Homo sapiens
gtgggccacaggttgattggacatggtgctggaggtctcaccaggaaactgtgcccacgacctctgcattttttctcatcccctagatgtagcggctttcacaggctcttggcagttttgtttcccagaagttacactaggactttgcgggcagggtggtgatgtccgtcagcatgctccccatcttcagagtccagcagaagtgtcctaactgacccctgttcccaggggaggacctcccatcccggtggcacgagctcccccatccccaccccaaccaatgctcagtgggtccaggtgcccttggctcagggcaccttcccgctctgcgatgtccatggacagcaccatccctggaaccttctctggtcaagggccaggtcagattccagggggcctcggctggtgccagccccagtcccagtcccaggcaggcggcagacaccctccagcccacccttcctttcaaaagcctgaaccctggatcacagtcaggagcagcctctggaaaccagcccaagaccaggccgtggggagaggacatcagtgggggaaagaggcgcagcgggcctcattgcaggctggttacctccacagccacggccatgacctctgcctgcctcctggccccaagcctggcagtgacctccctggaccacacagcccactgcttctctggtggggctggaagcacttcctatctgtcctgctcgctgggcatttatcaccagcagcctgcccacacctcttgtgctttgtctcatctttgttatttaactttgtttcacgtaggattattcctgtctctcccattagttctcagcttctggaatgcaggggcaaagtctttttcatccctatggttcccccaatcccctacacagcaccaggcccttgagagccacgttgcacaggtgtcggagtgaatgcatgaacatgcggggcctggggcagccccttgggtcggaccccaacgcccagccagccctggcactgcccactgcctcaatgggagctggcactggccgagggcacctgctccgcacctgcccagaaccaaatgggattttacaagtatctaaccttccccactaccatcaaggcaggcgtgtctctcccatcgaacagatgacaacactgaggctcagcacttgcccaaggtcacccagccgacaagtagcagggccaggaacggcagcatcctcgctggcacctccaaaagccagctgtgaggagccctgagccgagggcctctcctggctgctgaggaggctcagagctggatgcaggccagggcaggacaggtcccatggctgagagcaagagcaggcgggcacggaaacctcaaccctgtcccagggcccaggaaagactcgggcgtccaaccaaatccactcggcttccagaggctgccccggacagacgtcaccgggcctgggatcagggtggtgttggtgaccctcaccagcccagaaataagcacaggttccccggagtcctgccagagatgagaaaggcagcaggttgacctgggggcgcacacggccgtacctccgcgccccccmcccgcagcgcgttgcctccgaagcgggaagtcccaggtgcattcattcctgagaagaggccgggcagccggagcccgccatttctgcagtcacagcgccacctcctggccgaccgcggcgtggccgtaggggccgctccaccatcggagaacttccagaccgcaggccttgaatcaggcatccagcaaatattgactcagcacctcccttgggacaggagtgatgttagaggttgggtatacagtagtgaagaaacagactaaaagccctgcccttgcagagattacatcctaatgggggaaagaggtaatgc

SEQ ID NO: 68961 - DNA, 1878 bp, Homo sapiens
gtgggccacaggttgattggacatggtgctggaggtctcaccaggaaactgtgcccacgacctctgcattttttctcatcccctagatgtagcggctttcacaggctcttggcagttttgtttcccagaagttacactaggactttgcgggcagggtggtgatgtccgtcagcatgctccccatcttcagagtccagcagaagtgtcctaactgacccctgttcccaggggaggacctcccatcccggtggcacgagctcccccatccccaccccaaccaatgctcagtgggtccaggtgcccttggctcagggcaccttcccgctctgcgatgtccatggacagcaccatccctggaaccttctctggtcaagggccaggtcagattccagggggcctcggctggtgccagccccagtcccagtcccaggcaggcggcagacaccctccagcccacccttcctttcaaaagcctgaaccctggatcacagtcaggagcagcctctggaaaccagcccaagaccaggccgtggggagaggacatcagtgggggaaagaggcgcagcgggcctcattgcaggctggttacctccacagccacggccatgacctctgcctgcctcctggccccaagcctggcagtgacctccctggaccacacagcccactgcttctctggtggggctggaagcacttcctatctgtcctgctcgctgggcatttatcaccagcagcctgcccacacctcttgtgctttgtctcatctttgttatttaactttgtttcacgtaggattattcctgtctctcccattagttctcagcttctggaatgcaggggcaaagtctttttcatccctatggttcccccaatcccctacacagcaccaggcccttgagagccacgttgcacaggtgtcggagtgaatgcatgaacatgcggggcctggggcagccccttgggtcggaccccaacgcccagccagccctggcactgcccactgcctcaatgggagctggcactggccgagggcacctgctccgcacctgcccagaaccaaatgggattttacaagtatctaaccttccccactaccatcaaggcaggcgtgtctctcccatcgaacagatgacaacactgaggctcagcacttgcccaaggtcacccagccgacaagtagcagggccaggaacggcagcatcctcgctggcacctccaaaagccagctgtgaggagccctgagccgagggcctctcctggctgctgaggaggctcagagctggatgcaggccagggcaggacaggtcccatggctgagagcaagagcaggcgggcacggaaacctcaaccctgtcccagggcccaggaaagactcgggcgtccaaccaaatccactcggcttccagaggctgccccggacagacgtcaccgggcctgggatcagggtggtgttggtgaccctcaccagcccagaaataagcacaggttccccggagtcctgccagagatgagaaaggcagcaggttgacctgggggcgcacacggccgtacctccgcgccccccacccgcagcgcgttgcctccgaagcgggaagtcccaggtgcattcattcctgagaagaggccgggcagccggagcccgccatttctgcagtcacagcgccacctcctggccgaccgcggcgtggccgtaggggcckctccaccatcggagaacttccagaccgcaggccttgaatcaggcatccagcaaatattgactcagcacctcccttgggacaggagtgatgttagaggttgggtatacagtagtgaagaaacagactaaaagccctgcccttgcagagattacatcctaatgggggaaagaggtaatgc

SEQ ID NO: 68962 - DNA, 667 bp, Homo sapiens
aaaaaaatgtgctaggccagtactgcgaaaatatttgttaagcggggattcataggtagcctcatgacaagtgtatcaggtaagagaaaaaaagttggtatatccaaattacaaaaatatcagtctttcagtgaatttatccagatacatgatgacaataaactttgcatgtgtttcctcctccctgttctggctttaatgctgtattttgtgtacttactggacatttctgcttagatatttgaagaaattttgaaatgggagaagattttccgctctctgaaagtaagatagtctttgaaggtgtttgaaacttattttataggttatagtgtattataggaggtcttaagcagaggagtgatactttatcttttaaaaatcctccttttaactctccaagggagaaattacactggtcatcttatagatgaactgaggctcagagaagttaaacattttgcctgtggtcaaatagctaggaaattggagagctaggatttgaacccttgtctccaaagttcattgattctactatgcaatataattgccctgaatgtacagtaattcacttacttagactagagtttcctaatttttattagctgtaggtaattattattagtttgacagttgaaaaatarcattgcagttaaagtttccaaga

SEQ ID NO: 68963 - DNA, 952 bp, Homo sapiens
ctttacctggctctctcctcccagcctgttctaaagtcatctcttctaggaaaaggagactgtgaaatagctggaatcctcaaggatatctactgatattctttaagaaaaaaacctaaatagtggtttatgttatgtatctacgccaaaacaataacaaaaaaggaaaatatattttacaaggttaaagtggtcatttctaattagtagaaaatagatatttttaatctgtattttctaaaatgttctttgattaccatctaattttatactgggaaaaaataaacatttttaatagggaaggggagaagggaaaaagagaagcagcaaagaagggaaaaggattttttaaaaagacagtatagaagcattgaacaaatttcacaatgttaaataagctacccatcagcttagtgagcttgcctttattcgtctataataaaaatcaccctcatgtttcccatttatagctaaactcagttaattacagcatygtttgtggttgcttctgggcagagtcaatacaggtaattagatcctttacagtctttagaaagttactttcattccctgtgaaatatcaatatctggtgcagtgtgcattagtaaggagatccagtgagtaataatatgatcctaaggttggtgaagtgaaaaacagaggcaattagaaagataactcaggcagagtttcttgcccctgaataaccaagagcaatcatttttgtcagacttatttagaaaaagatctcaattctgaggtttagcaaagccaggagcattagagaatcatactctcttggaggtggataaacccttagaagttgtcaaattttgtcctagtagtgaaagcttttgttcagatcaatttaaaaatagaagcttggtacagtaacttttgggtagcatgacaaagtacagttgacccttgaacaacacaagtttaaactgt

SEQ ID NO: 68964 - DNA, 952 bp, Homo sapiens
ctttacctggctctctcctcccagcctgttctaaagtcatctcttctaggaaaaggagactgtgaaatagctggaatcctcaaggatatctactgatattctttaagaaaaaaacctaaatagtggtttatgttatgtatctacgccaaaacaataacaaaaaaggaaaatatattttacaaggttaaagtggtcatttctaattagtagaaaatagatatttttaatctgtattttctaaaatgttctttgattaccatctaattttatactgggaaaaaataaacatttttaatagggaaggggagaagggaaaaagagaagcagcaaagaagggaaaaggattttttaaaaagacagtatagaagcattgaacaaatttcacaatgttaaataagctacccatcagcttagtgagcttgcctttattcgtctataataaaaatcaccctcatgtttcccatttatagctaaactcagttaattacagcattgtttgtggttgcttctgggcagagtcaatacaggtaattagatcctttacagtctttagaaagttactttcattccctgtraaatatcaatatctggtgcagtgtgcattagtaaggagatccagtgagtaataatatgatcctaaggttggtgaagtgaaaaacagaggcaattagaaagataactcaggcagagtttcttgcccctgaataaccaagagcaatcatttttgtcagacttatttagaaaaagatctcaattctgaggtttagcaaagccaggagcattagagaatcatactctcttggaggtggataaacccttagaagttgtcaaattttgtcctagtagtgaaagcttttgttcagatcaatttaaaaatagaagcttggtacagtaacttttgggtagcatgacaaagtacagttgacccttgaacaacacaagtttaaactgt

SEQ ID NO: 68965 - DNA, 952 bp, Homo sapiens
ctttacctggctctctcctcccagcctgttctaaagtcatctcttctaggaaaaggagactgtgaaatagctggaatcctcaaggatatctactgatattctttaagaaaaaaacctaaatagtggtttatgttatgtatctacgccaaaacaataacaaaaaaggaaaatatattttacaaggttaaagtggtcatttctaattagtagaaaatagatatttttaatctgtattttctaaaatgttctttgattaccatctaattttatactgggaaaaaataaacatttttaatagggaaggggagaagggaaaaagagaagcagcaaagaagggaaaaggattttttaaaaagacagtatagaagcattgaacaaatttcacaatgttaaataagctacccatcagcttagtgagcttgcctttattcgtctataataaaaatcaccctcatgtttcccatttatagctaaactcagttaattacagcattgtttgtggttgcttctgggcagagtcaatacaggtaattagatcctttacagtctttagaaagttactttcattccctgtgaaatatcaatatctggtgcagtgtgcattagtaaggagatccagtgagtaataatatgatcctaaggttggtgaagtgaaaaacagaggcaattagaaagataactcaggcagagtttcttgcccctgaataaccaagagcaatcatttttgtcagacttatttagaaaaagatctcaattctgaggtttagcaaagccaggagcattagaraatcatactctcttggaggtggataaacccttagaagttgtcaaattttgtcctagtagtgaaagcttttgttcagatcaatttaaaaatagaagcttggtacagtaacttttgggtagcatgacaaagtacagttgacccttgaacaacacaagtttaaactgt

SEQ ID NO: 68966 - DNA, 1294 bp, Homo sapiens
ttttactgtatccgtgacccaaattatgtacattgtacccattacccattaagtarattctctctctttctctctctctctctctttctctctgtctttctctgagccagggtctcagtgtcacacaggctagaatgcaatggcatgaacatctctgcagcctcgagctcctgggctcaaatgatcctcccatctcagcctcctgagtagatgggactacaggcccatgctatcacacctggctaatttttgtattttttgttgaggcaatgtctcactatgttgcccaggctggttttgaactcctggccttaagcaatcctccaccttggcctcccaaagtgctgggactacaggggtgggctgccgtacccagcctggatttgttttcctttgggtagatagctagtagtggaattgctggattaaatgatacttctattagaaaataacaggctctttcttattgtttcgaatgtattacttatagatgcaggctctgaggctttgaagaaatccagaacataaaattaaattactaaataatacaaggaatcaaagagaacatgagttatttaaaagtgttcaaaagaatatccatgttgtcaggagctgaatttatttaaacacaatatatcagaataaaattttttggtcactaaagaatgcatgaatatgtatgtgtatatatatatatttgtgtctacatatttatgtgtatatgtacatgtgtatgtatatatgtgtgtgtgtttagaagagtgagagagagagagaagagaaattgagaagtgaaggccaatcgccacaaaaaaatttaagtttttgtcatcaacttgcaaatggaaactggcactgtgctggaataaagatgagactttttttttctttgtttttgattaggctttcttccagttgcaattgttagaatgtagaatttgcagcacatggttactttttttgaatgcccgtgctttggagatatttaaactcagacctcatgtatcacttgcaatctgatcgtgcaaatactgaatacctgactgatctctttatgagcccaaggctgttttatcccaaggcttggcatgctgtcagtaactgaaaagtccttagtcctgccattaagctagattttgtttcataaaagaaaagagggagaattatgctttctgaaaaaaatagcatgtaggttaactttggtctgaaccctttaaaatcatcaaatggtttcagggttgttatatatttatctgagttattttgaaccacatatatctctaattgcttggca

SEQ ID NO: 68967 - DNA, 699 bp, Homo sapiens
aggctttgtggggtttgaagcttgtacaattagagggaggtggctttaagaaaaagagaataaaattacaaacacaaaagtgaatcttgattcagaatgacacaaaatgaatctcacacacacaaaatcactagagccctagaaagtcaggtctcttttgagatctcttcaagcagtttatcagaaatgcttatatagaaacacttccacacatgcacacacacacacacaacacaccctccatccctgtcagccagacttccccttcccccagaacacttccacacagaaactccccacgmtcccaggaccatgaggtgaagggggtgggaggcttaagctttgccaggcaaatctgctctgcaagtagtgtgatgaccgccattttgctctggtgatgctgactgacacattatagacttgtgcaggacacagccctgataaggtgtgaagctgaaatttgaaatcagaacttctgcctctaaaccctaatgtgcttcccacggcaggctgcagtctccctctatgctgccacagtgctctgggactctgttggtctagcctgaaatccactctggagggccagttttggtctgagtggcaaatcctacaatcctcttccttatcctgaggccaaggagaagccctaaggacaggagagcggtggtcctttctgggggagatgaaccgttcctgctg

SEQ ID NO: 68968 - DNA, 699 bp, Homo sapiens
aggctttgtggggtttgaagcttgtacaattagagggaggtggctttaagaaaaagagaataaaattacaaacacaaaagtgaatcttgattcagaatgacacaaaatgaatctcacacacacaaaatcactagagccctagaaagtcaggtctcttttgagatctcttcaagcagtttatcagaaatgcttatatagaaacacttccacacatgcacacacacacacacaacacaccctccatccctgtcagccagacttccccttcccccagaacacttccacacagaaactccccacgatcccaggaccatgaggtgaagggggtgggaggcttaagctttgccaggcaaatctgctctgcaagtagtgtgatgaccgccattttgctctggtgatgctgactgacacattatagacttgtgcaggacacagccctgataaggtgtgaagctgaaatttgaaatcagaacttctgcctctaaaccctaatgtgcttcccacggcaggctgcagtctccctctatgctgccacagtgctctgggactytgttggtctagcctgaaatccactctggagggccagttttggtctgagtggcaaatcctacaatcctcttccttatcctgaggccaaggagaagccctaaggacaggagagcggtggtcctttctgggggagatgaaccgttcctgctg

SEQ ID NO: 68969 - DNA, 735 bp, Homo sapiens
atgagttgtaattctccattaaggaacaaaagccctaacccttcaaaggaatgggaggcaggggagtagatgagggttgtgacctgacttggggatggggatggagggatttccacaattttgaaattatatctcagaggcagctgttatactttttttttatttgtaaggaaagaaagacagaaaatttaaatggattggccatctaccaaggtcctgtgctagatactttcagaaatgttaccttatttaatcctcagagcaactgtgaggtaggtattacaatactctttcagtggatgacctggctgaggttagagacagttacagggtcacctaaaacagaaggaataattttttggtaagcrcctgtcttgtgcctggcactccattatttcttctcccaagtgtctcatttattcttaaagcactgtcaagcatgtagtattagctcctgtttttaaatgggaaggttgagaatcagagtagtgaagtggcttttccaaggttccaggaatgtgagaaattaccttaatgcaatgtggcctctgcatactctactagataagttctgtcagaggtgtcagaataggaggattcacgggccaaattaaagtgcttaaactcacagtttactaaatctgttgaaaacccaaagcaacagcaaggggagagggatagggtaggttagctcacttcagatgggagctgccaggtggaagcaccatactcctt

SEQ ID NO: 68970 - DNA, 735 bp, Homo sapiens
atgagttgtaattctccattaaggaacaaaagccctaacccttcaaaggaatgggaggcaggggagtagatgagggttgtgacctgacttggggatggggatggagggatttccacaattttgaaattatatctcagaggcagctgttatactttttttttatttgtaaggaaagaaagacagaaaatttaaatggattggccatctaccaaggtcctgtgctagatactttcagaaatgttaccttatttaatcctcagagcaactgtgaggtaggtattacaatactctttcagtggatgacctggctgaggttagagacagttacagggtcacctaaaacagaaggaataattttttggtaagcacctgtcttgtgcctggcactccattatttcttctcccaagtgtctcatttattcttaaagcactgtcaagcatgtagtattagctcctgtttttaaatgggaaggttgagaatcagagtagtgaagtggcttttccaaggttccaggaatgtgrgaaattaccttaatgcaatgtggcctctgcatactctactagataagttctgtcagaggtgtcagaataggaggattcacgggccaaattaaagtgcttaaactcacagtttactaaatctgttgaaaacccaaagcaacagcaaggggagagggatagggtaggttagctcacttcagatgggagctgccaggtggaagcaccatactcctt

SEQ ID NO: 68971 - DNA, 557 bp, Homo sapiens
tgtaaatttctgtgaagaatctgcttatgttctagggccacagacttcatatttcagaatcagatgagaatgtcttctagttccttcctttccaaaaggataaagatttggacatttctcttttgtactggctgggctgctaagtttaagggtattgtctaaggcaattgtctcaataatttaagccaggaggattaggctctttgcacatgcctatcaactcaagagcctgctgtcttgtcaaaaaccatgctgtcatcttggcatcgatttgaccaaggtggcaacataagtggtgtctctctcaaggccctaaatacagaaaaaagctatattcagaytgcattttttacggcaagctgtgtatctgctctacccattctggacaacacaatcttatctgtaaaattcaaagtttggaaccttataatgcctgcaaaaaagttgagactaaacaagcccatgctatggaataacctccatacacactactatgcaaattatttaaccttaagtatacatattaataaaaccaattataaccaccacagtggagt

SEQ ID NO: 68972 - DNA, 799 bp, Homo sapiens
ggatccctgcttagggtaatataagcctctcttatgcattcccttggcagcctatactacccttcatcataatatttattacaatagactgttgacaatctgagagcaggactgtgttttatgtttatatcttcatggcttagcacagtgcctggcaccataaatagtgttcaatagtcattcaaagaaaaaatgagtaatcgatgagagacaccaggttatgatgtaacattgcmaagtatataatgttttgacagctctttcttcttcttttctaccattcttttaatcattcttttctttgatttattttaatgggcaaactcggaatcgggtgtcattgccagcctccctgtataattaggaaaaaaaaaatttccccagattttcagggaatacgggctgatagtcactttccagccatgcaaaatgtgaaattaacataaagctacacaaagcttttgtgacaatgggccctctgactcagcttcagagatgagagcaaagaagcaaagaattgtccttggttcttttcacatcctccccctagtggcaagagctccaagtaagctaaggaagaaaatgaaacccatttggtccagagctctctctttctcaatgcctcattcacaggctttaaaacacatcgagattccttcacatcacctattccaagagaaaatgactgacacacgtgagtggtccaggctgcattctctctccgtgaagtcaccagagctatagtcgtagtcctgggtgatctctggtcatctgatacaattgtgcccaagctgggacc

SEQ ID NO: 68973 - DNA, 571 bp, Homo sapiens
ccagaacccagattacctatattcctctcactcccaggagggcttctcggactctgggtggcctagaggcagtgggaagacaccacagacatttgtctcacctttaggcccattctcaaggtggctgaagtgagaggagcagggttccaggtgagggaggcagggctaggctggacaaggagctcccagacctactcatgagacatgaaagaccagggtagsagtgggtcagagaagagagaattcactgtggcctggagcaagcaggaagggcttcctggaggaggtgggaattaggaattagatcaagaggtggagagctgggatacagtgaggacacaaagttaaaatggggcctcgaacacaaggccaaggggttgggcttgtcaccattggaagcaggagcactgatcctgggcaagagatcacagacagagagagggctggaatgtccctgggcaggaagagaagagagagggcccctgctaccaccaccaggatctggggttccaattaagtagggaaggaaggccaaagaagagcctccccaggagtcatctgtctgcatggg

SEQ ID NO: 68974 - DNA, 607 bp, Homo sapiens
tgaaagattttggttcacaataaagttgtgagctctctcaaaaactgtggcagaaattcctggaagctggacaaaagcaacagattctttttcctctggaatccttttcttgttatcttgggccatggaaacaatatggtcatttcctcctcctactcctcctcctcttcctccctcccctcatcctcctcccctcaaacctgcccctgaccttgtcccaagctggcttgcctgcgtacagcagaggcagtggccacctcctggttgcaggcagaggacaaggccaacaaggggacgggaggaaagacgcccccgggagaagcaggcggcagcacgagggacgacgtcaygggggcctctgaccgctattcatttcagtccccgggtgtctccatcaataacagtctgccagtgaccaggagggaggaggacgggagagggaggaggagtgatctggggtctggaggaagggagacatgagacagagagggagagagatttctccgaagcttctccaagcctgaggcaggagttggaggtggggaaggcagagggggcactgggagctgagagtttctgtctcccaggcttttctccctgtttcctt

SEQ ID NO: 68975 - DNA, 752 bp, Homo sapiens
gcattcactcaaccagggcttactgagcacctactatgtaccaagcttagtgcagaggacacagctgtgagcaatggaaacaccttgctctcacagcagctcacctcatcagcctttatccctgactcactcaccctggtcttttatttgtttctgtttgtctgtttttaatccttctgaaaacctattcccatctaccatcttgagacatgttttcaatagccaaaaatttacagatggaaaaagggcagcacagctaggacaagaatttggatctcccatcttgcagcaacacattgttcaagctctgtagcatgtgctgtgtggtcacaggctgcacaagagcactgaggccaggggccacagtggcgtgtggctgttggcaaggcaggcagaggtacttgcaacctcacatccactagcacatccaaatgcatctttgctgagtcctgagagaaatgtgagaagtcagagtcttcttgcagtcttgtacttatggacagagagaaagaacccacagactagacagaatccttaatctggtcggggaccatgggttggatttacctagacaggcaagaatggggagagtatcagaaggggggacctatgaagaccaaagatgccaaggaggagtgagtgagacaaaattgccagggtccatgaagggagccgagcaagaagagagcaggtgtggcttagagcacgggagttagatggatcagtctagctggatgggrctgggagggcct

SEQ ID NO: 68976 - DNA, 506 bp, Homo sapiens
acaggaagtaataaacccataccaaataagcccctaattctgcagtagtagctttgagggagagaaaccagcttcgagggagatgaaaccagtttgggggaaagggaggaggtgccctggccacaaatttagcagggccaccaacatagctgagtcatggctcaggaggcacctttaatactatgtcaaccatctgtcacatccatctttctttttttttttttttgagatggagtctctctctgttgcccaggctggagtgcactggtgtgatctcagctcactgcaacctccgcctcccaggttcaagcagttctcctacttcagcttcccaagtaactgggattacaggtgcccaccaccacacctggctaattttttttgtacttttagtagaaataaggtttcaccatggtggccaggctggcttcaaactcctgacctcaagtgatctgcccatcttggcatcccaaagtgctrggattacaggtgtgagccaccgcacc

SEQ ID NO: 68977 - DNA, 506 bp, Homo sapiens
acaggaagtaataaacccataccaaataagcccctaattctgcagtagtagctttgagggagagaaaccagcttcgagggagatgaaaccagtttgggggaaagggaggaggtgccctggccacaaatttagcagggccaccaacatagctgagtcatggctcaggaggcacctttaatactatgtcaaccatctgtcacatccatctttctttttttttttttttgagatggagtctctctctgttgcccaggctggagtgcactggtgtgatctcagctcactgcaacctccgcctcccaggttcaagcagttctcctacttcagcttcccaagtaactgggattacaggtgcccaccaccacacctggctaattttttttgtacttttagtagaaataaggtttcaccatggtggccaggctggcttcaaactcctgacctcaagtgatctgcccatcttggcatcccaaagtgctgggattacaggygtgagccaccgcacc

SEQ ID NO: 68978 - DNA, 506 bp, Homo sapiens
acaggaagtaataaacccataccaaataagcccctaattctgcagtagtagctttgagggagagaaaccagcttcgagggagatgaaaccagtttgggggaaagggaggaggtgccctggccacaaatttagcagggccaccaacatagctgagtcatggctcaggaggcacctttaatactatgtcaaccatctgtcacatccatctttctttttttttttttttgagatggagtctctctctgttgcccaggctggagtgcactggtgtgatctcagctcactgcaacctccgcctcccaggttcaagcagttctcctacttcagcttcccaagtaactgggattacaggtgcccaccaccacacctggctaattttttttgtacttttagtagaaataaggtttcaccatggtggccaggctggcttcaaactcctgacctcaagtgatctgcccatcttggcatcccaaagtgctgggattacaggtrtgagccaccgcacc

SEQ ID NO: 68979 - DNA, 506 bp, Homo sapiens
acaggaagtaataaacccataccaaataagcccctaattctgcagtagtagctttgagggagagaaaccagcttcgagggagatgaaaccagtttgggggaaagggaggaggtgccctggccacaaatttagcagggccaccaacatagctgagtcatggctcaggaggcacctttaatactatgtcaaccatctgtcacatccatctttctttttttttttttttgagatggagtctctctctgttgcccaggctggagtgcactggtgtgatctcagctcactgcaacctccgcctcccaggttcaagcagttctcctacttcagcttcccaagtaactgggattacaggtgcccaccaccacacctggctaattttttttgtacttttagtagaaataaggtttcaccatggtggccaggctggcttcaaactcctgacctcaagtgatctgcccatcttggcatcccaaagtgctgggattacaggtgtgagccaccrcacc

SEQ ID NO: 68980 - DNA, 660 bp, Homo sapiens
caggctggagtgcagtggtgtgatctcagctcactgcaacctccacctcccaggttcaagtggttctcctgcctcagcctcctgagtagctggcactacagctgtgcaccaccatgcccagctaacttttgtatttttggtagagacagagtttcgccatgttggccaggctggtctcaaactactgacttcaagtgatccgcccacctcagcctcccaaagtgttgggattacaggcatgagccaccgttcccggacctctctttgatttttaataactacaagtcaaggagagggcacagcaaaatgtaaaaattaggatagacatcttaatttttgtctttggctgaacaataacacacattggttcaaaaaatttttgaagtaaatataaatattcttgcttaacctggcacayaggctcttaataaacagttttttattatatttatttttctttttaaacagaaatcatgttgttgatgtcagtgttgcggtcagtactcctgcaggactcatcacacctattgtgtttaatgcacatataaaaggagtggaaaccattgctaatgatgttgtttctttagcaaccaaagcaagagagggtaaactacagccacatgaattccaggtagggtattaattattgctttctaatta

SEQ ID NO: 68981 - DNA, 838 bp, Homo sapiens
tctgcctaggaaaaccagagacctttgttcacttgtttatctgctgaccttccctccactattgtcctatgaccctgccaaatccccctctgcgagaaacacccaagaatgatcaataaaaaaaataaataaatwaattaaaaaaaaaaaaaaaaacttacctctgcaattaggtcaccttcattgattttgtccccctcttttttttgcccaacgggctatggtgcctgcctgcattgtgggggaaagagaaggcaatggaacctggaaaaggaaaagaagaaacattaaaatttttaaggactacctaactctcagtctggcttaagatttcattcaattcaatttcatgcaaagtgtatacagttccattgcacattgggaactagggatgccaagggagttcctgtccatgagaagttagtaatttccagtgacaggctttctcctccacagtcctgtgggtctgacaaagcatgaacctcggcagatattctgcatacagccccagtcttgaagctctcctttcaatgaaatagatcatgagagggacactaaggagctacagcaaagccaactattggacaaagggccaaagcagatactgggaatgggtggaggatcagtgaggcctctcaaggaggatcttgcaggcatccagtcagctctgaaggacaacggggtcccgagaaggggggtctagggctcaccttctgatgcgggggaagactgtaatagcggcggccgggcgaccccaaaagctgcagcagtaagcggttccgcggcgtggccccagaactgggggtccagccgcacagtgcccggaccccgccatacc

SEQ ID NO: 68982 - DNA, 786 bp, Homo sapiens
tcatctattcttggcttaaagtrttatctcctcagatgactttttttggtgattatatctaaactagattttcctcttgtattctctttaaccacacacagttgcttctttcaaagcacttactacattttataactattaaattgcttgtatgattgcttcctgtctgtctctccaactgttgccttactaggttgtaaaatccatgcaggtaggaaacatgtctgttcctttcacaactgtacccccaatgctaaacatacaataaagattcaataaattattacttgaataaataacttttttacccatcttcaaaaaattaataatgcagaatagttacataatgctgtgtaggccagacactgttacaagccctgtaaattgagttatttatttaaaagatacaacaacttcaaaaggtaaattctattattatatgctttttttttttgtatgaggaaattgaggtgcagggaagataagcaacttcctcagtgttactcaggtaagatataagcaaacatagatttagaactgaggtgctctgggtttgacacctatgttcatgacactaggctacaccgatatataccagaaagtaataattcctgtagaaaaggagggtggggacttttggtctgacttagggaagctggcattctcttctaggtcctgtctctgcatgcagatcttgggggagaggatggagcaagttacatgaggatcctagagaactttttgtttttttataaagccatttatttcaactctttctaagattca

SEQ ID NO: 68983 - DNA, 570 bp, Homo sapiens
tcttcagaaacatgagaaactcttcctgtaaggtaagatactgatttggtgattacatcatcatgtataatctgatttattttaaagtcctaagcaagcataacttcttctttttcatccaggtattcttgttcaggaactacaggaggactaacaaattaaagaacgagtcactgcaactacttaagtaattttgttttttcccatttacaccgcttttctcctgaatggttttcactgtgatagtttttttcctttgttccaatctacttgacatcctatgcagctttgaatttcaactccctgagaaaggtaagcatttgctataaattccagtcaagactttatatgtctttgttagtgcgttgtttttaaaatattcactgggcttaaagtgaaaktcaaatgtataacttcaggggcttgccaggaactgagaattttagttcaacatctttcaaatgttttagaacaaattcatcaatgcttcttcatcacaaaaccaaaacaatattctttaaaacagtgaattaaaatccagaaattcctttagtattgatattttcttta

SEQ ID NO: 68984 - DNA, 1471 bp, Homo sapiens
  misc_feature (1)...(1471): n = A,T,C or G
gcccaggaaactgcatctatgcaggctgcagggatgggattctgggcctttgggccatccatggtaaatactgaaaggtatggcccagtgtcccagagaggtgagtttcagtaaggaccaaacaagatgctctgtttcaaggacttcagtcctaatggttaccaggaggtcagtacagggaaactgaggcagcaacccagttgtaggggacttcatcaacccaaccaggatgaagagaggctgtaatgggaagtggaagaagtccccactggggcaaaggagctggctagtgggctggggctgcagatgggacagcaggccttgggaatggacagagcctataggtggaggcctcagggctctagccagcaaggctggggagcctgaggctgacccagcttccctttgagttttcagatgaggcaagtgagcaatcggatgaagaggacagtgtgcagtcgctccatggggtggtgagtgcacggccttattgacggggtgcgggacrgggggctgggatccagggcctaaatctcgtgactctggggcaggcaataccagttattgtcctcatttcttgtttgtcccctgggttggctacatgaacatccactatattccagcccctctccctagcctcccatcatgggtcccatcatggttgatggataaggagtggcctgggggaaacaggtcaccacgcagggcagcagcaggccccaaacttcctcactttcctcttgagaaacactttgacactgttccatctacagcctgtgtctccccttaattcaggcaaccttcttcccagggaatggcctctaacttgggccagccttccccacccagttcctgaggtactggctctttagagcctgcctctctgtacccccctgtatcttggcccctctcaagcttggtctaggttaagatgggcttagctggacagctgtctctgatctgagaggaaggagatagagaatcacacattgattcaagtccctgatgggtcctctctgctatgtctgccacatgaacaactccacctgctatttcagcctgggtctcctggtctccgggagactagaggctgcctccccttcccagagattccccagaagcctgagcccatgtccacacccttctcctctgccagctcatcctgctgccctccccacccaggcaaggccttctcaggtgggggcctgagacctgagagctgagggtaccacaggacctaagccattccctccactttccttcctgtcctcttcctaggaggcagtgcgtaagtgaaacccacccaggctgagttccaggctctgatcagctacttactgacgggctgggtgactggagcagcattaggannnnnnnnnnnnnnnnnnnnnnnnnnnnnnnnnnnnnnnnnnnnnnnnnnnnnnnnnnnnnnnnnnnnnnnnnnnnnnnnnnnnnnnnnnnnnnnnnnnnc

SEQ ID NO: 68985 - DNA, 744 bp, Homo sapiens
ttccacctcagcctctcaagtagttagggctacagaggtgcatcaccrtgctcaggtaattttattttattttatttatttattattttttttgcagagatgaaggtctcattatgttgtgcaggctggtctcaaacccctggcctcaagcaattctcctgcctctgcctcccaaagctctgggattatgggcatgagccactgtggcccggcccatgacttaactctagttgtagtccttgtggttagcaacagaggtggggcagatccagaggtgtatggtaagaacacctgacagcaataacttaagcttaccctgagaatgaccctgtatggcaaacacacctgaatgtgtgttctgagctagggaattgggaagtggccaaaccacagactcgtttcttgtcaatgaggaacatttgagcctctggcgcatcccgtggaacacgggctgtacaggggatcaaagcattgggtttagggttaaatgaaggttgtcaggtggaggttgttagggggagggtactaagtgaacatgctatagaaactgcaggccttttgcaagcggctgcaattctcccgcccagcctaccaccactggacctgttcaccaccactggacctgttctcttgtccagcccgccgctgctggactctcccctgtatgtaagcccccagtaaaaccccatgtctcatttgctggctctgggtctcttttttggcctcttgaacctggtgccatcc

SEQ ID NO: 68986 - DNA, 744 bp, Homo sapiens
ttccacctcagcctctcaagtagttagggctacagaggtgcatcaccatgctcaggtaattttattttattttatttatttattattttttttgcagagatgaaggtctcattatgttgtgcaggctggtctcaaacccctggcctcaagcaattctcctgcctctgcctcccaaagctctgggattatgggcatgagccactgtggcccggcccatgacttaactctagttgtagtccttgtggttagcaacagaggtggggcagatccagaggtgtatggtaagaacacctgacagcaataacttaagcttaccctgagaatgaccctgtatggcaaacacacctgaatgtgtgttctgagctagggaattgggaagtggccaaaccacagactcgtttcttgtcaatgaggaacatttgagcctctggcgcatcccgtggaacacgggcygtacaggggatcaaagcattgggtttagggttaaatgaaggttgtcaggtggaggttgttagggggagggtactaagtgaacatgctatagaaactgcaggccttttgcaagcggctgcaattctcccgcccagcctaccaccactggacctgttcaccaccactggacctgttctcttgtccagcccgccgctgctggactctcccctgtatgtaagcccccagtaaaaccccatgtctcatttgctggctctgggtctcttttttggcctcttgaacctggtgccatcc

SEQ ID NO: 68987 - DNA, 661 bp, Homo sapiens
ggggtagataggaaaatgagatactctgacaaaacattgatagaaacacatacagaccacacacctggctctcatkggaatgtaagctcagaaagagaagagatttttatttgtcttctttactgctttattcccatctcctagaacagttccaggtgtagaatgagtgctgaacaactattttttaaatgaacgaatggatacttgctgaaaatgcactcataaaacaagcttatataatgggtgatagtgaagcaactgtttttcatgcaagggaagcacatgcatatcatatacactgtaagactattttctagatattatatctaatacacctacagttgtaaagaaactaatgacacttgtgccttatatccagatatcatgtccagactactaagaatatattgagaaatcaaccatatgagtaatgggaactataaaacatctgatgtgggactgacactgagcagccaaagactatagaaagcttaaaaattaatcctaccaagattgtgggcctcccattatcaggtcccagggtagagttaaatcactgtttaattactttctttcttagactgagttgataaagactttacctgacttgctaacttgactgttaatttatgactttgttgtgagtccacataaagttaca

SEQ ID NO: 68988 - DNA, 661 bp, Homo sapiens
ggggtagataggaaaatgagatactctgacaaaacattgatagaaacacatacagaccacacacctggctctcatgggaatgtaagctcagaaagagaagagatttttatttgtcttctttactgctttattcccatctcctagaacagttccaggtgtagaatgagtgctgaacaactattttttaaatgaacgaatggatacttgctgaaaatgcactcataaaacaagcttatataatkggtgatagtgaagcaactgtttttcatgcaagggaagcacatgcatatcatatacactgtaagactattttctagatattatatctaatacacctacagttgtaaagaaactaatgacacttgtgccttatatccagatatcatgtccagactactaagaatatattgagaaatcaaccatatgagtaatgggaactataaaacatctgatgtgggactgacactgagcagccaaagactatagaaagcttaaaaattaatcctaccaagattgtgggcctcccattatcaggtcccagggtagagttaaatcactgtttaattactttctttcttagactgagttgataaagactttacctgacttgctaacttgactgttaatttatgactttgttgtgagtccacataaagttaca

SEQ ID NO: 68989 - DNA, 668 bp, Homo sapiens
gggcttcggatcagggcttctgtgtgaggacgcaggaagtgagccatccctaggcgcagacgccagacgcagcctgcttgccccatccaccccctccagaagggggtagccttggctgcaatgcctagaggcgagttttcaggtcccggactcccatgtggccgcacctttgtcaggaaaaaatagtttttaatatttggatttgggccctttacctgctgagacctctgaattggaggtggggatgaggctaagatgggagggtgtggcctctggatggaccgtggtgacaggttgggaagtgaccctggagagcaccttgcagagggggactgggagccttgctactggcctctagtcacatcctggccatcgagggcatgtgtgaggacgaagctgctcagaagcagccccacccacgcgaggcccctcagccccctccagctcctctgtggactggtttcactgtggggggtgaaggtggaccgtctttacagagttcaggtggaatgggggagatagatcacatggccastggtcatcaccgcgggcacacacccacccttgtgcgtagtcgcttccttccctctagacacagcagacattcgaggaccatggctactcttgtctgcccttctgggttgggacgctttaacaccaggtggagg

SEQ ID NO: 68990 - DNA, 668 bp, Homo sapiens
gggcttcggatcagggcttctgtgtgaggacgcaggaagtgagccatccctaggcgcagacgccagacgcagcctgcttgccccatccaccccctccagaagggggtagccttggctgcaatgcctagaggcgagttttcaggtcccggactcccatgtggccgcacctttgtcaggaaaaaatagtttttaatatttggatttgggccctttacctgctgagacctctgaattggaggtggggatgaggctaagatgggagggtgtggcctctggatggaccgtggtgacaggttgggaagtgaccctggagagcaccttgcagagggggactgggagccttgctactggcctctagtcacatcctggccatcgagggcatgtgtgaggacgaagctgctcagaagcagccccacccacgcgaggcccctcagccccctccagctcctctgtggactggtttcactgtggggggtgaaggtggaccgtctttacagagttcaggtggaatgggggagatagatcacatggccacyggtcatcaccgcgggcacacacccacccttgtgcgtagtcgcttccttccctctagacacagcagacattcgaggaccatggctactcttgtctgcccttctgggttgggacgctttaacaccaggtggagg

SEQ ID NO: 68991 - DNA, 629 bp, Homo sapiens
  misc_feature (1)...(629): n = A,T,C or G
gaattcctagtattgctaaaattctgcaatttcttaactacctgttaagttcctcaaggtcagagcttctgctttttttatctttctttgcccagcaccttgaatagtgtgggacacgtaattgacgctcagtagatatttgtgtattgaactccatcccttgtcctcctcccctcttgatgtttttctctactggccttatgctacacagtaaagcagggcatgattatgccacttgattacccccaagagattggaataaatgctwatgccaattcctacagctatccctgtgaatggtttatacccaggagncctgacactggctgatttctgaattttcagtgcttctgtaatatatactagttgggggaggagaaatagaaagcttaaactcaatgtgcgtatattgaataccttttctactaagggctccacaaagtggtaggcactgggaatataaaaatgaataaggagacccttgctctcgagggcagggcccacagtggggagacagacgttaagccatgcccacgacaagaatgacttctgagattccttctctggatcatgatttagtcttcagtggaaacctggtactcctcagattcctctggttcaacaggcgg

SEQ ID NO: 68992 - DNA, 629 bp, Homo sapiens
  misc_feature (1)...(629): n = A,T,C or G
gaattcctagtattgctaaaattctgcaatttcttaactacctgttaagttcctcaaggtcagagcttctgctttttttatctttctttgcccagcaccttgaatagtgtgggacacgtaattgacgctcagtagatatttgtgtattgaactccatcccttgtcctcctcccctcttgatgtttttctctactggccttatgctacacagtaaagcagggcatgattatgccacttgattacccccaagagattggaataaatgcttatgccaattcctacagctatccctgtgaatggtttatacccaggagncctgacactggctgatttctgaattttcagtgcttctgtaatatatactagttgggggaggagaaatagaaagcttaaactcaatgtgcgtwtattgaataccttttctactaagggctccacaaagtggtaggcactgggaatataaaaatgaataaggagacccttgctctcgagggcagggcccacagtggggagacagacgttaagccatgcccacgacaagaatgacttctgagattccttctctggatcatgatttagtcttcagtggaaacctggtactcctcagattcctctggttcaacaggcgg

SEQ ID NO: 68993 - DNA, 629 bp, Homo sapiens
  misc_feature (1)...(629): n = A,T,C or G
gaattcctagtattgctaaaattctgcaatttcttaactacctgttaagttcctcaaggtcagagcttctgctttttttatctttctttgcccagcaccttgaatagtgtgggacacgtaattgacgctcagtagatatttgtgtattgaactccatcccttgtcctcctcccctcttgatgtttttctctactggccttatgctacacagtaaagcagggcatgattatgccacttgattacccccaagagattggaataaatgcttatgccaattcctacagctatccctgtgaatggtttatacccaggagncctgacactggctgatttctgaattttcagtgcttctgtaatatatactagttgggggaggagaaatagaaagcttaaactcaatgtgcgtatattgaataccttttctactaagggctycacaaagtggtaggcactgggaatataaaaatgaataaggagacccttgctctcgagggcagggcccacagtggggagacagacgttaagccatgcccacgacaagaatgacttctgagattccttctctggatcatgatttagtcttcagtggaaacctggtactcctcagattcctctggttcaacaggcgg

SEQ ID NO: 68994 - DNA, 629 bp, Homo sapiens
  misc_feature (1)...(629): n = A,T,C or G
gaattcctagtattgctaaaattctgcaatttcttaactacctgttaagttcctcaaggtcagagcttctgctttttttatctttctttgcccagcaccttgaatagtgtgggacacgtaattgacgctcagtagatatttgtgtattgaactccatcccttgtcctcctcccctcttgatgtttttctctactggccttatgctacacagtaaagcagggcatgattatgccacttgattacccccaagagattggaataaatgcttatgccaattcctacagctatccctgtgaatggtttatacccaggagncctgacactggctgatttctgaattttcagtgcttctgtaatatatactagttgggggaggagaaatagaaagcttaaactcaatgtgcgtatattgaataccttttctactaagggctcsacaaagtggtaggcactgggaatataaaaatgaataaggagacccttgctctcgagggcagggcccacagtggggagacagacgttaagccatgcccacgacaagaatgacttctgagattccttctctggatcatgatttagtcttcagtggaaacctggtactcctcagattcctctggttcaacaggcgg

SEQ ID NO: 68995 - DNA, 629 bp, Homo sapiens
  misc_feature (1)...(629): n = A,T,C or G
gaattcctagtattgctaaaattctgcaatttcttaactacctgttaagttcctcaaggtcagagcttctgctttttttatctttctttgcccagcaccttgaatagtgtgggacacgtaattgacgctcagtagatatttgtgtattgaactccatcccttgtcctcctcccctcttgatgtttttctctactggccttatgctacacagtaaagcagggcatgattatgccacttgattacccccaagagattggaataaatgcttatgccaattcctacagctatccctgtgaatggtttatacccaggagncctgacactggctgatttctgaattttcagtgcttctgtaatatatactagttgggggaggagaaatagaaagcttaaactcaatgtgcgtatattgaataccttttctactaagggctccacaaagtggtaggcactgggaatataaaaatgaataaggagacccttgctctcgagggcagggcccacagtggggagacagacgttaagccatgcccacgacaagaatgacttctgagattccttctytggatcatgatttagtcttcagtggaaacctggtactcctcagattcctctggttcaacaggcgg

SEQ ID NO: 68996 - DNA, 557 bp, Homo sapiens
aataagaaacttggctaagataggttacttacttacctatggccacacagctagcacatgcaaagcctgggattaaaccaggtctatctgacttcaaacttttaatcacgatccaattttttgttgcagaattcctttaagagctctaaattaataagtggtgagatggcatgaaaactctttattcttttccttttccacaagcattttgagaaatcaaaatggtaatgtacattacgatatttggaaarccataaagggctaaacaagagtaggttacatcagtcaatcactactcacccacaataaaggggtggctatgttgtttatacgattttactattaaggcaatgtcttgagtgaatataatttatttctgtttatagaaagcctaacagcctcgaggggaattgcttattgagatgtgagccatggattacttcatgttttgtatagtacagtcacagttttaaaaaacaatctagaattccctgcaactggcaatttcattgctgtatggcctgaaatgcctccatgcccaggtaacgttggggatc

SEQ ID NO: 68997 - DNA, 583 bp, Homo sapiens
tcccatactcctgtcatagcagcccaagataacatggacttttacaatttgctgaattttattgctaagcttagagtccactgaacctcttatatatttgtgacctcaaatgattaaaaatcaaatctatcatgtacttacacattggattttgggacccaatatagtkaccacatgttaaatttaatggtaccgattttgatctagattttaagtttgttaagctaacattcagttatcaatttaattcaataagtatttattgagcatttaagatgtgttggccattatagaatttcactatttcatctagctttatatcatcaaattttacatttttatttaagtcattgattataataaggcataaggactgtgcattgtggcaaatcatcacagatctccctccagtgtaatagttagtccacaagttgcgctgttgagctctcttaagcagcatccttttaatagactaaccaatcttctccactctgtcagtgacaggcagaccaatgtccacagcaagcagaatgtttatgtcccataaatttccattcctttcaggtgatttgcatactaacaa

SEQ ID NO: 68998 - DNA, 583 bp, Homo sapiens
tcccatactcctgtcatagcagcccaagataacatggacttttacaatttgctgaattttattgctaagcttagagtccactgaacctcttatatatttgtgacctcaaatgattaaaaatcaaatctatcatgtacttacacattggattttgggacccaatatagttaccacatgttaaatttaatggtaccgattttgatctagattttaagtttgttaagctaacattcagttatcaatttaattcaataagtatttattgagcatttaagatgtgttggccattatagaatttcactmtttcatctagctttatatcatcaaattttacatttttatttaagtcattgattataataaggcataaggactgtgcattgtggcaaatcatcacagatctccctccagtgtaatagttagtccacaagttgcgctgttgagctctcttaagcagcatccttttaatagactaaccaatcttctccactctgtcagtgacaggcagaccaatgtccacagcaagcagaatgtttatgtcccataaatttccattcctttcaggtgatttgcatactaacaa

SEQ ID NO: 68999 - DNA, 583 bp, Homo sapiens
tcccatactcctgtcatagcagcccaagataacatggacttttacaatttgctgaattttattgctaagcttagagtccactgaacctcttatatatttgtgacctcaaatgattaaaaatcaaatctatcatgtacttacacattggattttgggacccaatatagttaccacatgttaaatttaatggtaccgattttgatctagattttaagtttgttaagctaacattcagttatcaatttaattcaataagtatttattgagcatttaagatgtgttggccattatagaatttcactatttcatctagctttatatmatcaaattttacatttttatttaagtcattgattataataaggcataaggactgtgcattgtggcaaatcatcacagatctccctccagtgtaatagttagtccacaagttgcgctgttgagctctcttaagcagcatccttttaatagactaaccaatcttctccactctgtcagtgacaggcagaccaatgtccacagcaagcagaatgtttatgtcccataaatttccattcctttcaggtgatttgcatactaacaa

SEQ ID NO: 69000 - DNA, 933 bp, Homo sapiens
atgcaaaaagctccaggcaagggtttcagcagttcctgcagagagcggccccaggctaagactaactttcatcccaatcatttctgcagtttctcactgcatgcctgatgtgcgtgtctgtctgtgtgtgtgtgtgtgtgtgtgtgtctgtgtgtgtgtacatacacatacacattggttgtgaatgccccaatcctatcaatgtcacatgttattatgtcttctgcagaggagagatcactaaaaactgacatttgtagcaagtttaaaggttctagtgatttcagaaatgcctaccctcaacactgaaaacaaaatgtataaccagacaataagaggataagggaaagatgtgaggtgcagttgactgctttctcttgtctccctacttatgagacaggatggaggattaagtctggaatagaatccttccttgctcaagagaacaggcctattcttgtgactgttctaatcataggaataaagcagggtcagccracatttgcttctagattgttatatataaatatatcaatatatcaccagctacccctccaacaggtagatatccatacaaagttaacttcgatctttattttgtgctttgcattctaaggtattcaccatgttaaaggttgctagagatgatgtttatttcactctaagaccaaagaatttcctttggcccagcctgcccgcttccctgtggggttgtcagagacaacagtcttgtaaagggtaataccaagtggaaagtattgtatcacagtggtcaaaactccaacgccaagctctcagataaacatgatgtagttgaagctttcaaccctgagaggcgttgggggtcttatccctcttcagccagctgcaaaaagagaccgtgtcactgaaacttataagcgccaaggggaaagaaaaaacaaaaagggattc

SEQ ID NO: 69001 - DNA, 763 bp, Homo sapiens
aaggattaaattacatatttgatgaaaaatgctttgtaccactccagtcacaaggtaatttattaatatattatatgtttgwtcactaccataatgatagattttgtgatgataatgtgattgcgattatataagggaactgaataaacaaaacctgaaactctacctgcttttccattaaaaatgcaaaagttggttggggatttgggaaatcaatgaaacattattacggcttgtgtctctatgggatgatcttggatgtgtatgcaatcagattctcattttataaagaacagtatgtggctccaaaatcacctaagattcttccatattttttgaagttgttcaaggatgttgatagaaacatggcaactcagtaaaggaggatggggcctttaagctaaatcctctgtatctagaaatgtgagaaagtagaagaaatctctcaggtaccgaagaactcagcaagggaaaaaagacgtgttaatatcatagatgatgcctgagatggtcctagagtatccctgtgtcactggatgaagctctgacctaacaacttttcacttttctcctggattgttcagaattttacctttccaaattttaatagcacaattatattttgaaaactatacttgattatgtgctcttaatttttgctagttttataatctttctagatattaaatctcatacatataacttcattttaaaattgaggaacatcacacactggggcctgtcatggggtggggggagagag

SEQ ID NO: 69002 - DNA, 763 bp, Homo sapiens
aaggattaaattacatatttgatgaaaaatgctttgtaccactccagtcacaaggtaatttattaatatattatatgtttgttcactaccataatgatagattttgtgatgataatgtgattgcgattatataagggaactgaataaacaaaacctgaaactctacctgcttttccattaaaaatgcaaaagttggttggggatttgggraatcaatgaaacattattacggcttgtgtctctatgggatgatcttggatgtgtatgcaatcagattctcattttataaagaacagtatgtggctccaaaatcacctaagattcttccatattttttgaagttgttcaaggatgttgatagaaacatggcaactcagtaaaggaggatggggcctttaagctaaatcctctgtatctagaaatgtgagaaagtagaagaaatctctcaggtaccgaagaactcagcaagggaaaaaagacgtgttaatatcatagatgatgcctgagatggtcctagagtatccctgtgtcactggatgaagctctgacctaacaacttttcacttttctcctggattgttcagaattttacctttccaaattttaatagcacaattatattttgaaaactatacttgattatgtgctcttaatttttgctagttttataatctttctagatattaaatctcatacatataacttcattttaaaattgaggaacatcacacactggggcctgtcatggggtggggggagagag

SEQ ID NO: 69003 - DNA, 763 bp, Homo sapiens
aaggattaaattacatatttgatgaaaaatgctttgtaccactccagtcacaaggtaatttattaatatattatatgtttgttcactaccataatgatagattttgtgatgataatgtgattgcgattatataagggaactgaataaacaaaacctgaaactctacctgcttttccattaaaaatgcaaaagttggttggggatttgggaaatcaatgaaacattattacggcttgtgtctctatgggatgatcttggatgtgtatgcwatcagattctcattttataaagaacagtatgtggctccaaaatcacctaagattcttccatattttttgaagttgttcaaggatgttgatagaaacatggcaactcagtaaaggaggatggggcctttaagctaaatcctctgtatctagaaatgtgagaaagtagaagaaatctctcaggtaccgaagaactcagcaagggaaaaaagacgtgttaatatcatagatgatgcctgagatggtcctagagtatccctgtgtcactggatgaagctctgacctaacaacttttcacttttctcctggattgttcagaattttacctttccaaattttaatagcacaattatattttgaaaactatacttgattatgtgctcttaatttttgctagttttataatctttctagatattaaatctcatacatataacttcattttaaaattgaggaacatcacacactggggcctgtcatggggtggggggagagag

SEQ ID NO: 69004 - DNA, 763 bp, Homo sapiens
aaggattaaattacatatttgatgaaaaatgctttgtaccactccagtcacaaggtaatttattaatatattatatgtttgttcactaccataatgatagattttgtgatgataatgtgattgcgattatataagggaactgaataaacaaaacctgaaactctacctgcttttccattaaaaatgcaaaagttggttggggatttgggaaatcaatgaaacattattacggcttgtgtctctatgggatgatcttggatgtgtatgcaatcagattctcattttataaagaacagtatgtggctccaaaatcacctaagattcttcyatattttttgaagttgttcaaggatgttgatagaaacatggcaactcagtaaaggaggatggggcctttaagctaaatcctctgtatctagaaatgtgagaaagtagaagaaatctctcaggtaccgaagaactcagcaagggaaaaaagacgtgttaatatcatagatgatgcctgagatggtcctagagtatccctgtgtcactggatgaagctctgacctaacaacttttcacttttctcctggattgttcagaattttacctttccaaattttaatagcacaattatattttgaaaactatacttgattatgtgctcttaatttttgctagttttataatctttctagatattaaatctcatacatataacttcattttaaaattgaggaacatcacacactggggcctgtcatggggtggggggagagag

SEQ ID NO: 69005 - DNA, 763 bp, Homo sapiens
aaggattaaattacatatttgatgaaaaatgctttgtaccactccagtcacaaggtaatttattaatatattatatgtttgttcactaccataatgatagattttgtgatgataatgtgattgcgattatataagggaactgaataaacaaaacctgaaactctacctgcttttccattaaaaatgcaaaagttggttggggatttgggaaatcaatgaaacattattacggcttgtgtctctatgggatgatcttggatgtgtatgcaatcagattctcattttataaagaacagtatgtggctccaaaatcacctaagattcttccatattttttgaagttgttcaaggatgttgatagaaacayggcaactcagtaaaggaggatggggcctttaagctaaatcctctgtatctagaaatgtgagaaagtagaagaaatctctcaggtaccgaagaactcagcaagggaaaaaagacgtgttaatatcatagatgatgcctgagatggtcctagagtatccctgtgtcactggatgaagctctgacctaacaacttttcacttttctcctggattgttcagaattttacctttccaaattttaatagcacaattatattttgaaaactatacttgattatgtgctcttaatttttgctagttttataatctttctagatattaaatctcatacatataacttcattttaaaattgaggaacatcacacactggggcctgtcatggggtggggggagagag

SEQ ID NO: 69006 - DNA, 1924 bp, Homo sapiens
gcattatataaccacagttatgtaaccatgttatgggtgagcttatcacctggctctgagccactattgtctgtaagtaacataactgaactgcgctgctgactctaagagacagagctcctgactgccttgcaagtggacaatggggagccaggaagtggcgagcacaccagggagtgcagctgcaggcatgggggtggcagaagccatggagccagcactgagaggggctggggctgaagatggtggccgagacaaaagctgatggagagagagagagtaaagccatatctatctacctatggtccctcaagtgttctttcagctacccgccaccttccaacccctccagttgaaccccagcttgggttggaacctgacagcaggggttaacagtttggtccaaaattgaaaagcattaaatattaacatatctttttagcctttagcttacatagagttttatgaaaatatgcacaaagaagggggaattatgactctgggccaaatttgtaattgaaacagtggctgaatttcaagccttctaataagccctggcttctcatgctcatgtatttgtttcacctgcaattttccctsagactcttcagtcatattaacatcacaaggaaagttaaagttttaaagctggttctctcgaggacatctatcttttgatctcccagagagatcagagctttaatctgaaaaggaatgattatgattggacatttgactattgtgcagagaaagccctccagggaaacacaccagaagtaactattgctttatgggtaagcatgaggagtgtcatggctaaactggaggtgacaggcagggaatcaagagttaggagacaggctctgcttattcctgtagacattcaaccatgtcacaactttatgctcaacttctttatctatgaatgggagactttgcaaggccgttaccagtattctatgaaacaatgtgggtgaagtgttttaaaatttctaaaaatacatatgaatatgaatgtcaatagatttttatattgattttcttcagatacagagatgcaagataaaagcaattaaaatatgaggcagcagcagccaagttgttatgtgatctcaggttattgcagagtccttcctaccacaggaagtaggaaactagcaaaagattagcaatagtgccactgaaaaatctttcaggaatttgtaagttctcaatgcatgagactgcagcaacggacagcactaagtgggaaaaaatgtccttttgatacctttttctcatattctgcacaatgtttaaacacaaacttgaaaatttgttcttaatcctgcattctttaggaagatattctattctattattaaacaagtcttcactgagcacccactgtgtgccaagatgttgatttccacgtaaggagagccacttatgtgccagggatcatgttaaacactttaaataattatcttattcaatttttataacaatttataaggttcatgttgatatgccctctttaatatatcaataaatagactcagaaagataatgtaactaatataatgtagatatgaggtagatttgggcagaattgaggtttaaatccagttctgcaccattccagaggctgtgctctcaaacacaatgccctattgacagttgagtctttggaagtctttactcttcttcaactgatttaattaaatttcacaaatgtctgtaaaagagacacaaaatgaaatttaatttatgtcaattttcagaataaatttgcctcatctagcaatttatgggtcaggataataatgaaaatactgtgaataaacatttgaatgttctcatgcaggaggattttaagcaattttatttcatatttagtcctaaaacaatagaaatttaaactttgctttacatccccaacttt

SEQ ID NO: 69007 - DNA, 1924 bp, Homo sapiens
gcattatataaccacagttatgtaaccatgttatgggtgagcttatcacctggctctgagccactattgtctgtaagtaacataactgaactgcgctgctgactctaagagacagagctcctgactgccttgcaagtggacaatggggagccaggaagtggcgagcacaccagggagtgcagctgcaggcatgggggtggcagaagccatggagccagcactgagaggggctggggctgaagatggtggccgagacaaaagctgatggagagagagagagtaaagccatatctatctacctatggtccctcaagtgttctttcagctacccgccaccttccaacccctccagttgaaccccagcttgggttggaacctgacagcaggggttaacagtttggtccaaaattgaaaagcattaaatattaacatatctttttagcctttagcttacatagagttttatgaaaatatgcacaaagaagggggaattatgactctgggccaaatttgtaattgaaacagtggctgaatttcaagccttctaataagccctggcttctcatgctcatgtatttgtttcacctgcaattttccctgagactcttcagtcatattaacatcacaaggaaagttaaagttttaaagctggttctctcgaggacatctatcttttgatctcccagagagatcagagctttaatctgaaaaggaatgattatgattggacatttgactattgtgcagagaaagccctccagggaaacacaccagaagtaactattgctttatgggtaagcatgaggagtgtcatggctaaactggaggtgacaggcagggaatcaagagttaggagacaggctctgcttattcctgtagacattcaaccatgtcacaactttatgctcaacttctttatctatgaatgggagactttgcaaggccgttaccagtattctatgaaacaatgtgggtgaagtgttttaaaatttctaaaaatacatatgaatatgaatgtcaatagatttttatattgattttcttcagatacagagatgcaagataaaagcaattaaaatatgaggcagcagcagccaagttgttatgtgatctcaggttattgcagagtccttcctaccacaggaagtaggaaactagcaaaagattagcaatagtgccactgaaaaatctttcaggaatttgtaagttctcaatgcatgagactgcagcaacggacagcactaagtgggaaaaaatgtcctyttgatacctttttctcatattctgcacaatgtttaaacacaaacttgaaaatttgttcttaatcctgcattctttaggaagatattctattctattattaaacaagtcttcactgagcacccactgtgtgccaagatgttgatttccacgtaaggagagccacttatgtgccagggatcatgttaaacactttaaataattatcttattcaatttttataacaatttataaggttcatgttgatatgccctctttaatatatcaataaatagactcagaaagataatgtaactaatataatgtagatatgaggtagatttgggcagaattgaggtttaaatccagttctgcaccattccagaggctgtgctctcaaacacaatgccctattgacagttgagtctttggaagtctttactcttcttcaactgatttaattaaatttcacaaatgtctgtaaaagagacacaaaatgaaatttaatttatgtcaattttcagaataaatttgcctcatctagcaatttatgggtcaggataataatgaaaatactgtgaataaacatttgaatgttctcatgcaggaggattttaagcaattttatttcatatttagtcctaaaacaatagaaatttaaactttgctttacatccccaacttt

SEQ ID NO: 69008 - DNA, 1924 bp, Homo sapiens
gcattatataaccacagttatgtaaccatgttatgggtgagcttatcacctggctctgagccactattgtctgtaagtaacataactgaactgcgctgctgactctaagagacagagctcctgactgccttgcaagtggacaatggggagccaggaagtggcgagcacaccagggagtgcagctgcaggcatgggggtggcagaagccatggagccagcactgagaggggctggggctgaagatggtggccgagacaaaagctgatggagagagagagagtaaagccatatctatctacctatggtccctcaagtgttctttcagctacccgccaccttccaacccctccagttgaaccccagcttgggttggaacctgacagcaggggttaacagtttggtccaaaattgaaaagcattaaatattaacatatctttttagcctttagcttacatagagttttatgaaaatatgcacaaagaagggggaattatgactctgggccaaatttgtaattgaaacagtggctgaatttcaagccttctaataagccctggcttctcatgctcatgtatttgtttcacctgcaattttccctgagactcttcagtcatattaacatcacaaggaaagttaaagttttaaagctggttctctcgaggacatctatcttttgatctcccagagagatcagagctttaatctgaaaaggaatgattatgattggacatttgactattgtgcagagaaagccctccagggaaacacaccagaagtaactattgctttatgggtaagcatgaggagtgtcatggctaaactggaggtgacaggcagggaatcaagagttaggagacaggctctgcttattcctgtagacattcaaccatgtcacaactttatgctcaacttctttatctatgaatgggagactttgcaaggccgttaccagtattctatgaaacaatgtgggtgaagtgttttaaaatttctaaaaatacatatgaatatgaatgtcaatagatttttatattgattttcttcagatacagagatgcaagataaaagcaattaaaatatgaggcagcagcagccaagttgttatgtgatctcaggttattgcagagtccttcctaccacaggaagtaggaaactagcaaaagattagcaatagtgccactgaaaaatctttcaggaatttgtaagttctcaatgcatgagactgcagcaacggacagcactaagtgggaaaaaatgtccttttgatacctttttctcatattctgcacaatgtttaaacacaaacttgaaaatttrttcttaatcctgcattctttaggaagatattctattctattattaaacaagtcttcactgagcacccactgtgtgccaagatgttgatttccacgtaaggagagccacttatgtgccagggatcatgttaaacactttaaataattatcttattcaatttttataacaatttataaggttcatgttgatatgccctctttaatatatcaataaatagactcagaaagataatgtaactaatataatgtagatatgaggtagatttgggcagaattgaggtttaaatccagttctgcaccattccagaggctgtgctctcaaacacaatgccctattgacagttgagtctttggaagtctttactcttcttcaactgatttaattaaatttcacaaatgtctgtaaaagagacacaaaatgaaatttaatttatgtcaattttcagaataaatttgcctcatctagcaatttatgggtcaggataataatgaaaatactgtgaataaacatttgaatgttctcatgcaggaggattttaagcaattttatttcatatttagtcctaaaacaatagaaatttaaactttgctttacatccccaacttt

SEQ ID NO: 69009 - DNA, 1924 bp, Homo sapiens
gcattatataaccacagttatgtaaccatgttatgggtgagcttatcacctggctctgagccactattgtctgtaagtaacataactgaactgcgctgctgactctaagagacagagctcctgactgccttgcaagtggacaatggggagccaggaagtggcgagcacaccagggagtgcagctgcaggcatgggggtggcagaagccatggagccagcactgagaggggctggggctgaagatggtggccgagacaaaagctgatggagagagagagagtaaagccatatctatctacctatggtccctcaagtgttctttcagctacccgccaccttccaacccctccagttgaaccccagcttgggttggaacctgacagcaggggttaacagtttggtccaaaattgaaaagcattaaatattaacatatctttttagcctttagcttacatagagttttatgaaaatatgcacaaagaagggggaattatgactctgggccaaatttgtaattgaaacagtggctgaatttcaagccttctaataagccctggcttctcatgctcatgtatttgtttcacctgcaattttccctgagactcttcagtcatattaacatcacaaggaaagttaaagttttaaagctggttctctcgaggacatctatcttttgatctcccagagagatcagagctttaatctgaaaaggaatgattatgattggacatttgactattgtgcagagaaagccctccagggaaacacaccagaagtaactattgctttatgggtaagcatgaggagtgtcatggctaaactggaggtgacaggcagggaatcaagagttaggagacaggctctgcttattcctgtagacattcaaccatgtcacaactttatgctcaacttctttatctatgaatgggagactttgcaaggccgttaccagtattctatgaaacaatgtgggtgaagtgttttaaaatttctaaaaatacatatgaatatgaatgtcaatagatttttatattgattttcttcagatacagagatgcaagataaaagcaattaaaatatgaggcagcagcagccaagttgttatgtgatctcaggttattgcagagtccttcctaccacaggaagtaggaaactagcaaaagattagcaatagtgccactgaaaaatctttcaggaatttgtaagttctcaatgcatgagactgcagcaacggacagcactaagtgggaaaaaatgtccttttgatacctttttctcatattctgcacaatgtttaaacacaaacttgaaaatttgttcttaatcctgcattctttaggaagatattctattctattattaaacaagtcttcactgagcaccyactgtgtgccaagatgttgatttccacgtaaggagagccacttatgtgccagggatcatgttaaacactttaaataattatcttattcaatttttataacaatttataaggttcatgttgatatgccctctttaatatatcaataaatagactcagaaagataatgtaactaatataatgtagatatgaggtagatttgggcagaattgaggtttaaatccagttctgcaccattccagaggctgtgctctcaaacacaatgccctattgacagttgagtctttggaagtctttactcttcttcaactgatttaattaaatttcacaaatgtctgtaaaagagacacaaaatgaaatttaatttatgtcaattttcagaataaatttgcctcatctagcaatttatgggtcaggataataatgaaaatactgtgaataaacatttgaatgttctcatgcaggaggattttaagcaattttatttcatatttagtcctaaaacaatagaaatttaaactttgctttacatccccaacttt

SEQ ID NO: 69010 - DNA, 641 bp, Homo sapiens
aggtttccttttcaggttttaaaggcaaaaaagaggagatgcagttataaatcacttcaagggatgatttagatttttttatggyggcaggttgctaccagtcatgaaatcccgaatgtaaaatgccactacagccatcaaaataaattgatatgggttggtgagtggaggtggttgataaaaccccaccatgtaattagttggaaagagattaaaatgtttacacagagggaaagttgcaaataaaatttctgtggaaaagttgaagtgattgaattattttaaacatgaaaagggaagggtagggggcagcttaattaatcttcaagaaatggctttgctttaggaccatggatagtggtgtccagtgcttgtcagttctgccaatgacagaaagctatgaaatataagacgtagcaagacagactaaggtatgattaaaaaaataggtttctaaagtttataaagctcactacctgaacttgaacaagagacactgttaaatattttcctctggacaacgttaaagaaagatatcctcctatgtctgtaatgataaaagcacggtcttttccaaagaaagagctcaactcacctccataacctaacaacattccttctagatctaagattagaccttt

SEQ ID NO: 69011 - DNA, 641 bp, Homo sapiens
aggtttccttttcaggttttaaaggcaaaaaagaggagatgcagttataaatcacttcaagggatgatttagatttttttatggcggcaggttgctaccagtcatgaaatccygaatgtaaaatgccactacagccatcaaaataaattgatatgggttggtgagtggaggtggttgataaaaccccaccatgtaattagttggaaagagattaaaatgtttacacagagggaaagttgcaaataaaatttctgtggaaaagttgaagtgattgaattattttaaacatgaaaagggaagggtagggggcagcttaattaatcttcaagaaatggctttgctttaggaccatggatagtggtgtccagtgcttgtcagttctgccaatgacagaaagctatgaaatataagacgtagcaagacagactaaggtatgattaaaaaaataggtttctaaagtttataaagctcactacctgaacttgaacaagagacactgttaaatattttcctctggacaacgttaaagaaagatatcctcctatgtctgtaatgataaaagcacggtcttttccaaagaaagagctcaactcacctccataacctaacaacattccttctagatctaagattagaccttt

SEQ ID NO: 69012 - DNA, 641 bp, Homo sapiens
aggtttccttttcaggttttaaaggcaaaaaagaggagatgcagttataaatcacttcaagggatgatttagatttttttatggcggcaggttgctaccagtcatgaaatcccgaatgtaaaatgccactacagccatcaaaataaattgatatgggttggtgagtggaggtggttgataaaaccccaccatgtaattagttggaaagagattaaaatgtttacacagagggaaagttgcaaataaaatttctgtggaaaagttgaagtgattgaattwttttaaacatgaaaagggaagggtagggggcagcttaattaatcttcaagaaatggctttgctttaggaccatggatagtggtgtccagtgcttgtcagttctgccaatgacagaaagctatgaaatataagacgtagcaagacagactaaggtatgattaaaaaaataggtttctaaagtttataaagctcactacctgaacttgaacaagagacactgttaaatattttcctctggacaacgttaaagaaagatatcctcctatgtctgtaatgataaaagcacggtcttttccaaagaaagagctcaactcacctccataacctaacaacattccttctagatctaagattagaccttt

SEQ ID NO: 69013 - DNA, 641 bp, Homo sapiens
aggtttccttttcaggttttaaaggcaaaaaagaggagatgcagttataaatcacttcaagggatgatttagatttttttatggcggcaggttgctaccagtcatgaaatcccgaatgtaaaatgccactacagccatcaaaataaattgatatgggttggtgagtggaggtggttgataaaaccccaccatgtaattagttggaaagagattaaaatgtttacacagagggaaagttgcaaataaaatttctgtggaaaagttgaagtgattgaattattttaaacatkaaaagggaagggtagggggcagcttaattaatcttcaagaaatggctttgctttaggaccatggatagtggtgtccagtgcttgtcagttctgccaatgacagaaagctatgaaatataagacgtagcaagacagactaaggtatgattaaaaaaataggtttctaaagtttataaagctcactacctgaacttgaacaagagacactgttaaatattttcctctggacaacgttaaagaaagatatcctcctatgtctgtaatgataaaagcacggtcttttccaaagaaagagctcaactcacctccataacctaacaacattccttctagatctaagattagaccttt

SEQ ID NO: 69014 - DNA, 641 bp, Homo sapiens
aggtttccttttcaggttttaaaggcaaaaaagaggagatgcagttataaatcacttcaagggatgatttagatttttttatggcggcaggttgctaccagtcatgaaatcccgaatgtaaaatgccactacagccatcaaaataaattgatatgggttggtgagtggaggtggttgataaaaccccaccatgtaattagttggaaagagattaaaatgtttacacagagggaaagttgcaaataaaatttctgtggaaaagttgaagtgattgaattattttaaacatgaaaagggaasggtagggggcagcttaattaatcttcaagaaatggctttgctttaggaccatggatagtggtgtccagtgcttgtcagttctgccaatgacagaaagctatgaaatataagacgtagcaagacagactaaggtatgattaaaaaaataggtttctaaagtttataaagctcactacctgaacttgaacaagagacactgttaaatattttcctctggacaacgttaaagaaagatatcctcctatgtctgtaatgataaaagcacggtcttttccaaagaaagagctcaactcacctccataacctaacaacattccttctagatctaagattagaccttt

SEQ ID NO: 69015 - DNA, 851 bp, Homo sapiens
atcccaaagggctgagggcccagctggctggctagtgaaatcaccttggattctacctgcacctaaataagatcaattctttttttatccatttatatatcaaatttctgcacaataattattttaaagagagttatgctactaagaataatagaaatctgttgatctaaagaaatatttagttgttacctgaagcacaatgtttctttaagtcacttttatatctactactttttatatatactttttatatacactgcttttcctgagcacagtgtaaaaggccagggcaagcacatactcacctcacaagccttatatctgcacttttcccatcagtcttcctcacatgtgattccaacctgttactgactttcttgatacgaccttaatattcagtgtctcatgtctctcttgccttgctctttggactttacattctttactgttttcccagctctaaccgcagaccttgacccctcyccacagcccttcttcttttctgtaaagcaaatatattgctttgggtcacctcttctaaacacttctattgtttcaatttagtagtgcaaccctcctaaccctggcaggactccttgtgatagtgcttccaccaagcccagctcacatcctcagtgagaacggccattaagagatactgtgcaacaaggggcatgttctaaaataccagtttcctatttaaccctactgacaacctactttcgttctttttttttatttttttaattatactttaagttctagggtacatgtgcacaacgtgcaggtttgttacatatgtatacatgtgccatgttggtgtgctgcaccccattaactcgtcatttaca

SEQ ID NO: 69016 - DNA, 620 bp, Homo sapiens
gatgatgatatgctaagtaccctgatctgatcactatacatcatgtgtattgaaacattgttgtgtatcccatgaatatgtacaattattgtcaattaaaaaaacaaaattaaagaaaaaaagctgtaatcatgatataattcrgccttctgccatttgtgcacacccaaggctcagattaggcagacaccctggctacatgcaagccccgtaaagtgctacccacttgcatgcccctactccctgtcaagcaccacccctacctcatgactcaccacctcagctcaagcacaccccatgactcacagtgctctctcccttcctggaataatgcccatcgcaggactcgctgccttatgtctgctgtgatgtcttcattttggataatattgtccttgggtgggacttacctgttttatatcattggtgtctcttttgcccattcccacccccagcctagtataggtctgggctcctgacgggtgctgaccgattgatagacagctattccatgtgattgtgaagggcctctggctccacaacaccttccatgttggagatgccttggctacattgcctccagataagccacttgccttagtatctctgaagggacaata

SEQ ID NO: 69017 - DNA, 620 bp, Homo sapiens
gatgatgatatgctaagtaccctgatctgatcactatacatcatgtgtattgaaacattgttgtgtatcccatgaatatgtacaattattgtcaattaaaaaaacaaaattaaagaaaaaaagctgtaatcatgatataattcagccttctgccatttgtgcacacccaaggctcagattaggcagacaccctggctacatgcaagccccgtaaagtgctacccacttgcatgcccctactccctgtcaagcaccacccctacctcatgactcaccacctcagctcaagcacaccccatgactcacagtgctctctcccttcctggaataatgcccatcgcaggactcgctgccttatgtctgctgtgatgtcttcattttggataatattgtccttgggtgggacttacctgttttatatcattggtgtctcttttgcccattcycacccccagcctagtataggtctgggctcctgacgggtgctgaccgattgatagacagctattccatgtgattgtgaagggcctctggctccacaacaccttccatgttggagatgccttggctacattgcctccagataagccacttgccttagtatctctgaagggacaata

SEQ ID NO: 69018 - DNA, 620 bp, Homo sapiens
gatgatgatatgctaagtaccctgatctgatcactatacatcatgtgtattgaaacattgttgtgtatcccatgaatatgtacaattattgtcaattaaaaaaacaaaattaaagaaaaaaagctgtaatcatgatataattcagccttctgccatttgtgcacacccaaggctcagattaggcagacaccctggctacatgcaagccccgtaaagtgctacccacttgcatgcccctactccctgtcaagcaccacccctacctcatgactcaccacctcagctcaagcacaccccatgactcacagtgctctctcccttcctggaataatgcccatcgcaggactcgctgccttatgtctgctgtgatgtcttcattttggataatattgtccttgggtgggacttacctgttttatatcattggtgtctcttttgcccattcccacccccagcctagtataggtctgggctcctgacgggtgctgaccgattgatagrcagctattccatgtgattgtgaagggcctctggctccacaacaccttccatgttggagatgccttggctacattgcctccagataagccacttgccttagtatctctgaagggacaata

SEQ ID NO: 69019 - DNA, 755 bp, Homo sapiens
ctcaacgcaggccatccttccaacagacagtgcttgtttgtgttgctcacacatgccttgtctgcaaacatagcgtggagagaagtcgtaaggactgagatgcagcggctgggaaactgcagtgaccgaygagagggcctgattgcttgtgcatagctgctgaaaggggtcttgacattttaagtgctcgtcagagtgaggaatgacagcagcagacaatgagacacttcctctttgccttttgctggctattaataagtgtttctgattctgcagatgtgggagagattctgggccattgggctgggtgtgctgtgtgggtttttttttctcactttgtctttcttccagtcccgtttcctcctctctcccctgcctccctctgcgtgagctgccactctccttctctcccaggtgctgctggctgtttgtcttggagtcggatttgttagtgctcaggaaatggcattaggcagctggactcagacctgctcttggcactttgccaatctcttagtctcctggcttggacccactgccaaaccccactcacttcccccagggtaggagaggcaaggaagggacacagtgggctggtggagaagatagagaggggctgtgagtctacggttggggaagggaccaccaggaaaggaagcaagagggaccatttagacagtcagtgcaagctgggacaaaggagccagccttggggacagatgactcagagagagctgggagatggacttttccct

SEQ ID NO: 69020 - DNA, 534 bp, Homo sapiens
cagtccacagcagcagcctcctcactggcctccgtgcctccacccctgccccgtctgtccacctttcacactgcagtcatgtagtttcctgaaacacgaatcctaccatacattgttgagccatgtttgtggctccctagtgccctcaggcaactgtcccagctcctcagcctggcactcaggccctggctgatctggtacccaccatccctccagaaagcccatcctctctgtccctgccctcatcttcctgtctcaggcacaacaaaagcagtcccatggtcatatcattgctcagagacggcctcccttatcatctaacacctatatcacaacaagagtttagtgctgtccctgtgccaagttctgtgttaggtggcttcatatacctcctctcgttgaatcctgaattagcaaayggcatagccactctgggctgtctgatttcagaggctgtgcccctgaccactacctcctgccctgcaaggccccggccctctcccaggaagctgcctgaccatccctttttggccc

SEQ ID NO: 69021 - DNA, 643 bp, Homo sapiens
agaagcagaggtaagatgggaagcctcagccagcctcctaagccgtcctctcagatctctgcacacctctcacccacaagcttttactccacataaacccagatgccctcattcacagcacagaaagcacacaaatcctggagtcagagggacttgcgtttgaatcccagstctgccactcatcaatcaggcgaccttgggtacctgttttctcatcataaacaaagggggtaactggccgggcatggcagctcacacctgtaatcccagcactttgggagatcgaggcgggtggatcacttgagctcaggagtttgagaccagcctggccaacatggtgaaaccccatctctactaaaatacaaaaattagctgggaatggtggcacgtgcctgtaatcccagctacctgggaggctgaggcaggagaattccttgaacccgggaggcaggaggcggaggttgcagtgagccgagattgtgccactgtactgcagcctgggcaacagagcgagactccatctcaaattaaaaaaaaaaaagtggggggggatggtaaccatactcacatcatagtttatttatgctgtttctccttgctagaatgaaagttcccaaaaggcagggatctgttttggtcactg

SEQ ID NO: 69022 - DNA, 643 bp, Homo sapiens
agaagcagaggtaagatgggaagcctcagccagcctcctaagccgtcctctcagatctctgcacacctctcacccacaagcttttactccacataaacccagatgccctcattcacagcacagaaagcacacaaatcctggagtcagagggacttgcgtttgaatcccaggtctgccactcatcaatcaggcgaccttgggtacctgttttctcatcataaacaaagggggtaactggccgggcatggmagctcacacctgtaatcccagcactttgggagatcgaggcgggtggatcacttgagctcaggagtttgagaccagcctggccaacatggtgaaaccccatctctactaaaatacaaaaattagctgggaatggtggcacgtgcctgtaatcccagctacctgggaggctgaggcaggagaattccttgaacccgggaggcaggaggcggaggttgcagtgagccgagattgtgccactgtactgcagcctgggcaacagagcgagactccatctcaaattaaaaaaaaaaaagtggggggggatggtaaccatactcacatcatagtttatttatgctgtttctccttgctagaatgaaagttcccaaaaggcagggatctgttttggtcactg

SEQ ID NO: 69023 - DNA, 322 bp, Homo sapiens
tgcacaatactgtgaatgtactawatgccactgagacatacactttaaaatggttaattgtatattatgtgaatttcacctcaataagaaatgatttgcaaaagaaaataaattcagttatacattcaaccgacaaccttgtgctgggtattgagaacatggaaatgaatcagacctggttcctgccagtgctggtagagcccatagccttagatgctgagatggggcagttgaacccagaacttgaacattgccctctgaaatttacctatcgggtgggttctctcatgggttcccaccatacagactgccagggggtact

SEQ ID NO: 69024 - DNA, 322 bp, Homo sapiens
tgcacaatactgtgaatgtactatatgccactgagacatacactttaaaatggttaattgtatattatgtgaatttcacctcaataaraaatgatttgcaaaagaaaataaattcagttatacattcaaccgacaaccttgtgctgggtattgagaacatggaaatgaatcagacctggttcctgccagtgctggtagagcccatagccttagatgctgagatggggcagttgaacccagaacttgaacattgccctctgaaatttacctatcgggtgggttctctcatgggttcccaccatacagactgccagggggtact

SEQ ID NO: 69025 - DNA, 1322 bp, Homo sapiens
tgcatttctacaaagccactatccatttctgactgcaattctctagggccacatgaatatctttgtatttaggtaaaagttaaagcattaaacctatctcctaatatcccctttctttacgactcttacttcagatcccatatctgggattttgttcctgtgaagaattaggagaaactggaatatggcagctgacagatccaccaatccttcctcttacccatggaccaactgggggcttcaactggagagagaccttgcttcaagaataaaccacaccagtgaacaagaaggaaaggccttttggagtgtgtctttctgtgtgtttaaaaacagtgggaaaatccacaccacactctaagtggacagctcagaataatttagcatatttcctttcacacttaaagttcttaagatgagactgtgtaaatgagagaaagacttgattcagaggaaaaaaatgtgttctctctggactcttgcctagctcacaaggctttggagaacttgtcttcctaaatcggggcacctgctacagaagagaatgtttcgttccctctgggtatgcacagctaaggggcctcatttctcccagagggagctgctggcccgctctaaggggtgcaagaggaaggagtgtgcccagaccagctgggggagcattgaaaggacagcttggggatggaatttttttttttttatctccattttccagttaggtagagccaagctgaggaatccttttaagattattagaaaacatgccctgaagagagttgttcttaggttacacatgaaatcctaccgtcactagcccccatacaccagtgttgctggctgaagatacccgcttaaggatgctaacatttaccctggtactgccacattttctctagagcagctggcccttcttgctacagccctatcccccctccttgcttctgtgaaatggggagacaaagcacttttgctctccaaagcacttttggatactcaggaggaaagataagatacatgtttgaagtattcaatcataggagcaaagaacttgcaaaatatgaagtgacttggaattaaccatgttgtagcctaacgtgctactgcatttctaaatcatcaatatttgcttgtctttgcccctagactctagactatgttaactagttaaggatgttacattttgaaaggatgtatgttagatatattatttgcrgcaagaagttcattctgtgcaatatggacatgtttgcaaaccataccaagggtcaggttgttgtacacttacagtacgtgtcaaccataatggaacatccacaaatgca

SEQ ID NO: 69026 - DNA, 788 bp, Homo sapiens
tcccacctaaggccttccttccaaatcctcattgcctgtcctaagaaccaccacttcctggactaaccgatagcggaagggccaggttccctctctgcccctgaggaagtgatgctaccccacagtccgaggagataatcacatcagaatatagcagacctgcagtagtgtgagagatttcctggcagtaagaaggggtagggaggaggatgtccttgtcacacccaggctgcctggatcctgtggcctccaccacatgcattaggcgtggctctggccacagatcagtagagggagaagcactgcacacagcacggatgcttgtaaatgtcaattgccctcagtggctataattagtttctctggtaccctgtgttcagcaaagtggggaaacagccccttagaaagtgtgtattttccaccgctgtacctcgtgatatcaccacaggtgccttctggctgaccccaagtttctcgttgttctccaggaactgctgtgactgttggtggcagttctataactctgagaagtcacagggggccyggtcaaccaccagcaaatgacttcctgttcccttcccctactgtcccccaccccccatgacactaggccagtccttgcctggtgagaataaattcaactgtacgtggatttctcacccaagtttctttctttctttttttttttttcggacaagtctcactctgtcaccagtctcactctgtcacccagactggagtgcagtggcgccatcttggctcaccgtaaccttcgcctcctgggttca

SEQ ID NO: 69027 - DNA, 788 bp, Homo sapiens
tcccacctaaggccttccttccaaatcctcattgcctgtcctaagaaccaccacttcctggactaaccgatagcggaagggccaggttccctctctgcccctgaggaagtgatgctaccccacagtccgaggagataatcacatcagaatatagcagacctgcagtagtgtgagagatttcctggcagtaagaaggggtagggaggaggatgtccttgtcacacccaggctgcctggatcctgtggcctccaccacatgcattaggcgtggctctggccacagatcagtagagggagaagcactgcacacagcacggatgcttgtaaatgtcaattgccctcagtggctataattagtttctctggtaccctgtgttcagcaaagtggggaaacagccccttagaaagtgtgtattttccaccgctgtacctcgtgatatcaccacaggtgccttctggctgaccccaagtttctcgttgttctccaggaactgctgtgactgttggtggcagttctataactctgagaagtcacagggggcccggtcaaccaccagcaaatgacttcctgttcccttcccctactgtcccccaccccccatgacactaggccagtccttgcctggtgagaataaattcaactgtacgtggatttctcacccaagtttctttctttctttttttttttttcrgacaagtctcactctgtcaccagtctcactctgtcacccagactggagtgcagtggcgccatcttggctcaccgtaaccttcgcctcctgggttca

SEQ ID NO: 69028 - DNA, 873 bp, Homo sapiens
cctacagctgggggacgagggcgcggggttcgagtcccgggtatagtgctcagcctccgccccagccgggtgtgagctcagcgtttctctcgcgcgctcccctaggtctccagcgccgagcgcctagggaggcggggccctgcggaggactcgggcaccctctccgtctggaatactgggctggtctgggatcctccggtgtctgggaaagggcgggagactgcggggcagggaggccggcgcccccgttgcagcggcttccagctccggatgtcgctctcgggttcggtctccccctggagtaggaggagcgggagcgtgggtgtwcctgcgtgtgcattgatggggaggatggaatcagaaggagaagcgatccctccaggggacctgggttctcgtcagtggtgacgccagctcagaaatctgtgggtgcctgagagtaaggagggggagctgttcttcatccttcctctaggagagtggggtaggggagggcagggagagcgcaggtggctgcccctggagcctgctggggagaggcctgtttgccagcatagggtggcggcggccggagtcgtctcaggccggtcggctcaagtctcaggggctggaactctgcctaagaggaagccaaggcccagcggccaggcccttctcccctggttaatccctgccgtgcagatttcttaggtggggacacaaggcctggcgtccggactgggcgcagcttcttttcatctttgaattacagcacctgaacaggagagttggccaaacttaatcagtgagggccaagtaaatgaaagtcctttttatttttttcccttctcacatttttttttcaggtgataactttatttatgtatttatttt

SEQ ID NO: 69029 - DNA, 873 bp, Homo sapiens
cctacagctgggggacgagggcgcggggttcgagtcccgggtatagtgctcagcctccgccccagccgggtgtgagctcagcgtttctctcgcgcgctcccctaggtctccagcgccgagcgcctagggaggcggggccctgcggaggactcgggcaccctctccgtctggaatactgggctggtctgggatcctccggtgtctgggaaagggcgggagactgcggggcagggaggccggcgcccccgttgcagcggcttccagctccggatgtcgctctcgggttcggtctccccctggagtaggaggagcgggagcgtgggtgtacctgcgtgtkcattgatggggaggatggaatcagaaggagaagcgatccctccaggggacctgggttctcgtcagtggtgacgccagctcagaaatctgtgggtgcctgagagtaaggagggggagctgttcttcatccttcctctaggagagtggggtaggggagggcagggagagcgcaggtggctgcccctggagcctgctggggagaggcctgtttgccagcatagggtggcggcggccggagtcgtctcaggccggtcggctcaagtctcaggggctggaactctgcctaagaggaagccaaggcccagcggccaggcccttctcccctggttaatccctgccgtgcagatttcttaggtggggacacaaggcctggcgtccggactgggcgcagcttcttttcatctttgaattacagcacctgaacaggagagttggccaaacttaatcagtgagggccaagtaaatgaaagtcctttttatttttttcccttctcacatttttttttcaggtgataactttatttatgtatttatttt

SEQ ID NO: 69030 - DNA, 873 bp, Homo sapiens
cctacagctgggggacgagggcgcggggttcgagtcccgggtatagtgctcagcctccgccccagccgggtgtgagctcagcgtttctctcgcgcgctcccctaggtctccagcgccgagcgcctagggaggcggggccctgcggaggactcgggcaccctctccgtctggaatactgggctggtctgggatcctccggtgtctgggaaagggcgggagactgcggggcagggaggccggcgcccccgttgcagcggcttccagctccggatgtcgctctcgggttcggtctccccctggagtaggaggagcgggagcgtgggtgtacctgcgtgtgcattgatggggaggatggaatcagaaggagaagcgatccctccaggggacctgggttctcgtcagtggtgacgscagctcagaaatctgtgggtgcctgagagtaaggagggggagctgttcttcatccttcctctaggagagtggggtaggggagggcagggagagcgcaggtggctgcccctggagcctgctggggagaggcctgtttgccagcatagggtggcggcggccggagtcgtctcaggccggtcggctcaagtctcaggggctggaactctgcctaagaggaagccaaggcccagcggccaggcccttctcccctggttaatccctgccgtgcagatttcttaggtggggacacaaggcctggcgtccggactgggcgcagcttcttttcatctttgaattacagcacctgaacaggagagttggccaaacttaatcagtgagggccaagtaaatgaaagtcctttttatttttttcccttctcacatttttttttcaggtgataactttatttatgtatttatttt

SEQ ID NO: 69031 - DNA, 2438 bp, Homo sapiens
atcctccaattactgttctatgttcactagtaaagaccccaaaagaatgattcttcaggaaaatgagttaccaattttagctcatcaggaagacagtttccttgagcagaagacagagaagcctgaaacatccgtcttcacttctggagtggcattgataagccagaaaggcaggctccctttttcctaggaaaagactcatttcccctgtaatttgtctttgttagcaattgagggtaacctttggagttctcctcactattgactgtaaaaccattccattagacgtgcagcggccaaaatgctaaccactagccacatgctgaataaaactgaacattcagttccacatcacactggccatgtttcaggtgctagtggctaccatgtcagagagtgcagatatgaaaccttcccatcatcacagaacattcggctggacatcgctgcactaggagtttcacagggaaggcacttgatttgtcgaatgcatttattgaattcatggatagacagtttagatagggcagggaatactgtagtattccctggtgaaggcatgttaatccttcaaaattatgcagcaggtttcttttaagaaactcagggttggccgggcacggtggctcacgcctgtaatcccagcactttgggaggccgaggcaggtggatcatctgagatcaggagttcgagaccagcctgaccaacatggagaaatcccgtctctactaaaaatacaaaattagccggtgtggtggtgcatgcctgtaatcccagctactcgggaggctgaggcaggagaatcgcttgaacccgggaggaggaggttgcagtgaacttaatttcccctttcacccccaccctgggcacaaaaattaaaaaccctccaccaaaaaaaaaaaaaaaagaaagaaaaaagataaagaaactcagggatttttcttttctttttttgaggtggagtctcactccattgcccaggctggagtgcagtggcacaatctcggctcactgcaacctctgcctcctaggttcaagccattctcctgcctcagcctgctgagtagctgggagtacaggcacacgaaaccacacccatctaatttttgtatttttagtagagacggggtttcaccatgttgaccaggagccaggctggtcttcaactcctgaccttaggtgatccgcccgcctcggcctcccaaaawgctggggttacaggcgcgagccacagcacctggccccgaaactcgagttttttttttttttctagtgttcatacttgaagatgttttttgagcattcatatgtattttcctaggctgagcgctaccaggaatatgaaaaacaacaacaataagagaagaggcagctgaatgtattgggaggaacagaggattgggaaagaaaagacccaggttctagcacgggttccaaacagaagggcaggtgaggtccatcagcccctttgagtctcagtctcttcagtcggtaaaatgagggtaataataatactatcctcaaaggttggttgtttgtatgaatcacatgaaaatataacggaacacactctggagactatcaagggttagatgtctgtgttactgaccttgccctcaagtcgctttcgagtcccactgtcataatccttgagaatattttagctgcctctttcaacggctctccctgccttgggatcatacttcattccatcatgcatacctccaagaaaataattctgccaaaataccactaggatcatgtgccaatgctgcaaagactaaaatggatccctactgcccgtaagatcaagaccaaactccttcttgtatttgctgctgcatcgtgccctgtttgcttaggaagctgctacttcattttgcaggagcttcctgaggcgagaagccttattcctgttacaagtgtgacccaggtcccacccatgcctttccttcttctagctctgcaaattgcacctggtcccttgagttcactgtctctaactcgcgccccctataaccctatcattcttaatgcccacctggcctcgcacattataacatgttctcccatgtggactttttttctgattgttttgtgtgtcttatctcctcaatagcactagacaacactcaaagagagtgtgcttaggcagtgcttggcatcttaggggtaccaagggatggggagggatggggatggatggttgaccctgaaggcctggggttagatggggccagattgatagggacagcgaggcaagacaggaagaaaatttggtttgaaaagacagtttagctttatacaggtagactatactattccttcaatgaaaaccctgttttagtataaaaatttcaaataccttttgtttattaagttaaaataattaattttccctttttttatactttaggtttatataattccagcccag

SEQ ID NO: 69032 - DNA, 921 bp, Homo sapiens
tgcatcctaaactgtgtgccctaggtgcttttcttgccctagtcctgctattctgtgacaggttgtttctaagttgagcaatatgtaagagtcaaacatgattcctaacttcaagttgctttccgtcctgtgagagagatgtgatgtacagatataatgacaatgcaatgtaaaaataaaatgccggtgtcatgcaatttcgacaggtgttgtgctgtgggaattgattgaatattgttctacactcaacagtgcttgctaaatgcaaatcagagcactgtgagcacatgttaaacaggtaaagaaagtgtaatccttctgctttagagaggacaatcacaaatggagaaccttggagaaaatacatatggttgcccatcacacacactttaactgggtatgtgcatcgtgtcagaggttctcagactttgctggatggacatgggattctctgtatagcctaaaatgtgtgagattttctattctagagaaggcccagatctataaatgttcctgaaaaggttattgaccccagagtttccagggtttccagggtgggtacagatggygactactcttttgtttcatgaggatttaccccagacttataggaacagagacactctgaatcctcataaaatagccaacatcattcatcccttgaaactactggcatgaattgtcttgcacggaggaaacaaacatttcctttttttttgttcaatgtctgaagggagctatccctgcagcaggacttggaaaggctcataaaacttgagcaaaatgtttataaagcatggaagtaaatgacaagactgtaactttgcaaagtttcaagaggagcagagattggtctcagtgatccagggatgggctttaggaagcctgtgaatccccagaaacatttgtgtgtatttggtt

SEQ ID NO: 69033 - DNA, 1454 bp, Homo sapiens
ttgttattcagaagatgctacaaattgtayatatattatacaatcatatagaaagagtctttagccaaaataaataaaacttaaaacatattcaaaatgtcaaaatataaaataaccaaaggggtgcaaacaaaatatcaaaaggtagattttaagtaagcttttaattagaaaggtaaattgagtgttgtcagattaacagacagagtagctagacaggtgttacatttatttgcaataccaatagcttaatatctttggccttccatgtacttgcttatggattcacattatttgctgctaaacacaaaggaagactaatatctgtggaaatgaatgaaagaggtgaacatataacaagtatctgagatgtttcaagttccgtatagaaattgtctttgttatttaatcttcaccacaaccctctaagatatttagaggctattcttataccattttacatagagacaccaaaggattaaagtagataagtgctagggtcctttcctgcctttaaagagctgatgtccctctgaggttttagtgttcctggcaaaaaaatgctctctgaactcttgtgaacccacatctcaaagagactaaggttgtcaatttatgttatagacaagggactttcctgctcactgcctcttttaacctgtaaatatgtaaaggctttgtcatcaatccagccaggcaagggagaatgcaccataatatatttttctcctcaaaagtgatttccaaatcatctggcatttgaatttcaaagctgatgcagctcagaatgtgtgggtttggaacagcaaacttgcttgaaataccaagtcatatttttgtcatgcactgcattgaaggtggggtgtttacagccaagacaggattgaagcccctttgcccaacatagcttctgtctataatagaatatcttccaaattcatacacagattttaataaagtcaaactttgcccccaatgagtttaaaagctaaaataggaaattcaggttcaagcccttgattgattgaaaatcagttaaaacatttgaatcatatttcattcctcccaacttgtcaatgttactttaatatttaagcccatgagttttacataattgtcttagagatgttttaaaacacttttgacttttcagtttaatttcaagtgttttaaaattactatttcagtgaacaaagcaatcaaactattaaaccattttttacatgaataaattaaaaacatttcctgtgaatgtaaatgtagaattcacattagtgccttaaaaatgctatgtcattaggaattttaggatcagagaatcaaaatgaaaaggtctattatttaaagcctcaagtgttggctatgaatcatacactgcaatatggaggctcaaaaggaaagtggctatcaggccattactacccacatacaaaatgccattagcaatgctaaat

SEQ ID NO: 69034 - DNA, 1454 bp, Homo sapiens
ttgttattcagaagatgctacaaattgtacatatattatacaatcatatagaaagagtctttagccaaaataaataaaacttaaaacatattcaaaatgtcaaaatataaaataaccaaaggggtgcaaacaaaatatcaaaaggtagattttaagtaagcttttaattagaaaggtaaattgagtgttgtcagattaacagacagagtagctagacaggtgttacatttatttgcaataccaatagcttaatatctttggccttccatgtacttgcttatggattcacattatttgctgstaaacacaaaggaagactaatatctgtggaaatgaatgaaagaggtgaacatataacaagtatctgagatgtttcaagttccgtatagaaattgtctttgttatttaatcttcaccacaaccctctaagatatttagaggctattcttataccattttacatagagacaccaaaggattaaagtagataagtgctagggtcctttcctgcctttaaagagctgatgtccctctgaggttttagtgttcctggcaaaaaaatgctctctgaactcttgtgaacccacatctcaaagagactaaggttgtcaatttatgttatagacaagggactttcctgctcactgcctcttttaacctgtaaatatgtaaaggctttgtcatcaatccagccaggcaagggagaatgcaccataatatatttttctcctcaaaagtgatttccaaatcatctggcatttgaatttcaaagctgatgcagctcagaatgtgtgggtttggaacagcaaacttgcttgaaataccaagtcatatttttgtcatgcactgcattgaaggtggggtgtttacagccaagacaggattgaagcccctttgcccaacatagcttctgtctataatagaatatcttccaaattcatacacagattttaataaagtcaaactttgcccccaatgagtttaaaagctaaaataggaaattcaggttcaagcccttgattgattgaaaatcagttaaaacatttgaatcatatttcattcctcccaacttgtcaatgttactttaatatttaagcccatgagttttacataattgtcttagagatgttttaaaacacttttgacttttcagtttaatttcaagtgttttaaaattactatttcagtgaacaaagcaatcaaactattaaaccattttttacatgaataaattaaaaacatttcctgtgaatgtaaatgtagaattcacattagtgccttaaaaatgctatgtcattaggaattttaggatcagagaatcaaaatgaaaaggtctattatttaaagcctcaagtgttggctatgaatcatacactgcaatatggaggctcaaaaggaaagtggctatcaggccattactacccacatacaaaatgccattagcaatgctaaat

SEQ ID NO: 69035 - DNA, 1454 bp, Homo sapiens
ttgttattcagaagatgctacaaattgtacatatattatacaatcatatagaaagagtctttagccaaaataaataaaacttaaaacatattcaaaatgtcaaaatataaaataaccaaaggggtgcaaacaaaatatcaaaaggtagattttaagtaagcttttaattagaaaggtaaattgagtgttgtcagattaacagacagagtagctagacaggtgttacatttatttgcaataccaatagcttaatatctttggccttccatgtacttgcttatggattcacattatttgctgctaaacacaaaggaagactaatatctgtggaaatgaatgaaagaggtgaacatataacaagtatctgagatgtttcaagttccgtatagaaattgtctttgttatttaatcttcaccacaaccctctaagatatttagaggctattcttataccattttacatagrgacaccaaaggattaaagtagataagtgctagggtcctttcctgcctttaaagagctgatgtccctctgaggttttagtgttcctggcaaaaaaatgctctctgaactcttgtgaacccacatctcaaagagactaaggttgtcaatttatgttatagacaagggactttcctgctcactgcctcttttaacctgtaaatatgtaaaggctttgtcatcaatccagccaggcaagggagaatgcaccataatatatttttctcctcaaaagtgatttccaaatcatctggcatttgaatttcaaagctgatgcagctcagaatgtgtgggtttggaacagcaaacttgcttgaaataccaagtcatatttttgtcatgcactgcattgaaggtggggtgtttacagccaagacaggattgaagcccctttgcccaacatagcttctgtctataatagaatatcttccaaattcatacacagattttaataaagtcaaactttgcccccaatgagtttaaaagctaaaataggaaattcaggttcaagcccttgattgattgaaaatcagttaaaacatttgaatcatatttcattcctcccaacttgtcaatgttactttaatatttaagcccatgagttttacataattgtcttagagatgttttaaaacacttttgacttttcagtttaatttcaagtgttttaaaattactatttcagtgaacaaagcaatcaaactattaaaccattttttacatgaataaattaaaaacatttcctgtgaatgtaaatgtagaattcacattagtgccttaaaaatgctatgtcattaggaattttaggatcagagaatcaaaatgaaaaggtctattatttaaagcctcaagtgttggctatgaatcatacactgcaatatggaggctcaaaaggaaagtggctatcaggccattactacccacatacaaaatgccattagcaatgctaaat

SEQ ID NO: 69036 - DNA, 1461 bp, Homo sapiens
tgagattggagcctcagtctccccggccctgaagccccagctcttaaccactgagctccataatccccaagcagcaagctggttggctagctcgagtgcaggcacctgcgatttgccagggtggtccctgctatgatccctgccacttggacaacgaggaggaaatccactggctcccagcatccatgtgcattttatcctcttagagagggagacgggattttctcctctgtcacagctccgggagccagtgtatcttggataattagaaacactgccaataatttgctccaagtgctgcaaagagcaagagtgatcgccrtgaggtcctgcgacatctgagatcttccacgtcacgacgctgctccctaccacggacgattggaacttccggaggatgagctccatgatccagagcatgagctgggaacgcagttgcactggggggtcttgcccccaccactttgtcaccatgtggattcgagaagtcacctctcggagcaggtggttcctcttccgggagaagaggcatctctgtccctacctggcatgcagccaggctcagacccactcgcccagtttcagttatgacgcgactgtgttgtccgggggagggggatgagcagttggtttttaatggggccagagcttccgtttgggaggatgagaacgttctggagatagatggtggtgaatgttcttgatgccactgaactgtgcagttaacacagctttacactgtgtatactttaccacaatagaaacacctgtgtttctaaattcccttgaaacacaggaagatctggcgatgtgggatccacttgctggcatgtcagagatgggcctcttggagggcctgtgtcccggtccccacctgccctcctactgccttcctatcacggaggctgagtgtccattgccactcaccctaatggactcccgtttaccctaaaggcaaattgctccttctctgtgtccatacctctctgaatgtgagaagagccagagatgggagacgggcagtaagactgatttttcacaatgcatccactttactgatttacacatcgctgctctctctaagcctgcggctctcagagtgggccgcatgctgggagtggtgagggggcaaggccttgcccaccccatctcccacccccgaccagctgaggcagagactctaggtggcccggccatctgtatgttatcaagccaggtgctcccgacttggatttgtggaggcacgttcgcacccaccacgccccgctcagcagattgccttggccgccctgtggcagaggggatggggttgaccggccagcaggccacctctggatgagcagcaccccacagggaggagaccccgacatcactcacatcgtgccgaagtttcccgaggacagtggggaacatgcccattgggctttccattcctgcaaatcccaccttgctgaagccaga

SEQ ID NO: 69037 - DNA, 1461 bp, Homo sapiens
tgagattggagcctcagtctccccggccctgaagccccagctcttaaccactgagctccataatccccaagcagcaagctggttggctagctcgagtgcaggcacctgcgatttgccagggtggtccctgctatgatccctgccacttggacaacgaggaggaaatccactggctcccagcatccatgtgcattttatcctcttagagagggagacgggattttctcctctgtcacagctccgggagccagtgtatcttggataattagaaacactgccaataatttgctccaagtgctgcaaagagcaagagtgatcgccgtgaggtcctgcgacatctgagatcttccacgtcacgacgctgctccctaccacggacgattggaacttccrgaggatgagctccatgatccagagcatgagctgggaacgcagttgcactggggggtcttgcccccaccactttgtcaccatgtggattcgagaagtcacctctcggagcaggtggttcctcttccgggagaagaggcatctctgtccctacctggcatgcagccaggctcagacccactcgcccagtttcagttatgacgcgactgtgttgtccgggggagggggatgagcagttggtttttaatggggccagagcttccgtttgggaggatgagaacgttctggagatagatggtggtgaatgttcttgatgccactgaactgtgcagttaacacagctttacactgtgtatactttaccacaatagaaacacctgtgtttctaaattcccttgaaacacaggaagatctggcgatgtgggatccacttgctggcatgtcagagatgggcctcttggagggcctgtgtcccggtccccacctgccctcctactgccttcctatcacggaggctgagtgtccattgccactcaccctaatggactcccgtttaccctaaaggcaaattgctccttctctgtgtccatacctctctgaatgtgagaagagccagagatgggagacgggcagtaagactgatttttcacaatgcatccactttactgatttacacatcgctgctctctctaagcctgcggctctcagagtgggccgcatgctgggagtggtgagggggcaaggccttgcccaccccatctcccacccccgaccagctgaggcagagactctaggtggcccggccatctgtatgttatcaagccaggtgctcccgacttggatttgtggaggcacgttcgcacccaccacgccccgctcagcagattgccttggccgccctgtggcagaggggatggggttgaccggccagcaggccacctctggatgagcagcaccccacagggaggagaccccgacatcactcacatcgtgccgaagtttcccgaggacagtggggaacatgcccattgggctttccattcctgcaaatcccaccttgctgaagccaga

SEQ ID NO: 69038 - DNA, 623 bp, Homo sapiens
catcacctcctttgaatgactagttggaagagcaaaaatttttaaaggctccttaaacattttgccaaattgctgtccagaaacgttggtcagtttgccacagccacatcaggcccttgtcacacggagctgccatcatctctgcaggcccctgtctcgcatctccatgtcaggcccatgccccccgctctgcgtactgcatgctcagctgatatggctggatggcttttgaacccacctggtctctcatgtgggggcttcataaccttcctctctggaatatttgctggtgtcccatctgtctgcatgctgactgcgtatctgcagccaggctgttgcttctggaaggccaagcatcggctgcctgttcattcctgtgcgtcctggacatgcagggatggaggaggctttggttactacagttttgtagtatattttgaagtctcataatgccaggtttgtgcttttgctcaggattgttttggctattcagagtttttttttggttctgtacaattttaagatttttccaattctgtgaagaatgtccttggtattttggtagggattgtgtttaatctgtagattactttaggtactatsatcattttaacaatatttct

SEQ ID NO: 69039 - DNA, 1088 bp, Homo sapiens
aatgagagtatttaaaatttctatcacctaaaacatgtatctttgtgctgggaacatttcaactcttttcttccacctgttttgaaatatacaatcaattattgttaattctagccaygctactttgctatcgaacactagaacctattgtttttatctgactgtaagctcgtacccattaatcagcctctctctataacacattttctttatctcttcatctgttgatgggcacttaggtggagtccatatcttattgtggatagtgctgcaacgaacatgggggtgcagatgtctctttcatgtaatgatttgctttcctttggataaatatccagtaatgggattgctagataatatggtagttctatttttagtttttttgagaaacttccatattgttttcgtacacttatgaagaagtttgaacctgtggtcttaattccttatgagttgttcgagatatcttaggagcttatcagaaataatgtccaggatacagctgctgtggttcaatgcagctgcataaggtgtgttagatgagagcttgagaaattcctccccctttctggatgacaccttcagctctatgaacactcagccagatgaggggcattgctgatgttggctagctacaagttggctgtggcagcgagctttgctttgaacagtttacgagataatcttaggttttcttttatgtatgttatttcagactcactccttcctgaatatcagagttctttctctgagtatttcctcccatgcaaaatattgttctttctctttgatgatctaagtataacctctaggttcagacctcaactgctgtattcctcctgatccatttgtccagaaacagctcttagtagtcccctttcctaggccccctgctgatgtcagtatctaattctgtctttttcatcttttgtctaaatgaactcgactgattctcttgtaaattcagcctcttcttattttcaactctttttctaagcatctatcacctttcctatcttctgacttcccaatatattggcagtctatttttctgctttctgttttcatgttataactttctgttaaga

SEQ ID NO: 69040 - DNA, 667 bp, Homo sapiens
acagagggtccagggttttcagtacttacataggataaagtggtaacatttaaaatgcatatccctgaagggatgagctactagaaaattaattatcctctctttgcccccctcacagcctctctacatcatttattgtagctttggtgtcccactcccaccactaattttctttcttgagctttgtcctcaatttctgttgctacaatgcaatatcaatagaaggaagaatgacaaacacacacacacacacacacacacacacacacacasagagagaaatcctgaaaatgttccattgatctagagcagagaactaactttggatgttgttggcattggagggactgcagaatgctgaaaagacactactctgaaagtcctgtggccatggttcaagacccagctctgctacttactcactggggactcagccaggctcttaacctccatgagctgcagttacctaatttgtaaatggagataacggtcactgcactacagcctcccagggcttgttgtgtgagtcaaaggtgacaaacactgtgccatctctgtaaagtactaaataaatgcctggaatttgtgttatccttttagaacaatctcttagcttgtcacatcgaggaccctctcccctcagggacctttcctccatgactgtcct

SEQ ID NO: 69041 - DNA, 1162 bp, Homo sapiens
tggaattctccatatacatgtacagcctacatgttaaatatttgccacgcatgctttagagtcttgtatctaaagaaaattcttagcatgatttgactaaagggtctgcagatagaatagaggacactgtctggttagtacagtctgtgaatattcccatttagtatttttatatctaatgaaaagggataatcataagaaatttatatcagttacttggatcacatatcttttgcaaaacacaaaaaacaatatctaatgatagcttacttgttattgctcctcagatacctcccagttaattcttcaaattttcctcaatccagttcctaatttggagttctttgttgtcattaatggtaaacaacatctactctaaagtccccaacagaaacatgaagctattcattctctcattcamccatttatctaatttttatatgttaacatttaatatcacttacattaacctccattattcccaaacttcatataactttcatagggccaaacatcaatattttctaagatctctccaaatgattttactatttaccaggggttgataaacactgcattggaaagatggactgaataatgcaaaaatgcaagaaaaaatggtgcatccaggataagtagtttctcttcttgaattttataattccaagtattttttttttaaataaaattattttcttgcagttctggaggccaaaagtccaagatcaaggtgtcaggaggtttggcttcttctgagggctctcttgttggcttgccttctcactgttttcttatgtcgtcatttctgtatctgcatgtgcacccctgatatctctttgtgtgtccaaatggcctctcatagaaggacaccagttagtttggattagggcccacccaaatggtcttattttgacttaatcacttgtttaaaggcactatcaacaaatgcagtcaaattctgagatacaggggttggccttcaacatgtgaattttggagaaacacatttcattccacaacattgccatagtaaatggaacacaaaaaaaggcagaggttgcaatcctagtctctggtaaaacagactttaaaccaagaaagatcaaaagagacaaagaaggccattacataatggtaaagggatcaattcaacaagaagagc

SEQ ID NO: 69042 - DNA, 1162 bp, Homo sapiens
tggaattctccatatacatgtacagcctacatgttaaatatttgccacgcatgctttagagtcttgtatctaaagaaaattcttagcatgatttgactaaagggtctgcagatagaatagaggacactgtctggttagtacagtctgtgaatattcccatttagtatttttatatctaatgaaaagggataatcataagaaatttatatcagttacttggatcacatatcttttgcaaaacacaaaaaacaatatctaatgatagcttacttgttattgctcctcagatacctcccagttaattcttcaaattttcctcaatccagttcctaatttggagttctttgttgtcattaatggtaaacaacatctactctaaagtccccaacagaaacatgaagctattcattctctcattcaaccatttatctaatttttatatgttaacatttaatatcacttacattaacctccattattcccaaacttcatataactttcatagggccaaacatcaatattttctaagatctctccaaatgattttactatttaccaggggttgataaacactgcattggaaagatggactgaataatgcaaaaatgcaagaaaaaatggygcatccaggataagtagtttctcttcttgaattttataattccaagtattttttttttaaataaaattattttcttgcagttctggaggccaaaagtccaagatcaaggtgtcaggaggtttggcttcttctgagggctctcttgttggcttgccttctcactgttttcttatgtcgtcatttctgtatctgcatgtgcacccctgatatctctttgtgtgtccaaatggcctctcatagaaggacaccagttagtttggattagggcccacccaaatggtcttattttgacttaatcacttgtttaaaggcactatcaacaaatgcagtcaaattctgagatacaggggttggccttcaacatgtgaattttggagaaacacatttcattccacaacattgccatagtaaatggaacacaaaaaaaggcagaggttgcaatcctagtctctggtaaaacagactttaaaccaagaaagatcaaaagagacaaagaaggccattacataatggtaaagggatcaattcaacaagaagagc

SEQ ID NO: 69043 - DNA, 667 bp, Homo sapiens
tgaaggttatggagcacctccccttggtcccttaacagaacatggggtctgaagtctgcacacatcactctgaatgttacagaatttcagaatcgcagagctcccctgcctgtccccttgccctgaggcagcgagcgtgtctgcagcctccaggacacgagctcaccctactctactccactggctcctgggaaggggcttctccttccagatgctgcctagtccttctgtggactcaaaattcttccttccaagacatggagcctgacaacggaaggctgggttgagggagtctggcaatactgggtttgaatcccagactggccacgactgagtgaccttggggaagacatttaccttctctgtgccccagcttcctgctctgtaaaatggggacagtatcggcatgctgcccagaccactaaaacctcccatgcacggcrtctggtgaggctgaccttccaggcaggggagttactgccctcccccgacgccccccccccgggaggtggagctgaaatctgcctcctccactgctcccctgcagctggttctctgataccacacagaacaaggccagccaaagggtaagaaatattggggtcaaatgaccacagagtggagaatacacaaaagagctggattttcacccaggcccttttcccac

SEQ ID NO: 69044 - DNA, 1282 bp, Homo sapiens
tggatgttacctcatttttagagagagaaaaggaggctcaatgattttattttctattttaaataaaaattgactttctttagtctgtattctgctgaagcctcagtgattttaagcaagtggtccaaggccacccagccagtatgatgccgaagtgggctgaagccctggttgctctgattcctgggccctgctctctctgattcctgggccctgctctctctgattcctgggccctgctctctctgattcctgggccctgctctctctgattcctgggccctgctctctctgattcctgggccctgctctctctgattcctgggccctgctctctctctctgattcctgggccctgctctctctgattgattcctgggccctgctctctctctctgattcctgggccctgctctctctgattgattcctgggccctgctctgtgagcccttggggtcacacccaggctgacctccctgtgtgtacagacccaggttgatgaacacccctstggtcttcccaggcttcatctgggtccagaagcatctactgagcaggtggaactgttgcaggtcagagatgttgcagggtgaccccattctgtccctgttttagcagtgaaagtcgcacatccctcattcctgggcaaatcaagacagtcaccctagagctgtggtccagccaggtcctgttgctgcccctttgggcacccagaacctgatccctcacaacctgctgttttccaggcatttgtgcaccacctcccaatccttgggatcctccaggctgtggttagaggctgggacaggggttaaggtactatgaaaatgaggctcaggctgggcgcagtggctcacgcctgtaatcccagcaacttgggaaaccaaagcagggggatggcttaaggccagcagtttgggaccagcctgagcaacataacaagaattgtctttacaaaaaaaaaaaaagctacccaggcatggtggcaggcaccagtagccccggctactgaggaggctgaggcaggaagacaggaagatcacttgaccctgggagtttgaggctgcagcgagctatgatcgtgccactgcactccagcctcggttgcagagtgagacctcgtctcttaaaaaaaaaattaggctcatcaatgccagcaagaagtaacagcccaaatcaagtaagaccttgatttgtctttacaatggcctcgaaagacagcagcccccacgttcattttgactctccatggtcccctgactctctgtatatcctgtgacc

SEQ ID NO: 69045 - DNA, 657 bp, Homo sapiens
cccaaaagacaaggtgactgaggggcttgggattccctctaccccagacctctgtctggggmttcaaatcctcgcaataatctctatgtctaaacaaagctctttgatgaaataatttcacacctgtgatctcctttcatgacgtggagagagcctggaacctagagtgaagcagaggagggttgcagagtcacttgtgacctcttgatgcatccatggttccaagtgccactttaaaataggttatggcaggctgtgtgttacctgctcagttagtggggccatcacatctggctgtcaagtgctaaggggcatgttgtacttgccaagactggggaggttattaatggcccagtctcgtgtgggcaactgaagctcagagaggtaaaaccacttccccagggcctttgagtttgcttgtagaactgtttgagtgccagctgcataccaggtgccctggaagttacccagacgggctaagcggcagcctcgagccacagtaactggtgaatcccagatagtggtaaatcagacagaccaggtgggcgtgagtctactgtgcctcccactagctgagtggcactgagcaaatcacttcatccctctgagcctataaaattagaatacctcctttagcaggttgttgcgaggattaaa

SEQ ID NO: 69046 - DNA, 657 bp, Homo sapiens
cccaaaagacaaggtgactgaggggcttgggattccctctaccccagacctctgtctggggcttcaaatcctcgcaataatctctatgtctaaacaaagctctttgatgaaataatttcacacctgtgatctcctttcatgacgtggagagagcctggaacctagagtgaagcagaggagggttgcagagtcacttgtgacctcttgatgcatccatggttccaagtgccactttaaaataggttatggcaggctgtgtgttacctgctcagttagtggggccatcacatctggctgtcaagtgctaaggggcatgttgtacttgccaagactggggaggttattaatggcccagtctcgtgtgggcarctgaagctcagagaggtaaaaccacttccccagggcctttgagtttgcttgtagaactgtttgagtgccagctgcataccaggtgccctggaagttacccagacgggctaagcggcagcctcgagccacagtaactggtgaatcccagatagtggtaaatcagacagaccaggtgggcgtgagtctactgtgcctcccactagctgagtggcactgagcaaatcacttcatccctctgagcctataaaattagaatacctcctttagcaggttgttgcgaggattaaa

SEQ ID NO: 69047 - DNA, 723 bp, Homo sapiens
attgaataagtaatcagggcaccccagacaagactgtttggtgtggaacagatgagaaggcacaggcctgggggtgtgagtggggtcagtgcaggctgtgccctcagccccttggcctgaataactcccttgctcttcctggaggaaatcaattaagattatagcagccttcaaaaggtaaatgtactacagaagtgcaagaatcggctatggtagtctgtctctttcaatgtctctggctgggaagttcctccaggcatctgacctatatccctctctatagagaagctggttttgacactgccttttgcagacacagtcttcaggggaccctgtggggatggcctgagaacagtcttctgtcctaccaagtccttaattggcagtattagagtaatgagtcacagacaacaaccaattaattatccccagttataaaaagctctacttccccttcctggctgttgagtgagcctggcctcctgctgccaggctcctccactcctcagaactgggggcaagagaagaggccatttcacctctctggtccttggtttcctgcttctttatttgttaagcgtgtrtcctgggggactggggggcaaaggcttggaagaggtgggaatgtgtcaggctggggggcaggaaggagggagaccagcgtggatggagaggaaggggcccttcccaggctctctccacgcaccctctccactcccagga

SEQ ID NO: 69048 - DNA, 652 bp, Homo sapiens
ggatcccacctgcatgggaggagtactggaagcttatagcaggcagcatctttggacctggttgaactccttactgctctttcccatggtcacagcaggagaaagggtaagccttggcctacaaagctctggtgcccagtgtgtgtttgccaccaccccaaagggggcaaagggaggagaagctggctgccctgccagtgaccccgctgtggcccggccagcctgcctccagtcccgccaacttggcctggcctggcccagccagttcccaatcacagggtctcctctgccagctaatgaccatgctgcctgcagctcaggccaccaccctcctttgggcgaggcagctacccacacagcctgctggcccagacagtggccaggccaaaaatcacagctgcccgtcataccacatcctctggccctggtgctgtggtctcctcctcctccctccagggtcacgaaagacgatgtagaaagctggagctacaggggagctcagaacccaccctgctccccatagacatggacacaygggaccccagagaggggccgactcaccccaggtcacacagacaaccagccagcctgtgcacggcctagggcccaggtccttcctgggccccatgctcagtccaacactgcccttcct

SEQ ID NO: 69049 - DNA, 586 bp, Homo sapiens
catagcatacgaatagcaaaatcactggcacttaagtactttggagctgacttcagtcataatttaagtataaagagattgggggaagacagaacaaatagcccatgaaaactagttttagagttctttattcagtatgtgtttggggaaattgcaggatagacgactccaacaaatccaggttttagtgtctcttgggctcctgaagcctgggaaaggcaaagtgggccaaagctggcctcagtgtgtgtgggaactgcaggggatgggggttaggaggacagtttataaagaaaatggttcaaarctctattttgattcctagggtaaagtaggctaccaggaggaacacagagttcattcaaggcacaaagctcagattaaaatgtttcatcagctttctaacttccagcacgctcacacttgggcacatctagcagcctgtgtacacccagaattctgttgctttggggcaccaacaatacactgaaaccagtctatgatgattttcattctcaatcatgttagcgaaggctcagaacagttaacaactatgagaaggtcacacagccctcaaccctttgac

SEQ ID NO: 69050 - DNA, 586 bp, Homo sapiens
catagcatacgaatagcaaaatcactggcacttaagtactttggagctgacttcagtcataatttaagtataaagagattgggggaagacagaacaaatagcccatgaaaactagttttagagttctttattcagtatgtgtttggggaaattgcaggatagacgactccaacaaatccaggttttagtgtctcttgggctcctgaagcctgggaaaggcaaagtgggccaaagctggcctcagtgtgtgtgggaactgcaggggatgggggttaggaggacagtttataaagaaaatggttcaaagctctattttgattcctagggtaaagtaggctaccaggaggaacacagagttcattcaaggcacaaagctcagattaaaatgtttcatcagctttctaacttccagcacrctcacacttgggcacatctagcagcctgtgtacacccagaattctgttgctttggggcaccaacaatacactgaaaccagtctatgatgattttcattctcaatcatgttagcgaaggctcagaacagttaacaactatgagaaggtcacacagccctcaaccctttgac

SEQ ID NO: 69051 - DNA, 1013 bp, Homo sapiens
tttctggggacactgtctctagctttcatcagattcacaaaaatgtccatgtctcccaaagaaacattagcactactgttggataatcttgaaataagtcatatactctccaactctattttttcatgtataaaatcatttaaatattttatccaatcaacatcctcagcagaaatgtgtttgccaattcaacttactgttaatcaagttttaagctcatgttataagaagatctatttcgtttcttggatgggtataattgagtttgaagatctgaggaaagaaatgtttcctatatcttggccttcctccctatcagctggctgtgtttggggctgagaagaagtctgcatcagcacatgtgagtgtgtgtgtttacatgggccccaggggaagtgatgactgtgaggcaggctgtatgcctgtcctgaaatgtctgccctcctcttatcagaaaccaatgtgcgtgtttattctattccctcattaatctcctcccagcaaaccacagactgccacaagcagcttgatgtctcagcacacttggcagccaggcaggtcactaatgagtcctcagcaccctggccttgtttgttgctccccagcccaccaggaactggactctgctgggctgatgagaagtgggcggaagggagtgtactggccccacaaccaaggtgcgcacagggatggacagccccagagagtcccaatcctcacaccgtcaaaggacagcagacacaactgatgccagtttatatgaggttgacatgaagttcaaaccagcccactgctatttttagtggagaggttggcggtgtgattgcagagggccttatttaataaatcacctactcccgggattcgagaataaacaaacgctatgagcagtgtgaagctgccatcacccctcctgctctgcatttgctttctcacctttgctcgtcttctatttctgtttytctgttcccacttctgtacttccttcagctggctctttgagaaacacagct

SEQ ID NO: 69052 - DNA, 719 bp, Homo sapiens
cacatgattatgaatgttgccaagtccaaagatctgcagtgggtaagctggaatcccaagagagctggtatttcagttgcagtctgaaggaaggaaaaaaaccaataacttccagctaatgaaartcactcaggaggaaattccctcttattcaggggaggatctgcctttttgttctatgcaggccttcaactgattggatgaagcccattcacattagagatgacaatctgccttactcagtctattcaatgttaaactcatccacaaacaccctcacagacatacctagaataatgtttgaccagctatctagacaccccacagctctgtcaaattgacacataaaattaaccatcccagctagccttcccatttgataagtgacttctggtaactaagctcttcagtctagtcaatgccatggctgcaattcttccattgcaagccctctgtaaatctgatttgtgattagaattggtgtagcaaactgtcagcatcaatattgtaattaggaagagctaagagcccaggacttagagacatgcaaaagtctatggcaatggagagacaagcagaagagggagtccaggaccccagaaaaagaggaaattattgcagtatcatcaacccctcaaacaagccaaattacacaaagggaagataatcttttcaagttctatagccacaattacattgacagagacaagattaagaat

SEQ ID NO: 69053 - DNA, 687 bp, Homo sapiens
tccctctctctcatcttttatccttgctcaccgctttctctcctttctctcttcctcctcttcctcctcctttttcttctcctcctccccctcccctcccctccttctccttcctcttcatcttcttcttcttcttctttcagtctctctctccatgtcatttttctccaccttccatttcaccttcactgcctcactcttatctactacatacaaacttttttttcacatgtaagagacaaagaaataaagcagcccatggctgatacatttacgtctttaccatcagtgtaataggtttctccctcagctctaagaaaattctcagtaaagacatagattggctttcattctatcaagtctaaagactaaacaagtctaagactaagcacaatgaatagcaaaggaaggtcataagaagattgtcattcccattcaggccacacattagactgaagggtatgggaagtgagtattttcccctaaaaagcgggtaagtagggatgcccactgagagaatcattaggaacttaataaccagcctagtatgtggctataaagtataggtktgttgatatcctttattgcagatgataaattgagaatgagatgagttaagaaatttgctcaaagcatcatctattgctcataagagatctgaacaaggtggaatatatggtgtggcct

SEQ ID NO: 69054 - DNA, 502 bp, Homo sapiens
cttcagaagtaataagctgtctacaaagtttaaaaaaaacaacaacaacacacatatctgtactgatcgggatattggttagaaaaagcatttcagggctcaaaataacaaaattttatttttcacacttgataagtatacatttcargtcatctgggcctctgtttcatatccctttactccagaattcaggttgacagaacatctaacatataaagtgctgtcagttgtgatggtagcaagaaaggaatgtggtaaattgtccatatgaagagaactggcttcactttaagagaaagaccaccctgagaaaaaccatgtggctcttatgcttacatgtttttggcctaagcaaatctcatgactttgcctgacttcaaaagggtcagaaacttgccatcctaccacgataccatgatctgggaagtaggaagggtgggatgtgaagacagtcaacatcaggagctctcgtgactgccacaatcctcttcctccacttgaa

SEQ ID NO: 69055 - DNA, 913 bp, Homo sapiens
gcataagaatgatacaatggactcgggactcggggacagggtgcgaggcgggtgagggataaaagactacacattgggtacagcatacactgctcgggtgatgggtgcacccaaatctcgcagatcaccactgaagaacttactcatgtaagcaaacacaacctgtttcccaaaagcctatgaaaaaaaaagagamaaatgaataaaataaagaactaaaaacaaatgaggttcttaaaaggaattaatattacatgtgggttattgctgtgaatattgccatattagcaataaaaactgaaaaaaaccaagagtatcaattaatgtaaaagcaacaaaattcctttacacagtaacaaaaaaagaataaccatattttcacaaataaaaaaaagagaatgtgtcattattttacattttgccagtatcattaatgtctgatttaatagaatttagttagggactcatttctgttttcgtattcaatctgttggaataagttgttttgatcaaagtatctgaaaatgtggcctcatacagacatgtagtagggaaagggagaaatactctaacagacttttcaggtaactgtggctattcttctttgacactgacctgtaattgactgttagtactagctttttaaaggccaatgagatatggaatctgacacaatatcaggaaacttttcatactctgttatataaaaattattggcttattttatacttttttattatagtttaagttctgggatacatgtgcagaacgtgcaggtttgttacataggtagaaatgtgccatggtggtttgctgcacccatcaaccagtcatctacattagatatttatcctaatgctatccctccccttgccccctaccccacaacacgccctagtgtgtgatgttctcc

SEQ ID NO: 69056 - DNA, 1096 bp, Homo sapiens
cctatatgcacacatttcttttggtcatctacctagaagagaaatttctgggtcatacatctaccttcagtacatattgtacatactgcaaaatcgtgttccagagtggttgtgacaacttatactcccacaatcagtgtatgacagttccagttgctccgtctcttcaatgacacttggtattggtctttttgatgtaagatgtagtcatatttcattattttaagtcatagttctgtgattgctaatgaaactaagcactttatgattatttggtatttagagttcttattttgtgaaagtcctattcaaatctttttagacagaactttcagaaagttagaattagattatctgatatcacccaatgttatctaacatttgctcactttttaaaattaaaattttgctcactttttaaatcaaaattatgtctttttctatggatgtaaaggcgtaatgaatatattctggatatgagttctttatcagttatatatattgcaaatatttctttccactctatggctttgatttttacttttgagtgtgtgaaaacatacatttttaattttaatacagtccatttttctctacgatagtattgtttatatcctttcaaaaatttacataaatcaaggttatgtaaatagtgttctttctatctcctagaaaatttattttgttttccttttacattagaaactaaaatccatctgaaatttacttttgtatatgacatgaagtagagagyaaaattttattctttccaacgttgatattaaattcattcagcaccatttattggaaagattatccttcctttactctgccacagtaccaactttttcataaaccaagtgactgtatttatgtagacttatttctgggctctctgtccaatcactgcacacactgcactttcttaattagtgtacctttatagctgcagtgaatgagtcatggtatttagcaagttaagtctcctaacattgttcttctttttccagatagctttggttatttttagccctttgtattctcataatgtaagtatcaactggtcaatttccaccaaaacctactgcagagatat

SEQ ID NO: 69057 - DNA, 1096 bp, Homo sapiens
cctatatgcacacatttcttttggtcatctacctagaagagaaatttctgggtcatacatctaccttcagtacatattgtacatactgcaaaatcgtgttccagagtggttgtgacaacttatactcccacaatcagtgtatgacagttccagttgctccgtctcttcaatgacacttggtattggtctttttgatgtaagatgtagtcatatttcattattttaagtcatagttctgtgattgctaatgaaactaagcactttatgattatttggtatttagagttcttattttgtgaaagtcctattcaaatctttttagacagaactttcagaaagttagaattagattatctgatatcacccaatgttatctaacatttgctcactttttaaaattaaaattttgctcactttttaaatcaaaattatgtctttttctatggatgtaaaggcgtaatgaatatattctggatatgagttctttatcagttatatatattgcaaatatttctttccactctatggctttgatttttacttttgagtgtgtgaaaacatacatttttaattttaatacagtccatttttctctacgatagtattgtttatatcctttcaaaaatttacataaatcaaggttatgtaaatagtgttctttctatctcctagaaaatttattttgttttccttttacattagaaactaaaatccatctgaaatttacttttgtatatgacatgaagtagagagcaaaattttattctttccaacrttgatattaaattcattcagcaccatttattggaaagattatccttcctttactctgccacagtaccaactttttcataaaccaagtgactgtatttatgtagacttatttctgggctctctgtccaatcactgcacacactgcactttcttaattagtgtacctttatagctgcagtgaatgagtcatggtatttagcaagttaagtctcctaacattgttcttctttttccagatagctttggttatttttagccctttgtattctcataatgtaagtatcaactggtcaatttccaccaaaacctactgcagagatat

SEQ ID NO: 69058 - DNA, 1530 bp, Homo sapiens
tgcacaggttgtgcatctacaacaaggttcaaacaagaggattcaggccctgtgctgtgatcctattggtttcgtgatgttctggaagtcagtatgtctcagactcagcgaagaaggcaacttcctgttttaggtggcttgctaaataaaatcttctcttcctttctgaactccctgccccagccaaacccacacaaaataagggaagagaaacatactaagaataggaacttgaataatccctgaaagatagcaagcagagagaaccaaccatggcaagtgcccatgtcaagagggggatgaaagtctcgagatggttggaagcaacacagcattagtcatctcattgcagtgggagaagtcagaaaggctaaatctctacaccaaacagaaagacatggagtgcatggcttaaggctaggaaggagacttaatccgcttcgcagggcagagttctcaaggcaggtgacattgggaggatcaaggactcaccacagccaggaccagagcactgccccatagcacattccacgccttccccatttttaccgaaaccagcacacattccagcagcagcacctcccgcccacttcctccatcagaatgcaaggacaggcaacaagcagacaaatggtcattcagcgttacagagatgggttcaatccagaatcaccaaacatttcacaaagaacgccaccatgaacatcaaataaagaaacaaaataaaagaggctcaacagacagaacaactcaaatcagagggatcagagctaacagggaaaggagaataggactgtatatgtaggtttcatgtccacagagagataaaaaaatatttcagtcatgaacaaggctaggagttatgagacaagcacagacttgtgaaaaaggacccaagtagagatcttggaaatgagaagccactgggcaatggtcttaggtcaaatgatcacaaaatgaggtagaggaagctgatgaggcacaaacaaatcaaaaaacaaccaacagcgccagtgagagaagtccccagctgcaggatattttgagtaagggaaagaaagatgttgagaaaaaaacacgcggagtctaggcccacttcaaaatccaactaagatgttkctttagggtctactatgtttgtgtgattcccctcacaaattaagcatctgcagtgtcccctccagagaccatgaaggagaagacaggattcaagagaaaacactaaggatgcagaagtacagaggaaaggaaggggcagcacagctcagaggaacatgaagtgtttggcgaaaggggactcgtggtggacactcatgttgggaggagtaggaaaaattgcaagtatttattttcaaagatgttttcttaaaaactaggcaactgaaaggacattactacaattcttgaaaatataaacacacagctgaatctgtttgacaaagtaggacaagaaaatcagggaagaagtttttgcactaccacatcacattgctaaaacatgcctgagagtgaaaacgaactagatttata

SEQ ID NO: 69059 - DNA, 927 bp, Homo sapiens
tgcattagccaaatgggatgaggyttccaaagagaagcatgcctaatcagatgaggggaagggaaaggggctgtatttctgacaagataataatgcagagatgtctcttatccacatgaatgggccacagggaaaacactaataattgaaacacgcaaatgtggttaaaatctttaccttttatttcttcaaaacctaggttattgttgttttaaaattttctaacaaaaaagaagcattttctttagggaaacaggagggatttgagttagaaaggtagttgttaagtctaggtgagctaataatgtatgctaaggaaactgctgtgggcagatgcaggtgaaacagaaaatgggaggaataaggactgagcacctctttcctctctcaaaaagagaaaaggaagagatagaaatatgaaaacaacaccacacaattagcatgttggatggtaggatatgaaaatggaaaagggagatggaaacttcttagaatccccactatctgtcaggagtaatacataaaattacctcatttaatacacacaacaaattgatgagatatcattcatatatcccttccttccaacattcattcattcatctttcactcattcaatcatttattccaaaccatttaactagggtcctactatctatctgtctgccacaatgcaagtagctgatgacaaagagaaaacagagctcctgccttcaagtcgtctaccatccagtaaagacaatgtccacagaataaggaaactgagactcagaaaatgtgtcttacctaaggttttgtagatattcatcacccaagagaagatttattctccagtctttctgacaccatctaaacccaaactactcaattctggccagctatcacactcagctgatgggattccatccccagaggtgcagaatgaca

SEQ ID NO: 69060 - DNA, 946 bp, Homo sapiens
gtttatagacctccaaggtcatgtaaactacgaggtggccatgctagaatttaaacagcagtttttatttttgtgaaagtcttgttttctttccaagatattacagctgtcttacttcacaaaattgtcctgaggaccagataattgtaacatatatgagaggtaaaagaaaaaagtctaaccaatgtttggtagtgtgattattgcttttatattctagttaatttttctgtgatgaaaaagcaagtttccaaaggccctggctttgaagggaagtaatgcaacttggcccagtctctgggtttatcccagaaagccagttcccctccaactccctcctgcaggtgcagttttcagctgggccctcagacacagyccactttgcatcccacttcttgggaaaatttttcttaatgttcactagcgctaagatcattctgaaacctctccctgcaccactgcaagactagtgcattcttaaaccctgcagcccaaccgttacctgtgatttattttattgtcatttattcccacagacaatacacataaaaataaaggtagtaagtgtaagagcattttaattgccatcccactagtcttaaatgtccactgtttttatatctccccctcctaccctagaaaatttcagaatagagaagatcaatttatcatcttatcctcgtttcctgatctcaaattggaagatggacagtttttatgttaatagagagtcgtttagagtcagggaatttttcgaaggaaagtcgagatagatggatgaataggtggttgtgtgtgtgtgtgtattatatatattaatattaatagagaggcttcctttgtggcctcatgcagaatgcttaaagatcctagaaatgttgctgtaggaatggaagcagaagaagccgcaggcttcatggttgattgcttttctgattggtgccat

SEQ ID NO: 69061 - DNA, 864 bp, Homo sapiens
ttatttattccatccattattttcaatatccacaaaaagcccccatttaagtagcacagcctgcattttacagatgaggaaactaaactgaagttcagtaaagtcaggaaacttcatccagaaccactcatttctagtaaacagatgagcagacctgaaaacccagaatgagtggcatcaaaacgcgcactggtttctctacacagccctgattcggtctccacacgtagaaaatgaggttagacaacaatctctagggtcttccgtggccttgagagttgataaatctcattctggacttcctagcttcagcaggcagcctgaacatgttgagggtccggttatgaaaatgatcacagcagtcactttcaccttcctcacctccaccccttaatatttgtctcctttcccctgtaaagactgggtggacttttktattttcttctcggaagatgaatggctgactttttttttttaagagggactttttgctggggtggggagaacgaattgaaacagaagactttggtaaagaagtcacttgaaaaatgatcctatttcctttagagatgctcttgtaatataattatgagccatctgttaacctcctctccccttgcacgatctttctggttctcagcagatgatgtccccaggagcaaaccggcgaggatggggagatgaggctcttttgattgagcaccgaggaatggggtaacttgaaccacgcaagtcggagcaatttagaaaaggtgtagaaaatccaagcaagacataaataccaacaaatgttctagggattagcagataagtcgtatcgggagaaagcgagagagtcaaatttatatagttgagaaaggatcc

SEQ ID NO: 69062 - DNA, 864 bp, Homo sapiens
ttatttattccatccattattttcaatatccacaaaaagcccccatttaagtagcacagcctgcattttacagatgaggaaactaaactgaagttcagtaaagtcaggaaacttcatccagaaccactcatttctagtaaacagatgagcagacctgaaaacccagaatgagtggcatcaaaacgcgcactggtttctctacacagccctgattcggtctccacacgtagaaaatgaggttagacaacaatctctagggtcttccgtggccttgagagttgataaatctcattctggacttcctagcttcagcaggcagcctgaacatgttgagggtccggttatgaaaatgatcacagcagtcactttcaccttcctcacctccaccccttaatatttgtctcctttcccctgtaaagactgggtggacttttgtattttcttctcggaagatgaatggctgactttttttttttaagagggactttttgctggggtggggagaacgaattgaaacagaagactttggtaaagaagtcacttgaaaaatgatcctatttcctttagagatgctcttgtaatataattatgagccatctgttaacctcctctccccttgcacgatctttctggttctcagcagatgatgtccccaggagcaaaccggcgaggatggggagatgaggctcttttgattgagcaccgaggaatggggtaacttgaaccacgcaagtcggagcaatttagaaaaggtgtagaaaatccaagcaagacataaataccaacaaatgttctagggattagcagataagtcgtatcgggagaragcgagagagtcaaatttatatagttgagaaaggatcc

SEQ ID NO: 69063 - DNA, 353 bp, Homo sapiens
tccccctctgttttttcagtgatccatttgtttacttaagaaatatttggccaggcgcggtggctcatgcatgtaatcccagcactttgcgtggctgaggtgggtggatcacctgaggtcaggagttcgagaccagcctgaccaacatggagaaaccctgtctctacgaaaaatacaaaatcagctgggcatggcagcgcgtgcctgtaatcccagctacttgggaggctgagacaagagaatcacttgaacctgggaagcggaggttgcagtgagccgagawgtcattgcactccagcctgggcaacaagagtgaaactctgtctcaaaagaaaaaaaaaaagaaatttagt

SEQ ID NO: 69064 - DNA, 1413 bp, Homo sapiens
cgccctgactttgggcctttgtccatacagcaccacactgggcgtcagggtccttttgttgggatgagtggctctgtcactctttcactgagaccaaggctcaggcaatcaagcaatgcatttcaatcaacttctacaatgatccaatttctgggtctggctctgtttctctatttcccagttacttgcccaagaacatggctccatctaaaggaagtggcctacgggaatctgcgcacctctgctgtgaccgggaagctgggctctcattggaggttgttgggctgcagttcacggcccaggtgagaccasactgcagaacataatgtgcagatcaaggcaatgatgcctgtttctccatttcattagccacagctcactatgtgtcaagtcttgttttctccagtttagactcagaaactgacttccatcattgaaatagggctcgtgtctccttgtagtaactgcaaggctttagggaggtagaaaaaatttagtgaaaataattcagcaactcgtttgagctgaaaataacttgattcaaggactgtgccttcagatacttgggaggcatgaagatgaaggcatttgcagtcttgttttcctttgtgactggggcattaataaggctttgggattcacttcaaaatcattaaaaacatgttcactagtccaaagcacctctcccacctgtgtatgaaacaaatgaattggtgggaccttggatcctcgtagtttgctgctcctggggtagtccctcactaagctccttatcacacatttgcactgccaagatgatatttttggttaaaaagttataaatattctggaccaaaatattaccttgagattttgtccacctgacatccacttcattgagtgggaattctgcccaaagaattactgaagaatgaattcccctgtttatttagagcttgatatcttcataaccattttgactaacattaaccatttagtcattaggacccaggagcacagataattggtattgaggttcacatatgtggtgaatttcaagcaaagaggtctcaaatatgaataagtgaatagtgcccttaaagcttcttattcagaatctacaaagtgatgaaacaaaggcaaaaaaaaaaaaggtgggatccccgaaactagaaaaaccctagaagaaaatctaggcaataccattcagaacataggcacatgcaagggtttcatgatgaaaacgccaaaagcaatggcaacaaaagcaaaaatgacaaatggggtctaattaaactcaagagcttctgtacagcgaaagaaactatcatcagagtaaacagacaacctgcagaatgggagaaaatttttgcagtctattcaactgacaaaggtctaatatccagagtctacaaggaacttaaatttacaaga

SEQ ID NO: 69065 - DNA, 603 bp, Homo sapiens
ggatcccactgagagaacatcagtcaaatcgtcccttcgtctctggttccaaagtaccctgcaatcatttgtgccttcctccaaaatacctctttcactgccacatcagaagagctctttaaacgctaacaagaaccaatattttagattctactgctaggcatttcagctcaagtcactttattgtaaaattagatgtcattgtgaaaagcatggatataaatataagagcaaaaggcccttttcttaatgcagaaaccaaggtaacaatatcctatttttccttgttgtcaaaagttgtggtttttttttttttttgatagctcagccaatataatgcactgcatgtttacacttagcattaaataactattatgcaaaagtactccacagtaaaatctaagtatatttatggaaagctaaattatattgccaagtttattttagaccaaagaagcccctgggaagggatattgtgtattttaaagagtaaatgtaaactattaaatagaaagagsctttgtggaatgtaacacattctacctaggtaaatcacagagcaattacacagtaaacttttctttgatgaagcactgaagtgat

SEQ ID NO: 69066 - DNA, 730 bp, Homo sapiens
cacagaaagggttgtggcagctgcgtgccctgactatctggccctgtgggcctttattcagcacagatttaatgacaaaggctttgagtcaacacacctgtgggtaattaatctggtcgcagtcccccggagagagcagtcctacaaatgatcaaaggtaaacatgctctttagataaactctcttacatgtctttgtacttactcgaagctattaactcaaggtaaggggattaggctgctttcagctataaccctatcctgaggcttttgcaaaactttccacyttccaagaaggtttgtgtctatttcctataactttatctttataattattcccaccacctgaccaatcccctacaatgttggaattttatcttttagtgtaaacttggatttgggtggattgcagtggttcatgactataatcccagctctttgggaatcgaaggcaggaagattgcttaagcccaggagttccaggctgcagtgagctatgattgtgccattgcactccagcctgagtgacaggaggagaccctgtccccaaaacagaaaaataaataaaattttaaaataataaaaattataaacttggatttatgtggaggttaaggaagagaatatttcagtttgaaaatatgaagctaagccccacaacgaaatagttacagagttttaaaaaagaaaatgttcattaaaacccaccaccagaaactctctttcaagag

SEQ ID NO: 69067 - DNA, 684 bp, Homo sapiens
gagtcttaaatataggtgttcctgcccctattgagaggttttcaaaacatgctcttaatttaacgtttaaatataccagagtcttagaatgtgagaataatgaaattggtttgttttaattttgtgataatattaaatctactggaaagaatattctcctttgaaaagattctcagctcagtgatcatagaacctgtacttgcgtttaattcaatgaggaaagacatagaaatgccacgttaatatcctcatttaggtggtttctcccttcactgatcagcctatgaatgtgtcaatgcagtactccccagtttaggcttaggtacttattgaaaggatgctgcctgagcatttttaataattgctatttcaagatcacattttggccrtgaggcaggctgccactcactttaggctctgcctaggcaggaatgggtcctggaagacacatgttctctctctctctctctctctttcacacacacacacacacacacacacacacacacacacacacacacccctctcttctctctgggtacacattattctggacatcttcagtttccaggattctctatgtctccagctagaagtcagggcttagcctgtggtgatccagccaccctcaggttgaatctcgatgaagtcacaggaaccaccagtggcatggagggtaaggga

SEQ ID NO: 69068 - DNA, 684 bp, Homo sapiens
gagtcttaaatataggtgttcctgcccctattgagaggttttcaaaacatgctcttaatttaacgtttaaatataccagagtcttagaatgtgagaataatgaaattggtttgttttaattttgtgataatattaaatctactggaaagaatattctcctttgaaaagattctcagctcagtgatcatagaacctgtacttgcgtttaattcaatgaggaaagacatagaaatgccacgttaatatcctcatttaggtggtttctcccttcactgatcagcctatgaatgtgtcaatgcagtactccccagtttaggcttaggtacttattgaaaggatgctgcctgagcatttttaataattgctatttcaagatcacattttggccatgaggcaggctgccactcactttaggctctgcctaggcaggaatgggtcctggaagacacatgttctctctctctctctctctctttcacacacacacacacacacacacacacacacacacacacacacacccctctcttctctctgggtacacattattctggacatcttcagtttccaggattctctatgtctccagctagaagtcagggcttagcctgtggtgatccarccaccctcaggttgaatctcgatgaagtcacaggaaccaccagtggcatggagggtaaggga

SEQ ID NO: 69069 - DNA, 824 bp, Homo sapiens
tttgacaagacttgtgaagaattttgtaaaaagtaccccccaagatgacagtgttcrctgttggcagcaggactgtttccacgcagtagggctatgctgggtgtgcagtggagctgtgcacactgtgctcacggggcagattctgtgctgctgactctgatccctgtgcttgggaggaccgtgtccactgctgagtctacatctgaatttgattctcaagaaaaaggtcattcatagctgctggacactgagtcacacagagagacagaaggtggctgaggacaccttatctctgatgagaataaggggattagatctgctggtggaacaggaagctgaagaaacttctggctctaaacatggaatttccagccctctgtctctgctgtccatgcccttctcatctgtatgttcctgggagatgtggaccacgggggtcagaggtgaaggggattgggaagctttcatgttctctctcaccatctcccttgtttatctaacacactcttacacacctactttattagagcttctgctctacaaacatggctgagctctaaattagagacttttgaaagtgcagacggatgcaggaactcgtccatctggagactttccaccacttgaagcagtgaacacatctctgcaaggctccaaatttcaagtgacaggattttgggatttcaaagaaaactaaatctttggtgaaccacgacagaagagggaaggttcacacatttccctgctgcttgggcctcagtgaggactgactcagccagtctcaggctcctggaaacctcctaggagatgtgcactaggaaagt

SEQ ID NO: 69070 - DNA, 824 bp, Homo sapiens
tttgacaagacttgtgaagaattttgtaaaaagtaccccccaagatgacagtgttcgctgttggcagcaggactgtttccacgcagtagggctatgctgggtgtgcagtggagctgtgcacactgtgctcacggggcagattctgtgctgctgactctgatccctgtgcttgggaggaccgtgtccactgctgagtctacatctgaatttgattctcaagaaaaaggtcattcatagctgctggacactgagtcacacagagagacagaaggtggctgaggacaccttatctctgatgagmataaggggattagatctgctggtggaacaggaagctgaagaaacttctggctctaaacatggaatttccagccctctgtctctgctgtccatgcccttctcatctgtatgttcctgggagatgtggaccacgggggtcagaggtgaaggggattgggaagctttcatgttctctctcaccatctcccttgtttatctaacacactcttacacacctactttattagagcttctgctctacaaacatggctgagctctaaattagagacttttgaaagtgcagacggatgcaggaactcgtccatctggagactttccaccacttgaagcagtgaacacatctctgcaaggctccaaatttcaagtgacaggattttgggatttcaaagaaaactaaatctttggtgaaccacgacagaagagggaaggttcacacatttccctgctgcttgggcctcagtgaggactgactcagccagtctcaggctcctggaaacctcctaggagatgtgcactaggaaagt

SEQ ID NO: 69071 - DNA, 824 bp, Homo sapiens
tttgacaagacttgtgaagaattttgtaaaaagtaccccccaagatgacagtgttcgctgttggcagcaggactgtttccacgcagtagggctatgctgggtgtgcagtggagctgtgcacactgtgctcacggggcagattctgtgctgctgactctgatccctgtgcttgggaggaccgtgtccactgctgagtctacatctgaatttgattctcaagaaaaaggtcattcatagctgctggacactgagtcacacagagagacagaaggtggctgaggacaccttatctctgatgagaataaggggattagatctgctggtggaacaggaagctgaagaaacytctggctctaaacatggaatttccagccctctgtctctgctgtccatgcccttctcatctgtatgttcctgggagatgtggaccacgggggtcagaggtgaaggggattgggaagctttcatgttctctctcaccatctcccttgtttatctaacacactcttacacacctactttattagagcttctgctctacaaacatggctgagctctaaattagagacttttgaaagtgcagacggatgcaggaactcgtccatctggagactttccaccacttgaagcagtgaacacatctctgcaaggctccaaatttcaagtgacaggattttgggatttcaaagaaaactaaatctttggtgaaccacgacagaagagggaaggttcacacatttccctgctgcttgggcctcagtgaggactgactcagccagtctcaggctcctggaaacctcctaggagatgtgcactaggaaagt

SEQ ID NO: 69072 - DNA, 824 bp, Homo sapiens
tttgacaagacttgtgaagaattttgtaaaaagtaccccccaagatgacagtgttcgctgttggcagcaggactgtttccacgcagtagggctatgctgggtgtgcagtggagctgtgcacactgtgctcacggggcagattctgtgctgctgactctgatccctgtgcttgggaggaccgtgtccactgctgagtctacatctgaatttgattctcaagaaaaaggtcattcatagctgctggacactgagtcacacagagagacagaaggtggctgaggacaccttatctctgatgagaataaggggattagatctgctggtggaacaggaagctgaagaaacttstggctctaaacatggaatttccagccctctgtctctgctgtccatgcccttctcatctgtatgttcctgggagatgtggaccacgggggtcagaggtgaaggggattgggaagctttcatgttctctctcaccatctcccttgtttatctaacacactcttacacacctactttattagagcttctgctctacaaacatggctgagctctaaattagagacttttgaaagtgcagacggatgcaggaactcgtccatctggagactttccaccacttgaagcagtgaacacatctctgcaaggctccaaatttcaagtgacaggattttgggatttcaaagaaaactaaatctttggtgaaccacgacagaagagggaaggttcacacatttccctgctgcttgggcctcagtgaggactgactcagccagtctcaggctcctggaaacctcctaggagatgtgcactaggaaagt

SEQ ID NO: 69073 - DNA, 824 bp, Homo sapiens
tttgacaagacttgtgaagaattttgtaaaaagtaccccccaagatgacagtgttcgctgttggcagcaggactgtttccacgcagtagggctatgctgggtgtgcagtggagctgtgcacactgtgctcacggggcagattctgtgctgctgactctgatccctgtgcttgggaggaccgtgtccactgctgagtctacatctgaatttgattctcaagaaaaaggtcattcatagctgctggacactgagtcacacagagagacagaaggtggctgaggacaccttatctctgatgagaataaggggattagatctgctggtggaacaggaagctgaagaaacttctggctctaaacatggaatttccagccctctgtctctgctgtccatgcccttctcatctgtatgttcctgggagatgtggaccacgggggtcagaggtgaaggggattgggaagctttcatgttctctctcaccatctcccttgtttatctaacacactcttacacacctactttattagagcttctgctctacaaacatggctgagytctaaattagagacttttgaaagtgcagacggatgcaggaactcgtccatctggagactttccaccacttgaagcagtgaacacatctctgcaaggctccaaatttcaagtgacaggattttgggatttcaaagaaaactaaatctttggtgaaccacgacagaagagggaaggttcacacatttccctgctgcttgggcctcagtgaggactgactcagccagtctcaggctcctggaaacctcctaggagatgtgcactaggaaagt

SEQ ID NO: 69074 - DNA, 946 bp, Homo sapiens
tgtagtaatatatcttcaacttataagttgagctaattgaacattaacttagatagatcatttttatggggggattcctaaacctaaaacattgtattaaaaattttgtcaggttaaaagatcattaaaaggccaatgtttgattaaaatctggagtcttttactttgggctgcaatcagccaatgagtgcatggagttggctgccctcccagaccctgactggctccacgtcgaggtagagcagcgctcccgacaggcagctggaggaactgacgaggggaagctgtttgcatcagggcctcaaaaatttggctcaggattttcccacgtcccctccccaagcccaagctggtcccaggacactcagaagagctcatcattatgggtctaaaacttctctgatctcgctcttctttcttccttccccagagaccttggaattgtcagtccctctcacaggcccttcctttccttgtcaagtgcactccctgaattatctgctcctgggtcagcaattctctagaacttcagggaaagcagtgctgggtcacccacatggggccccagaaagctggctaaggaccagacacacaggcagcaggctaggtccccacagggctgcatggttggcatcgggtagaggggagggaccaggaaccactcgctgagtgtccgyagggccaggtgaactagggaagggctggaacctggtcaaagaattgtgtactaagcaccactttctctgttctatatgctacaactcaactttctctctctctctcttctctaattaacaatgatatcctgtctggtccaaggtcacacatttccagtgttgcaggaatgtctgttgaatctgctaatttgttgctgggaagaatactcaaatttctcatgctcatatttgattgtcaactgtctccagccagcatttctaaaccagga

SEQ ID NO: 69075 - DNA, 946 bp, Homo sapiens
tgtagtaatatatcttcaacttataagttgagctaattgaacattaacttagatagatcatttttatggggggattcctaaacctaaaacattgtattaaaaattttgtcaggttaaaagatcattaaaaggccaatgtttgattaaaatctggagtcttttactttgggctgcaatcagccaatgagtgcatggagttggctgccctcccagaccctgactggctccacgtcgaggtagagcagcgctcccgacaggcagctggaggaactgacgaggggaagctgtttgcatcagggcctcaaaaatttggctcaggattttcccacgtcccctccccaagcccaagctggtcccaggacactcagaagagctcatcattatgggtctaaaacttctctgatctcgctcttctttcttccttccccagagaccttggaattgtcagtccctctcacaggcccttcctttccttgtcaagtgcactccctgaattatctgctcctgggtcagcaattctctagaacttcagggaaagcagtgctgggtcacccacatggggccccagaaagctggctaaggaccagacacacaggcagcaggctaggtccccacagggctgcatggttggcatcgggtagaggggagggaccaggaaccactcgctgagtgtccgtagggccaggtgaactagggaagggctggaacctggtcaaagaattgtgtactaagcaccactttctctgttctatatgctacaactcaactttctctctctctctcttctctaattaacaatgatatcctgtctggtccaaggtcacacatttccagtgttgcaggaatgtctgttgaatctgctaatttgttgcygggaagaatactcaaatttctcatgctcatatttgattgtcaactgtctccagccagcatttctaaaccagga

SEQ ID NO: 69076 - DNA, 517 bp, Homo sapiens
tgggctccaggctgaggatgaggctgattattactgctgctcatatgcaggcagctacactttccacagtggtccaagttcctggggaactgagaccaaaacccaccctgggctctcaggctcccttttgctctgaagatgcttcctcaccctgtgcaargggcttcctgcagcacggccttgagaattcttctctctcagctcctctcctttcccaccatgaaatccaacaggaaacctgccctgtggtttctcatcccggacagggacagcttcctggtgcttgtgtgctgtggtccctgaatgtgcagctcttcccagctcttcaaatgcagggacagtgacaagcagctgcctgattggtgcagtcactgcttttttttcagagatgtcttcaccctacatgcatcaccatctcccacactgtgggtagaattttagccaaatatggctgggcgcagtggctcacacctgtaatcccagcactttgggaggccaaggctggcagatcatgagg

SEQ ID NO: 69077 - DNA, 565 bp, Homo sapiens
gctaatttttgtttttttggtagagacggggtttcaccatattggccaggctggtctccaactcctaatctcaggtgatctacccaccttggcctcccaaattgctgggattacaggcgtgaaccactgctcccttccctgtccttctgattttaaaataactataccagcaggaggacgtccagacacagcataggctacctgccatgcccaaccggtgggacatttgagttgyttgcttggcactgtcctctcatgcgttgggtccactcagtagatgcctgttgaattcctgggcctagggctgtgccagctgcctcgtcccgtcaccttctggcttcttctctccctccatatcttagctgttttcctcatgagaatgttccaaattcgaaatttctatttaaccattatatatttacttgtttgctattatctctgcccccagtagattgttagctccagaagagaaaggatcatgtcttttgcttatctagatatgcccatctgcctggtacaatctctggcacatgttacaggcaacaactacttgtggaattggtga

SEQ ID NO: 69078 - DNA, 630 bp, Homo sapiens
atgttacaataatggcattatttggaaatcccagtggtattccatgaataaaaccactatgaagataatcccactcaacagactctccgttggagaaggacagcaacaccaccctgggaaagccaaacagtcagaccagacctgtttagcatcagkaggacttccctaccatatctgctgggtagatgagtgaaaccagtgttccaaaccactccgggcttgtagcaaaccatagtctcctcatctaccaagatgagcaaccttacctcctgatgtcctagccaatcaccaactaggaaactttgcacagtttatttaaagtaacagtttgattttcacaatatttttaaattggagaaacataacttatctttgcactcacaaaccacataatgagaagaaactctaagggaaaatgcttgatctgtgtgacccggggcgccatgccagagctgtagttcatgccagtgttgtgctctgacaagccttttacagaattacatgagatctgcttccctaggacaaggagaaggcaaatcaacagaggctgcactttaaaatggagacataaaataacatgccagaaccatttcctaaagctcctcaatcaaccaacaaaattgtgctttc

SEQ ID NO: 69079 - DNA, 1520 bp, Homo sapiens
cgggtaggcggtgatctgcagctgtggccgcctgctcggacaggaaaggccttgacgtccagatcctgctggtgggagagccgtggcccaggctcctacattgccttggggaggagagtcaggccctgcagggaagggttgtgaacctgctctgggcaaatgggcctggctcctgggaaacttcgggcctgcagtaaccctactctgaccagaggaatccttcccctgtcgcattggcatccctcccctcactgttctcttcattctggacccccttgtcatcacgatgccagtgctgtccctttggtgtggggtttgtgctctgacctgaccctcaggccctgycagtgccctggcttccaggcagatctgggcaggcaggtctgagcccccggagctgggtaagcatctggggcatgtgaggattgcaggaggtgacccgggacagtgcctcacgcccagggtgaccagaaactgtgttcccttccctaacccaccgggtttaaactttttacttgctagccatagagctcttaatcagacaatatccaggggaacccccattatgtaaggcaggtaaagctggtggaagctctcccacccactagttgtccctgctcagccttggcacggggccactgtgggaccggagagctgggaagccaccacctcagtccctgccagtctctggtctgatggtgaggaggggtctggcctgctcagtggcagggtgcggaggtgaggctggtggctgttcttcagctgtgggactcgtgtggggacaagctgaacagtgtgctgatctctgatcaccactcaagccacaagtgactggacaggcatggacctgtgtcctcatagtgaggacccatggggcttcacccaggacagcctggttcgcctgccctccgatgctggtggaggggaggcaaggcagaggggactcctgtaaagggctgtttttttctgtcctggaatgagcacattctgagggtgagtggctgtcagcagttaggaaaaattgcctgttgacttgtttcattaagaggccccttgccgagggtgaggtcgcagcccggccctgctcagggaggaagcggtgtttacagagcggccagctggtgccgggtgaggaggtggctgatccctcgttatggagctgagaaggcctgcgcttccagcccattcctgccatgccgctgccctaatggctgtgacaatggatggatggatggacggagggccaggccaaccaggcagtgaaaacaggaaacctaatcttttaaaaataatccagggggaggggagaaagtgaagcagcaaagcccttaagccgacagatggccctggtggggtgtgtcttccaactgggtaggtgcttctcaaggctgaaaattccagtgagtcggtgaaagctgagcgtgcccaccaaagacacttgaatgggcggctggcattttcaagctctgttccttatgttagacgatgttgttttagcacaaagcctccccccggatccc

SEQ ID NO: 69080 - DNA, 1335 bp, Homo sapiens
gttttattccatttttctccatttttgttttctctctcttatttagattggataatttctattgatctatctttaagttcactgactccattgtcatctccattctgctgttgaacccctccaggtaattgtttattttttggttctaaaattcctatttggttcttttttatagcttctattttttttggctgagaaggcctgtctttttatttgtttcaagagtctttgtcctttcttcttagagcatggttataatagctgctttaaagtcttagtctgataattcaaacatttgggtcatcttggggttgatgttagttgattgccttttcctttcacagtttatgttgcttagttctctgtcaagtaattttgggttatatcctggacatcttgagtgtaatattatgagactccggaccctgtttaaatgttctgaaaatgttgactgatttttttttttttaaacaggcagtcaacccagttagattcagatggcatatcctggctcactttctcagctctgtggttccggtatccaccctgctgttgaccactsagggatcagtttgaaactgggcagtgatctgtgctgtgctgattctaagtgttttcacacatgtgcagtttaggggtgagcccagggcttcttatgaagatttaaaggatcccttctccagctccctcttctccatgatcttccctatactctctacttccccatgtcccccctttcaggtgttctgattagaaggcagttcccccctgagggtccactgttgctgtgctggtgaagggggcaggggcttcacctatttggtggcgcttggttagtgtagagtggaaagagtccacgggtctccaccccagggaggccgctgcttgcatctgtggggagaggaatggacacgttgtttgtgctggggaaaggtggataaagccaaaagagttcaatctacaggatttctccttcctgggcttttggttagagagagcaagcttttctgtttggttcttttttttttttcctcttgtctgtgcctgttggtagtttcaagctactctagtgcccatgctgggaggcaaaattccaaaaactggaaaaccagaaaaatcactgccaaggtgtccttaaagtcctgcaatctctgctcagtcctcctgcccttatctacctttttgagtcccatgatagaggtttcatgcagaatttgtacctgtggatagtgggaaaggctgtagtgtgctttttccatcttgcctggaattggaagttccaacttctacatttagacgtccttctctctgtgtgtggtgatgttccctgggata

SEQ ID NO: 69081 - DNA, 588 bp, Homo sapiens
tcagcttagacctctggctctttggctccaagctgtttrctccattatcagatggcgctactggctagaaagacattgcttacactaagctgagttgatcttccttggaaatgcccccttgtctctttctgttgctgcacatgggttaagcctgcatccccctccaacaacaggtgctcgccctcaaatgtttgaaagcagctgtcacgtcccattgaaacaggaatccttcaggctaaggagcccgctcctagactttagcgcagcggaaacatagttttcaaaagtctgtgcaattcactaaagagtgagttcatcttgtgatgtcaagagctgaattaatcagggactcaagaagcaattccagggaacctctgcatatctaggtttagagactcaaccgtgatgaaccaggcttgtcttatctccaaagcttatccaataggaatgggagggcaagacagtgactgcggtaggtggctggggacgtggcttgggagttaggaaccccaacctggtttctgaccctctctacacctcgtctagacctctgctcccttatctgtctaagcatctcttccacttccc

SEQ ID NO: 69082 - DNA, 588 bp, Homo sapiens
tcagcttagacctctggctctttggctccaagctgtttactccattatcagatggcgctactggctagaaagacattgcttacactaagctgagttgatcttccttggaaatgcccccttgtctctttctgttgctgcacatgggttaagcctgcatccccctccaacaacaggtgctcgccctyaaatgtttgaaagcagctgtcacgtcccattgaaacaggaatccttcaggctaaggagcccgctcctagactttagcgcagcggaaacatagttttcaaaagtctgtgcaattcactaaagagtgagttcatcttgtgatgtcaagagctgaattaatcagggactcaagaagcaattccagggaacctctgcatatctaggtttagagactcaaccgtgatgaaccaggcttgtcttatctccaaagcttatccaataggaatgggagggcaagacagtgactgcggtaggtggctggggacgtggcttgggagttaggaaccccaacctggtttctgaccctctctacacctcgtctagacctctgctcccttatctgtctaagcatctcttccacttccc

SEQ ID NO: 69083 - DNA, 751 bp, Homo sapiens
  misc_feature (1)...(751): n = A,T,C or G
atttagccaaggatttcaaggctgcagttagctatgattgagccacttttctccagcctaggtgacagagagtgaggccctatctccccgcaacctcaaaaaagaaattttttttaaaatgaggaarttaaggttgggcatggtggctcatgcctataacagtttctgcccttgtggagcaataaacaaaataagtaaaatataaatgctagatggtagagagcacccaggaagaaagtaaagcagggaattgggacagcaagggtgaatggcattgcacatttaaattggggggtcagacactgtgggaggccgaggcaggaggactgcttgagctcagaagttcaagaccaacgtgggcaacatagtaagacctcatcctttttttttttttttttngggagacggagcctggctctgtcgcccaggctggagtgcagtggcgcgatctcggctcaccgcaagctccgcctcctgggttcacgccattctcctgcctcagcctcccaagtagctgggactacaggcacccgccaccacgcccagntaatgttttttttggtttttttggtggagacggggtttcactgtgttagccaggatggtctcgatctcctgatcttgtgatctgcccaccttggactcccaaagtgctgggattacaggtgtgagccactgcgcccggccanaaganctcatctttacaaaaaaatcaaaaaattagccaggtgtggtggtgcacacctgtggt

SEQ ID NO: 69084 - DNA, 751 bp, Homo sapiens
  misc_feature (1)...(751): n = A,T,C or G
atttagccaaggatttcaaggctgcagttagctatgattgagccacttttctccagcctaggtgacagagagtgaggccctatctccccgcaacctcaaaaaagaaattttttttaaaatgaggaagttaaggttgggcatggtggctcatgcctataacagtttctgcccttgtggagcaataaacaaaataagtaaaatataaatgctagatggtagagagcacccaggaagaaagtaaagcagggaattgggacagcaagggtgaatggcattgcacatttaaattggggggtcagacactgtgggaggccgaggcaggaggactgcttgagctcagaagttcaagaccaacgtgggcaacatagtaagacctcatcctttttttttttttttttngkgagacggagcctggctctgtcgcccaggctggagtgcagtggcgcgatctcggctcaccgcaagctccgcctcctgggttcacgccattctcctgcctcagcctcccaagtagctgggactacaggcacccgccaccacgcccagntaatgttttttttggtttttttggtggagacggggtttcactgtgttagccaggatggtctcgatctcctgatcttgtgatctgcccaccttggactcccaaagtgctgggattacaggtgtgagccactgcgcccggccanaaganctcatctttacaaaaaaatcaaaaaattagccaggtgtggtggtgcacacctgtggt

SEQ ID NO: 69085 - DNA, 695 bp, Homo sapiens
ccccacatatatctaaagtctaaagttgtttttttaaaaaaaaaaaagaaaagaaaagaaaagaaaaaagaaaatagccaggcgcggtgctcacgcctgtagttctagcactttgggaggcgaaagtgggtggattgtttgagctcaggagtccaagaccagcctgggcatcacggtgaaaccccatctctactttaaatatacaaaaaattagccaggcatgscggcgtgtgcctgtagtcctggctacgagggaggctgaggcaggagaattgcttgaccctgggaggcagaggttgcagtgagccgagattgtgccactgaactccagcctgggccacagagcaagactctgtctcaaaaaaaaaaaagaaaagaaaagaaaagaaaaaaaataaagccctgttgaggacttgtaatatatcaggaataatgcaaaaaaaaaattattcagacattttgcagcatgaaacacttcagtaaatttatgaagctttagtttggtcttttcctttttctcctgagggtgatttttatcagttcctcaagattttttattagtgtttctctgtggctctcaaaaacttctttatttttatgattatttccttatattttagagactgggtcttactctgtcacacaggctggagtgcagtggcgaagtagctcactgtcaccttgagccatgatca

SEQ ID NO: 69086 - DNA, 695 bp, Homo sapiens
ccccacatatatctaaagtctaaagttgtttttttaaaaaaaaaaaagaaaagaaaagaaaagaaaaaagaaaatagccaggcgcggtgctcacgcctgtagttctagcactttgggaggcgaaagtgggtggattgtttgagctcaggagtccaagaccagcctgggcatcacggtgaaaccccatctctactttaaatatacaaaaaattagccaggcatggcggcgtgtgcctgtagtcctggctacgagggaggctgaggcaggagaattgcttgaccctgggaggcagaggttgcagtgagccgagattgtgccactgaactccagcctgggcsacagagcaagactctgtctcaaaaaaaaaaaagaaaagaaaagaaaagaaaaaaaataaagccctgttgaggacttgtaatatatcaggaataatgcaaaaaaaaaattattcagacattttgcagcatgaaacacttcagtaaatttatgaagctttagtttggtcttttcctttttctcctgagggtgatttttatcagttcctcaagattttttattagtgtttctctgtggctctcaaaaacttctttatttttatgattatttccttatattttagagactgggtcttactctgtcacacaggctggagtgcagtggcgaagtagctcactgtcaccttgagccatgatca

SEQ ID NO: 69087 - DNA, 695 bp, Homo sapiens
ccccacatatatctaaagtctaaagttgtttttttaaaaaaaaaaaagaaaagaaaagaaaagaaaaaagaaaatagccaggcgcggtgctcacgcctgtagttctagcactttgggaggcgaaagtgggtggattgtttgagctcaggagtccaagaccagcctgggcatcacggtgaaaccccatctctactttaaatatacaaaaaattagccaggcatggcggcgtgtgcctgtagtcctggctacgagggaggctgaggcaggagaattgcttgaccctgggaggcagaggttgcagtgagccgagattgtgccactgaactccagcctgggccacagagcaagactctgtctcaaaaaaaaaaaagaaaagaaaagaaaagaaaaaaaataaagccctgttgaggacttgtaatatatcaggaataatgcaaaaaaaaaattattcagacattttgcagcatgaaacacttcagtaaatttatgaagctttagtttggtcttttcctttttctcctgagggtgatttttatcagttcctcaagattttttattagtgtttctctgtggctctcaaaaacttctttatttttatgattatttccttatattttagagactgggtcttactctgtcacacaggctggagtgcagtggcgaagtagctcactgtcmccttgagccatgatca

SEQ ID NO: 69088 - DNA, 461 bp, Homo sapiens
aaacatcttactgttacaaagaatgccccagtaagcctcttctctctataaggtatgtgatccacacagagagatttccttaagacaaacatctcaagtgaaattggcaggtgaaagagcagaacattttattgagagatattggtaaaatatgtgaaagacatgttggaagtttattctacagccagcagggcctaagatcatccacctcaccaatcccttatcagcaccttgaccttcttttcagctctgctcactggcaaggtaaaaacttctcattacagtgagatctaattcacattctttattstctggtaaagtttagctgttttccacacagttgtgactgtttcttaaatccgtctttgattcatgtggttctcagttaaagccacgcagagcaggaggggcagtgaggtggcgagcaccgatcctgggcagaagccagctgtcctccgctg

SEQ ID NO: 69089 - DNA, 728 bp, Homo sapiens
agtggctctctgatgtgtcaggggtctccgagctgtgactgtctgtgactcgaggagctggcaatggggctgtcccacagggaggtttatggcgctctcccatgccggagtctgggcgttgagagtccaggtggctcctgctgctgagggccgcctttgggatctgtgaaggatgcaatgcagctctggggcctgaccgctggggtccagatccagacgctgcccctgaagagctgcaggcggccttggtgcctcagtgatctctgcagtggacacgaaatggagatcgtaatggcaccagtcccttggttggtgtgaacactgagcgaggcaaaaacagcttagaaccaggtatggaacgcagtaagtgtccagtatgcgttgctcttgtgatcatcgttactgtcactttctttgtygctgcctgtggctttcctctgcttaaaatggtggccgcatctctgctctgtccctgtcctaggtttggagagagggagatggtgcagggtgcagggccgaggccaaagcacgcctcagctgagcctatgtgttttcggaagctttcctggaacccacacagcgatgtcctccatcagccacacccttgccacccaccagccacaggggacctggagaagatgtgggtggagacaggaggcaaggaagagggtctgtgtgtgtgtgcatgcaggctgccagaccagtgtgtgccccggggagaggtatgg

SEQ ID NO: 69090 - DNA, 727 bp, Homo sapiens
tccatttctgcggtttcttgtgagctgaagccctgaattcagccttccccttccctccctgccctgcgccctgtcccttactgagctgcctcacaacagccatcagaacccaggaaagacggtgagccctgcctgagcagctctggggccgtgactacactgggcaggtgtgtgtgcagactcgcgtggccatgtccctggaaggggagctggactcaatggcctaggctggccctgccaggcctaagacatgaggattgctgacttagctataaagcaattcccaccagacatcgtcatctgggtcacagatccctcttgccagcatccagcccagaggccaccgcccttcccaacagtccctcttcttcatcccctaccaaacgggctgagtgcagttagtgtccctccacaggcagcccaccccagcttcacttgcaagcacttttttccactgtctactgggcatgccaactgccaggttctctctagtgtgctaggcacacggggcctcctggtcctcaggcagacctcccccatccactaggctgcctggccactggcccttccttcctgaatgtgcattctcctygattctgctctctcttggattcttctaggtgcttggtcatgcttgagtcctgctcctcagcatctgctcacgccagggacccacacctctctattcccaaacattactaaacagcccgtgtgcccttcgccagcc

SEQ ID NO: 69091 - DNA, 1139 bp, Homo sapiens
tcccacccagaaggcgggaaggaagtagtttcttctggggtctaagaaggtggaagccgtttctctccatggcagaaacagaggtggtgggcgagtgtgctcaggattggggccctgcagggaatcaccacggtgctgcttttcatgctcaggtcacgtaggggccttggggtgatctcagggatgagcccatcagctccctctttttcattgtaaccgcttttctaagaggcaagcagagctttggtcatgggctcatctctgccgtcaaatcgctctgactttgcgcagatctcttcggatcaaggtgcacgttaagttctggagtgtgggaaataaacgggctcgtttgtgcttagagccrtaagacaactaacagataagagatgtgggaagctgtagatacaaagagtctccggagcatgtgctcagggttactcccactttcactgaaatgccagaggaccactccatcatgaatgtgtaatttggaaccttattgctaaaaaaggccttaaccagcacttaacttccactaaatgctccaattggctctgaaacgatcactcagcccatggcatcgtgcagcctgttctagtcccttctgtgacggggagttcacctccttcccagtgcccttcgctggcccagtacttaagtcttctgggtgacagcctggctcctatttctctctctctctttgccccctggtttctgatcgaggcagtgcttatccctttgtatgggaagcccatcataacatgtcccccatctgtctcccatgtagctgcaccaagtgtctggacacgattacgtcccaaccctgacatcctggaccactccctgcagaccccagggtggactgagggatcccagggtgcctgagtagggggcagaaccaggtccaggatggagaacagtttcctgctggagtgggctgggagacagaagctggaggaaacggttaaacaggactccctttgccatccccataacagcacctcccatttaaaatcagctttcaagctagagaactccttccacattcaggatttcagctcttaacgttgcataaagtagacattattgctgtcctttaacacgcggtcgagtagttggggcatcagctttgagtcagt

SEQ ID NO: 69092 - DNA, 1480 bp, Homo sapiens
taaggatgaggagagtggagaccgccagcctgccaccgcttctcagagtcccggggtcactgcccctgcccagctcgggctctgtcacctctttccttggtttcctcactggcctcctggccatgggttcccagctgtcctgacaccataaccagggaattgtctagaacgtgtcttgctttgtgtccctctgcagagccggacagcagaatggaggccaggctgctgcttttagagctcaggaagtcagtctgcctctgccccatrtaactggcccttctgagtctctgggtctcccagccacctgggctgtatggcatgcctcttctctcctttcccacggtccaaagcacacttgacttgccagagcctactggaattctcctccataagctgtccttccaggaacttacacacaacttgcccatagcagaggttttaaactgctttttagtggtagaacccctttatcaaagcaaaagaagtagaatataagcacataaaatagcttataaaaaggcagctcgggccgggtgcagtggctcacgcctgtaatcccagcactttgggaggccgaggcaggtggatcacaaggtcaggagatcgagagcatcctaacacggtgaaaccccgtctctaccaaaaatacaaaaaattagccgggcgtggtggtgggcgtctgtagtcccagctactcgggaggctgaggcaggcaaatggcgtgaacccgggaggtggagcttgaaatgagccgagatcgcaccactgcactccagcctgggtgacaagagcgagactctatctcagaaaaataaataaataaaaatttaaaaataaaaataaataaacaaataaaaaggaagctcagagccaggcgtggtggtgcatgactctaatccctgcaactcaggaggctgcagcaggaggatcacttagggcgagtaatttgaggctgcagtgagccatgcttgttccgctgcactccagcctgggcgacagagcaagaccctaactctaaaaaataaagaataaagcagctcaggctgaagctggagcagagggttactgcgatcagttgtgcatttctggaggttcaccccggcagcatgtgcaggatgtactggaagagggagacagaacacctcaggcccccgaatagattggtccttgggtcagcaagactcaggtgacacccagacagaggcccccaccccgcgggctctgttcctctgtaggaccttgtgctcatcaagaatacagacgtgcaggcagcccgcctgggaaacatcatccacgccatgatcatgtatcgccgtaaactggaccgtgaagaaatcaagcctgtgagttgcgtcagggttgaaggtgggatgggaggggagacctgagtctgagccatgctgggccttccctcaggtgatggcactgggcatagtgcctatgtgctcctaccagatggagaggatgttcaacaccactc

SEQ ID NO: 69093 - DNA, 1480 bp, Homo sapiens
taaggatgaggagagtggagaccgccagcctgccaccgcttctcagagtcccggggtcactgcccctgcccagctcgggctctgtcacctctttccttggtttcctcactggcctcctggccatgggttcccagctgtcctgacaccataaccagggaattgtctagaacgtgtcttgctttgtgtccctctgcagagccggacagcagaatggaggccaggctgctgcttttagagctcaggaagtcagtctgcctctgccccatgtaactggcccttctgagtctctgggtctcccagccacctgggctgtatggcatgcctcttctctcctttcccacggtccaaagcacacttgacttgccagagcctactggaattctcctccataagctgtccttccaggaacttacacacaacttgcccatagcagaggttttaaactgctttttagtggtagaacccctttatcaaagcaaaagaagtagaatataagcacataaaatagcttataaaaaggcagctcgggccgggtgcagtggctcacgcctgtaatcccagcactttgggaggccgaggcaggtggatcacaaggtcaggagatcgagagcatcctaacacggtgaaaccccgtctctaccaaaaatacaaaaaattagccgggcgtggtggtgggcgtctgtagtcccagctactcgggaggctgaggcaggcaaatggcgtgaacccgggaggtggagcttgaaatgagccgagatcgcaccactgcactccagcctgggtgacaagagcgagactctatctcagaaaaataaataaataaaaatttaaaaataaaaataaataaacaaataaaaaggaagctcagagccaggcgtggtggtgcatgactctaatccctgcaactcaggaggctgcagcaggaggatcacttagggcgagtaatttgaggctgcagtgagccatgcttgttccgctgcactccagcctgggcgacagagcaagaccctaactctaaaaaataaagaataaagcagctcaggctgaagctggagcagagggttactgcgatcagttgtgcatttctggaggttcaccccggcagcatgtgcaggatgtactggaagagggagacagaacacctcaggcccccgaatagattggtccttgggtcagcaagactcaggtgacayccagacagaggcccccaccccgcgggctctgttcctctgtaggaccttgtgctcatcaagaatacagacgtgcaggcagcccgcctgggaaacatcatccacgccatgatcatgtatcgccgtaaactggaccgtgaagaaatcaagcctgtgagttgcgtcagggttgaaggtgggatgggaggggagacctgagtctgagccatgctgggccttccctcaggtgatggcactgggcatagtgcctatgtgctcctaccagatggagaggatgttcaacaccactc

SEQ ID NO: 69094 - DNA, 633 bp, Homo sapiens
cttattctgttgccaaattctatttccacagatcacacaggtgctggagtctcccagtctcccaggtacaaagtcacaaagaggggacaggatgtagctctcaggtgtgatccaatttcgggtcatgtatccctttattggtaccgacaggccctggggcagggcccagagtttctgacttacttcaattatgaagcccaacaagacaaatcagggctgcccaatgatcggttctctgcagagaggcctgagggatccatctccactctgacgatccagcgcacagagcagcgggactcggccatgtatcgctgtgccagcagcttagccacagtgtggcatagtcgyctccttcctgttcacaaacctcatccttctctctccttgcacctcctagagacccttaacagaggcctctctttgctcctcacttttgatgggaaagaagtagatttggacatcggctgtcctttgggtagaaagagaccacagattcattcctgaaacacagtgactgcaaatgtaggtggtgaaaacaatcacgtcccactgccctctaggagggctcggagccagctcactgctcgaaacagggagtgggtgtcttagccttggccttcagggcagacatgc

SEQ ID NO: 69095 - DNA, 1325 bp, Homo sapiens
ctctgaagatccagccctcagaacccagggactcagctgtgtacttctgtgccagcagtttagccacagcgctgcagaatcacccctttcctgtgcagaaaacccggtgtttccccttctccttctacctcccagcagtcctgggcaaagtctctgctgttcctccctccctatgagaaaaaagtggtttgggggtatgaaaaagacagaaaatgagaagggatcaacataggaaaccttatgttggtttgaggattacaaaatgggttttgaggattccttaaaaattgtctctgctcaaaacacataggagtaagataaaccttggctactgacactggagatttccctgccctcctgcatttgccatcccatgagaatggtgggggctcttgagaagggctgcattttctgaactgtgaggccctcttcattctctcctaactctaagctgcaaacagaaatttccctcacacgttttctagattgtaaaagaaagttcttctttactatgattgtggacgttcctttataatgccaatttcaactttacattacttcaggatttttcactactcctaaagagtgtctcaaatgtggctagagcaagcaggttagtacactagatgtaagctacctggcctggaatctaaggatccatttgtctctgttctgcgtaagatgagccgggtgctggccaaaggctgtgcacactcacagagcactgatgacgcctcctggtaaggacccacactggggtatctaaaagcagacaggcatgtccagtcttctgttgccctgtttcctttctgattatatgtccttaacacacaaatttacattttccttcttatttatatgagaagtttctatacaatacctgcaatccattctgagtggttataatttctgtgtgatattcatatttacatgctgattccttctaaatacctatcatggtatcattgacaactgaggcaaaagacccctatattttgagtgcccaaggccattgaggttttttggagctctgccataagcccaattccactgtgtcattttcctatttttctttccttttttkttttttgattagtgggtcctgactttcaagatgaaaatagtgcagaattcctccctgctgcttccagatcattttccttcctacttctctaaagcccagctgcattataggcttcctttagcctgattttaaattccttccatgtgatcatgcatctgtctctacctgtatcttgtatctggcttctgcctcttacccatcaatcccatggctactagaaggtattcaatctctgttgaca

SEQ ID NO: 69096 - DNA, 1751 bp, Homo sapiens
tccgcagggtacctagctatgtgccctgcaggcacagagacttgggagccacaggcagtgatgatcaccaggggtggcagagctccctcccttgcctagcctcactgtgcttgttaaggatttctaattagcagaaagcaatcacaggctgggagcgccacccctaacatgctattgacttgccttctcccttcccatctccactccagttgctgccccctttgatgatgatgacaagatcgttgggggctacaactgtgaggagaattctgtcccctaccaggtgtccctgaattctggctaccacttctgtggtggctccctcatcaacgaacagtgggtggtatcagcaggccactgctacaagtcgtaagtgtggggcccccgactgcaaagctcccggccagtctgcctgggagagcttggcttcagcccagggaactactgaggttgggtaagatggatgggagaggtggtggagaagaaaacttgttggcagctgcggactctccagagcagagagtgaacmcaagacaggaacctctcacacccaggcaaatccatgaaacagcaagggttgtggtcataaaagcaggcagggatgatcttggggtggtgagagctagtgagaaaagcaggcaagtatcttttgctggttagctacacattaaagccaactaagaaagactttttaaaaatacagatgcctttgtcctatcccagggcaattaagtcaaaattttcaggaagagggtgtgaatatcagtgagaattttacactctacctctgctaactgtagagtgtatagacagagctgagaactgctgcctacaccaagaactctcaaacctgagtatgcatcagaacgccctgcaggcttgttaaggcacaaatcactgggccccttccccaaggttctgatcagtaggtgggggtaaggaccaagaattcacatttctaacaagttcccaggagatgctaatgctatggctacccttggattagattacacagaagggtggttctcaccaggccaagaatggagggaggaacaggcactgtgcacagttggcaaaggcctggggtgaagaatgctgggaaaacttcaaggagctccttgtgcccacagtgctagtgactgtggagattgtgggaaagagtctggggaggcaggttgaggagcagcctctggtgggatccctttgactcttccccaccccactaccaccaacctctggagcagataggtcctgggtctcataccttcactgacccacatccctctgctgcccatgcgatatggccacacaccccaccccatgcctccagagctgtccatgagcagagagcttgaggaacctggggaaggtgggataggtgccctggctgtgggagaaggtcttcaccatgcctgccctgcccatcagccgcatccaggtgagactgggagagcacaacatcgaagtcctggaggggaatgagcagttcatcaatgcagccaagatcatccgccacccccaatacgacaggaagactctgaacaatgacatcatgttaatcaagctctcctcacgtgcagtaatcaacgcccgcgtgtccaccatctctctgcccaccgcccctccagccactggcacgaagtgcctcatctctggctggggcaacactgcgagctctggcggtgagtgggacccttagtccttctacttccctccatcctcacaatttccagaacaaaccatgcccctta

SEQ ID NO: 69097 - DNA, 962 bp, Homo sapiens
taagtctatttgggtgccaaaaaatgtgtattctatttggacattacagtggattgacagcatagaaattatttattaaacccatcctactggacctgaaggtgaaccccatcgtaacagggtgcctggtagagtcattcttaactagccatcgatttgtaaaaaattgcaaaagttgttttttttkttgtttcttttttgtttttttttttttttttgagatggagccctgctctgtcgccagactggagtgcagtggcatgatctcggctcactacaacctccgcctcccaggttcaagcaattctcctgcctcagtctcccgggtagctgggactacaggcgcccacaaccacgcccggctaatttttgtactattagtagagacagggtttcaccatgttggccagaatggtcttgatctcttgacctcgtgatctgcctgccttggcctcccaaagtgctgggattacagtaaaaatttcttatatcaaatgaccgttcttgaattgttaccttggattaacagggagcaaatattggcatttccacacagcaatctactatctggggataatctagctttcctggagggatggaaacaaagtgcataatggttgtttaccaatcatataatatcagacaccaataatttgtcattcactctagtgttctacaatcattagaggagctattcaactgctctcagacataccagctatgatcatgtaggaaacgtgattccgtgggctgaatgtaccaactcttcactaacatctcaatactctagactgaagttaatgaccagtgcaaaccaccagagtattacagtaaaagaacagcagtaaaaaggccttaataaatcagaaatttaaattggctattcattttagttacagccattcgtcagagcaaagtgatggtccaattcacctatgtggtaacttacattgatcataaca

SEQ ID NO: 69098 - DNA, 962 bp, Homo sapiens
taagtctatttgggtgccaaaaaatgtgtattctatttggacattacagtggattgacagcatagaaattatttattaaacccatcctactggacctgaaggtgaaccccatcgtaacagggtgcctggtagagtcattcttaactagccatcgatttgtaaaaaattgcaaaagttgtttttttttttgtttyttttttgtttttttttttttttttgagatggagccctgctctgtcgccagactggagtgcagtggcatgatctcggctcactacaacctccgcctcccaggttcaagcaattctcctgcctcagtctcccgggtagctgggactacaggcgcccacaaccacgcccggctaatttttgtactattagtagagacagggtttcaccatgttggccagaatggtcttgatctcttgacctcgtgatctgcctgccttggcctcccaaagtgctgggattacagtaaaaatttcttatatcaaatgaccgttcttgaattgttaccttggattaacagggagcaaatattggcatttccacacagcaatctactatctggggataatctagctttcctggagggatggaaacaaagtgcataatggttgtttaccaatcatataatatcagacaccaataatttgtcattcactctagtgttctacaatcattagaggagctattcaactgctctcagacataccagctatgatcatgtaggaaacgtgattccgtgggctgaatgtaccaactcttcactaacatctcaatactctagactgaagttaatgaccagtgcaaaccaccagagtattacagtaaaagaacagcagtaaaaaggccttaataaatcagaaatttaaattggctattcattttagttacagccattcgtcagagcaaagtgatggtccaattcacctatgtggtaacttacattgatcataaca

SEQ ID NO: 69099 - DNA, 880 bp, Homo sapiens
acttgaggcagtctgtctgttttcagagctcaaacgctgtgctgggggaacaactgctctcttcagagctgtcagacagggacgtttaaatctgcgaaagctgtctgctgctgttcagctatgccctgcccacagaggtggagtctatagaagcagtaggccttgctgagctgtggtgggctccacccagtttgagcttcctgggctgctttgtttacctactcaagcttcagcaatggtggacacccgtcccccagccaggctgctgcctcgcagttctatctcagactgctgcgctagcagtgagcaaggctccgtgagtgtggggcccaccgagccaggcatgggagagtatctccttgtctgctggttgctaagaycttgggaacagcacagtatttgggtgggagtgtccactttttccaggtacagtctgtcctggcttcccttggctaggaaagggaaatcctccgacccctggtgcttcccgagtgaggtgatgccccaccctgcttcggcttgccctccttgggctgcacccactgtccaaccagtcccagtgagatgaaccaggtacctcagttggaaatgcagaaatcacctgtcttctgcatcagtcacgctgggagctgcacaccagagctgttcctatttggccatcttggaacagaagagcgtatgtttaattttttaatgtctgaagaagatggtgtgccttgggaagaatacagacacctgggtttgggttctgacagccacttaagaactggaggtttttaacttaagtgtagtgagggcaggagcagcaagaacttcagcccaagtccagctggcatgagctaaaatggaagctctgaaagccactgggtccttcttttgc

SEQ ID NO: 69100 - DNA, 558 bp, Homo sapiens
actttgcagataacactgtaaagctaatccctcatgcactgtacatgcagttgaacctgggtgtctctctggtattcataaraaaagccctgctcctataggccctatctccatatgtcagcctagtaaagtaaccaaccatgttattcactgtgagataccatgttctagttatcctttacttgcttgagtgctgagatgaacataatacacaaggtctagtagttcctaaaccctgtgagaactcctaagctccttttcttgttgttgtctacatatataagttcaaaaaatagtcttgggggaatttcaacaaacaattctaaataagtccttttttctttgcaaatataaatccttgtaaaattcctttttttcctatctgtttcctattcctgattctattatagctctagcaatactaaacactagctggtttggagattaatataaccagacataccatggcttttttgtttgttttttttggaagacagagtctcattctgctgcccaggctggagtgcagtggtgtgatcttggctaactgcaatctcc

SEQ ID NO: 69101 - DNA, 651 bp, Homo sapiens
aagttgggtggttccagagtcctggtccttgaccactgcactcagctgttcctctatcttcccaacatacagccactacctccctgccgttgtaggtcacttacttcagtactacagctcaggagtctatccggacctgacacccattgaatggagcccttttcactgcccaacgccccacccccatgtgctcgggtaactcagtctgaaattccacaaccagtcatcataaccccatccctgcgtctatgccctgcccaactctccctctatcaacgtgctcagctacaccccaacccagaaaattccaaccctacagctgctcttgcacaaatacaccaactgagctcactttaacttcttaatcactatgatgctgaccccacttgggcccctaatgctgcatggcacttayattcccctcatccattagtcctctaatgggaaccctctctgggctcatgctctcttccttctttgctggatttctgcatgaactattactacctcagacagtgatgcaataggttaatcataaagctaagcctgatgccaacaatttgtttttcttattcttcctcagtcttctgcatgtgtgtgttatattcttgaagaaaattcagcaactgcagagaacatctacaattacat

SEQ ID NO: 69102 - DNA, 1295 bp, Homo sapiens
ttagaactttctcatcttctatgactacaactctatgccgattgcaatccaattccccgttttcccctcctcctagcccctggcaatcaccatgctactttctgcttctgtgagtttcactattgtagatatctcataaaagtggaatctgaagcatttgtccttctggaaattgcttgtttaacttaagcataatgttctcaggtccgtcgatgtggctggagtagtttctgacaattctacacagtggggggatcttgaaacttgtcaaacatgcaccaaactggaaagactactatagcgatcactacrttttcatcacacagctccaatcactacaagacagctaattccgtttcgtacatctccctctccaaagctgcacaaatacagaagaaagttcccctctccttcaaaaggaaatattgatgattttgaatggcatgaagccaatttctgtaatgcagcaaaagaatacatttaactgacttattctaaccaaatttgaaacaatttcatttgttagatcaaatgtttccaaaggaagatttcaagtgttattatattttttaagtgcattaaaataacatataggcattaattgttctcatattcaaataaatatacaaatgactttgcatatactaactgaatattgcacttgaaaaaaattctgtagataatttatctctacagaaagccttgaaacatgtaaaccataaataattatgcatacttgtatatttaggaaacacttctagtcagtgctaaagacaagcatcatttaatagtggaccaaatcaattaaatgacattttgatgtgtttgtgaaaatgccatattcatgaatccatgactcacaatgtatacttacatgtcttgttcaatggtcttaatggtttttagcagtttaatttattctggggtacaaacttatgttgcttttaagttttcatatttcctctcaaattttatttcatgaaaattggtttcataatttagtaaggatacacaaaaataagttcataaaatagattttgtcttatgttttttctccttaggaataacaatgtaagcttaaatacttgtgatttctaccatttgagactgatatagatccactgaggccaaatgtaaaatcagatcatctttattgctaaaagttcattgacaatgtttgggagactaggtgaccattattagggaaaggactgaaagcccgctacatacaactttggattggctactactgctcacataactgtttaggatttacatgggttttagcagaaaag

SEQ ID NO: 69103 - DNA, 1010 bp, Homo sapiens
ttttaataatattctacaaatatgttttagtccttgatgctttcaaagcccacacacgtaatccttccaataaaactggtctttctgttccaccaccaatgatcttgacatttcctgcaaattaaacactcacatagccacatcctagattttgacattcctgagaatctacaatatctacataacattaataaaagcaaagttgtactataggaaccatatgtcagatcctgttctgaaccattttaaataccttattatagaaaaattcatttaacactcaaaacaactctgtgaggtaggtactcacattatgcccacaatattaatggagcaagctgggacacagaaagaatttgctcatggtttcccaggcagcaatggtcgaaccagacttagattctaaacagtgggggttgagtccgggcttttgaccactacactatgctatttccccatgtatccaacatgcaacaactaaygccctcacactgtaggtcactctaagcactacagctcaggagtctatcaggaactgaagcccattgaatagagcacctttcactgtccaacactggagtgcccaacactccctttcttcgttcccagattaagttccatggtcactcaccataactccatccttgtgtatgtgccctgccagcttctccctctgtcacagtgctcagccaaatgccaacccagaaaaatccaactctccagctgccctaacacaaccatgccaacagatctcaaagtcgtgtttatgatgacactaatctaatttgcactcccaatgctgcttgacaattatattcccctagtccactcactggcccagtctcaggaaaaaaagtatagtccttcttctctgccctcctgccccatctctacttgtcactgatgatcttttatctcactacagagacagaagcaacccacagggcacattcagcgtccgagcatcacatcttcacccacctttgtccatcagtgcttacgcactcgac

SEQ ID NO: 69104 - DNA, 1869 bp, Homo sapiens
gttagggtttgggggccctgctgagctcttgggcttgaggttagggttgagagaaacagctgatctctcaggggtttgggttagggttgggggcccagctgagctcttggggttgaggttagggttgagaggatcagctggcctcttggaggttttgagttagagttggggggttccagctgagctcttgggttcgggttagggttgagggacccagctgagctcttggggttgaggttagggttagggggtccagctgaacttctgaggttgaggttasgagtagaggggcccatttgggctcctggggttgaggttaggattgagaggatcagctgggctctctgggcattcaggttaaagttaggaccccagctgagctcttggggttgaggttaagtttgggagccctgctgagttcttggggttgaagttagggttggggggcccagctgagctcttggagttgaagttaaggttgggagggctcagctgagcttttggggttctagttagtgtttggggccccagctgagctcttgacggtgaggttagggttgagaggatcagcagggccctttggagattcgggttatgtttggagatcccagctgagctcttggagttacagttagggttgggggtcccagctgagcttttggagttctagttagggtttggggccccagctgagctcttgatggtgaggttaggttgaggatcagcagggccctttggagattcaagttatgtttggggatcccagctgagctcttggggttgaggttagggttgggggacccagctgagcctttggggacgtgtgtggctgctctctggtcacagaaggggtgacctcctcagcaccactgtggtagagagtgtccagaatgaggtccctctgcccctggcttctgcagtccttgcttctggtggcttccgggcccaggccccgtgctcagtggctgtctcagaaagaaaaagattcttgacaaaggagaggcccttccctccttcatcctctgcagactacactgccttgtgtttatcgtttcagaaagcacctccgcgacccgacaccagatgaagggggaagatgcccagccacaggagatggcgtccacaagcttcccaagggccagtggtcccagtcctgaattcagacagcacggggactctgacgggaagagagggagcccacagaatctgcccatagaacatcattttgcttgtaaagagtgtggggacacctttcggcttaaagtcctgcttgtccagcaccagagagtccacagtgaggagaagggctgggaatgtggcgactgcgggaaggtctttaggggggtggcggagtttaatgagcacaggaaaagccacgtagctgcggagccccagcccggccccagtagggccctggagaatgccgcggagaagagggagcagatggagagggaggcaaagcccttcgagtgcgaggagtgcggaaaacggtttaagaagaatgcaggcctgagtcagcatctgagggtccacagcagagagaagccctttgattgcgaggaatgcgggcggtcgttcaaagtcaacacccacctcttccgacatcagaaacttcacacttcggaaaagcctttcgcctgcaaggcgtgcagcagggatttcctggatcgccaggagcttctcaagcaccagcgcatgcacactggccacctgcccttcgactgcgacgactgcggcaagtccttccgaggggtcaacgggctggccgagcaccagcgcatccacagtggggccaagccatacgggtgtccccactgcggcaagctcttccgaaggagctcggagctcaccaagcaccggcggatccac

SEQ ID NO: 69105 - DNA, 838 bp, Homo sapiens
cacagtggggcgcggcgctgcgaatgcagccagtgtggccgcgtgttcaagaggcgctcggcactgcagaagcatcagccaacccaccacgagtagaaacgccctgtggtcccgcgggacagggacggagtccccagaggggatggcagagtcaaaggagatgaacagttttgtagcgcttatatattttgtcttccaaaaggttgagaccgatttatactgccaccagcaatttataagtgttacgttatgcccatcaagagtagcttgtaccatttaacttagtttggctagtttaactggtaggaagtaccatcaaggtatttcagtccacatgccttgaatccaagaatgagagaggacaratctggatgtggggtagggaggggcttagaggtcatcaactccaagctccccccgccccagagaaacacacagagctgttccacgatggcgtcctcataatgtgatcccagctttcctgaagagaacgttgccctcatgatttttggcctacttgaatttataaatttttagggatgtaaatagaacactcaaatgtcttaaaatatttaatttattaatttagttatacatacatactgtaaatcacatattatataaaataatatattaatttagaaaataccccatttttgccaccctccctttcacgaaatcattttactctgactcctcaccgtcttcaccaacatgggaaccctgtttgagtcatcagacagtttcaagacacacccagtcacttccatccgagctctgcacggtcgctcagtgacgatcccttcatgaggctctcattagaaattttctcccaagc

SEQ ID NO: 69106 - DNA, 1585 bp, Homo sapiens
atcatggtggaaggcaaggaggagcaagtcacgtcttacatggatggcggcagacaaagagagagagagcttgtacagggaaactgccgtttttaaaaccatcagatctcttgagacttattcactatcacgagaacagtatgggaaagacccaaccccatgattcaattatctcccactgggtccctcccacaacatgtgggaatattgggagctacaagatgagatttgtgtggggacacagagccaaacaatatcattccacatgtggcccctcccaaatctcatgtcttcacctttcaaaaccaatcctgccttcccaacagtcccccaaagtcttaactcatttcagcgttaacgcaaaagcccacagtccaaatcttgagaagttgtcaaaggacactcagttttcttcagttaataatgtaaaaggactgcactgacgtggttaaattcccaggactctcagttctttaggaatggactaaatatctggtatcgtcacttacaaaagtgtcttgaacttgatatagtttatgttcagaaattggttcatattttttatttttatcttttaattcaattttttttcatgagctttttgaaggcccccggatatgcaccctgtataaaggagaaaaattctcgggactactaattttgaccgaaattattgttgatttaatttatacaaacacaaaaggtgatacaaacatttttatagcacctaatgaacatatttgtgaaataaatgcattcaaaaacaaactaaaacagaaaagaataaaaatatacaataaaatagtacacagcaggttgctgattgtggtgacctctgaggtgcgggctgaattgtggaggaactttatacagaraagaattgtgaattatctgtattttagatttcttttgcaacaagaatataggcacaattatcttttaaattacaatatctaaataagcctaacagcaaaaatagtagctgtgtattagtcagttaaagtaactgaagtaactgctagctgatgcaataggcaaaccctggaatttgagtgacatgacaaaacacaagtttatttaatgtgcacatgagtcctgatgtggtttgacagggcctctccactctcccgtgacccaggtatccaggcagcttccacctcgggattccaccacctcaacatgaggctgccatgtttactattagatggagggagaaagcatggaaatggcacactggctctcagatgtctagatgtgacaaacaatgcttctgctcatgtttcagtggtaaggggttgtcacatgacccttcctaactacaagtggactgtactgttcccatgtatccaggaaagagaggaagatgagatgtgggtgagcactatagtctctcccataaactgttgcatagtaggtgctcaacaaaaaggaactattattatttgctatgacaacagccctcttcattgctgggaggagtttcggagaaaaccagattttctttacgttctccaactttttttaagtgtgtactgtatgacagatgctttcaaatacaggatcacatgtagttttctaaggatcc

SEQ ID NO: 69107 - DNA, 741 bp, Homo sapiens
cctttgacaggatcaaattttttctcctccattttgtatgtaaggaattacaatgaaaccgtttttttttttctgatgttaaatcatatgttatttccttgggcagagcctgtctatttgtttaatatgctactaatttaggtaaggtatttactgctaggtaagggagcttacttggtgtgttctttttccatcggggagggatgtggtcctcatctgattttgaatccaggagggctagtctgggagaatgaactgaacaattgtcaatcttttgtatgttttggaagagttgatataagatggtggttagttttccctgatcatttggtagaattggcctccaaaactgcctaacctggaatgtttgagggtggcttgagctttgaatattgtacagtttcagtttgtatagtttaattaaagttttctttttctttttggatcagtttggttactgatgtattttatttctatgaagtggtcagtttcatttaggatttcacttttaatggcatatttgtgataaaaaacgttttattagggaaagccttcacacatacagaataacagaaactaatattatgaacccaggatacttgataccgagcatgaacaactttaaatacacagcaaagctggttccagttagacactygcctacctgcatatgagcttctgtaataacgtggagccaatctaaggcattagaccatttcatctctaaacaatttaacatgc

SEQ ID NO: 69108 - DNA, 760 bp, Homo sapiens
accccaaagatccgatcatctcccaccaggccctacctccggcacgggggattacaattcaacatgagatttgggcagggacaaatatccaaacagtatcagaggtggtggacggtgggctggagagcaggtggtctgggctttctcttgtctccagtagtgactcaccttgctgcctgggycagtcacttcatttccacatgcctcaacttcgtcctctgcaaaacctagattttggactcagagacctcttataatcttgttcagctctaacaaaatctccatgttaccattaatgaagaaatgtttataaaataccctgcagaccctctgcggatgttagtgatttgctctgggggtacattgttaagatgcacttgtaattttataagcagttaagtatttggcatgggtgagaaagtgtgtgtgcgctttagtccactctgtccagggcttgcaggcgtgtgcttgtagggaccaggcaggtaatgtcagagagtgcagagggttgggtagggtggggggcaaactggggaactcctgccccatccatgaggggcacaagggaggggaagaggcagagaggaggggagggcgccactctcttgctcctgagtgttgctgtgctagaattgaggctcagggttggtgtcacttcccagttttccggagaagctggaaattagaattatttgaaatcacctgatttttaaatatagtcggtgaattcagatttacttaagatgttatagaagaaaaa

SEQ ID NO: 69109 - DNA, 760 bp, Homo sapiens
accccaaagatccgatcatctcccaccaggccctacctccggcacgggggattacaattcaacatgagatttgggcagggacaaatatccaaacagtatcagaggtggtggacggtgggctggagagcaggtggtctgggctttctcttgtctccagtagtgactcaccttgctgcctgggtcagtcacttcatttccacatgcctcracttcgtcctctgcaaaacctagattttggactcagagacctcttataatcttgttcagctctaacaaaatctccatgttaccattaatgaagaaatgtttataaaataccctgcagaccctctgcggatgttagtgatttgctctgggggtacattgttaagatgcacttgtaattttataagcagttaagtatttggcatgggtgagaaagtgtgtgtgcgctttagtccactctgtccagggcttgcaggcgtgtgcttgtagggaccaggcaggtaatgtcagagagtgcagagggttgggtagggtggggggcaaactggggaactcctgccccatccatgaggggcacaagggaggggaagaggcagagaggaggggagggcgccactctcttgctcctgagtgttgctgtgctagaattgaggctcagggttggtgtcacttcccagttttccggagaagctggaaattagaattatttgaaatcacctgatttttaaatatagtcggtgaattcagatttacttaagatgttatagaagaaaaa

SEQ ID NO: 69110 - DNA, 760 bp, Homo sapiens
accccaaagatccgatcatctcccaccaggccctacctccggcacgggggattacaattcaacatgagatttgggcagggacaaatatccaaacagtatcagaggtggtggacggtgggctggagagcaggtggtctgggctttctcttgtctccagtagtgactcaccttgctgcctgggtcagtcacttcatttccacatgcctcaacttcgtcctctgcaaaacctagattttggactcagagacctcttataatcttgttcagctctaacaaaatctccatgttaccattaatgaagaaatgtttataaaataccctgcagaccctctgcggatgttagtgatttgctctgggggtacattgttaagatgcrcttgtaattttataagcagttaagtatttggcatgggtgagaaagtgtgtgtgcgctttagtccactctgtccagggcttgcaggcgtgtgcttgtagggaccaggcaggtaatgtcagagagtgcagagggttgggtagggtggggggcaaactggggaactcctgccccatccatgaggggcacaagggaggggaagaggcagagaggaggggagggcgccactctcttgctcctgagtgttgctgtgctagaattgaggctcagggttggtgtcacttcccagttttccggagaagctggaaattagaattatttgaaatcacctgatttttaaatatagtcggtgaattcagatttacttaagatgttatagaagaaaaa

SEQ ID NO: 69111 - DNA, 1813 bp, Homo sapiens
catctaaatctaatcacttcccaaaggtcccccctcccaataccatcacattgggagtcagagctttaacatatgaattgggggcagggaagaggagagacacaaacattccattcatagcagtgacttgcmtccttactctcggacctcagtttcctcaccaatacaataagcaagtaggaaagaagttgaacaaaatatccttgcagactgcgcctcgtatatcccaagatcttgcctttctgcccagcaaaagtgggaaggggccaagactgagtttgaaagcgggagtaactaggggtattttctgtccttcactagcttgtgcccatgggacctctctgagactcaagtttcctcacctctctgagccccaagtggggataacaagggtccttatcaagggttttggagatcttcaatgagctcgtgcaggtgaagtgcttagcacataggaagcatttaaaaaatgagttattgccattactatgtttgccactgtggttgttgatgttatactagaattggccaggagacagttttctattctgacaaaagtcttcaacattgaaaggaacttctgaacatcagtccccaagcctcatccctactctatagataaggggactgagattgtgtcaatctcagctacctgggagagctcacagtttggaaatggaaggatgggtcttaaagatccactcagcccaacctttccatattaaggctatggaaactgaggctacagaggccaattgagccaaccatggtcatcactgtccaagtggcagttcaactgcttcccaggctcccagccctacaggaagcccagtttcagcctatgcagatagattctctagaggaaagtgatttcaacacagagggaatgtgtgtgagtttatgggtgcatatgggcaggagcgtgtgtgttggtatgttgtagggaggatttaggggtctctgtgggccccggcagaccatgagaatacatgtacctccaaggtcctccttattgagaataggcttggtttttcatcttcttctgtggacccccagcctttaggtacaatgcataacagggcacaggtcatgggtcattcatcccactactccagacctttcatcacccaccccttgcatatgcaaatatacgcaaatagcacaactcagccaccccctatgttttggaggaaaaaaaactttttagacatctcttagagacttgggaggatttagacagactaaatccttttcccaaaaccttttctctgaacctgcctttgatctcattgtttaagtggattaatgaatgtaaagtcctcagaacagtgtctggcacccagtaagagctacgtaaacatttattattcttcttcgaccatcaaaaagtttcctttccctgactcctgagcccaagaactctctatagcaaaggaaatttatagcaaagtgttttgaagctcaggatctgcttctgcagggcttcagaagcgtagaaggggaataagtcaggttatgtagcctcttcctcacccatccaagagcctggcattgcactctcagctctgggaaggttctgtgacccagactgtttctactgtaataatatctaatacttactagagtctctacctctgagctggaactggcttttctgtgaagtaggcactatgatcatgcccattgtacagattagaaaactgaggcacaaagagctgagtttcccactaggaccatctgactccagagtccaagctctgaagttggagcatagagacataggcaacggtgttcctacctcctagagcagccc

SEQ ID NO: 69112 - DNA, 1484 bp, Homo sapiens
cggaatgagttgccacactggctggaaaactcacgtgagagagaaacaaactcttatctcgctaaatccattattatcatgagtcttgtttttagtggtcaaaacctgtgctaagacaacgtaaggatgtctccctctttcacctgcattcgagaacttgcagtctcataaaaataccctctggaaaagctttgttttggcagcagaccttgaaggataagaaagcactaactgcaatgtcgtcacaacgccagggcatttattctattcgtacttgcccacaaatcagtttcatttgagtgtgttagttcatcagattcccagattttgactcagccccattagtctttgcttacagggcctcaagtggtctctttatgcacaacgasaatctcctgaatacacaacaggtgcacacttctggaattttaatctgttatcctgaggagaatggaatgaagggggtaagtgcccagcttcacttgaagggcttgcagccatagctgagcatgccccggttcctttgttctctcaccaagtggcaactggaggctgtcgttgatcactcagatgccattatgatctccactgagtcatccacactgtttcttgcagtctggagaaatgcggcactctccaggtttggggcagagctgagtactttcagaggtgcagtggaagcaacgctgacctagatattaagacatcaggtttcttactccaaaatctgcctttaattagctgtaggattctttttgtttgcaagtgacaatatttcaattggatttagcaaaagagaaataatttattggctcacgtaactgacaacgtccaaaatcaaggtacggttggatccagggacttggatgaaccatgtttctagcttctgtaaacttgaagctttaacatcttcccggcatccatatgctggacactgctttttctagacaacctgatgagaggcctgagtcctgagtcaggacttgcctcagccttccttgtcacctccccaacccgcttcttctgggagaagtcctcgtcctggagtgtacttttcaaaacaaaccaaccattccaaggtctgaccccaagcacctcccttattaagttctcatgccctgggccattacagactgccctaatcacccagcgccaggtgccaggcagccagaaacatcccctataccccaggccagagtccactgaaatatttctccttccttccttccttcctttctttccttctttctcttttttcttttaataggatctgactctgtcacccaggctagagtgcagtggcatgatctcagctcactgcaacctccacctcctgggctcaagccatcctctcaccttagctgggactataggcgcacaccaccacgcccagctaattcttgtatttttttgtagaaatggagtttcgccatgttgtccaggctggtgttgaactcctcagctcaggcaattcacccacctca

SEQ ID NO: 69113 - DNA, 1460 bp, Homo sapiens
aggatcagaaaaaggacattacagaaaactgaggacttaatgccatttctggttttgagacaaagtataacccatgaataaaacagagagaaactagtgttgtgtgattcagttggggtgctgccatctgcaagtattaataagagaaactccagccaaaaatggcctaagtgtaagaatccagagccagctgcagtggtgcgcacctgaaatcccagctactcaggagactgrgtcaggaggattggatcatttgagcccaggagtttgagaccagccaggggaatgtagtgagaccctgtctcaaaaaagaaaaggaaaggttgtgggctcagtggctcacgcctgtaataatcctagcactttgggaggtctgaactcccagccaacatggtaaaacctcgtctctatgaaaaatacaaaaaaattagccaggtgtggtggtgcatacctgtaatcccagctacttggaaagctgaggcaggagaatcacttgaatccaggaggcggaggttgcagtgagccaagattacatcaccacactccagcctcggcaacagagtgagactccatctcaagaaaaaaaaaaaagaagaagaagagaagaaaaagaaaaggaaaggaaaggtctggctcagtggctcatgcctgtaatcccagcactttgggaagctgaggcgggtggattgcttgaactctggagctcgagaccagcctgggcaacatggcaagaccccatctctacaaaaaaatacaaaaattagccaggtgtgctggcacatgcctgtggtcccagctacttgagagtctgaggtgggaggattgcttcagcccaggagttcaaggctgcagtgagctgagatcacaccactgcactccagcctgggtgacagagtgagaccttgtctaaaatttagaaaaaaaaaaaaaaaaaaaaaaaaaaaagaattcaggcagcagagagaatccagggccaattggttgagtggcttaaccaagtcaagcccttccatcttcatacttggccatttttggggtctcctcctctgattgacctgatatgggcacttccaaacactgtggtcaggcagggatggagagcaggagctgtttcttctttgtgtgtctcttttttaagactaaaaaaacatttccagaagctgcccagtagactctgcctcattgaccagaacctaacaccccttgctaagcccaggcaccaccataacaggctgagaccaatcagaatttgccctgcagtcacacagggagggctggacacagggtaaaaatcaggattcaggctgcaataagggcagctggctgcttcagcacagtcttgtgaatacaagagaaaatgaaaagaacaactcctttcatgtgtaattagaaaactaaggtgaagccgggtgcagtggctcacatctgtaatcccaacgctttgggaggccaaggcagga

SEQ ID NO: 69114 - DNA, 1460 bp, Homo sapiens
aggatcagaaaaaggacattacagaaaactgaggacttaatgccatttctggttttgagacaaagtataacccatgaataaaacagagagaaactagtgttgtgtgattcagttggggtgctgccatctgcaagtattaataagagaaactccagccaaaaatggcctaagtgtaagaatccagagccagctgcagtggtgcgcacctgaaatcccagctactcaggagactgagtcaggaggattggatcatttgagcccaggagtttgagaccagccaggggaatgtagtgagaccctgtctcaaaaaagaaaaggaaaggttgtgggctcagtggctcacgcctgtaataatcctagcactttgggaggtctgaactcccagccaacatggtaaaacctcgtctctatgaaaaatacaaaaaaattagccaggtgtggtggtgcatacctgtaatcccagctacttggaaagctgaggcaggagaatcacttgaatccaggaggcggaggttgcagtgagccaagattacatcaccacactccagcctcggcaacagagtgagactccatctcaagaaaaaaaaaaaagaagaagaagagaagaaaaagaaaaggaaaggaaaggtctggctcagtggctcatgcctgtaatcccagcactttgggaagctgaggcgggtggattgcttgaactctggagctcgagaccagcctgggcaacatggcaagaccccatctctacaaaaaaatacaaaaattagccaggtgtgctggcacatgcctgtggtcccagctacttgagagtctgaggtgggaggattgcttcagcccaggagttcaaggctgcagtgagctgagatcacaccactgcactccagcctgggtgacagagtgagaccttgtctaaaatttagaaaaaaaaaaaaaaaaaaaaaaaaaaaagaattcaggcagcagagagaatccagggccaattggttgagtggcttaaccaagtcaagcccttccatcttcatacttggccatttttggggtctcctcctctgattgacctgatatgggcacttccaaacactgtggtcaggcagggatggagagcaggagctgtttcttctttgtgtgtctcttttttaagactaaaaaaacatttccagaagctgcccagtagactctgcctcrttgaccagaacctaacaccccttgctaagcccaggcaccaccataacaggctgagaccaatcagaatttgccctgcagtcacacagggagggctggacacagggtaaaaatcaggattcaggctgcaataagggcagctggctgcttcagcacagtcttgtgaatacaagagaaaatgaaaagaacaactcctttcatgtgtaattagaaaactaaggtgaagccgggtgcagtggctcacatctgtaatcccaacgctttgggaggccaaggcagga

SEQ ID NO: 69115 - DNA, 762 bp, Homo sapiens
accacgcatggctaattttttgaggaatttttttttgagagatggggtctacctaatgttgcccgggctggacttgaactactgggctcgagcaaccttcccctgcctcagcctcccaaagtgctgggattacaggagtgagctattgccccagactctgagattcaccctacttttgagtggggtgatgaattctgatcctgcaagatcacattgaaaaggatatgtttaaagggatgggaggactttgtgatagcatgtaaaatggtcagcacagttattacacggaactaaatttctttttatttaacaagcacttacacacttttatgtgtggcaggcactataggtataactctttatataagctactcattaaatccccattaaagcccaaaatgataggtcctattgttgcagtawttttctttagttcagctaaagatggggttttttgtctcacagccacaaaaattcaggctcacagacaattcgaatggtgagtaagacagggttttattgggtggaaagggaagaaaagggggaaacagggactcttgctaggtcagagtccctgctagagcacttcccacctggccattcaaatcccagattccacacagaaagaggaggggccaggctcctcccagctgcaaagtcacaaacttgtgtggctctttccagtgagcaggccagttggagaggttggaggttctctggggatccccctcccacctagctgtctcattcccacctctaaaa

SEQ ID NO: 69116 - DNA, 762 bp, Homo sapiens
accacgcatggctaattttttgaggaatttttttttgagagatggggtctacctaatgttgcccgggctggacttgaactactgggctcgagcaaccttcccctgcctcagcctcccaaagtgctgggattacaggagtgagctattgccccagactctgagattcaccctacttttgagtggggtgatgaattctgatcctgcaagatcacattgaaaaggatatgtttaaagggatgggaggactttgtgatagcatgtaaaatggtcagcacagttattacacggaactaaatttctttttatttaacaagcacttacacacttttatgtgtggcaggcactataggtataactctttatataagctactcattaaatccccattaaagcccaaaatgataggtcctattgttgcagtatttttctttagttcagctaaagatggggttttttgtctcacagccacaaaaattcaggctcacagacaattygaatggtgagtaagacagggttttattgggtggaaagggaagaaaagggggaaacagggactcttgctaggtcagagtccctgctagagcacttcccacctggccattcaaatcccagattccacacagaaagaggaggggccaggctcctcccagctgcaaagtcacaaacttgtgtggctctttccagtgagcaggccagttggagaggttggaggttctctggggatccccctcccacctagctgtctcattcccacctctaaaa

SEQ ID NO: 69117 - DNA, 747 bp, Homo sapiens
tccctgcagcccatcagttttggttataaaaccctgagctaatcattaatagccgtacattacacaatccatatatcccaagtacttggtgactttatttggcccaatcagttgacccagtaactccatgaagcaggtgctataaagactgtgaactattcttagacccgctaatttcccatcatgaagcatcatgccaactttatgagcaaaaacttgggagttgggaagcctaggttcaaatccttactatgccacttacctacaggatgatcttgggcgagttactcaacctgccttagcctcagtttccctatatttccttggcatacagggaaactataacaaatgctcaatgaatgctgttcactactttattacttcatgagttcagccaaccactatagtggcttgaaggcaaagattccactaaagggtgaccttcacccacccctgagtggatggctacaaaaggraccccaatgatcatctagtttgaaggtcaagatgggaaagaatgagccagcatctcacggcaggtcagatacagagctgggggtaggacccaggctctcaaccccagtctaacagattccacccctgcccactggctgtcttcatggataagccatccaacctagtatgagaaaggttctcagcctgcctgtctcctctcgccagtcatcctgagtcgtggtttccaaaaaaagtatctcttaagaagctttcagaggggctgagacttga

SEQ ID NO: 69118 - DNA, 739 bp, Homo sapiens
cttagaactctcacctttcagccccatcgcctataagataaccgttagcctcatccttcaagagatgtatgccttttcagggagggttagatattgctacttggaagggaaaaccgttgggatataaatgatcacactgtctatttggtccccactggggcacagaatggctttaattatcagggagaataaatatgtttaaatgttatgactgctctgtcttgccagcatgaggtttggagactgtatagaaaaaaacacactcagagtgttttttctgttctcttactcaacaaccatcaacacagaaggcttctgtgaacaaatgggtgggggtttctccccacacaccaagaaagcgatcarttttacagcagacatcgctgggtatcctccaattcaattctgacactatctacctggagatagtgtcagatcccataggacaaaggcgcagtccccaagactatatacctccttcagaccccagccacatgtccaggccgccggaactttttctttttattattattattatttttaaggatctcactccgttattcaggctggagtgcagtggcaccatctcagctcactgcaacatccgcctcccaggttcaagcgattcttgtgcctcagcctcctgagtagctggcattacaggcatgcgccaccacacccagctcatttttgtatttttagtagagacggggtttcggcattttggccaggctggtct

SEQ ID NO: 69119 - DNA, 739 bp, Homo sapiens
cttagaactctcacctttcagccccatcgcctataagataaccgttagcctcatccttcaagagatgtatgccttttcagggagggttagatattgctacttggaagggaaaaccgttgggatataaatgatcacactgtctatttggtccccactggggcacagaatggctttaattatcagggagaataaatatgtttaaatgttatgactgctctgtcttgccagcatgaggtttggagactgtatagaaaaaaacacactcagagtgttttttctgttctcttactcaacaaccatcaacacagaaggcttctgtgaacaaatgggtgggggtttctccccacacaccaagaaagcgatcaattttacagcagacatcgctgggtrtcctccaattcaattctgacactatctacctggagatagtgtcagatcccataggacaaaggcgcagtccccaagactatatacctccttcagaccccagccacatgtccaggccgccggaactttttctttttattattattattatttttaaggatctcactccgttattcaggctggagtgcagtggcaccatctcagctcactgcaacatccgcctcccaggttcaagcgattcttgtgcctcagcctcctgagtagctggcattacaggcatgcgccaccacacccagctcatttttgtatttttagtagagacggggtttcggcattttggccaggctggtct

SEQ ID NO: 69120 - DNA, 739 bp, Homo sapiens
cttagaactctcacctttcagccccatcgcctataagataaccgttagcctcatccttcaagagatgtatgccttttcagggagggttagatattgctacttggaagggaaaaccgttgggatataaatgatcacactgtctatttggtccccactggggcacagaatggctttaattatcagggagaataaatatgtttaaatgttatgactgctctgtcttgccagcatgaggtttggagactgtatagaaaaaaacacactcagagtgttttttctgttctcttactcaacaaccatcaacacagaaggcttctgtgaacaaatgggtgggggtttctccccacacaccaagaaagcgatcaattttacagcagacatcgctgggtatcctccaattcaattctgacrctatctacctggagatagtgtcagatcccataggacaaaggcgcagtccccaagactatatacctccttcagaccccagccacatgtccaggccgccggaactttttctttttattattattattatttttaaggatctcactccgttattcaggctggagtgcagtggcaccatctcagctcactgcaacatccgcctcccaggttcaagcgattcttgtgcctcagcctcctgagtagctggcattacaggcatgcgccaccacacccagctcatttttgtatttttagtagagacggggtttcggcattttggccaggctggtct

SEQ ID NO: 69121 - DNA, 739 bp, Homo sapiens
cttagaactctcacctttcagccccatcgcctataagataaccgttagcctcatccttcaagagatgtatgccttttcagggagggttagatattgctacttggaagggaaaaccgttgggatataaatgatcacactgtctatttggtccccactggggcacagaatggctttaattatcagggagaataaatatgtttaaatgttatgactgctctgtcttgccagcatgaggtttggagactgtatagaaaaaaacacactcagagtgttttttctgttctcttactcaacaaccatcaacacagaaggcttctgtgaacaaatgggtgggggtttctccccacacaccaagaaagcgatcaattttacagcagacatcgctgggtatcctccaattcaattctgacactatctacctggagatagtgtcagatcccataggacaaaggcrcagtccccaagactatatacctccttcagaccccagccacatgtccaggccgccggaactttttctttttattattattattatttttaaggatctcactccgttattcaggctggagtgcagtggcaccatctcagctcactgcaacatccgcctcccaggttcaagcgattcttgtgcctcagcctcctgagtagctggcattacaggcatgcgccaccacacccagctcatttttgtatttttagtagagacggggtttcggcattttggccaggctggtct

SEQ ID NO: 69122 - DNA, 1397 bp, Homo sapiens
cttaaaaaacttaacaataatttattattatcatcttatatccaatgtttacatttccccaactgtccccttaagtgtctttttatactagaactgcacaaatcaggatctgaaaagggggtacatgttgcatttggttaatgtctctctctctctctctctctttttttttttttgagacagaatctcactgtgtctcccaggctggaacgcagtggcatgattttggctcactgcaacttctgcctcctgggttcaagtgattctcctgcctcagcctcctgagtagctgggattacaggtgtgtgccaccacgcccagctaatttttgtatttttagtagagacggggtttcaccatgttgactaggctggtctcaaactcctgacctcaagtgatccaccygccttggcctcccaaagtgctgggattacaggcgtgagccactgcgcccagccaatatgcctaactttcttttactctataaccatttaccacttcccctccccacttcctcttttctttttattgttaaagaatgcaggtcatctgtttcatattttccatatcctacatatatcttttttttttgttttgacatggagtcttgctctggggcacgtgcctatgggggatactggaaaccatttttcctgggtattgagacgtggcatgtaagttgcttccagcagccgacttctggaggctactttctcaagcctgttaggggaattgctttagaggagaatattacagtgcaggaaggctctgggggataatttggttttactgtgaaatgtttcttttctttcaccaaaagatggcagtaacctccatccaacttctaggatcctagctgcctgaaaaccgacgttcttcccatcaattgctttctcaattccataccatcattcattcatatttttgtttctttctggttttgttttccttcttggtaggagggcaaagataaaatgttcctgatagaaaaattgatcaagctgcaggatatggagaagaaagcaaaccccagctcacttgttctggaaaggagagaggtggaggtgagtctggaggctgccttggggacccctgggacacgagcttgcctccatgtaaaaagcgcgtcagagaactacagaccaagctcttgggatcatggaagggcccttcactctctgtcttaagtatttctgtggtttttacttaaaaagtaatattcatggccaggtgcagtggctcacgcctgtaatcccagcactttgggaggcctacgcgggtggatcaagaggtcaggagtttgagaccagcctggccaatatggtgaaaccctgtctctactaaaaatacaaaagttagctgggtgtggtggcacgcacctgtagccccagctactt

SEQ ID NO: 69123 - DNA, 716 bp, Homo sapiens
cttggcaggctgaggcaggagaatcgcttgaacccaggaggcggaggttgcggtgagccgagatggcaccatggcactccagcctgggcaacatgagcaaaaactcaatctcaaaaaaaaaaaaaaaaaagtatgtacaggcagggctcggtggctcacgcctgcaatcccggcactttgggaggctgaagcaggaggatcacttgagccctggagttcaagaccagcctggtcaacatggtaagacctcgtctctacaaaaacaaaacaaaacaaaaatcaaaaaatgtaggcaagcatggtggtgcacacctgtggtcccagctactcaggaggctgaggtgggagtatcacttgagctgagagttggaggctgcaatgagctatgatcaaaccactgcacttcagcctgggcaacagaacgagaccctgtctcttaaaaaaaattaaaagattgtaaagaaaagaaaataggttctaagctatggaaacaatgtcagcactgccaaccttcctcccagtctgtttcctttctgcccccagccctgccagagctgcccctgccttccctgtgccccctgttctggatggagttcaaaggccactgctatcgattcttccctctcaataagacctgggcygaggccgacctctactgttctgagttctctgtgggcaggaagtccgccaagctggcctccatccacaggtaagtg

SEQ ID NO: 69124 - DNA, 908 bp, Homo sapiens
ctcttttctatagtttgcatttttcataatgtgcacatagtacttttatatcaatgaaggtagaaatcttttttaaacaaatgtcatataatagggaatatcagagtgacttggtagctcatgattatattgtgatattgggaggattctacttagagctaattgtccagtcaaatcttcacaacatgtcatagattctcattctttattgaacaccagagctttaaagaagaatttaggttgataaagagttttgagtggtagaatagaaataagatagaatatcactgaggttatctgataataccactcaaaagtacacatcagcatgatcatggaaacataatctgatcaaaatctctgtggtctggctccccaaagtcygtactccctactttttagccttgggcctagtggtttaaggttcccaccttggttcacagggccaccccttactgcccacatgagctattgtgtgcctgtctcacagttgctgagaagccagcatgggagttaggagacagggaacagatgggaatctctagtagtgggcttggtgagggaggcttccatgtcaaaactggccacagagatggagaataactgatctacagcagatagatgcagctccaacaaggaactattgagtttggttctcaggttcatttggtccaagtgacctgctgatgctacagatactgatactgatactacagatagaagccaaataaatgagacatcactgaataaaggaaatgtggaaagactgtgtttttgaaaattagaattgtcaatgtataatttgtactttagaatatatcatattctatttttatcaaatgacttttatatatagtttcattttattggcccaaatgtttgaaaatgtaattatttgaattaatgca

SEQ ID NO: 69125 - DNA, 908 bp, Homo sapiens
ctcttttctatagtttgcatttttcataatgtgcacatagtacttttatatcaatgaaggtagaaatcttttttaaacaaatgtcatataatagggaatatcagagtgacttggtagctcatgattatattgtgatattgggaggattctacttagagctaattgtccagtcaaatcttcacaacatgtcatagattctcattctttattgaacaccagagctttaaagaagaatttaggttgataaagagttttgagtggtagaatagaaataagatagaatatcactgaggttatctgataataccactcaaaagtacacatcagcatgatcatggaaacataatctgatcaaaatctctgtggtctggctccccaaagtctgtactccctactttttagccttgggcctagtggtttaaggttcccaccttggttcmcagggccaccccttactgcccacatgagctattgtgtgcctgtctcacagttgctgagaagccagcatgggagttaggagacagggaacagatgggaatctctagtagtgggcttggtgagggaggcttccatgtcaaaactggccacagagatggagaataactgatctacagcagatagatgcagctccaacaaggaactattgagtttggttctcaggttcatttggtccaagtgacctgctgatgctacagatactgatactgatactacagatagaagccaaataaatgagacatcactgaataaaggaaatgtggaaagactgtgtttttgaaaattagaattgtcaatgtataatttgtactttagaatatatcatattctatttttatcaaatgacttttatatatagtttcattttattggcccaaatgtttgaaaatgtaattatttgaattaatgca

SEQ ID NO: 69126 - DNA, 667 bp, Homo sapiens
ctcctgggatcacttaagcccaggaggtcgaagctgcagtgaactatgatcacaccactgcactctagcctgggtgacagagagagactttatgcgttaaaaatatgtaaatattgaacctgggaggcagaggttgtagtgagccaagatcgagatattacactccagcctgggtgacggagcaagactctgtcttaaaaaaaaaaaaawatatatatatatatatatatatatatatacacacacacacacacatatatataaacacacacatatgtatatacacattatatatatacacatatatatacacacacacacacacacatatatatatatatagttaattttatatgtttgtgtgtggaaagccattagaatcacgccaggtaccccagaggtgctcactaatggcagggatattgtgaccatcatcattgtcttcatcgtcactgtgtacgcacatgcaggaaacaacatagaatttgcaggtatttttagctgctggagctgcctcctcctccaccccccgtgtctgtctctaagagtcactgtccagctctgaaggcagaggtgaagcagccgccctgtgtgttgcttcctgggcatggaagttcccatgggcagcatcctctggggatggcacagagactggctatctgggtta

SEQ ID NO: 69127 - DNA, 667 bp, Homo sapiens
ctcctgggatcacttaagcccaggaggtcgaagctgcagtgaactatgatcacaccactgcactctagcctgggtgacagagagagactttatgcgttaaaaatatgtaaatattgaacctgggaggcagaggttgtagtgagccaagatcgagatattacactccagcctgggtgacggagcaagactctgtcttaaaaaaaaaaaaaaatatatatatatatatatatatatayatacacacacacacacacatatatataaacacacacatatgtatatacacattatatatatacacatatatatacacacacacacacacacatatatatatatatagttaattttatatgtttgtgtgtggaaagccattagaatcacgccaggtaccccagaggtgctcactaatggcagggatattgtgaccatcatcattgtcttcatcgtcactgtgtacgcacatgcaggaaacaacatagaatttgcaggtatttttagctgctggagctgcctcctcctccaccccccgtgtctgtctctaagagtcactgtccagctctgaaggcagaggtgaagcagccgccctgtgtgttgcttcctgggcatggaagttcccatgggcagcatcctctggggatggcacagagactggctatctgggtta

SEQ ID NO: 69128 - DNA, 667 bp, Homo sapiens
ctcctgggatcacttaagcccaggaggtcgaagctgcagtgaactatgatcacaccactgcactctagcctgggtgacagagagagactttatgcgttaaaaatatgtaaatattgaacctgggaggcagaggttgtagtgagccaagatcgagatattacactccagcctgggtgacggagcaagactctgtcttaaaaaaaaaaaaaaatatatatatatatatatatatatatayacacacacacacacacatatatataaacacacacatatgtatatacacattatatatatacacatatatatacacacacacacacacacatatatatatatatagttaattttatatgtttgtgtgtggaaagccattagaatcacgccaggtaccccagaggtgctcactaatggcagggatattgtgaccatcatcattgtcttcatcgtcactgtgtacgcacatgcaggaaacaacatagaatttgcaggtatttttagctgctggagctgcctcctcctccaccccccgtgtctgtctctaagagtcactgtccagctctgaaggcagaggtgaagcagccgccctgtgtgttgcttcctgggcatggaagttcccatgggcagcatcctctggggatggcacagagactggctatctgggtta

SEQ ID NO: 69129 - DNA, 667 bp, Homo sapiens
ctcctgggatcacttaagcccaggaggtcgaagctgcagtgaactatgatcacaccactgcactctagcctgggtgacagagagagactttatgcgttaaaaatatgtaaatattgaacctgggaggcagaggttgtagtgagccaagatcgagatattacactccagcctgggtgacggagcaagactctgtcttaaaaaaaaaaaaaaatatatatatatatatatatatatatatacacacacacacacacatatatataaacacacacatatgtatatacacattatatatatacacatatatatacacacacacacasacacatatatatatatatagttaattttatatgtttgtgtgtggaaagccattagaatcacgccaggtaccccagaggtgctcactaatggcagggatattgtgaccatcatcattgtcttcatcgtcactgtgtacgcacatgcaggaaacaacatagaatttgcaggtatttttagctgctggagctgcctcctcctccaccccccgtgtctgtctctaagagtcactgtccagctctgaaggcagaggtgaagcagccgccctgtgtgttgcttcctgggcatggaagttcccatgggcagcatcctctggggatggcacagagactggctatctgggtta

SEQ ID NO: 69130 - DNA, 1367 bp, Homo sapiens
gtggctcatgcctgtaatcctaacactttgggaggatcgcttgagcccagaagtttaagaccagcctggccaacatggtgagaccccatctttatttaaaaaataaaaattaaaaaaaagagccgggcatagtggcctgtggtagttccagctaccccacaggctgaaacaggaagatagcttgagcccaggagatagaggtgacaatgagctacagtggtgccactgcactccagcctgggcaacaaaatgagaccttgtctcaaaaaaaaaaacaaattaaaaaataaaataaaaaaggtactcttgaaatataagcgaggttaagacctttccgaagaagttttgatggcgcagtgttctaagcataatagagggaaaggtaaaatgctatggacctccaaaagaaacccggtgaaaacttgtttgccagccagttaccttacattttatgggcatttaccttttttaagcacgatcacgtttttccttcttacttggttctatctctgagaggtagagctcattattttagagaaggcaactgaggcatgggttggtaatccaccactgaggtgctgatgagacatgctagctttcctcattccactgtcactaattctcgtttctctgtccagtttgaggctgtcctgtgtgcaatacagagtaattgggacaggatccttgccagtgacaaaatctctccatccaatttccaaagatggaattagagaataggggttcagttatgattctaagagtacaataaggctgtaccttccttttatggrcctgttacaaactctgatctggtgataactgtacttaacctatctgcaagaaggttgaagggatgctttaaaaatgaggggaaagaaaggtcaaaagtcagtgaagattctatctctttagtcatatgatccagggttattgttgacgttatttattgaagcttagaaagatcttatgtccatactgacttggataagctcctgggctctctttatggatttttgttattgtgatgtacttacttggtgcctttggcagggtgcagaacagtgttaaactacattgatttcccagtagtgtacagcaatgtattataatccttctaggtgacacctactgagctcttgctctgttcttgactctgtggatgagatgtgttcattctctgaagttgtcatttagccagtaggaactgtttgaaaataaaagttgcagatcactacaagggatggtgccaattcagtcctaagatccccattatctatactaagtatgtacagccaaatcccatgatcataactgctttgtcatggtgactctggctaatcagtaagttagatttccattctgcatac

SEQ ID NO: 69131 - DNA, 1389 bp, Homo sapiens
agtaagcaactataatcctatcccccgccttttcccctcactaaagaattatgtattggccgggcacggtggctgacacctgtaatcccaacactttgggaggctgaggtgggtggatcacgaggtcaggagattgagaccatcctggccaacacagtgaaaccccgtctctactaaaaatacaaaaaagaaatagttgggcgtggtggcacgtgcctgtagtcccaactaccctggaggctgaggcaggagaattgcttgaacctgggaggyagaggttgcagtgagctgagatcgtgccactgcactccagcctgggtgaaagagcgagactgtgtctcaaaaaaaataataaataaaataaaaaagaatatgtattagactacagcccctgacagtgctgatgatgtaggaataaacttgaatttgctcaaatatattaagactaaatcactgcaacatgagaactatatgttttagtataaacatggctggtggtagtgtaattgtttaataatttgtcacaatgtttagattaagagctgcttgagagctgtttttgtaccatttaccttttcaacatttcttttcaaagtatgcctaagaatgacaaatttactctgtaactgaagccttaatattttatatcgaacagttttaaaggacaccttggaaaaaaagggggtattagggcatttaaaagcaaggatccgagctgaagttttcaatgccctagatgatgaccgtgaaccccgaccatcattgtctcatgaaaaccttctaattaatgaattaattcgagagtatttagaattcaacaaatataagtatacagcatctgtcctcatagcaggtaagtggttattatttatcacataaaatctgtttctcccctttccccaattctcagaaactgtttatcctagaaatctaattcccttaccagatagtgccatctgggtgactgggacacaaaaatcacatgggttctttctgtagcttaaacagattcttacaagagaaaatacataactaaataatcacttaaactaggcatatacttggaaaaatcatctataattcctgtaaccgagaataaacaattgttgacgttttgtcctgtttgccaccagttttttcctgtgtattaagctttaaaaatatacgctgattaagtatattatttgttaaaaaataggctgggtaggtggctcacacctgtaatctcagtgctttgggaggccgaggcaagattacttgagcccaggagttcgcgaccagcctgggcaacacagggagaccccatctctggaaaagagtttttaaaattagccatgcatggtggcacgtgtctgttgtcctagctgaggctgagcaggggtcggggag

SEQ ID NO: 69132 - DNA, 1389 bp, Homo sapiens
agtaagcaactataatcctatcccccgccttttcccctcactaaagaattatgtattggccgggcacggtggctgacacctgtaatcccaacactttgggaggctgaggtgggtggatcacgaggtcaggagattgagaccatcctggccaacacagtgaaaccccgtctctactaaaaatacaaaaaagaaatagttgggcgtggtggcacgtgcctgtagtcccaactaccctggaggctgaggcaggagaattgcttgaacctgggaggcagakgttgcagtgagctgagatcgtgccactgcactccagcctgggtgaaagagcgagactgtgtctcaaaaaaaataataaataaaataaaaaagaatatgtattagactacagcccctgacagtgctgatgatgtaggaataaacttgaatttgctcaaatatattaagactaaatcactgcaacatgagaactatatgttttagtataaacatggctggtggtagtgtaattgtttaataatttgtcacaatgtttagattaagagctgcttgagagctgtttttgtaccatttaccttttcaacatttcttttcaaagtatgcctaagaatgacaaatttactctgtaactgaagccttaatattttatatcgaacagttttaaaggacaccttggaaaaaaagggggtattagggcatttaaaagcaaggatccgagctgaagttttcaatgccctagatgatgaccgtgaaccccgaccatcattgtctcatgaaaaccttctaattaatgaattaattcgagagtatttagaattcaacaaatataagtatacagcatctgtcctcatagcaggtaagtggttattatttatcacataaaatctgtttctcccctttccccaattctcagaaactgtttatcctagaaatctaattcccttaccagatagtgccatctgggtgactgggacacaaaaatcacatgggttctttctgtagcttaaacagattcttacaagagaaaatacataactaaataatcacttaaactaggcatatacttggaaaaatcatctataattcctgtaaccgagaataaacaattgttgacgttttgtcctgtttgccaccagttttttcctgtgtattaagctttaaaaatatacgctgattaagtatattatttgttaaaaaataggctgggtaggtggctcacacctgtaatctcagtgctttgggaggccgaggcaagattacttgagcccaggagttcgcgaccagcctgggcaacacagggagaccccatctctggaaaagagtttttaaaattagccatgcatggtggcacgtgtctgttgtcctagctgaggctgagcaggggtcggggag

SEQ ID NO: 69133 - DNA, 1389 bp, Homo sapiens
agtaagcaactataatcctatcccccgccttttcccctcactaaagaattatgtattggccgggcacggtggctgacacctgtaatcccaacactttgggaggctgaggtgggtggatcacgaggtcaggagattgagaccatcctggccaacacagtgaaaccccgtctctactaaaaatacaaaaaagaaatagttgggcgtggtggcacgtgcctgtagtcccaactaccctggaggctgaggcaggagaattgcttgaacctgggaggcagaggktgcagtgagctgagatcgtgccactgcactccagcctgggtgaaagagcgagactgtgtctcaaaaaaaataataaataaaataaaaaagaatatgtattagactacagcccctgacagtgctgatgatgtaggaataaacttgaatttgctcaaatatattaagactaaatcactgcaacatgagaactatatgttttagtataaacatggctggtggtagtgtaattgtttaataatttgtcacaatgtttagattaagagctgcttgagagctgtttttgtaccatttaccttttcaacatttcttttcaaagtatgcctaagaatgacaaatttactctgtaactgaagccttaatattttatatcgaacagttttaaaggacaccttggaaaaaaagggggtattagggcatttaaaagcaaggatccgagctgaagttttcaatgccctagatgatgaccgtgaaccccgaccatcattgtctcatgaaaaccttctaattaatgaattaattcgagagtatttagaattcaacaaatataagtatacagcatctgtcctcatagcaggtaagtggttattatttatcacataaaatctgtttctcccctttccccaattctcagaaactgtttatcctagaaatctaattcccttaccagatagtgccatctgggtgactgggacacaaaaatcacatgggttctttctgtagcttaaacagattcttacaagagaaaatacataactaaataatcacttaaactaggcatatacttggaaaaatcatctataattcctgtaaccgagaataaacaattgttgacgttttgtcctgtttgccaccagttttttcctgtgtattaagctttaaaaatatacgctgattaagtatattatttgttaaaaaataggctgggtaggtggctcacacctgtaatctcagtgctttgggaggccgaggcaagattacttgagcccaggagttcgcgaccagcctgggcaacacagggagaccccatctctggaaaagagtttttaaaattagccatgcatggtggcacgtgtctgttgtcctagctgaggctgagcaggggtcggggag

SEQ ID NO: 69134 - DNA, 491 bp, Homo sapiens
ttaggagaagtcatcatgtaggcatgattgattattacccaatctccagctcctctcttctccccagaggatggagagaggggctggaaagttccaagcttctaatcacacttggtctttctggtgaccagccccaatccaggagccagcaggagtagcctcattagcacaaaaggcattcctatgacccaggaaattccaagggatctagtagctctgtgtcaggaactgggatcggagaccaaatattagatggtctaatatttggagctaaagatgctcctatagcatattttcccattatttcacagcatcatggcattgcatataacctcattttttcatatatgacctatctctgatctattacctcacytccaaggtcctgggagataaggaggcaatgacatcatttttcagggttgttttagggatgaggggcaaggcctctcaccttgagagagagtggcagtgttgggcccactaataga

SEQ ID NO: 69135 - DNA, 1116 bp, Homo sapiens
cccctgggtgctgacccattgtggggacgcatgtctgtccagkccgtgtccaacaggagatcgacgacgtgatagggcaggtgcggcgaccagagatgggtgaccaggctcacatgccctacaccactgccgtgattcatgaggtgcagcactttggggacatcgtccccctgggtgtgacccatatgacatcccgtgacatcgaagtacagggcttccgcatccctaaggtaggcctggcgccctcctcaccccagctcagcaccagcccctggtgatagccccagcatggctactgccaggtgggcccactctaggaaccctggccacctagtcctcaatgccaccacactgactgtccccacttgggtggggggtccagagtataggcagggctggcctgtccatccagagcccccgtctagtggggagacaaaccaggacctgccagaatgttggaggacccagcgcctgcagggagagggggcagtgtgggtgcctctgagaggtgtgactgcgccctgctgtggggtcggagagggtactgtggagcttctcgggcgcaggactagttgacagagtccagctgtgtgccaggcagtgtgtgtcccccgtgtgtttggtggcaggggtcccagcatcctagagtccagtccccactctcaccctgcatctcctgcccagggaacgacactcatcaccaacctgtcatcggtgctgaaggatgaggccgtctgggagaagcccttccgcttccaccccgaacacttcctggatgcccagggccactttgtgaagccggaggccttcctgcctttctcagcaggtgcctgtggggagcccggctccctgtccccttccgtggagtcttgcaggggtatcacccaggagccaggctcactgacgcccctcccctccccacaggccgccgtgcatgcctcggggagcccctggcccgcatggagctcttcctcttcttcacctccctgctgcagcacttcagcttctccgtggccgccggacagccccggcccagccactctcgtgtcgtcagctttctggtgaccccatccccctatgagctttgtgctgtgccccgctagaatggggtaccta

SEQ ID NO: 69136 - DNA, 1116 bp, Homo sapiens
cccctgggtgctgacccattgtggggacgcatgtctgtccagtccgtgtccaacaggagatcgacgacgtgatagggcaggtgcggcgaccagagatgggtgaccaggctcacatgccctacaccactgccgtgattcatgaggtgcagcrctttggggacatcgtccccctgggtgtgacccatatgacatcccgtgacatcgaagtacagggcttccgcatccctaaggtaggcctggcgccctcctcaccccagctcagcaccagcccctggtgatagccccagcatggctactgccaggtgggcccactctaggaaccctggccacctagtcctcaatgccaccacactgactgtccccacttgggtggggggtccagagtataggcagggctggcctgtccatccagagcccccgtctagtggggagacaaaccaggacctgccagaatgttggaggacccagcgcctgcagggagagggggcagtgtgggtgcctctgagaggtgtgactgcgccctgctgtggggtcggagagggtactgtggagcttctcgggcgcaggactagttgacagagtccagctgtgtgccaggcagtgtgtgtcccccgtgtgtttggtggcaggggtcccagcatcctagagtccagtccccactctcaccctgcatctcctgcccagggaacgacactcatcaccaacctgtcatcggtgctgaaggatgaggccgtctgggagaagcccttccgcttccaccccgaacacttcctggatgcccagggccactttgtgaagccggaggccttcctgcctttctcagcaggtgcctgtggggagcccggctccctgtccccttccgtggagtcttgcaggggtatcacccaggagccaggctcactgacgcccctcccctccccacaggccgccgtgcatgcctcggggagcccctggcccgcatggagctcttcctcttcttcacctccctgctgcagcacttcagcttctccgtggccgccggacagccccggcccagccactctcgtgtcgtcagctttctggtgaccccatccccctatgagctttgtgctgtgccccgctagaatggggtaccta

SEQ ID NO: 69137 - DNA, 1116 bp, Homo sapiens
cccctgggtgctgacccattgtggggacgcatgtctgtccagtccgtgtccaacaggagatcgacgacgtgatagggcaggtgcggcgaccagagatgggtgaccaggctcacatgccctacaccactgccgtgattcatgaggtgcagcactttggggacatcgtccccctgggtgtgacccatatgacatcccgtgacatcgaagtacagggcttccgcatccctaaggtaggcctggcgccctcctcaccccagctcagcaccagcccctggtgatagccccagcatggctactgccaggtgggcccactctaggaaccctggccacctagtcctcaatgccaccacactgactgtccccacttgggtggggggtccagagtataggcagggctggcctgtccatccagagcccccgtctagtggggagacaaaccaggacctgccagaatgttggaggacccarcgcctgcagggagagggggcagtgtgggtgcctctgagaggtgtgactgcgccctgctgtggggtcggagagggtactgtggagcttctcgggcgcaggactagttgacagagtccagctgtgtgccaggcagtgtgtgtcccccgtgtgtttggtggcaggggtcccagcatcctagagtccagtccccactctcaccctgcatctcctgcccagggaacgacactcatcaccaacctgtcatcggtgctgaaggatgaggccgtctgggagaagcccttccgcttccaccccgaacacttcctggatgcccagggccactttgtgaagccggaggccttcctgcctttctcagcaggtgcctgtggggagcccggctccctgtccccttccgtggagtcttgcaggggtatcacccaggagccaggctcactgacgcccctcccctccccacaggccgccgtgcatgcctcggggagcccctggcccgcatggagctcttcctcttcttcacctccctgctgcagcacttcagcttctccgtggccgccggacagccccggcccagccactctcgtgtcgtcagctttctggtgaccccatccccctatgagctttgtgctgtgccccgctagaatggggtaccta

SEQ ID NO: 69138 - DNA, 1394 bp, Homo sapiens
aaaaacacataatttgaatcaacacaaccacccacagcctaattattagcatcatccctctactattttttaaccaaatcaacaacaacctatttagctgttccccaaccttttcctccgaccccctaacaacccccctcctaatactaactacctgactcctacccctcacaatcatggcaagccaacgccacttatccagtgaaccactatcacgaaaaaaactctacctctctatactaatctccctacaaatctccttaattataacattcacagccacagaactaatcatattttatatcttcttcgaaaccacacttatccccaccttggctatcatcacccgatgaggcaaccagccagaacgcctgaacgcaggcacatacttcctattctacaccctagtaggctcccttcccctactcatcgcactratttacactcacaacaccctaggctcactaaacattctactactcactctcactgcccaagaactatcaaactcctgagccaacaacttaatatgactagcttacacaatagcttttatagtaaagatacctctttacggactccacttatgactccctaaagcccatgtcgaagcccccatcgctgggtcaatagtacttgccgcagtactcttgaaactaggcggctatggtataatacgcctcacactcattctcaaccccctgacaaaacacatagcctaccccttccttgtactatccctatgaggcataattataacaagctccatctgcctacgacaaacagacctaaaatcgctcattgcatactcttcaatcagccacatagccctcgtagtaacagccattctcatccaaaccccctgaagcttcaccggcgcagtcattctcataatcgcccacggacttacatcctcattactattctgcctagcaaactcaaactacgaacgcactcacagtcgcatcataatcctctctcaaggacttcaaactctactcccactaatagctttttgatgacttctagcaagcctcgctaacctcgccttaccccccactattaacctactgggagaactctctgtgctagtaaccacgttctcctgatcaaatatcactctcctacttacaggactcaacatactagtcacagccctatactccctctacatatttaccacaacacaatggggctcactcacccaccacattaacaacataaaaccctcattcacacgagaaaacaccctcatgttcatacacctatcccccattctcctcctatccctcaaccccgacatcattaccgggttttcctcttgtaaatatagtttaaccaaaacatcagattgtgaatctgacaacagaggcttacgaccccttatttaccga

SEQ ID NO: 69139 - DNA, 508 bp, Homo sapiens
ctacctgtatctcttgttctctcctatttgagtttcacttccagagaacttgttcttcagcaagaatgtgtcactagtaaggacatctctagcatttctctagccttccttttctgctgctcaaaaataatcgttacaaagcttaggtttaagctgtatatgaaatatttatgcgactctcaaactttaaaggagttgctcctttgttccaaaattaaatgtgttagataaatttgtgattgtatgggtggcttcatgaattaagaattgaattaatacagactttttgataattgggacattttcctgtgactctggaaggtcttgtcaaagccccatgaggcagttataatatgatgttaagatggctttggggagctaggagaaaacattggcccatattgaatgacrtggagacggcagaccatacaaaaaaggaccaaaagacttagaggaaatgggtatgcaagaatgaatgttatataacactggtaaacccaccagctga

SEQ ID NO: 69140 - DNA, 636 bp, Homo sapiens
tacactaacagtaaactagaataataaaacatgcatcacagttgctggtaaagctaaatcagatatttttttcttagaaaaagcattccatgtgtgttgcagtgatgacaggagtgcccttcagtcaatatgctgcctgtaatttttgttccctggcagaatgtattgtcttttctccctttaaatcttaaatgcaaaactaaaggcagctcctgggccccctccccaaagtcagctgcctgcaaccagccccacgaagagcagaggcctgagcttccctggtcaaaatrgggggctagggagcttaaccttgctcgataaagctgtgttcccagaatgtcgctcctgttcccaggggcaccagcctggagggtggtgagcctcactggtggcctgatgcttaccttgtgccctcacaccagtggtcactggaaccttgaacacttggctgtcgcccggatctgcagatgtcaagaacttctggaagtcaaattactgcccacttctccagggcagatacctgtgaacatccaaaaccatgccacagaaccctgcctggggtctacaacacatatggactgtgagcaccaagtccagccctgaatctgtgaccacctgccaagatgcccctaactg

SEQ ID NO: 69141 - DNA, 636 bp, Homo sapiens
tacactaacagtaaactagaataataaaacatgcatcacagttgctggtaaagctaaatcagatatttttttcttagaaaaagcattccatgtgtgttgcagtgatgacaggagtgcccttcagtcaatatgctgcctgtaatttttgttccctggcagaatgtattgtcttttctccctttaaatcttaaatgcaaaactaaaggcagctcctgggccccctccccaaagtcagctgcctgcaaccagccccacgaagagcagaggcctgagcttccctggtcaaaatagggggctagggagcttaacctygctcgataaagctgtgttcccagaatgtcgctcctgttcccaggggcaccagcctggagggtggtgagcctcactggtggcctgatgcttaccttgtgccctcacaccagtggtcactggaaccttgaacacttggctgtcgcccggatctgcagatgtcaagaacttctggaagtcaaattactgcccacttctccagggcagatacctgtgaacatccaaaaccatgccacagaaccctgcctggggtctacaacacatatggactgtgagcaccaagtccagccctgaatctgtgaccacctgccaagatgcccctaactg

SEQ ID NO: 69142 - DNA, 636 bp, Homo sapiens
tacactaacagtaaactagaataataaaacatgcatcacagttgctggtaaagctaaatcagatatttttttcttagaaaaagcattccatgtgtgttgcagtgatgacaggagtgcccttcagtcaatatgctgcctgtaatttttgttccctggcagaatgtattgtcttttctccctttaaatcttaaatgcaaaactaaaggcagctcctgggccccctccccaaagtcagctgcctgcaaccagccccacgaagagcagaggcctgagcttccctggtcaaaatagggggctagggagcttaaccttgctcgataaagctgtgttccyagaatgtcgctcctgttcccaggggcaccagcctggagggtggtgagcctcactggtggcctgatgcttaccttgtgccctcacaccagtggtcactggaaccttgaacacttggctgtcgcccggatctgcagatgtcaagaacttctggaagtcaaattactgcccacttctccagggcagatacctgtgaacatccaaaaccatgccacagaaccctgcctggggtctacaacacatatggactgtgagcaccaagtccagccctgaatctgtgaccacctgccaagatgcccctaactg

SEQ ID NO: 69143 - DNA, 636 bp, Homo sapiens
tacactaacagtaaactagaataataaaacatgcatcacagttgctggtaaagctaaatcagatatttttttcttagaaaaagcattccatgtgtgttgcagtgatgacaggagtgcccttcagtcaatatgctgcctgtaatttttgttccctggcagaatgtattgtcttttctccctttaaatcttaaatgcaaaactaaaggcagctcctgggccccctccccaaagtcagctgcctgcaaccagccccacgaagagcagaggcctgagcttccctggtcaaaatagggggctagggagcttaaccttgctcgataaagctgtgttcccagaatgtcgctcctgttcccaggggcaccagcctggagggtggtgagcctcactggtggcctgatgcttaccttgtgccctcacaccagtggtcactggaaccttgaacacttggctgtcgcccggatctgcagatgtcaagaacttctggaagtcaaattactgcccacttctccagggcagatacctgtgaacatccaaaaccatgccacagaaccctgcctggggtctacaacacatayggactgtgagcaccaagtccagccctgaatctgtgaccacctgccaagatgcccctaactg

SEQ ID NO: 69144 - DNA, 636 bp, Homo sapiens
tacactaacagtaaactagaataataaaacatgcatcacagttgctggtaaagctaaatcagatatttttttcttagaaaaagcattccatgtgtgttgcagtgatgacaggagtgcccttcagtcaatatgctgcctgtaatttttgttccctggcagaatgtattgtcttttctccctttaaatcttaaatgcaaaactaaaggcagctcctgggccccctccccaaagtcagctgcctgcaaccagccccacgaagagcagaggcctgagcttccctggtcaaaatagggggctagggagcttaaccttgctcgataaagctgtgttcccagaatgtcgctcctgttcccaggggcaccagcctggagggtggtgagcctcactggtggcctgatgcttaccttgtgccctcacaccagtggtcactggaaccttgaacacttggctgtcgcccggatctgcagatgtcaagaacttctggaagtcaaattactgcccacttctccagggcagatacctgtgaacatccaaaaccatgccacagaaccctgcctggggtctacaacacatatggactrtgagcaccaagtccagccctgaatctgtgaccacctgccaagatgcccctaactg

SEQ ID NO: 69145 - DNA, 2171 bp, Homo sapiens
tatggacatgtacctttctaatctacaaacatacaactatgtgatggtataggaactgctgatactatttgtactcacttaaggtaataaagaggcttatttagggctgatcacaaaatgagttttcataaagtgaattacatttctcattttattactttattatcctttttatatatggatacttcatctcagctatagtaacacagggaacaactggtggacaaagtgtgtgtatatcctcccccagaaaagcctggggtaacctttgagaagtatagtgcataagaaatgtagtgcctaagtatttgctctttcgctcaytcctttgtggttaatttcaatgtaggcatactggggtgtacatcttgagcctgggcagcaaacaaggcatagggtttggccattcttattatgctcttggcactgaatactctaatatcattatgcttttccctacaatgagccatctttcttataaggctgtacttctagtcccaaagagagactgaatgagtgtggatggcccaacctaccctcataactgagagaccaactcagattgcatggtttgtacctgctgctagaaataaacgggatgtgaagaagagtaaagaatcatattgttggcaaggataattctcattaaatattttttccagtttgaatcttctttctgtgcatatgtagcatattttgctcccttggactacatcttctcaaaggacagctattattcctattgtttacattcatacagtcctcttactgcccaatatttgaaatattttaagtttacgagggaaaaaatgaacatatgactatattccttcatcaaaaaatggtttcctatttcaatatcctctctgttctctggatttatcaactccaaaattagttttaaccatgtctgtaactataaaagcacaataaaaggtaaaaaaaaattatttcccaaaccatttcagactaattattggaactcattttgtcatgactctatttctcttttattgtcttcatctctttcatttcattgtatgtatgtataacacacatatgcatgtaaaaaatcagattccactgccatacttttctattttcttgtttcttcctcctgcctttaataagctgtaagcattgcttaagttctcctattctgattcatgtttcaggtagctaatgtaccactccttgttttctgtgatgaagttaggaacaatttgactcttgactatcgtttgtgttaccctcagtcacagttgttctgtactagatgttgttgacaaggcaataataagccctattaaatcctacctcttacatcaccaaaatctatgttattggctagacaaattgggccgatgtgtatctcttcactcagaaagttttcatgacttctccatgtataaggactcataagcaaacactatacaaatctggaaaatatatttccttgtgtggtgtaaaagtcacaggaaagtattaaatttggcttgggtaatgggatattcttcctcatttgtatcatgcaaataaaactccgtaacattttacaaatcacatacccaccctctctccccttgggatggggttggaggtgtatgtttttttttaacaatggtagcattctttttgacacaaagcaaggcagttcaaaataacactgaaacaatcctacattcatgcttcttcttcttctttacaaggcatctgacaggaaaagtatcaatgtgctaatctccacagcaaatcatgagataatggacatcttgcaaaagaatataaggtgacttgaggattataaaggtaatcttgtaatgcttttgaaaactcttcgaaagcactaaaacatcaatggcctgagagagaaggaagacctttaaaatatattgcatattattattcaataaggcaaaagcattatttgatgccttctttgggatcagtagcagttgaaagacctgtgttgcaaaattatatttaaaggtcaacagctgttttattccagatggaacctactcctgaagatgtttaaacacttttttatagaaattgtgattactgtagtgatgctagtctatccctatagaatttctaggacctattggagaagaaatactttagtaaggatatttggccttattaaccctagtaaagcttgatgtaaa

SEQ ID NO: 69146 - DNA, 858 bp, Homo sapiens
ataggcttggagagccacaggcaaggatgagagaggagaatatggaaaggattggggaggaggtgagacagctgatggaaaagctgagggaaaagcagttgagtcatagtctgcgggcagtcagcactgatccccctcaccatgaccatcacgatgagttttgccttatgccctgaatcctgatggtttccctgaagttaatagggagacccctgcttcctaaacttacacatttgtggtgtacctttgtcgtaaacgttttgatgttacctatttcttgtgggtctcctattaccagcttctaaatgaatgttgtttttgacccagtttgtaagtttctgtcagcaggagagttttacctattgcatggaaagatgctcattatatattgtgaagttaataaaacagttttaaaaagcattctctgcattcttttttactttaaatcttaaacatgcacctaaacagtcatatatatatatatatatatatatatatatatatatatayacacacacacatatatatagtaaatagtgtttatctctgtggtagaattaagagggagtttattcttgcttacccataatttcttatttttcaaaatggaacacgtattactgataaaaagcaatgtgaccaccttataaaagcgatgtgagcacttactaaacacttgtgacagaatctcaattttagcttgcctctgggttctctttttagaaatgtaagagacacatctctttgaagataataatatttatcagtaagatgaagacaatcacctcccaggcttgttgtatggaccagataaggtaatgaggttgtgagctttctcccaagttcttgttcttactg

SEQ ID NO: 69147 - DNA, 560 bp, Homo sapiens
gaaggagaagaggagatgcaggaaagcaatgtctgtctgcatgcctgggaactgaccacagaaggtgccagtgagctcaacggtgggcccaggatacgtggggtggggttaccccatcctaactagtgcttctccagccagacagttttatttattttctttttagttctgaactctgtctgaagttkttttactcatttattcagctatccatttgttaattgtctgttccccctacccacaactagacgatcagctatacaagaacagggacctctcattctaggtcaccatcctctttccgggcttgagagcagtgcatggcacaaagcagatcctcaataaatattaaacgaatgagtgagtgaatgaatgaatgtactacttcacggtgtgggggcaaaagcgtgatcccgattcagtggacagttgactccatgtggatgatggacatggataagttgcagacagagccagtgggagaggaagaagggggctgatacccacacataattacagctggtcacctgctttgtgggcagatgggaggcaccttcagg

SEQ ID NO: 69148 - DNA, 625 bp, Homo sapiens
atatgttttgtagagtttcctcattccacatacatctgtctttgttctatcctcctgaaaactgaggcaaagggtacrgggcaatgttctcattgtcaatgttccccctgtgtgcctccccattttcattattcaccatcaagactaagtaattaggatatttctctgtttgtatatttctcaaaaataagaatcatgtacaagttgacagcaactcaatggaccctatggcttataagaagcagaaaggtactgccagtaccttgctcaagaaactttgagttctcaaagctaattttaaaaattcatagccatcaatttcaagttttcctgaattccaaaagctgccattacatattggtaaccaggcctgggagattctgaccaaagatctttaatataagccaaaggtagtgagaactcaggacctaaaggaaatgtttatcagaaagaaacttagtggaaaggagagaggaaagatgaggaaaaaacagccaatctcatgtgtcctggttcaaatcaattcccaaattgaaaccgtagagagtggtgggtatcaggtatgaccagataagttactgggaaatttaagagtattggggttagtttcttcacttccataggc

SEQ ID NO: 69149 - DNA, 589 bp, Homo sapiens
ttgtgggacgaagccccagaggagggcttggtttcgtttgctgtgaggatttgtgtttctcctgatcttagcttgttcttagtgcgagggtgtggcggaggagggctcggggaccttccctgcytgcatgtagcaattctgtgatataccaaggccagccctaccctcttgctagaaatgcatggcctgggaagatttctgacaagattagaaagaaaggaatacacatagcctattaatgaaggctgcatattaaatacgaatcatacatttttaggaaaattattgaattgtatctttgtggccggtgattgaaatcatagtcctaaagagttgagtagatcacctgtgcagggcagcgtgctgggcgctgaaggagaggggcacagaggagaagttcttgccttcaaggcaccaaaccttcagcacagctggttgctggaaatagatggagacagccccgagcggagcagcaaaggagaggacccagagaggagtagtcctggggctgtcgggaagcaccggctgccccaaccctgggcaagtggctgaggcctactgccccaggttggccccaccagtgatggtg

SEQ ID NO: 69150 - DNA, 589 bp, Homo sapiens
ttgtgggacgaagccccagaggagggcttggtttcgtttgctgtgaggatttgtgtttctcctgatcttagcttgttcttagtgcgagggtgtggcggaggagggctcggggaccttccctgcttgcatgtagcaattctgtgatataccaaggccagccctaccctcttgctagaaatgcatggcctgggaagatttctgacaagattagaaagaaaggaatacacatagcctattaatgaaggctgcatattaaatacgaatcatacatttttaggaaaattattgaattgtatctttgtggccggtgattgaaatcatagtcctaaagagttgagtagatcacctgtgcagggcagcgtgctgggcgctgaaggagaggggcacagaggagaagttcttgccttcaaggcaccaaaccttcagcacagctgkttgctggaaatagatggagacagccccgagcggagcagcaaaggagaggacccagagaggagtagtcctggggctgtcgggaagcaccggctgccccaaccctgggcaagtggctgaggcctactgccccaggttggccccaccagtgatggtg

SEQ ID NO: 69151 - DNA, 1088 bp, Homo sapiens
agtgaggaaggagccacattttaatttacacattacaaaatacgcttcttagattgtcaccggtgtcagtaagaaaccgtgttccacagcaatgaaacctgggaagtaatggattaagtaaatttccctgcttctttttttttttttttttcctgagaaattttctcagaatgtgaaaagggccaatgtccatttaggatgtctaaggaaatttagyttaagttcctcttaaactagttaattagaatatgcttctctgtcttcttttttttttttttttgagacagattcttgtgctattgctcaggctggagtgcagtggcgtgatctcggctcactgcaagctctgcctccccagttcaggccattctgttggctcagcctcccaagtacctgggactacaggcgccaccatgcccggctaatattttgtatttttagtagagacggggtttcactgtgttagccaggatggtctcgaactcctgaccttgtgatccgcccacctcggcctcccaaagtgctgggattacagacatgagccaccccgcccagccgcttctctggtcttcttttaggcctaagatgcctcagaattcatgctgggaaatgcattccacacggtcgattgttacttttgatatggccagttttcgctcgtgtctctctgtgtctctgtctctgtctctctctccttctctctctctctttcccccaaacctatctgagatcatcttggatccatgtctgccacgtccaggtatcatccagatgtttgagaaacgtctcttctagcataatgatgatgatgatggtgattatggtgataatgatgatggtgatgatggcgatgatgataatgatgatggtgatgatggtgatgatggtgatgttgatgatggtgatgatggtgatgatgatgatggtgatggtggtgatgatggtgatggtgatgatggtggtgatgacactcctgtatagcctctgatggtttacagagtttgtaatacgtaggctgctcaagttacacagttcaaaggagggggtaataacagcacttcactcaagaggtttattgcaaatgctca

SEQ ID NO: 69152 - DNA, 1829 bp, Homo sapiens
tgcctgtctcataagaatccatgtttaaatagcaagtctagaagagtgtccagcatataacaggtacccaggatgtctctttggtttaatccacccgaagaggttgacttcctccttttgattcagtgattggcttggcggcgactttccagaatggaattccttataaggggccttcccagattggaattgcacggcgatctcgaagcttgcagacatggagcggttgccaccagggcatggctcctgtcatcccgcagcctgggaaaggccacatagaggctgtctctttggcctggtggcaactgtgactcaccgtcaccatcccgaccccaccctcagagcaggtggccttccctccaggacttgggaggggccgctggacaggatggcatggacagtcccagctaaggctgctcagactggactctgagaccctgcacactgatcaacctgtgggtgagcctggtggatcctgtcccatctagtctgtcgctggctgagccgaggcttcacatgtgccatgccatgcccttcctgagcttcagtttcctgatgtgcgatgtgtgcaggggatgaaacagaccaggcagtccccctgggacctcatagctcttggtgaccattccactcatgctggtggcggccggttccacggtccggatgctacccccagttyatgggctctttcctggtcttttttgctctgtctgctgccctggctggtgcattctgactctgtagatggccgggctgagggtgacaccaggccccagtgtgctgaggctatgaacacccagccttgcttgcgtcctgggtttgggatgtaaaggattcccagtctgctaaagccacaccctccacagccaccccaaagccgagcctttgctttcaggattcctgtaatcctcatgcagcatgggcagccctggcacctgtgcccgcatgctcagggaggagggatggccccacagcaccgggggttcttccagattcaacaatggacggaccccacacaatgccctaaaaggcagggttattggtggcaaggacctgacatttcctgggcgccttctccaagccaggctctgggccaggcactgggcagggatgtgggcccatccagccctgccttgagcacggcctggtccctcaggggagacagacatgcagagaaagagcctccagcgtgggggggctacatgcacccatgtagcagatctgttctgcaggcgaccctggggtttcaaaggaagcatggttgattcggatcatgctccaggaaccctgaaaggagggagcatttaatagacaaagatgccgaagctcagagaatgaatcagcagttcagagaatgagtcaggaatttccaaactaagccagtttcacagacaccccaggcctgggcagcacgcacagcaggcatgtgatttccccttttccgggtctgcaggttgactgtggttccgctgatcccaactggctttgcccgggtgactcaacctcggcctgtgtgcggtcgacagggacgggtctgggtcagctcctggcccaggctgctccagccgatctcggggccgatcaccggagtgcaaacctcaagggcactcttaaggcctttggtcacatggcattcacttgattccattggccaaagtaagtgacttaccaggatggacagggtgcggagtgccctctaaccacgcgggaaggaggtcctgtacttcatcacccagtggtggagcaggaatttgaacccaagcctgactcagaaggccttggcaccatcggcctctcatctgaggtcatgtgcaagggccctggctcgg

SEQ ID NO: 69153 - DNA, 628 bp, Homo sapiens
ttattggtaatagccagaaactagaaacaaaccatatgcctatcaagagatgaatgtatacacaaactatggtaaacccattcaatggaatactactcagcagtgaaaaggaaagaactgttggtatatataaaacaaaatgaatgaatcacaaaattgttatgcttggtgaataaagccagacaaaaaagagaatatcttgtgtgcttccatttacataaagtcctagaaaacacaaagtaatctatcatgaaagagagctatcagtggtttcgtggaggtgggaggagggagtgatgatgaattgctaaagggcatatggaagatttttggggtggcgaaaatatttgatatcttgattgatatcttgtgatggttttatggatattgacatatgatgaatttcatcatattgtatcatttaaatgtgtgcagagtattgtatataaagtataccacaatgcagatacagtaaatgtaaaaaaagaattataaaaaattatatgactgaaggcaggggctcacaaagtgtggtctgaggacacttccagagcatcggcgaggccagaactagttttctrttaacactgaggtgtgatttaccttcttcactcgattcttttatgca

SEQ ID NO: 69154 - DNA, 241 bp, Homo sapiens
tgtctcactggaacccgcatacaataggagcccagaaaacayacctgttccgtgagcgagcgagtgagatgatctctgaccttggccagtgggagccagggccctaagggctctgagtgcagccacaggcccagggctgggcgtccatggaggaggtctggccaaagggctgagtggggcagcctggtgaaagggccccgaccgcttgaagagcaaaggaaatgtggtggggtgggggggg

SEQ ID NO: 69155 - DNA, 2788 bp, Homo sapiens
aggggaagggacgtgcaagacctcctaagccaccaccgcacccttgaacaaaccgagttcacttcaggcatgtcatgtgcaccccacacaaggcatgggtcaggtggcatgactgttcccattttacagatgaggaaactgaggctgcgatgggggaggggcttggccaggtcactcaagggtggagtgggggtgagtgaggctcctgactcccaaatccagtgggagttgggcagtgggacaggcacttgggtgaacgcggtgcctcaggcctccccatcctccgtcccccaatctctgcaggccttggtggatctcctgctggtcagtggggcggcggcagccactaccgtggcctggtaccaggtgagcccgctggccgcccgcctgctctacccctacctggcctggctggccttcacgaccacactcaactactgcgtatggcgggacaaccatggctggcrtgggggacggcggctgccagagtgagtgcccggcccaccagggactgcagctgcaccagcaggtgccatcacgcttgtgatgtggtggccgtcacgctttcatgaccactgggcctgctagtctgtcagggccttggcccaggggtcagcagagcttcagaggtggccccacctgagcccccacccgggagcagtgtcctgtgctttctgcatgcttagagcatgttcttggaacatggaattttataagctgaataaagtttttgacttcctttaccatggcctttttgcttgggtgggacccctggccacagggaagagggggagctggggctgcactggagctcgtctctgcaggatctgcctgggctgccttctccagacagggctggatccagctggggctgccccacgcttcctgggacgctcccgaagccctgcaggagatgaacagagcagccctgggtgccaccctggggcccacactggcgcagacccagctggggccgtgggcttcagcagagggagggggtcctgtccgcttcccatggcttccgggatgctcagcccgggccctttaatggccgggcccacaaccactgttcgacgcctggtcctgcccagtgcgtggccctcagctgcttttacccaggacagagttgggggtgctgactgccctgtcccccgggggcccaggcttatggcagcctcactgcaccagggatagccccgcaaacacccagttggctcgagggggagtcagaggcaggaaaggttaggtcccgactccagcagacagggcctccttgctggcccagagcggccaggattggaggtgtcacagccactcactccctcaccccggcttcgaactgggtgacccatggcctctccaggcagctgtttggagtaaatgagccgagtcccatacgcagcactcctccgtcttgctctcggtcaccacacccatgcagcactcagcaacacagcccgcggctccctcccctcggccaggcctgacctgccgggctttttgttttttgtttttggcagctaagttcattcaaattggcaaaatgttcatagacagctcgtcatcactcaacagcccgcggctgctgcttcctcttttctcccccggctcctgtgtcctctcccgacctgtacgctcagacacaacctgacgttcacaaaagcttggacacagtggctcacacctgtaatcccagcactttgggaggctgaggcgggaggattgcttgaggccaggtgtttgagaccagcctgggcaacatagggagactcttgtctataccatccactctggtgcacgcacaacacacacacacacacacacacacacacacacacacacgaaagaacgaacagctcagggaaatgggtagacagtcgactgcattcttctgacagaagggatggctcccgcccaggggctgcgctactccaccctgaccctcagcctcccgctcccttgactctggcagagtttgatgcccaacagatcacgctctgcaggatccaaaaactctgcggccacgggcactcagctgagccctcagccctcatggctttcccgatgctcaccggtgcagaggagccagctggggagcctctgtgtatcctttttattaacttatttctgaagttctccaagacgcccagagttgaattcctccagagctctgtgcagacagtccaagcagcggatggcagagaggtccttgctagcaagaaacttacaggccaggctgtctcctgctccagcatgccggtgagcatgcaccgtccccgcagggcacaggggtatcctttgaagtgtcaagggacacctgagtccgtgccagacacttagggattggagaaagtgcaacccagacttctgccatctccgcaactcgtggggttgttcatctgtaacaaatgtcccacatagctcctgctggccacaaaacacgcactgccacaaaacgccttggaaaaatgggcgagaggagaacgcatttagcatttcgtctgccggcttccttttaacagcctggcgacgtttccccaggaaatgctcgtaacagacagcattctctccttttctaagctgctgtcatccactgggaacttaaggttttgatgctttctgagtgggtttatttattatttttttttgagacagtcttgctctatcgcccaggctggagtgcagtgacgccatcttggctcactgcaacctctgcctcccaggttcaagtgattctcctgcctcagcttccagagtagctgggattacaggtgtgtaccaccatgcc

SEQ ID NO: 69156 - DNA, 2788 bp, Homo sapiens
aggggaagggacgtgcaagacctcctaagccaccaccgcacccttgaacaaaccgagttcacttcaggcatgtcatgtgcaccccacacaaggcatgggtcaggtggcatgactgttcccattttacagatgaggaaactgaggctgcgatgggggaggggcttggccaggtcactcaagggtggagtgggggtgagtgaggctcctgactcccaaatccagtgggagttgggcagtgggacaggcacttgggtgaacgcggtgcctcaggcctccccatcctccgtcccccaatctctgcaggccttggtggatctcctgctggtcagtggggcggcggcagccactaccgtggcctggtaccaggtgagcccgctggccgcccgcctgctctacccctacctggcctggctggccttcacgaccacactcaactactgcgtatggcgggacaaccatggctggcgtgggggacggcggctgccagagtgagtgcccggcccaccagggactgcagctgcaccagcaggtgccatcacgcttgtgatgtggtggccgtcacgctttcatgaccactgggcctgctagtctgtcagggccttggcccaggggtcagcagagcttcagaggtkgccccacctgagcccccacccgggagcagtgtcctgtgctttctgcatgcttagagcatgttcttggaacatggaattttataagctgaataaagtttttgacttcctttaccatggcctttttgcttgggtgggacccctggccacagggaagagggggagctggggctgcactggagctcgtctctgcaggatctgcctgggctgccttctccagacagggctggatccagctggggctgccccacgcttcctgggacgctcccgaagccctgcaggagatgaacagagcagccctgggtgccaccctggggcccacactggcgcagacccagctggggccgtgggcttcagcagagggagggggtcctgtccgcttcccatggcttccgggatgctcagcccgggccctttaatggccgggcccacaaccactgttcgacgcctggtcctgcccagtgcgtggccctcagctgcttttacccaggacagagttgggggtgctgactgccctgtcccccgggggcccaggcttatggcagcctcactgcaccagggatagccccgcaaacacccagttggctcgagggggagtcagaggcaggaaaggttaggtcccgactccagcagacagggcctccttgctggcccagagcggccaggattggaggtgtcacagccactcactccctcaccccggcttcgaactgggtgacccatggcctctccaggcagctgtttggagtaaatgagccgagtcccatacgcagcactcctccgtcttgctctcggtcaccacacccatgcagcactcagcaacacagcccgcggctccctcccctcggccaggcctgacctgccgggctttttgttttttgtttttggcagctaagttcattcaaattggcaaaatgttcatagacagctcgtcatcactcaacagcccgcggctgctgcttcctcttttctcccccggctcctgtgtcctctcccgacctgtacgctcagacacaacctgacgttcacaaaagcttggacacagtggctcacacctgtaatcccagcactttgggaggctgaggcgggaggattgcttgaggccaggtgtttgagaccagcctgggcaacatagggagactcttgtctataccatccactctggtgcacgcacaacacacacacacacacacacacacacacacacacacacgaaagaacgaacagctcagggaaatgggtagacagtcgactgcattcttctgacagaagggatggctcccgcccaggggctgcgctactccaccctgaccctcagcctcccgctcccttgactctggcagagtttgatgcccaacagatcacgctctgcaggatccaaaaactctgcggccacgggcactcagctgagccctcagccctcatggctttcccgatgctcaccggtgcagaggagccagctggggagcctctgtgtatcctttttattaacttatttctgaagttctccaagacgcccagagttgaattcctccagagctctgtgcagacagtccaagcagcggatggcagagaggtccttgctagcaagaaacttacaggccaggctgtctcctgctccagcatgccggtgagcatgcaccgtccccgcagggcacaggggtatcctttgaagtgtcaagggacacctgagtccgtgccagacacttagggattggagaaagtgcaacccagacttctgccatctccgcaactcgtggggttgttcatctgtaacaaatgtcccacatagctcctgctggccacaaaacacgcactgccacaaaacgccttggaaaaatgggcgagaggagaacgcatttagcatttcgtctgccggcttccttttaacagcctggcgacgtttccccaggaaatgctcgtaacagacagcattctctccttttctaagctgctgtcatccactgggaacttaaggttttgatgctttctgagtgggtttatttattatttttttttgagacagtcttgctctatcgcccaggctggagtgcagtgacgccatcttggctcactgcaacctctgcctcccaggttcaagtgattctcctgcctcagcttccagagtagctgggattacaggtgtgtaccaccatgcc

SEQ ID NO: 69157 - DNA, 2788 bp, Homo sapiens
aggggaagggacgtgcaagacctcctaagccaccaccgcacccttgaacaaaccgagttcacttcaggcatgtcatgtgcaccccacacaaggcatgggtcaggtggcatgactgttcccattttacagatgaggaaactgaggctgcgatgggggaggggcttggccaggtcactcaagggtggagtgggggtgagtgaggctcctgactcccaaatccagtgggagttgggcagtgggacaggcacttgggtgaacgcggtgcctcaggcctccccatcctccgtcccccaatctctgcaggccttggtggatctcctgctggtcagtggggcggcggcagccactaccgtggcctggtaccaggtgagcccgctggccgcccgcctgctctacccctacctggcctggctggccttcacgaccacactcaactactgcgtatggcgggacaaccatggctggcgtgggggacggcggctgccagagtgagtgcccggcccaccagggactgcagctgcaccagcaggtgccatcacgcttgtgatgtggtggccgtcacgctttcatgaccactgggcctgctagtctgtcagggccttggcccaggggtcagcagagcttcagaggtggccccacctgagcccccacccgggagcagtgtcctgtgctttctgcatgcttagagcatgttcttggaacatggaattttataagctgaataaagtttttgacttcctttaccatggcctttttgcttgggtgggacccctggccacagggaagagggggagctggggctgcactggagctcgtctctgcaggatctgcctgggctgccttctccagacagggctggatccagctggggctgccccacgcttcctgggacgctcccgaagccctgcaggagatgaacagagcagccctgggtgccaccctggggcccacactggcgcagacccagctggggccgtgggcttcagcagagggagggggtcctgtccgcttcccatggcttccgggatgctcagcccgggccctttaatggccgggcccacaaccactgttcgacgcctggtcctgcccagtgcgtggccctcagctgcttttacccaggacagagttgggggtgctgactgccctgtcccccgggggcccaggcttatggcagcctcactgcaccagggatagccccgcaaacacccagttggctcgagggggagtcagaggcaggaaaggttaggtcccgactccagcagacagggcctccttgctggcccagagcggccaggattggaggtgtcacagccactcactccctcaccccggcttcgaactgggtgacccatggcctctccaggcagctgtttggagtaaatgagccgagtcccatacgcagcactcctccgtcttgctctcggtcaccacacccatgcagcactcagcaacacagcccgcggctccctcccctcggccaggcctgacctgccgggctttttgttttttgtttttggcagctaagttcattcaaattggcaaaatgttcatagacagctcgtcatcactcaacagcccgcggctgctgcttcctcttttctcccccggctcctgtgtcctctcccgacctgtacgctcagacacaacctgacgttcacaaaagcttggacacagtggctcacacctgtaatcccagcactttgggaggctgaggcgggaggattgcttgaggccaggtgtttgagaccagcctgggcaacatagggagactcttgtctataccatccactctggtgcacgcacaacacacacacacacacacacacacacacacacacacacgaaagaacgaacagctcagggaaatgggtagacagtcgactgcattcttctgacagaagggatggctcccgcccaggggctgcgctactccaccctgaccctcagcctcccgctcccttgactctggcagagtttgatgcccaacagatcacgctctgcaggatccaaaaactctgcggccacgggcactcagctgagccctcagccctcatggctttcccgatgctcaccggtgcagaggagccagctggggagcctctgtgtatcctttttattaacttatttctgaagttctccaagacgcccagagttgaattcctccagagctctgtgcagacagtccaagcagcggatggcagagaggtccttgctagcaagaaacttacaggccaggctgtctcctgctccagcatgccggtgagcatgcaccgtccccgcagggcacaggggtatcctttgaagtgtcaagggacacctgagtccgtgccagacacttagggattggagaaagtgcaacccagacttctgccatctccgcaactcgtggggttgttcatctgtaacaaatgtcccacatagctcctgctggccacaaaacacgcactgccacaaaaygccttggaaaaatgggcgagaggagaacgcatttagcatttcgtctgccggcttccttttaacagcctggcgacgtttccccaggaaatgctcgtaacagacagcattctctccttttctaagctgctgtcatccactgggaacttaaggttttgatgctttctgagtgggtttatttattatttttttttgagacagtcttgctctatcgcccaggctggagtgcagtgacgccatcttggctcactgcaacctctgcctcccaggttcaagtgattctcctgcctcagcttccagagtagctgggattacaggtgtgtaccaccatgcc

SEQ ID NO: 69158 - DNA, 2788 bp, Homo sapiens
aggggaagggacgtgcaagacctcctaagccaccaccgcacccttgaacaaaccgagttcacttcaggcatgtcatgtgcaccccacacaaggcatgggtcaggtggcatgactgttcccattttacagatgaggaaactgaggctgcgatgggggaggggcttggccaggtcactcaagggtggagtgggggtgagtgaggctcctgactcccaaatccagtgggagttgggcagtgggacaggcacttgggtgaacgcggtgcctcaggcctccccatcctccgtcccccaatctctgcaggccttggtggatctcctgctggtcagtggggcggcggcagccactaccgtggcctggtaccaggtgagcccgctggccgcccgcctgctctacccctacctggcctggctggccttcacgaccacactcaactactgcgtatggcgggacaaccatggctggcgtgggggacggcggctgccagagtgagtgcccggcccaccagggactgcagctgcaccagcaggtgccatcacgcttgtgatgtggtggccgtcacgctttcatgaccactgggcctgctagtctgtcagggccttggcccaggggtcagcagagcttcagaggtggccccacctgagcccccacccgggagcagtgtcctgtgctttctgcatgcttagagcatgttcttggaacatggaattttataagctgaataaagtttttgacttcctttaccatggcctttttgcttgggtgggacccctggccacagggaagagggggagctggggctgcactggagctcgtctctgcaggatctgcctgggctgccttctccagacagggctggatccagctggggctgccccacgcttcctgggacgctcccgaagccctgcaggagatgaacagagcagccctgggtgccaccctggggcccacactggcgcagacccagctggggccgtgggcttcagcagagggagggggtcctgtccgcttcccatggcttccgggatgctcagcccgggccctttaatggccgggcccacaaccactgttcgacgcctggtcctgcccagtgcgtggccctcagctgcttttacccaggacagagttgggggtgctgactgccctgtcccccgggggcccaggcttatggcagcctcactgcaccagggatagccccgcaaacacccagttggctcgagggggagtcagaggcaggaaaggttaggtcccgactccagcagacagggcctccttgctggcccagagcggccaggattggaggtgtcacagccactcactccctcaccccggcttcgaactgggtgacccatggcctctccaggcagctgtttggagtaaatgagccgagtcccatacgcagcactcctccgtcttgctctcggtcaccacacccatgcagcactcagcaacacagcccgcggctccctcccctcggccaggcctgacctgccgggctttttgttttttgtttttggcagctaagttcattcaaattggcaaaatgttcatagacagctcgtcatcactcaacagcccgcggctgctgcttcctcttttctcccccggctcctgtgtcctctcccgacctgtacgctcagacacaacctgacgttcacaaaagcttggacacagtggctcacacctgtaatcccagcactttgggaggctgaggcgggaggattgcttgaggccaggtgtttgagaccagcctgggcaacatagggagactcttgtctataccatccactctggtgcacgcacaacacacacacacacacacacacacacacacacacacacgaaagaacgaacagctcagggaaatgggtagacagtcgactgcattcttctgacagaagggatggctcccgcccaggggctgcgctactccaccctgaccctcagcctcccgctcccttgactctggcagagtttgatgcccaacagatcacgctctgcaggatccaaaaactctgcggccacgggcactcagctgagccctcagccctcatggctttcccgatgctcaccggtgcagaggagccagctggggagcctctgtgtatcctttttattaacttatttctgaagttctccaagacgcccagagttgaattcctccagagctctgtgcagacagtccaagcagcggatggcagagaggtccttgctagcaagaaacttacaggccaggctgtctcctgctccagcatgccggtgagcatgcaccgtccccgcagggcacaggggtatcctttgaagtgtcaagggacacctgagtccgtgccagacacttagggattggagaaagtgcaacccagacttctgccatctccgcaactcgtggggttgttcatctgtaacaaatgtcccacatagctcctgctggccacaaaacacgcactgccacaaaacgccytggaaaaatgggcgagaggagaacgcatttagcatttcgtctgccggcttccttttaacagcctggcgacgtttccccaggaaatgctcgtaacagacagcattctctccttttctaagctgctgtcatccactgggaacttaaggttttgatgctttctgagtgggtttatttattatttttttttgagacagtcttgctctatcgcccaggctggagtgcagtgacgccatcttggctcactgcaacctctgcctcccaggttcaagtgattctcctgcctcagcttccagagtagctgggattacaggtgtgtaccaccatgcc

SEQ ID NO: 69159 - DNA, 2481 bp, Homo sapiens
acatggaaatcagactgtggggtggaggcctgcgatataaaggccatcttatttcttctcccactttttgtgggtgacttcttggtatccggggcttttcagtgacagccggggcgacaggccaggctgagcctgtggctccagggtccaaagagaaaggagggcagaaataagagaagatggcctttattgcagcacgaactgagggggactgcatgtccacagctctccaggagctgccaaaggcracgggcccgccctgcccctgcaacaggccctccaggggctagagcatggctcccctcaggaagggtaacgcgtgcttgtaaacaagggcccagacaacacagagaggagaggcagcatcatcaggtgcagctttgctacaagaaagatagttcttaatttcaaagaggagacaccgctacacctagccctgccctcccatgcactggaaggctctggaagtagctctcgcctgcctgggcagttaggtccacccactgcccgtgagctgggcccaggcacactgcagccacacaaaaacgctggcagctgactcctaatttcagaaacacaattagaaaagaactggaattttacatttttctcccatacattaaaaaataagaaaaagccaacattttgactgtagaccctggtaggtggcatctgactttaacctgaagttctcattggaatccttttctgtctggcgctccaccgcccacaatcagccccagccccaggcgccccttgccgaaggatcctggcccatctcacacaagggcgggaccccgtggagtgcccggcgagcagggcaaccactgggaagacagatactgatttccctgttggggtctgtgaccctcagcaaacgaaaaggaaacggtaacaagacggtggcctcctgccaggacctcagcaggaggtttgctggtgaaggttctgggtgagctggaatgggtgataaggcgggcttgctgggtggtggcctcaggctgttcctgggcccctgtcgcatagagccctgtgggtgcagtgtggggccccacagccgtcccggggtcgtcctgatgcataagagcagagaccccggaagagaaacccgcctgccccgtgtgatacagggctcccaaacgcttcccggtggaaccctgctcccgaggacaccttgtctcgctccacggaacccttcccccagcaccccctggaaacacagcagccaggaacaaattctccatgccaggaacaaagcccttggctaaactggagactcatcagtgcacagatggtggtgaggggtgagggcagggcgtggggtggtgctcagccctggggacaccatcactgtcctgctctgacccacaggtgagaggaggatgctgtgctcccggagtgtggcgccgggaggatggctcggcaggacagaggcctggggctgaggctatgcccagggccggtgtggggagggacatgggggcctttgcagaagcagctcagagaactgaggttggaatcctgccccaagcacaggttttggggacagcgagtgcctagacaaggcaggtaacgtggcagccaccgggctggtccagaaacaaggtgctgaagacgtcgttgaagaaggtggggtggtacctgcaggctcgctcacagtcggggttgaagttcacctccaggatctgcggctgcatcacccgccttcctgatggcaaagagcgcagcagagtgtgaaggctcgttggcctccactctgcagggacagtggcctggggatccagcaaaggctgggaggccatgaacctgggccctgattcccaggggatgagcaggacaaggccgggcctagaacttgggtctcttgactttgctggggaggcctggcctgacatctgcttctctaggagaggccagggctgcctccagccctagggatgacagcctggccctttaagcttggatgttcagtttagtaaaaaaaaaaaaaagtagatatgcagcagcagtgtactgtgtgggggtctggcacagggaaggccagccagggtggtgtgggttggggtcagggtgcctttcacacgggtctcctgtcctgtgagctctcccccgactcagaggcccaacccgcagcctttcccctccagactctgcaccgcaggcacttcctgtgggccaagccagggctttccccaacccagattcctggctgattcaagccagaggacagcctggggcagctgcctgccttctccaggctgtggctggctggcggagggggcgcctgctggtttggatcaggagatggggagcccctcttaccatctgggccgttgtcccacttcagcatgaggtcgacggcatacatggcccgggatgaggggtagtcgcagaggcccaggggtggtggcttggcacaggccacctggaacagctccgtgaaggcccggaagatctcagcctggggaccggggagcctga

SEQ ID NO: 69160 - DNA, 1232 bp, Homo sapiens
caccacacacacaagagacaccactcgggcggccagtcacctggttctaggtggagaataggaaagcgatgatagaaataggctctctgagtgctctgcatctctgcaacagagaggttaaagcaaaacccaggcaaaggaaaaggagaaaccaacagaaagaattaaaaagaaccactcaaagcaaccagcctaccaaggagtagaggcgggaatgcaacatggcgcggggctgggaccctgggcttcgaggctcggggctgcccttgactttcccacacacggaaagcgctccgcccaggaggacccggccacggtgtgtgcgcaaggcagtggcctcctgtttcggtccgaggagccctctctcatgggagctacagagggcagagaccacctggcctatgtcagggggcacatgtgtaccccttgtttggcagctcggcccactgtggaggtgggaagatgaccagccgcagccaagaggaggcagggggcgaagggcaaagggcgtaccatccttccacagctccgagacaaacttgtcagaggactggtggagcagtgtggcgatgttgtcattcaggggatccatgttcttcatcagccactcgtcagctttgtaatccacctggcggggtcagagaggcaggagtcacaagctgcgctggggacatgtgtgctcacagggtctccggagcacaggctaaccccatgcrtggaaaagtcagaaaacgtgaagaccctttgatccagcatttccacccctaagaaggaagtggtgaggataaggggagcgaggcatcaagacgttctctgcggcgtctcgtgcagagccaaagcctcaaagcaaggcatggccaacaacgggagcctggctctagacatggcatggtggccacacagtaccgtgctgggtttcagcttttttaaaatttttaggtaatatgaacaaagaaaaacaatcctggaaggacaacaaaatgttactatttctttttagtcataagacaagtaatttttgttttttctttgtctttttagaatgttcacattttctctgagtatgtgtcagtttcatctttttggaaatatattctgtttttaaatatatttttttaattgggcagcctcctaaactagagggttcagagagactcccagaaatagattccttttttctcattttaaatagagataggggctgggtgcggtggctcatgcctgtaatccca

SEQ ID NO: 69161 - DNA, 1232 bp, Homo sapiens
caccacacacacaagagacaccactcgggcggccagtcacctggttctaggtggagaataggaaagcgatgatagaaataggctctctgagtgctctgcatctctgcaacagagaggttaaagcaaaacccaggcaaaggaaaaggagaaaccaacagaaagaattaaaaagaaccactcaaagcaaccagcctaccaaggagtagaggcgggaatgcaacatggcgcggggctgggaccctgggcttcgaggctcggggctgcccttgactttcccacacacggaaagcgctccgcccaggaggacccggccacggtgtgtgcgcaaggcagtggcctcctgtttcggtccgaggagccctctctcatgggagctacagagggcagagaccacctggcctatgtcagggggcacatgtgtaccccttgtttggcagctcggcccactgtggaggtgggaagatgaccagccgcagccaagaggaggcagggggcgaagggcaaagggcgtaccatccttccacagctccgagacaaacttgtcagaggactggtggagcagtgtggcgatgttgtcattcaggggatccatgttcttcatcagccactcgtcagctttgtaatccacctggcggggtcagagaggcaggagtcacaagctgcgctggggacatgtgtgctcacagggtctccggagcacaggctaaccccatgcatggaaaagtcagaaaacgtgaagaccctttgatccagcatttccacccctaagaaggaagtggtgaggataaggggagcgaggcatcaagacrttctctgcggcgtctcgtgcagagccaaagcctcaaagcaaggcatggccaacaacgggagcctggctctagacatggcatggtggccacacagtaccgtgctgggtttcagcttttttaaaatttttaggtaatatgaacaaagaaaaacaatcctggaaggacaacaaaatgttactatttctttttagtcataagacaagtaatttttgttttttctttgtctttttagaatgttcacattttctctgagtatgtgtcagtttcatctttttggaaatatattctgtttttaaatatatttttttaattgggcagcctcctaaactagagggttcagagagactcccagaaatagattccttttttctcattttaaatagagataggggctgggtgcggtggctcatgcctgtaatccca

SEQ ID NO: 69162 - DNA, 1232 bp, Homo sapiens
caccacacacacaagagacaccactcgggcggccagtcacctggttctaggtggagaataggaaagcgatgatagaaataggctctctgagtgctctgcatctctgcaacagagaggttaaagcaaaacccaggcaaaggaaaaggagaaaccaacagaaagaattaaaaagaaccactcaaagcaaccagcctaccaaggagtagaggcgggaatgcaacatggcgcggggctgggaccctgggcttcgaggctcggggctgcccttgactttcccacacacggaaagcgctccgcccaggaggacccggccacggtgtgtgcgcaaggcagtggcctcctgtttcggtccgaggagccctctctcatgggagctacagagggcagagaccacctggcctatgtcagggggcacatgtgtaccccttgtttggcagctcggcccactgtggaggtgggaagatgaccagccgcagccaagaggaggcagggggcgaagggcaaagggcgtaccatccttccacagctccgagacaaacttgtcagaggactggtggagcagtgtggcgatgttgtcattcaggggatccatgttcttcatcagccactcgtcagctttgtaatccacctggcggggtcagagaggcaggagtcacaagctgcgctggggacatgtgtgctcacagggtctccggagcacaggctaaccccatgcatggaaaagtcagaaaacgtgaagaccctttgatccagcatttccacccctaagaaggaagtggtgaggataaggggagcgaggcatcaagacgytctctgcggcgtctcgtgcagagccaaagcctcaaagcaaggcatggccaacaacgggagcctggctctagacatggcatggtggccacacagtaccgtgctgggtttcagcttttttaaaatttttaggtaatatgaacaaagaaaaacaatcctggaaggacaacaaaatgttactatttctttttagtcataagacaagtaatttttgttttttctttgtctttttagaatgttcacattttctctgagtatgtgtcagtttcatctttttggaaatatattctgtttttaaatatatttttttaattgggcagcctcctaaactagagggttcagagagactcccagaaatagattccttttttctcattttaaatagagataggggctgggtgcggtggctcatgcctgtaatccca

SEQ ID NO: 69163 - DNA, 1232 bp, Homo sapiens
caccacacacacaagagacaccactcgggcggccagtcacctggttctaggtggagaataggaaagcgatgatagaaataggctctctgagtgctctgcatctctgcaacagagaggttaaagcaaaacccaggcaaaggaaaaggagaaaccaacagaaagaattaaaaagaaccactcaaagcaaccagcctaccaaggagtagaggcgggaatgcaacatggcgcggggctgggaccctgggcttcgaggctcggggctgcccttgactttcccacacacggaaagcgctccgcccaggaggacccggccacggtgtgtgcgcaaggcagtggcctcctgtttcggtccgaggagccctctctcatgggagctacagagggcagagaccacctggcctatgtcagggggcacatgtgtaccccttgtttggcagctcggcccactgtggaggtgggaagatgaccagccgcagccaagaggaggcagggggcgaagggcaaagggcgtaccatccttccacagctccgagacaaacttgtcagaggactggtggagcagtgtggcgatgttgtcattcaggggatccatgttcttcatcagccactcgtcagctttgtaatccacctggcggggtcagagaggcaggagtcacaagctgcgctggggacatgtgtgctcacagggtctccggagcacaggctaaccccatgcatggaaaagtcagaaaacgtgaagaccctttgatccagcatttccacccctaagaaggaagtggtgaggataaggggagcgaggcatcaagacgttctctgcggcgtctcgtgcagagccaaarcctcaaagcaaggcatggccaacaacgggagcctggctctagacatggcatggtggccacacagtaccgtgctgggtttcagcttttttaaaatttttaggtaatatgaacaaagaaaaacaatcctggaaggacaacaaaatgttactatttctttttagtcataagacaagtaatttttgttttttctttgtctttttagaatgttcacattttctctgagtatgtgtcagtttcatctttttggaaatatattctgtttttaaatatatttttttaattgggcagcctcctaaactagagggttcagagagactcccagaaatagattccttttttctcattttaaatagagataggggctgggtgcggtggctcatgcctgtaatccca

SEQ ID NO: 69164 - DNA, 3342 bp, Homo sapiens
tcccaccctgccctctaaagtgctggattacaaacatgagccacgacacccggcctgaataaatgctgatctttatatagaggaaagttcttcacattctgctcctgattatcttaccctgggaggtgagggaaaatagcaaatgttaatcatattaatcatctttaggcactgttttaagaagacagaagagcatttatcaacctcccctcctgagatcaaactacagccatagtcaaggcacttacaggtataatggcacttaatgttaatgtgggcaaacattggtggattttgcaccactaattgctctaagatgttataaatagtaactcacagaactcttccaagaacctaggaagtgtgtaccattggtatttccattttcaggtaagaaaactgaaacagatgttcagtgacttgcccaagctcagaatctactacgtggtaaagactgggttcccacccagacagacggactcaagaactcacgcactgcctctgcaccctctgctgccaatgaaaatttaaatgagggcaacaggagatcagagatgccaagagatgttggaaaacagaactggctgaagaaatgacaactgaataaagaggggtgaagggagctgtgaaccacagcaatgccaagagggcatccagccaggcagagtggtctactaggcagagcctcagagaggggaggagttcaccaggcccacgtgccatatgggattcatgccagccttgagtctacaccagtgaaaaaaatcagagagttcatgactgaagcaatatgccccagaaataatatctttgtattctgacacttcagtgggttcccattcaatcaccctacagggaagactgccagtagacctgccccccaccccgttcaatatgaatagatctaggatcagaaattggagaaaggtgaaagtggggaaacagaccaagatgaccaaatacaaaaggagtccagaacaaacaagtaattttttaaatctcaaacccatgtcctcagggagattaaaaaatattttattcataaacttaaaacaagatatatagaaaagaagaaaaatcaatgaaacaaacaaaaaaagagattttctrgaaactaaaaggtgatgatcaaataaacaagtctagagagaccatgtgaaagaaagtcacggaaatcctccagaaaataaaccaaaaagatgacagaggaaaaggagctatatggggaatagaaaagttaccaggcacagggtcacagggtgttctaagaaagctacttgagaatgagccaccgggaggaagaaagggtgggtgggtgggtgtgtgtgtgtgtgtgtgtgtgtgtgtgtgtatgtgttgtgcatccatggagggcaggtggggataaccaagaaagaaaaagacatgggatccagaaaacaggaaaatcaacccagagagaagggaatctgaggatcacagtgggacatgcagtaggcctacaaaacgaccagtccaggatggaataaaaagggaatggttctgtgggaaaaagggactcaatagaatacctcaaaggattcacagtttgagagaaactgaggaaatgaagaaggcaagcagtacaagggaggaaaaaaaacaaaggcaattagaaacatcaggaaaaagtaaagctgtgccacaaaacatgtgcaaacatggtgtacaactcagctccacagtaaatagtatttaaaacatcacaaaatgtaaacactcttgattgatttttaactttgagaacagaacagagcatataaatatgagaactaaatatacttgttaccgattagtacaaacttaaagcacaaaggtagcagttgggatgtgaagcactgaacgaaggagaaggaggattaatattgtcatcttttaaagaggggagtcaagaaatactaggtaaaactgagagtataagaaagaaagttgtaagtaaattgtttacagctacaaagttgctaatggaggacataaaactggtgatacaatattaggaaaaggtggagaggagagatagagggagtgtacaaacaagatgaaaatgactaataatgacactataagtaataatgataataccgattcaggcccatcccagttaggggcggctccaaaatcaccattgttcttttctcaccttgtgtctctgcgcactccccggcacacccacttccagcagctggtctttgtttgcagactttattttaacagctcagtggttcccgggcatcctccagctcttatacaaaagccccctcctcaaaagccactcgcctccctctttccacttcccacctctgtttcagggtcgaggcatccagatatctgtcttctggggcccctacgcagcaagactaaaagggggacccagtcctgggcagcagttcaccaggggagtatgcagaggggcatctggacacttcttgctgtaagggacggggtgacgggagggggtcttcccttccccttcttcctgctttgttcactctgtgacaccctaggccaggggagctgtctcaacgccatctcatgagccatgagaaccaggaggaccaggagggagaagaggagcaggagggcagacagagctggggcctcggacctgcccaatacttgtgaggagctgcatccaggatcccatcctcctgggtcattgttggcctggctcccacctttgtctggagcctctgctgggggttgaggctggatactgcccctcaggcttgactaggacacagtgtgtactccatgggtgagcctgcaggctggtcaattccggtgtccaactgagcgacctggaagaggagccctccctcccacctcagctctgagccaagctctccagatgcagaggacagggactctcagcaaagcatctccctccaagtggttgtggggcatcctccttgggcagggaaagaggagtcgaaatgatttcctgagaaatcgtcattttcattttatttttgagaaactgtcttgctctgtcacccagtctggagtgctttggggctatcacagcttgctgtagcctagagcccctgggctcaagtgatccttctgcctcagccttccaggtagctgggactacaggcacacggcaccatgcaggactaatttgttaatttttcatttcagagagacagcatctcctgtgttgcccaagctgtcttgagctcctagcatcatgtgattctcccgcctctgcctcccacagcactgaattacaggcctcagccgtggcactgcacccttctgaggaatcttcagtgaaaagccacggtcaagttcaaaccccatagcagggcacacaggccctct

SEQ ID NO: 69165 - DNA, 3342 bp, Homo sapiens
tcccaccctgccctctaaagtgctggattacaaacatgagccacgacacccggcctgaataaatgctgatctttatatagaggaaagttcttcacattctgctcctgattatcttaccctgggaggtgagggaaaatagcaaatgttaatcatattaatcatctttaggcactgttttaagaagacagaagagcatttatcaacctcccctcctgagatcaaactacagccatagtcaaggcacttacaggtataatggcacttaatgttaatgtgggcaaacattggtggattttgcaccactaattgctctaagatgttataaatagtaactcacagaactcttccaagaacctaggaagtgtgtaccattggtatttccattttcaggtaagaaaactgaaacagatgttcagtgacttgcccaagctcagaatctactacgtggtaaagactgggttcccacccagacagacggactcaagaactcacgcactgcctctgcaccctctgctgccaatgaaaatttaaatgagggcaacaggagatcagagatgccaagagatgttggaaaacagaactggctgaagaaatgacaactgaataaagaggggtgaagggagctgtgaaccacagcaatgccaagagggcatccagccaggcagagtggtctactaggcagagcctcagagaggggaggagttcaccaggcccacgtgccatatgggattcatgccagccttgagtctacaccagtgaaaaaaatcagagagttcatgactgaagcaatatgccccagaaataatatctttgtattctgacacttcagtgggttcccattcaatcaccctacagggaagactgccagtagacctgccccccaccccgttcaatatgaatagatctaggatcagaaattggagaaaggtgaaagtggggaaacagaccaagatgaccaaatacaaaaggagtccagaacaaacaagtaattttttaaatctcaaacccatgtcctcagggagattaaaaaatattttattcataaacttaaaacaagatatatagaaaagaagaaaaatcaatgaaacaaacaaaaaaagagattttctagaaactaaaaggtgatgatcaaataaacaagtctagagagaccatgtgaaagaaagtcacggaaatcctccagaaaataaaccaaaaagatgacagaggaaaaggagctatatggggaatagaaaagttaccaggcacagggtcacagggtgttctaagaaagctacttgagaatgagccaccgggaggaagaaagggtgkgtgggtgggtgtgtgtgtgtgtgtgtgtgtgtgtgtgtgtatgtgttgtgcatccatggagggcaggtggggataaccaagaaagaaaaagacatgggatccagaaaacaggaaaatcaacccagagagaagggaatctgaggatcacagtgggacatgcagtaggcctacaaaacgaccagtccaggatggaataaaaagggaatggttctgtgggaaaaagggactcaatagaatacctcaaaggattcacagtttgagagaaactgaggaaatgaagaaggcaagcagtacaagggaggaaaaaaaacaaaggcaattagaaacatcaggaaaaagtaaagctgtgccacaaaacatgtgcaaacatggtgtacaactcagctccacagtaaatagtatttaaaacatcacaaaatgtaaacactcttgattgatttttaactttgagaacagaacagagcatataaatatgagaactaaatatacttgttaccgattagtacaaacttaaagcacaaaggtagcagttgggatgtgaagcactgaacgaaggagaaggaggattaatattgtcatcttttaaagaggggagtcaagaaatactaggtaaaactgagagtataagaaagaaagttgtaagtaaattgtttacagctacaaagttgctaatggaggacataaaactggtgatacaatattaggaaaaggtggagaggagagatagagggagtgtacaaacaagatgaaaatgactaataatgacactataagtaataatgataataccgattcaggcccatcccagttaggggcggctccaaaatcaccattgttcttttctcaccttgtgtctctgcgcactccccggcacacccacttccagcagctggtctttgtttgcagactttattttaacagctcagtggttcccgggcatcctccagctcttatacaaaagccccctcctcaaaagccactcgcctccctctttccacttcccacctctgtttcagggtcgaggcatccagatatctgtcttctggggcccctacgcagcaagactaaaagggggacccagtcctgggcagcagttcaccaggggagtatgcagaggggcatctggacacttcttgctgtaagggacggggtgacgggagggggtcttcccttccccttcttcctgctttgttcactctgtgacaccctaggccaggggagctgtctcaacgccatctcatgagccatgagaaccaggaggaccaggagggagaagaggagcaggagggcagacagagctggggcctcggacctgcccaatacttgtgaggagctgcatccaggatcccatcctcctgggtcattgttggcctggctcccacctttgtctggagcctctgctgggggttgaggctggatactgcccctcaggcttgactaggacacagtgtgtactccatgggtgagcctgcaggctggtcaattccggtgtccaactgagcgacctggaagaggagccctccctcccacctcagctctgagccaagctctccagatgcagaggacagggactctcagcaaagcatctccctccaagtggttgtggggcatcctccttgggcagggaaagaggagtcgaaatgatttcctgagaaatcgtcattttcattttatttttgagaaactgtcttgctctgtcacccagtctggagtgctttggggctatcacagcttgctgtagcctagagcccctgggctcaagtgatccttctgcctcagccttccaggtagctgggactacaggcacacggcaccatgcaggactaatttgttaatttttcatttcagagagacagcatctcctgtgttgcccaagctgtcttgagctcctagcatcatgtgattctcccgcctctgcctcccacagcactgaattacaggcctcagccgtggcactgcacccttctgaggaatcttcagtgaaaagccacggtcaagttcaaaccccatagcagggcacacaggccctct

SEQ ID NO: 69166 - DNA, 3342 bp, Homo sapiens
tcccaccctgccctctaaagtgctggattacaaacatgagccacgacacccggcctgaataaatgctgatctttatatagaggaaagttcttcacattctgctcctgattatcttaccctgggaggtgagggaaaatagcaaatgttaatcatattaatcatctttaggcactgttttaagaagacagaagagcatttatcaacctcccctcctgagatcaaactacagccatagtcaaggcacttacaggtataatggcacttaatgttaatgtgggcaaacattggtggattttgcaccactaattgctctaagatgttataaatagtaactcacagaactcttccaagaacctaggaagtgtgtaccattggtatttccattttcaggtaagaaaactgaaacagatgttcagtgacttgcccaagctcagaatctactacgtggtaaagactgggttcccacccagacagacggactcaagaactcacgcactgcctctgcaccctctgctgccaatgaaaatttaaatgagggcaacaggagatcagagatgccaagagatgttggaaaacagaactggctgaagaaatgacaactgaataaagaggggtgaagggagctgtgaaccacagcaatgccaagagggcatccagccaggcagagtggtctactaggcagagcctcagagaggggaggagttcaccaggcccacgtgccatatgggattcatgccagccttgagtctacaccagtgaaaaaaatcagagagttcatgactgaagcaatatgccccagaaataatatctttgtattctgacacttcagtgggttcccattcaatcaccctacagggaagactgccagtagacctgccccccaccccgttcaatatgaatagatctaggatcagaaattggagaaaggtgaaagtggggaaacagaccaagatgaccaaatacaaaaggagtccagaacaaacaagtaattttttaaatctcaaacccatgtcctcagggagattaaaaaatattttattcataaacttaaaacaagatatatagaaaagaagaaaaatcaatgaaacaaacaaaaaaagagattttctagaaactaaaaggtgatgatcaaataaacaagtctagagagaccatgtgaaagaaagtcacggaaatcctccagaaaataaaccaaaaagatgacagaggaaaaggagctatatggggaatagaaaagttaccaggcacagggtcacagggtgttctaagaaagctacttgagaatgagccaccgggaggaagaaagggtgggtgggtgkgtgtgtgtgtgtgtgtgtgtgtgtgtgtgtgtatgtgttgtgcatccatggagggcaggtggggataaccaagaaagaaaaagacatgggatccagaaaacaggaaaatcaacccagagagaagggaatctgaggatcacagtgggacatgcagtaggcctacaaaacgaccagtccaggatggaataaaaagggaatggttctgtgggaaaaagggactcaatagaatacctcaaaggattcacagtttgagagaaactgaggaaatgaagaaggcaagcagtacaagggaggaaaaaaaacaaaggcaattagaaacatcaggaaaaagtaaagctgtgccacaaaacatgtgcaaacatggtgtacaactcagctccacagtaaatagtatttaaaacatcacaaaatgtaaacactcttgattgatttttaactttgagaacagaacagagcatataaatatgagaactaaatatacttgttaccgattagtacaaacttaaagcacaaaggtagcagttgggatgtgaagcactgaacgaaggagaaggaggattaatattgtcatcttttaaagaggggagtcaagaaatactaggtaaaactgagagtataagaaagaaagttgtaagtaaattgtttacagctacaaagttgctaatggaggacataaaactggtgatacaatattaggaaaaggtggagaggagagatagagggagtgtacaaacaagatgaaaatgactaataatgacactataagtaataatgataataccgattcaggcccatcccagttaggggcggctccaaaatcaccattgttcttttctcaccttgtgtctctgcgcactccccggcacacccacttccagcagctggtctttgtttgcagactttattttaacagctcagtggttcccgggcatcctccagctcttatacaaaagccccctcctcaaaagccactcgcctccctctttccacttcccacctctgtttcagggtcgaggcatccagatatctgtcttctggggcccctacgcagcaagactaaaagggggacccagtcctgggcagcagttcaccaggggagtatgcagaggggcatctggacacttcttgctgtaagggacggggtgacgggagggggtcttcccttccccttcttcctgctttgttcactctgtgacaccctaggccaggggagctgtctcaacgccatctcatgagccatgagaaccaggaggaccaggagggagaagaggagcaggagggcagacagagctggggcctcggacctgcccaatacttgtgaggagctgcatccaggatcccatcctcctgggtcattgttggcctggctcccacctttgtctggagcctctgctgggggttgaggctggatactgcccctcaggcttgactaggacacagtgtgtactccatgggtgagcctgcaggctggtcaattccggtgtccaactgagcgacctggaagaggagccctccctcccacctcagctctgagccaagctctccagatgcagaggacagggactctcagcaaagcatctccctccaagtggttgtggggcatcctccttgggcagggaaagaggagtcgaaatgatttcctgagaaatcgtcattttcattttatttttgagaaactgtcttgctctgtcacccagtctggagtgctttggggctatcacagcttgctgtagcctagagcccctgggctcaagtgatccttctgcctcagccttccaggtagctgggactacaggcacacggcaccatgcaggactaatttgttaatttttcatttcagagagacagcatctcctgtgttgcccaagctgtcttgagctcctagcatcatgtgattctcccgcctctgcctcccacagcactgaattacaggcctcagccgtggcactgcacccttctgaggaatcttcagtgaaaagccacggtcaagttcaaaccccatagcagggcacacaggccctct

SEQ ID NO: 69167 - DNA, 3342 bp, Homo sapiens
tcccaccctgccctctaaagtgctggattacaaacatgagccacgacacccggcctgaataaatgctgatctttatatagaggaaagttcttcacattctgctcctgattatcttaccctgggaggtgagggaaaatagcaaatgttaatcatattaatcatctttaggcactgttttaagaagacagaagagcatttatcaacctcccctcctgagatcaaactacagccatagtcaaggcacttacaggtataatggcacttaatgttaatgtgggcaaacattggtggattttgcaccactaattgctctaagatgttataaatagtaactcacagaactcttccaagaacctaggaagtgtgtaccattggtatttccattttcaggtaagaaaactgaaacagatgttcagtgacttgcccaagctcagaatctactacgtggtaaagactgggttcccacccagacagacggactcaagaactcacgcactgcctctgcaccctctgctgccaatgaaaatttaaatgagggcaacaggagatcagagatgccaagagatgttggaaaacagaactggctgaagaaatgacaactgaataaagaggggtgaagggagctgtgaaccacagcaatgccaagagggcatccagccaggcagagtggtctactaggcagagcctcagagaggggaggagttcaccaggcccacgtgccatatgggattcatgccagccttgagtctacaccagtgaaaaaaatcagagagttcatgactgaagcaatatgccccagaaataatatctttgtattctgacacttcagtgggttcccattcaatcaccctacagggaagactgccagtagacctgccccccaccccgttcaatatgaatagatctaggatcagaaattggagaaaggtgaaagtggggaaacagaccaagatgaccaaatacaaaaggagtccagaacaaacaagtaattttttaaatctcaaacccatgtcctcagggagattaaaaaatattttattcataaacttaaaacaagatatatagaaaagaagaaaaatcaatgaaacaaacaaaaaaagagattttctagaaactaaaaggtgatgatcaaataaacaagtctagagagaccatgtgaaagaaagtcacggaaatcctccagaaaataaaccaaaaagatgacagaggaaaaggagctatatggggaatagaaaagttaccaggcacagggtcacagggtgttctaagaaagctacttgagaatgagccaccgggaggaagaaagggtgggtgggtgggtgtgtgtgtgtgtgtgtgtgtgtgtgtgtgtatgtgttgtgcatccatggagggcaggtggggataaccaagaaagaaaaagacatgggatccagaaaacaggaaaatcaacccagagagaagggaatctgaggatcacagtgggacatgcagtaggcctacaaaacgaccagtccaggatggaataaaaagggaatggttctgtgggaaaaagggactcaatagaatacctcaaaggattcacagtttgagagaaactgaggaaatgaagaaggcaagcagtacaagggaggaaaaaaaacaaaggcaattagaaacatcaggaaaaagtaaagctgtgccacaaaacatgtgcaaacatggtgtacaactcagctccacagtaaatagtatttaaaacatcacaaaatgtaaacactcttgattgatttttaactttgagaacagaacagagcatataaatatgagaactaaatatacttgttaccgattagtacaaacttaaagcacaaaggtagcagttgggatgtgaagcactgaacgaaggagaaggaggattaatattgtcatcttttaaagaggggagtcaagaaatactaggtaaaactgagagtataagaaagaaagttgtaagtaaattgtttacagctacaaagttgctaatggaggacataaaactggtgatacaatattaggaaaaggtggagaggagagatagagggagtgtacaaacaagatgaaaatgactaataatgacactataagtaataatgataataccgattcaggcccatcccagttaggggcggctccaaaatcaccattgttcttttctcaccttgtgtctctgcgcactccccggcacacccacttccagcagctggtctttgtttgcagactttattttaacagctcagtggttcccgggcatcctccagctcttatacaaaagccccctcctcaaaagccactcgcctccctctttccacttcccacctctgtttcagggtcgaggcatccagatatctgtcttctggggcccctacgcagcaagactaaaagggggacccagtcctgggcagcagttcaccaggggagtatgcagaggggcatctggacacttcttgctgtaagggacggggtgacgggagggggtcttcccttccccttcttcctgctttgttcactctgtgacaccctaggccaggggagctgtctcaacgccatctcatgagccatgagaaccaggaggaccaggagggagaagaggagcaggagggcagacagagctggggcctcggacctgcccaatacttgtgaggagctgcatccaggatcccatcctcctgggtcattgttggcctggctcccacctttgtctggagcctctgctgggggttgaggctggatactgcccctcargcttgactaggacacagtgtgtactccatgggtgagcctgcaggctggtcaattccggtgtccaactgagcgacctggaagaggagccctccctcccacctcagctctgagccaagctctccagatgcagaggacagggactctcagcaaagcatctccctccaagtggttgtggggcatcctccttgggcagggaaagaggagtcgaaatgatttcctgagaaatcgtcattttcattttatttttgagaaactgtcttgctctgtcacccagtctggagtgctttggggctatcacagcttgctgtagcctagagcccctgggctcaagtgatccttctgcctcagccttccaggtagctgggactacaggcacacggcaccatgcaggactaatttgttaatttttcatttcagagagacagcatctcctgtgttgcccaagctgtcttgagctcctagcatcatgtgattctcccgcctctgcctcccacagcactgaattacaggcctcagccgtggcactgcacccttctgaggaatcttcagtgaaaagccacggtcaagttcaaaccccatagcagggcacacaggccctct

SEQ ID NO: 69168 - DNA, 3342 bp, Homo sapiens
tcccaccctgccctctaaagtgctggattacaaacatgagccacgacacccggcctgaataaatgctgatctttatatagaggaaagttcttcacattctgctcctgattatcttaccctgggaggtgagggaaaatagcaaatgttaatcatattaatcatctttaggcactgttttaagaagacagaagagcatttatcaacctcccctcctgagatcaaactacagccatagtcaaggcacttacaggtataatggcacttaatgttaatgtgggcaaacattggtggattttgcaccactaattgctctaagatgttataaatagtaactcacagaactcttccaagaacctaggaagtgtgtaccattggtatttccattttcaggtaagaaaactgaaacagatgttcagtgacttgcccaagctcagaatctactacgtggtaaagactgggttcccacccagacagacggactcaagaactcacgcactgcctctgcaccctctgctgccaatgaaaatttaaatgagggcaacaggagatcagagatgccaagagatgttggaaaacagaactggctgaagaaatgacaactgaataaagaggggtgaagggagctgtgaaccacagcaatgccaagagggcatccagccaggcagagtggtctactaggcagagcctcagagaggggaggagttcaccaggcccacgtgccatatgggattcatgccagccttgagtctacaccagtgaaaaaaatcagagagttcatgactgaagcaatatgccccagaaataatatctttgtattctgacacttcagtgggttcccattcaatcaccctacagggaagactgccagtagacctgccccccaccccgttcaatatgaatagatctaggatcagaaattggagaaaggtgaaagtggggaaacagaccaagatgaccaaatacaaaaggagtccagaacaaacaagtaattttttaaatctcaaacccatgtcctcagggagattaaaaaatattttattcataaacttaaaacaagatatatagaaaagaagaaaaatcaatgaaacaaacaaaaaaagagattttctagaaactaaaaggtgatgatcaaataaacaagtctagagagaccatgtgaaagaaagtcacggaaatcctccagaaaataaaccaaaaagatgacagaggaaaaggagctatatggggaatagaaaagttaccaggcacagggtcacagggtgttctaagaaagctacttgagaatgagccaccgggaggaagaaagggtgggtgggtgggtgtgtgtgtgtgtgtgtgtgtgtgtgtgtgtatgtgttgtgcatccatggagggcaggtggggataaccaagaaagaaaaagacatgggatccagaaaacaggaaaatcaacccagagagaagggaatctgaggatcacagtgggacatgcagtaggcctacaaaacgaccagtccaggatggaataaaaagggaatggttctgtgggaaaaagggactcaatagaatacctcaaaggattcacagtttgagagaaactgaggaaatgaagaaggcaagcagtacaagggaggaaaaaaaacaaaggcaattagaaacatcaggaaaaagtaaagctgtgccacaaaacatgtgcaaacatggtgtacaactcagctccacagtaaatagtatttaaaacatcacaaaatgtaaacactcttgattgatttttaactttgagaacagaacagagcatataaatatgagaactaaatatacttgttaccgattagtacaaacttaaagcacaaaggtagcagttgggatgtgaagcactgaacgaaggagaaggaggattaatattgtcatcttttaaagaggggagtcaagaaatactaggtaaaactgagagtataagaaagaaagttgtaagtaaattgtttacagctacaaagttgctaatggaggacataaaactggtgatacaatattaggaaaaggtggagaggagagatagagggagtgtacaaacaagatgaaaatgactaataatgacactataagtaataatgataataccgattcaggcccatcccagttaggggcggctccaaaatcaccattgttcttttctcaccttgtgtctctgcgcactccccggcacacccacttccagcagctggtctttgtttgcagactttattttaacagctcagtggttcccgggcatcctccagctcttatacaaaagccccctcctcaaaagccactcgcctccctctttccacttcccacctctgtttcagggtcgaggcatccagatatctgtcttctggggcccctacgcagcaagactaaaagggggacccagtcctgggcagcagttcaccaggggagtatgcagaggggcatctggacacttcttgctgtaagggacggggtgacgggagggggtcttcccttccccttcttcctgctttgttcactctgtgacaccctaggccaggggagctgtctcaacgccatctcatgagccatgagaaccaggaggaccaggagggagaagaggagcaggagggcagacagagctggggcctcggacctgcccaatacttgtgaggagctgcatccaggatcccatcctcctgggtcattgttggcctggctcccacctttgtctggagcctctgctgggggttgaggctggatactgcccctcaggcttgactaggacacagtgtgtactccatgggtgagcctgcaggctggtcaattccggtgtccaactgagcgacctggaagaggagccctccctcccacctcagctctgagccaagctctccagatgcagaggacagggactctcagcaaagcatctccctccaagtggttgtggggcatcctccttgggcagggaaagaggagtcgaaatgatttcctgagaaatmgtcattttcattttatttttgagaaactgtcttgctctgtcacccagtctggagtgctttggggctatcacagcttgctgtagcctagagcccctgggctcaagtgatccttctgcctcagccttccaggtagctgggactacaggcacacggcaccatgcaggactaatttgttaatttttcatttcagagagacagcatctcctgtgttgcccaagctgtcttgagctcctagcatcatgtgattctcccgcctctgcctcccacagcactgaattacaggcctcagccgtggcactgcacccttctgaggaatcttcagtgaaaagccacggtcaagttcaaaccccatagcagggcacacaggccctct

SEQ ID NO: 69169 - DNA, 3342 bp, Homo sapiens
tcccaccctgccctctaaagtgctggattacaaacatgagccacgacacccggcctgaataaatgctgatctttatatagaggaaagttcttcacattctgctcctgattatcttaccctgggaggtgagggaaaatagcaaatgttaatcatattaatcatctttaggcactgttttaagaagacagaagagcatttatcaacctcccctcctgagatcaaactacagccatagtcaaggcacttacaggtataatggcacttaatgttaatgtgggcaaacattggtggattttgcaccactaattgctctaagatgttataaatagtaactcacagaactcttccaagaacctaggaagtgtgtaccattggtatttccattttcaggtaagaaaactgaaacagatgttcagtgacttgcccaagctcagaatctactacgtggtaaagactgggttcccacccagacagacggactcaagaactcacgcactgcctctgcaccctctgctgccaatgaaaatttaaatgagggcaacaggagatcagagatgccaagagatgttggaaaacagaactggctgaagaaatgacaactgaataaagaggggtgaagggagctgtgaaccacagcaatgccaagagggcatccagccaggcagagtggtctactaggcagagcctcagagaggggaggagttcaccaggcccacgtgccatatgggattcatgccagccttgagtctacaccagtgaaaaaaatcagagagttcatgactgaagcaatatgccccagaaataatatctttgtattctgacacttcagtgggttcccattcaatcaccctacagggaagactgccagtagacctgccccccaccccgttcaatatgaatagatctaggatcagaaattggagaaaggtgaaagtggggaaacagaccaagatgaccaaatacaaaaggagtccagaacaaacaagtaattttttaaatctcaaacccatgtcctcagggagattaaaaaatattttattcataaacttaaaacaagatatatagaaaagaagaaaaatcaatgaaacaaacaaaaaaagagattttctagaaactaaaaggtgatgatcaaataaacaagtctagagagaccatgtgaaagaaagtcacggaaatcctccagaaaataaaccaaaaagatgacagaggaaaaggagctatatggggaatagaaaagttaccaggcacagggtcacagggtgttctaagaaagctacttgagaatgagccaccgggaggaagaaagggtgggtgggtgggtgtgtgtgtgtgtgtgtgtgtgtgtgtgtgtatgtgttgtgcatccatggagggcaggtggggataaccaagaaagaaaaagacatgggatccagaaaacaggaaaatcaacccagagagaagggaatctgaggatcacagtgggacatgcagtaggcctacaaaacgaccagtccaggatggaataaaaagggaatggttctgtgggaaaaagggactcaatagaatacctcaaaggattcacagtttgagagaaactgaggaaatgaagaaggcaagcagtacaagggaggaaaaaaaacaaaggcaattagaaacatcaggaaaaagtaaagctgtgccacaaaacatgtgcaaacatggtgtacaactcagctccacagtaaatagtatttaaaacatcacaaaatgtaaacactcttgattgatttttaactttgagaacagaacagagcatataaatatgagaactaaatatacttgttaccgattagtacaaacttaaagcacaaaggtagcagttgggatgtgaagcactgaacgaaggagaaggaggattaatattgtcatcttttaaagaggggagtcaagaaatactaggtaaaactgagagtataagaaagaaagttgtaagtaaattgtttacagctacaaagttgctaatggaggacataaaactggtgatacaatattaggaaaaggtggagaggagagatagagggagtgtacaaacaagatgaaaatgactaataatgacactataagtaataatgataataccgattcaggcccatcccagttaggggcggctccaaaatcaccattgttcttttctcaccttgtgtctctgcgcactccccggcacacccacttccagcagctggtctttgtttgcagactttattttaacagctcagtggttcccgggcatcctccagctcttatacaaaagccccctcctcaaaagccactcgcctccctctttccacttcccacctctgtttcagggtcgaggcatccagatatctgtcttctggggcccctacgcagcaagactaaaagggggacccagtcctgggcagcagttcaccaggggagtatgcagaggggcatctggacacttcttgctgtaagggacggggtgacgggagggggtcttcccttccccttcttcctgctttgttcactctgtgacaccctaggccaggggagctgtctcaacgccatctcatgagccatgagaaccaggaggaccaggagggagaagaggagcaggagggcagacagagctggggcctcggacctgcccaatacttgtgaggagctgcatccaggatcccatcctcctgggtcattgttggcctggctcccacctttgtctggagcctctgctgggggttgaggctggatactgcccctcaggcttgactaggacacagtgtgtactccatgggtgagcctgcaggctggtcaattccggtgtccaactgagcgacctggaagaggagccctccctcccacctcagctctgagccaagctctccagatgcagaggacagggactctcagcaaagcatctccctccaagtggttgtggggcatcctccttgggcagggaaagaggagtcgaaatgatttcctgagaaatcgtcattttcattttatttttgagaaactgtcttgctctgtcacccagtctggagtgctttggggctatcacagcttgctgtagcctagagcccctgggctcaagtgatcctyctgcctcagccttccaggtagctgggactacaggcacacggcaccatgcaggactaatttgttaatttttcatttcagagagacagcatctcctgtgttgcccaagctgtcttgagctcctagcatcatgtgattctcccgcctctgcctcccacagcactgaattacaggcctcagccgtggcactgcacccttctgaggaatcttcagtgaaaagccacggtcaagttcaaaccccatagcagggcacacaggccctct

SEQ ID NO: 69170 - DNA, 825 bp, Homo sapiens
cccgatgaaggaggcgccctgcctcttggtcttgtccagagccttgttgatgcgcagcaccagccagcggaacatccgctcataggtcgccttggccaaggcctcgatggcaaagtcagcctgcggggcacacccggggagcgtggtgtcagatacaaaggatctgaaaaccctcataccctatgccccagtaatttcacttttagagtcctcccsctagaggaacagccctaagtatgtgggggaaaaaaaaaaatcttcgtacacaaatatgttcactgtggtgttatttaaaatgatgaaaagtagaaacaacctaatatctaacaatatggggacaataaacttagatcttttgaaataaaatgaggacacactaaaggatttacagaaaaagtgatgcttcaaaataaggcagtggtctacggccgtaccaccctaaatgcacccgatctcatcaaaataaggcagcagtctacggccataccaccctaaacgcgcccaatctcatcaaaataaggcagcagtctacggccataccaccctaaacgcgcccgatctcatcaaaataaggcagtgggcagaggggcagggggagataagacaaacgatgagccaagactcgccgtgagttagtaactgctgaagccgcctacgtgatgggcacgtggggctctttacactctcccctcttctttgttttgcacatttgcaaagctctgtaattaaaagccagaaggagaactaagtttaattcttttttttttttaagtcttgtaggaaagagctgcccaatgatattcatcactgggaattgttttcctt

SEQ ID NO: 69171 - DNA, 825 bp, Homo sapiens
cccgatgaaggaggcgccctgcctcttggtcttgtccagagccttgttgatgcgcagcaccagccagcggaacatccgctcataggtcgccttggccaaggcctcgatggcaaagtcagcctgcggggcacacccggggagcgtggtgtcagatacaaaggatctgaaaaccctcataccctatgccccagtaatttcacttttagagtcctccccctagaggaacagccctaagtatgtgggggaaaaaaaaaaatcttcgtacacaaatatgttcactgtggtgttatttaaaatgatgaaaagtasaaacaacctaatatctaacaatatggggacaataaacttagatcttttgaaataaaatgaggacacactaaaggatttacagaaaaagtgatgcttcaaaataaggcagtggtctacggccgtaccaccctaaatgcacccgatctcatcaaaataaggcagcagtctacggccataccaccctaaacgcgcccaatctcatcaaaataaggcagcagtctacggccataccaccctaaacgcgcccgatctcatcaaaataaggcagtgggcagaggggcagggggagataagacaaacgatgagccaagactcgccgtgagttagtaactgctgaagccgcctacgtgatgggcacgtggggctctttacactctcccctcttctttgttttgcacatttgcaaagctctgtaattaaaagccagaaggagaactaagtttaattcttttttttttttaagtcttgtaggaaagagctgcccaatgatattcatcactgggaattgttttcctt

SEQ ID NO: 69172 - DNA, 825 bp, Homo sapiens
cccgatgaaggaggcgccctgcctcttggtcttgtccagagccttgttgatgcgcagcaccagccagcggaacatccgctcataggtcgccttggccaaggcctcgatggcaaagtcagcctgcggggcacacccggggagcgtggtgtcagatacaaaggatctgaaaaccctcataccctatgccccagtaatttcacttttagagtcctccccctagaggaacagccctaagtatgtgggggaaaaaaaaaaatcttcgtacacaaatatgttcactgtggtgttatttaaaatgatgaaaagtagaaacaacctaatatctaacaatatggggacaataaacttagatcttttgaaataaaatgrggacacactaaaggatttacagaaaaagtgatgcttcaaaataaggcagtggtctacggccgtaccaccctaaatgcacccgatctcatcaaaataaggcagcagtctacggccataccaccctaaacgcgcccaatctcatcaaaataaggcagcagtctacggccataccaccctaaacgcgcccgatctcatcaaaataaggcagtgggcagaggggcagggggagataagacaaacgatgagccaagactcgccgtgagttagtaactgctgaagccgcctacgtgatgggcacgtggggctctttacactctcccctcttctttgttttgcacatttgcaaagctctgtaattaaaagccagaaggagaactaagtttaattcttttttttttttaagtcttgtaggaaagagctgcccaatgatattcatcactgggaattgttttcctt

SEQ ID NO: 69173 - DNA, 1794 bp, Homo sapiens
atccttgatgaccaatcagccaaaataccatctcaatgtaaagaggcacaatgcagtctcaggatggcacttcctgggcgtgaagccttgagtgtgccatgaagcttctccagtgctctagatggsgttatgccacctctctccgggttgctgtgaggactgcatcatggaatcatgtgaaagtgcctgacacggacaccccaggatggcccacaacagcctcaactgtgctgctgcagggacattcacccaggaggcagccagctgccctggccccagaggacatacctgctctttagtctgcgccttctggacgtaatcccgtcccaccttgatgcgcggggtgaggattcctctggtgaaatcggtcacattgatacccaagagatgggacaccttttgggcagctaagatttttcagagaataagagagggacaaaaagtcctaattagacccaagagagaaagttctaattagacccaagagaataagtccctctgcttgacttgggagcagagaggaagaaagccacggggtgaatgagcaatcattaccaggacaaccgcatctgggcccttctttagcagggccacagacacctagcaccccccagactcagcagccacatacaggtcagtgggcagggcagctgtacctcccctgagccccacggggcagagaggaaggcgtcctggctggaggccacagcggcagcagtggttcctctgtccactctcagccgcactcctcagagtgtaaaagcaggtccctacccaccaatggggctgagaggagcaggccaacctggtgctggggcacggaacagcacaggatcccacaggaatgtctttttttttttttgagacggcgtcttgctcttgttgcccaggctggagtgcagtggcgcgatttcggctcactgcaacccctacctcctggcttcaagcaattctcctgcctcaacctcccaagtagctgggattacaggcgcacgccaccatgcccggctaatttttgtatttttaatagagatggggtttcacaatgttggccaggctggtctcgaactcctgacctcgtgatctgcccgcctcagcctcccaaactgctgggattacagatgtgagccaccacgcccggtcaggagtgtcttttacaatccacacacccatgcgttacatctttagagagaccctaaggagggcacattaagactgaataacttgcatggggtcatttgcagcaaccctaacaaaggggctgaatcgggtgtggcaaggacataatttcaagatctcgacatagtcacaggcaaggctcccattaaggaggagctacggcagaaatcattggtgtcctgacgaatggtttggtctcaggaatgaataagggaagccctggtccacatgatcacaagtttaagttattctgaaatgcttacttggtgagaaaaaaaagcagggtcatgtttacgtgtgttttacatctgtatagaaaataccgacagatactaacattaaaaagaatagtgtccggaatttccgcaagaccttccctcctgagcaaatccatggccaagcacctgccccattatttccagcgagaggccccgggtgttacctgtgttgtcgggcatggacgcctggtcagtgttccgctccttcttgaagacgatgttgccgagctgaagaacccctgagatgacccgcagcaggcctttgggtgcaatcagaggcagctcagaagcagacatgggtcatggtgattcccgggggtgggggccactcatctag

SEQ ID NO: 69174 - DNA, 1413 bp, Homo sapiens
agaagcaccatttcctaggcgaggcagaccttttgcagaccacagctgcttccacctgaactttacagcagaccattgtgcctgccccgggacacagtcccacccatcccccgctgcctggcaagggccagcaacacaacgtttaygctctctcactctcctggccttggccagttcaaagcctttggtgccatcacagagttccgagcaacagtccaatccccaaggcaggaagacccaggaacggccatgacaacgaattaacaacatgggaaagccaggggcaggagggtgaaccgaccatgtcacccaaggccacgctgggcacgtctgggatgccctgtaactacttactgactgacacacaccaccgcctttctgcaagatccgacctcgccacacctgacaaaactcccaggacacctgacattggctcagtcgtgctggcgcaggtgtaggcaccaaatgtcttgttttgtagctagggccacaaatctctgtctataaacatgcctcgtctctccacctggaccgccagggcatccagtaacaggataatgtcaaaacctcctggcattctggcaccttctgtcacctacctccacggcctaatccaaggcactacatgctgtgatgccccacccgtgcccacggcagacagcactaatccatctcagaattcctgcatcgagtctcaaatccttgccagcacagggctccaggcagccactactgatcgatcggagatgacactcaaagtaaaactaatctgcaatgcttagtccagtagttcttaactgggaataatcttgccccccacggaaacttgatggcaatgtctgagaatatttttggttgtcacaactggagagggaaggtgtagctggcaccaagtgaatagaggccacgatgctgctaaaaatcctacagtgctcaggaagatcccccacccccaacagagaatcatccagcctcaaatatcactagtgccaagagtgagaatccctggcttagtctgacaataggtgagtgacatataatttatcctccaaactgggatgcttctgaaagtgaaagagagtgctattaataataactgtggaacaacaggcataaatcaggactgtacaggcaaaccagtacactgaacagataaaggcagatggaggtccccaggaagggtcaaagagctcctctcctacaagtccccagacagagccaccaactgccccgtttggcagaataaatgctagtatgtcataaggcacagccagctcaggaaggaaatctttgtctagttcttgtttaaagaaaaagcacaaaaggaactttccggctgtgccttttaagatgtaagtggcagagaacaaatctgtttccctcaaagccaggggggcagcatgcactaagact

SEQ ID NO: 69175 - DNA, 1413 bp, Homo sapiens
agaagcaccatttcctaggcgaggcagaccttttgcagaccacagctgcttccacctgaactttacagcagaccattgtgcctgccccgggacacagtcccacccatcccccgctgcctggcaagggccagcaacacaacgtttacgctctctcactctcctggccttggccagttcaaagcctttggtgccatcacagagttccgagsaacagtccaatccccaaggcaggaagacccaggaacggccatgacaacgaattaacaacatgggaaagccaggggcaggagggtgaaccgaccatgtcacccaaggccacgctgggcacgtctgggatgccctgtaactacttactgactgacacacaccaccgcctttctgcaagatccgacctcgccacacctgacaaaactcccaggacacctgacattggctcagtcgtgctggcgcaggtgtaggcaccaaatgtcttgttttgtagctagggccacaaatctctgtctataaacatgcctcgtctctccacctggaccgccagggcatccagtaacaggataatgtcaaaacctcctggcattctggcaccttctgtcacctacctccacggcctaatccaaggcactacatgctgtgatgccccacccgtgcccacggcagacagcactaatccatctcagaattcctgcatcgagtctcaaatccttgccagcacagggctccaggcagccactactgatcgatcggagatgacactcaaagtaaaactaatctgcaatgcttagtccagtagttcttaactgggaataatcttgccccccacggaaacttgatggcaatgtctgagaatatttttggttgtcacaactggagagggaaggtgtagctggcaccaagtgaatagaggccacgatgctgctaaaaatcctacagtgctcaggaagatcccccacccccaacagagaatcatccagcctcaaatatcactagtgccaagagtgagaatccctggcttagtctgacaataggtgagtgacatataatttatcctccaaactgggatgcttctgaaagtgaaagagagtgctattaataataactgtggaacaacaggcataaatcaggactgtacaggcaaaccagtacactgaacagataaaggcagatggaggtccccaggaagggtcaaagagctcctctcctacaagtccccagacagagccaccaactgccccgtttggcagaataaatgctagtatgtcataaggcacagccagctcaggaaggaaatctttgtctagttcttgtttaaagaaaaagcacaaaaggaactttccggctgtgccttttaagatgtaagtggcagagaacaaatctgtttccctcaaagccaggggggcagcatgcactaagact

SEQ ID NO: 69176 - DNA, 684 bp, Homo sapiens
ggccagagacgtgaagtcctatgatctgcctgctcagcctcctgacacgggaccctggcaagtcattcccctcccagggcctcagtttccccacagggcctggcacaagtaggtgctcagactcagggtgagtgagacaacctctgagttccttgtgtctcaaaagaaatctgttgttcccattgggcttcagcagcagcaccctggggccagcctgggtgtggcccggccacaaggacatgccgggctccaggtcacctcccctcctccaccttctttgattccttcaaatttcccaaagagatgggcacccccaacacctacctttcttctggggtcagctggccgtgtctgagggtgtcagaaccagagctgagcccggggagctttgtgaacccatctaagctgttttccccacctctctctacagtttacccgcccagcaggagggagggagcaatcagactcaagcctgggtgcaaatcccggctctgccactgctttcctgtctgatctgaaccagctacctaacctctctgagcttatctacaaaagctgaatgatccttcccttatagagctattgcragaataaggacatgggggtagatcacactatccccaacttaccaagggatcttcctctgacagagactgagcaagatccaactgttctgagctgtgt

SEQ ID NO: 69177 - DNA, 684 bp, Homo sapiens
ggccagagacgtgaagtcctatgatctgcctgctcagcctcctgacacgggaccctggcaagtcattcccctcccagggcctcagtttccccacagggcctggcacaagtaggtgctcagactcagggtgagtgagacaacctctgagttccttgtgtctcaaaagaaatctgttgttcccattgggcttcagcagcagcaccctggggccagcctgggtgtggcccggccacaaggacatgccgggctccaggtcacctcccctcctccaccttctttgattccttcaaatttcccaaagagatgggcacccccaacacctacctttcttctggggtcagctggccgtgtctgagggtgtcagaaccagagctgagcccggggagctttgtgaacccatctaagctgttttccccacctctctctacagtttacccgcccagcaggagggagggagcaatcagactcaagcctgggtgcaaatcccggctctgccactgctttcctgtctgatctgaaccagctacctaacctctctgagcttatctacaaaagctgaatgatccttcccttatagagctattgcargaataaggacatgggggtagatcacactatccccaacttaccaagggatcttcctctgacagagactgagcaagatccaactgttctgagctgtgt

SEQ ID NO: 69178 - DNA, 1006 bp, Homo sapiens
tgtgtccataaagttttattggaacaccgccaggctcattcttttacgtattgtctatggttgattttatgctacgatggcagagttgagtagttgggacagagaccatatggctggcaaagcctaaaagatttacaatcaatctcttaaagcaaatggtttgcccacccttgcttagagagagcctccaggaagaaaagagcagtgagggtgacgttgaagaagggggcaagactaggtcaccaggggctccctgtgcccmgcccaggcactgaacttaagctgagggcaagtgggagccattgaaggtgcaggcaggagagtgacctgctcaagtgaatgttggagtaggatcactctgcctcctcagcaaggatggatgaagctgggcacggaggcacctggagcaggtagaccagccctaggcagcccggatggttcagcaaaggcctctgggactattctggagcacattcgctgggatatagaataggtagcgcatccctgcaccttcgacgatggcggcgcagagatgtctgctgcgtacccacaatgccttgtgcctcgcaccgcgggaggaagtggctgctctgtaggccccagaacggaaccacttgaaaggcgggaaacacgtgggggacgcctctgagccctgagaggaatggcctagagcaaggccacgaggagccagggcacgacacggtgggccctcggagaaccgctggtgggcaagtggcaggagagtaggctcaagagggttggcagggccgaccgggcctagggtggccgggtgaggggggcgggggaggggaggcccccccagttaccccaggagtgcgcaggtggcttcgggcatgtgagggacggagggggtcggacggaaggacacaggccggtgtacagcggtcacccacgccccaagcagacacacagactctgcagacaccgtaacaggcccggcaccgtgcacacatcacaggcccaggcctctgcacatggtcacaga

SEQ ID NO: 69179 - DNA, 1006 bp, Homo sapiens
tgtgtccataaagttttattggaacaccgccaggctcattcttttacgtattgtctatggttgattttatgctacgatggcagagttgagtagttgggacagagaccatatggctggcaaagcctaaaagatttacaatcaatctcttaaagcaaatggtttgcccacccttgcttagagagagcctccaggaagaaaagagcagtgagggtgacgttgaagaagggggcaagactaggtcaccaggggctccctgtgccccgcccaggcactgaacttaagctgagggcaagtgggagccattgaaggtgcaggcaggagagtgacctgctcaagtgaatgttggagtaggatcactctgcctcctcagcaaggatggatgaagctgggcacggaggcacctggagcaggtagaccagccctaggcagcccggatggttcagcaaaggcctctgggactattctggagcacattcgctgggatatagaataggtagcgcatccctgcaccttcgacgatggcggcgcagagatgtctgctgcgtacccacaatgccttgtgcctcgcaccgcgggaggaagtggctgctctgtaggccccagaacggaaccacttgaaaggcgggaaacacgtgggggacscctctgagccctgagaggaatggcctagagcaaggccacgaggagccagggcacgacacggtgggccctcggagaaccgctggtgggcaagtggcaggagagtaggctcaagagggttggcagggccgaccgggcctagggtggccgggtgaggggggcgggggaggggaggcccccccagttaccccaggagtgcgcaggtggcttcgggcatgtgagggacggagggggtcggacggaaggacacaggccggtgtacagcggtcacccacgccccaagcagacacacagactctgcagacaccgtaacaggcccggcaccgtgcacacatcacaggcccaggcctctgcacatggtcacaga

SEQ ID NO: 69180 - DNA, 1006 bp, Homo sapiens
tgtgtccataaagttttattggaacaccgccaggctcattcttttacgtattgtctatggttgattttatgctacgatggcagagttgagtagttgggacagagaccatatggctggcaaagcctaaaagatttacaatcaatctcttaaagcaaatggtttgcccacccttgcttagagagagcctccaggaagaaaagagcagtgagggtgacgttgaagaagggggcaagactaggtcaccaggggctccctgtgccccgcccaggcactgaacttaagctgagggcaagtgggagccattgaaggtgcaggcaggagagtgacctgctcaagtgaatgttggagtaggatcactctgcctcctcagcaaggatggatgaagctgggcacggaggcacctggagcaggtagaccagccctaggcagcccggatggttcagcaaaggcctctgggactattctggagcacattcgctgggatatagaataggtagcgcatccctgcaccttcgacgatggcggcgcagagatgtctgctgcgtacccacaatgccttgtgcctcgcaccgcgggaggaagtggctgctctgtaggccccagaacggaaccacttgaaaggcgggaaacacgtgggggacgcctctgagccctgagaggaatggcctagagcaaggccacgaggagccagggcacgacacggtgggccctcggagaaccgctggtgggcaagtggcaggagagtaggctcaagagggttggcagggccgaccgggcctagggtggccgggtgaggggggcgggggaggggaggcccccccagttaccccaggagtgcgcaggtggcttcgggcatgtgagggacggagggggtcggacggaaggacacaggccggtgtacagcggtcacccacgccccaagcagacacacagactctgyagacaccgtaacaggcccggcaccgtgcacacatcacaggcccaggcctctgcacatggtcacaga

SEQ ID NO: 69181 - DNA, 886 bp, Homo sapiens
cataactaagggcaaggtcacgttttcattttctttttcttgttgcccagtgagccacactccttctcccgaactctcaagcccctagccacaacccagccttgtaagtggaaatgctatgaatttacggtgagggattttgatcaatttcttttcctttcccctggttgttctcttattrccctgagaggtaaggcaataaggcaactcaataccaatatggatgacttattgccttttcctaaacctgagattttcacatggcaagaatcatttctgattgcttcttgagtggggttctgacagtccagggctggtgggtgtcaatctggtttgaccataagaacaggaccaaaaaccttggaaatcaatcatttctgagaaaccaaatggttctcttatcccagttctcatcagtgaaaagacactgaagggagttgaaataaatattatttgttactaatggtaataaaccctggtagtttaatgtatttagttttaaatctgttctaattgatatttaggaagctgcatttgagattcagcctcttgacaagatcacagtgctgcaggattaagagtcagatgcgtgttgtaaatgctgtggagacaggctgggattaccaaaataagatgcaaagtatagacagacatttcgtaactttcacactagctggaattaataaattcctatttttgtcaatgtcagaaagccaaagaaagtcaaatatggagtatctcagaacacgttcatataaggatctgtatcttcagctaaaattttcttaaagctgacaactgtcatatttcttgcagagtatgttacccccatcctcttggcccaagtcttcaaagccaagaaacctgtgcccttggagagaccctt

SEQ ID NO: 69182 - DNA, 886 bp, Homo sapiens
cataactaagggcaaggtcacgttttcattttctttttcttgttgcccagtgagccacactccttctcccgaactctcaagcccctagccacaacccagccttgtaagtggaaatgctatgaatttacggtgagggattttgatcaatttcttttcctttcccctggttgttctcttattgccctgagaggtaaggcaataaggcaactcaataccaatatggatgacttattgccttttcctaaacctgagattttcacatggcaagaatcatttctgattgcttcttgagtggggttctgacagtccagggctggtgggtgtcaatctggtttgaccataagaacaggaccaaaaaccttggaaatcaatcatttctgagaaaccaaatggttctcttatcccagttctcatcagtgaaaagacactgaagggagttgaaataaatattatttgttactaatggtaataaaccctggtagtttaatgtatttagttttaaatctgttctaattgatatttaggaagctgcatttgagattcagcctcttgacaagatcacagtgctgcaggattaagagtcagatgcgtgttgtaaatgctgtggagacaggctgggattaccaaaataagatgcaaagtatagacagacatttcgtaactttcacactagctggaattaataaattcctatttttgtcaatgtcagaaagccaaagaaagtcaaatatggagtatctcagaacacgttcatataaggatctgtatcttcagctaaaattttcttaaagctgacaactgtcatatttcttgcagagtatgttacccccatccycttggcccaagtcttcaaagccaagaaacctgtgcccttggagagaccctt

SEQ ID NO: 69183 - DNA, 1849 bp, Homo sapiens
agcctgccagctgccttgagactttgggtgctagacataatactggcagagtccaagagttatttctatttcatatgttttatttagtatggctatattaattttttattcatcagaagttctgctgttgaaataaatgtaaaatgttttacaaaaccaaaaccactgccatcgagtttcatatataggtagaaatataaaaaactccagaataaggtagcaccctcaaatgatgtctcattgcctttttcttggaaacacacacagcaagttgaaaatgtggattgatctgccatatctgttaaattattagtttttcttcttctaaatatgatgaggcagtttttccttggaaaaacagtttgtgttcagcttgggaggttgattttccaccatcagtttctccctttaataattgaaaaccactgttcgttatttacataaaactgtctttttctggtctgctttctataacctttcccctcttaagaattttaagaattccctgactttcctctgagggattttctgcctgctttatcccagatgtgggacattgactaggctgaggttttggggattttatyttattttttttagtgtttctacatttgaaagatgttcttttaaccagtgcacaaatctgccactgaaaaaaggggctttgaagaaaaatcaagtagttaagaaaatatgtgaactttgtttacatttctcacttactgaatgacaccaaaatcccatatgccaaatgaaaaagtagacagtagtttcagataataaggggaaaatgcacccgtgttatttcagccttttaattctgggattttattctctgaatgaaggcatgtcagtttctggtcccagtggcactgtgtttggtcttcactacatgcttgctgatgtcagcccaggaaatacacgggcttggcagatgtttacatggcctttgtcttctctctttccaccttctgctcacataaagaggatatttaaccttattcataatattttgtctgcttacagatgtattgatcctaatccctggttcagaaatgttaggaaaaggagataagttacagtgaaagaggctgtagtaagaaatacaggattttctggttttttgtaatgtctactcagattcccagatgattgttcattaccagcttttggttattgtggtttatgtattaatgtctaaaaaaatataccatgtgatgttttttgcatgatactatgtgagaagaataccaagaataattttttccttacttgaacaaatattatacattttcccttagtccaaaattctgttttccataatgaatacaattctgatgtagtatgtttaactctataaaatcagaactttagtaattttcttcctaattaaatttttttgttgtatttttaaaaatctaaattcataagctttattttcacatatggtttctacctcttatatgtttccacacctgtgccatgttcccttggctgacagacactttttttcctttttatctcacgtaggatctttcgaagatggtttggctgccttggagatttggagatctgatgccacgatgaggactcacacacggggggctcccagtgtgtttttcatatatttgctttgctttgtgtcagcctacatcaccgacgagaacccagaagttatgattcccttcaccaatgccaactacgacagccatcccatgctgtacttctccagggcagaagtggcggagctgcagctcagggctgccagctcgcacgagcacattgcagcccgcctcacggaggctgtgcacacgatgctgtccagccccttggaatacctccctccctg

SEQ ID NO: 69184 - DNA, 1849 bp, Homo sapiens
agcctgccagctgccttgagactttgggtgctagacataatactggcagagtccaagagttatttctatttcatatgttttatttagtatggctatattaattttttattcatcagaagttctgctgttgaaataaatgtaaaatgttttacaaaaccaaaaccactgccatcgagtttcatatataggtagaaatataaaaaactccagaataaggtagcaccctcaaatgatgtctcattgcctttttcttggaaacacacacagcaagttgaaaatgtggattgatctgccatatctgttaaattattagtttttcttcttctaaatatgatgaggcagtttttccttggaaaaacagtttgtgttcagcttgggaggttgattttccaccatcagtttctccctttaataattgaaaaccactgttcgttatttacataaaactgtctttttctggtctgctttctataacctttcccctcttaagaattttaagaattccctgactttcctctgagggattttctgcctgctttatcccagatgtgggacattgactaggctgaggttttggggattttattttattttttttagtgtttctacatttgaaagatgttcttttaaccagtgcacaaatctgccactgaaaaaaggggctttgaagaaaaatcaagtagttaagaaaatatgtgaactttgtttacatttctcacttactgaatgacaccaaaatcccatatgccaaatgaaaaagtagacagtagtttcagataataaggggaaaatgcacccgtgttatttcagccttttaattctgggattttattctctgaatgaaggcatgtcagtttctggtcccagtggcactgtgtttggtcttcactacatgcttgctgatgtcagcccaggaaatacacgggcttggcagatgtttacatggcctttgtcttctctctttccaccttctgctcacataaagaggatatttaaccttattcataatattttgtctgcttacagatgtattgatcctaatccctggttcagaaatgttaggaaaaggagataagttacagtgaaagaggctgtagtaagaaatacaggattttctggttttttgtaatgtctactcagattcccagatgattgttcattaccagcttttggttattgtggtttatgtattaatgtctaaaaaaatataccatgtgatgttttttgcatgatactatgtgagaagaataccaagaataattttttccttacttgaacaaatattatacattttccctwagtccaaaattctgttttccataatgaatacaattctgatgtagtatgtttaactctataaaatcagaactttagtaattttcttcctaattaaatttttttgttgtatttttaaaaatctaaattcataagctttattttcacatatggtttctacctcttatatgtttccacacctgtgccatgttcccttggctgacagacactttttttcctttttatctcacgtaggatctttcgaagatggtttggctgccttggagatttggagatctgatgccacgatgaggactcacacacggggggctcccagtgtgtttttcatatatttgctttgctttgtgtcagcctacatcaccgacgagaacccagaagttatgattcccttcaccaatgccaactacgacagccatcccatgctgtacttctccagggcagaagtggcggagctgcagctcagggctgccagctcgcacgagcacattgcagcccgcctcacggaggctgtgcacacgatgctgtccagccccttggaatacctccctccctg

SEQ ID NO: 69185 - DNA, 794 bp, Homo sapiens
tgcctgcggggagggccgggagggtggggtttccaacccattccgtggagcctgcaggtatcccccgtcacaccttctggcagcctggggtgggcagctcccctcgctgggcgcaggccmgcatgtggggcaagggtgatgtctctgcaagttattctgctagcactcagggtgcccggggctccttctcgcctggatggggcgggggaggcaccttggggaacagatcacagcccgggcctggctgtcaggagcatcaggctgggtggccacccgcggggacaaaaccctggacggcctcaagcagagcctcttcctgaggcgcaggaactgggcgcccttggcagggcgggacagcggccttgccgctggccgggtcctcaaagtgaggccactcccacgtcccaccccgggtcactgaagggtggccccagctccatgccctccccacaactgcagggcgagagcagcaacgcaggagtggtgaaggctctgggcctgggggcggtcctgctggctgctcaagagtggggtcagtgcagtcagctgcctcagtgacgcgaggcacaggggatatggggcacaagggtcccaccacggccactactccctcagtggctcctgccgccaccgcttgcaacttcccgcagcagccggccactctggacagctcgccaccgccagcatcaccacccttttatcctgaaatactaacatgaaccttagctggatttcctggattactactatcacaattagtttctttttttcacaaatttgtttcttttttcttt

SEQ ID NO: 69186 - DNA, 794 bp, Homo sapiens
tgcctgcggggagggccgggagggtggggtttccaacccattccgtggagcctgcaggtatcccccgtcacaccttctggcagcctggggtgggcagctcccctcgctgggcgcaggccagcaygtggggcaagggtgatgtctctgcaagttattctgctagcactcagggtgcccggggctccttctcgcctggatggggcgggggaggcaccttggggaacagatcacagcccgggcctggctgtcaggagcatcaggctgggtggccacccgcggggacaaaaccctggacggcctcaagcagagcctcttcctgaggcgcaggaactgggcgcccttggcagggcgggacagcggccttgccgctggccgggtcctcaaagtgaggccactcccacgtcccaccccgggtcactgaagggtggccccagctccatgccctccccacaactgcagggcgagagcagcaacgcaggagtggtgaaggctctgggcctgggggcggtcctgctggctgctcaagagtggggtcagtgcagtcagctgcctcagtgacgcgaggcacaggggatatggggcacaagggtcccaccacggccactactccctcagtggctcctgccgccaccgcttgcaacttcccgcagcagccggccactctggacagctcgccaccgccagcatcaccacccttttatcctgaaatactaacatgaaccttagctggatttcctggattactactatcacaattagtttctttttttcacaaatttgtttcttttttcttt

SEQ ID NO: 69187 - DNA, 794 bp, Homo sapiens
tgcctgcggggagggccgggagggtggggtttccaacccattccgtggagcctgcaggtatcccccgtcacaccttctggcagcctggggtgggcagctcccctcgctgggcgcaggccagcatgtggggcaagggtgatgtctctgcaagttattctgctagcactcagggtgcccggggctccttctcgcctggatggggcrggggaggcaccttggggaacagatcacagcccgggcctggctgtcaggagcatcaggctgggtggccacccgcggggacaaaaccctggacggcctcaagcagagcctcttcctgaggcgcaggaactgggcgcccttggcagggcgggacagcggccttgccgctggccgggtcctcaaagtgaggccactcccacgtcccaccccgggtcactgaagggtggccccagctccatgccctccccacaactgcagggcgagagcagcaacgcaggagtggtgaaggctctgggcctgggggcggtcctgctggctgctcaagagtggggtcagtgcagtcagctgcctcagtgacgcgaggcacaggggatatggggcacaagggtcccaccacggccactactccctcagtggctcctgccgccaccgcttgcaacttcccgcagcagccggccactctggacagctcgccaccgccagcatcaccacccttttatcctgaaatactaacatgaaccttagctggatttcctggattactactatcacaattagtttctttttttcacaaatttgtttcttttttcttt

SEQ ID NO: 69188 - DNA, 794 bp, Homo sapiens
tgcctgcggggagggccgggagggtggggtttccaacccattccgtggagcctgcaggtatcccccgtcacaccttctggcagcctggggtgggcagctcccctcgctgggcgcaggccagcatgtggggcaagggtgatgtctctgcaagttattctgctagcactcagggtgcccggggctccttctcgcctggatggggcgggggaggcaccytggggaacagatcacagcccgggcctggctgtcaggagcatcaggctgggtggccacccgcggggacaaaaccctggacggcctcaagcagagcctcttcctgaggcgcaggaactgggcgcccttggcagggcgggacagcggccttgccgctggccgggtcctcaaagtgaggccactcccacgtcccaccccgggtcactgaagggtggccccagctccatgccctccccacaactgcagggcgagagcagcaacgcaggagtggtgaaggctctgggcctgggggcggtcctgctggctgctcaagagtggggtcagtgcagtcagctgcctcagtgacgcgaggcacaggggatatggggcacaagggtcccaccacggccactactccctcagtggctcctgccgccaccgcttgcaacttcccgcagcagccggccactctggacagctcgccaccgccagcatcaccacccttttatcctgaaatactaacatgaaccttagctggatttcctggattactactatcacaattagtttctttttttcacaaatttgtttcttttttcttt

SEQ ID NO: 69189 - DNA, 794 bp, Homo sapiens
tgcctgcggggagggccgggagggtggggtttccaacccattccgtggagcctgcaggtatcccccgtcacaccttctggcagcctggggtgggcagctcccctcgctgggcgcaggccagcatgtggggcaagggtgatgtctctgcaagttattctgctagcactcagggtgcccggggctccttctcgcctggatggggcgggggaggcaccttggggaacagatcacagcccgggcctggctgtcaggagcatcaggctsggtggccacccgcggggacaaaaccctggacggcctcaagcagagcctcttcctgaggcgcaggaactgggcgcccttggcagggcgggacagcggccttgccgctggccgggtcctcaaagtgaggccactcccacgtcccaccccgggtcactgaagggtggccccagctccatgccctccccacaactgcagggcgagagcagcaacgcaggagtggtgaaggctctgggcctgggggcggtcctgctggctgctcaagagtggggtcagtgcagtcagctgcctcagtgacgcgaggcacaggggatatggggcacaagggtcccaccacggccactactccctcagtggctcctgccgccaccgcttgcaacttcccgcagcagccggccactctggacagctcgccaccgccagcatcaccacccttttatcctgaaatactaacatgaaccttagctggatttcctggattactactatcacaattagtttctttttttcacaaatttgtttcttttttcttt

SEQ ID NO: 69190 - DNA, 662 bp, Homo sapiens
actcctaaacacactcacacactcacttctgcaaacagttgtcttgtcaagtgggaaatgaatgctcttacaaggctcaaacttgtgaacacatcactgaccagcacagagctggctaacaataaggacccagttaaagtgttttccatgcaactggttccaaccttccaagtactaaattaaaacaatcatttaaagaaggaaattgtttcagaagaggaccttcatactgcatctctgaccagcaactgatgatgctattgaactcagatgctgattggttctccaacacgagattacgcaacccaggagcaaagaaattagtaccttactccctgtgttggggatgtgagtagagggaggtcatagytctccgtgaatgtgagacttgcctgctaccctggcacctggtcctgtcctgttctccagcatggtgtgtttgaggctccctggaggctcctgcatggcagcgctgacagtgacactgatggtgctgagctccccactggctttggctggggacacccgacctaagtgcacactgcggttgctgagctaccataaggggggtaaagtagggacctaaatttgtcactgtgcccagtccatgtcccttaagaatttgtaacgttttccacagggattgcccatctttatcacat

SEQ ID NO: 69191 - DNA, 1416 bp, Homo sapiens
taggttcacccgtcatgccctcagctttccttaattagccatgtctgcttacctcttcctccagtttttatttttccccagctatgttgtcatcatttccagaaattcctaaagcttgcacagacccagagcactatgagatccattgaaagagattttttcctttttttgagacaaggcctggctctgtcacccatgctgtagttcagtgttatgatctaggcttactgcaacctctgcctcccaggctcaagcgggcctccctcctcagcctccagagtagtggagactacaggcaggaaaccacgcccagctgatttttgtaattttgctagagatgagactttgctatgttacccaggctggtcttaaactgctggactcaagcaatcctccagccttgacctcccaacatgcttgggttataggtttgagccaccgcacccaggcaaaaaatagatgaatcttaatttaaaaatttattatttcttaaatcactgttaatctttatctgtgaattcttacaactagaaggaggagaaagaagaactttgcctgtatttcacaccgggaggagaaggggtctagtgtgacatcaaaatgaaagagtgctggagtttgagccccttcttgctttccaggatccaaacagtgatcagttcctagatccctggtttattcatgtaaaccacacttatttttctcagcagctactgtgtactcggctccattccaagttcaaatcattgtatttgattaagatagagagggtcccgactctcatggaagttacacaacaatagaggagacaracattaacccaatatgcaattaacaaagaagataacattagagagtaatagtgcactgaagaaaagacatcaggtttgtggaaaagagagaaatggattcacccaactttagctcatgtgtttagaaagctctgcctgagaaagtgacattcagctgagacaacaaaataagtagagagccatgtgaagatctaagggacgaaagttccagggagacagaatgtgggggcagggggggtgggaagccctggtgtgggaaattatgtgcagggacagaaagaaggctagagagactgaactatagcattcaaagaaatgcagaggcagaggatgaggtaggaagcagagaggaagtcaggagcctcattatattaggctctgatgtccatggtaagaaatttgaattttattttatttattttcatttttttatttcattatttattttttgagatggagtttcgttcttgttgcccaggctggatgcaatggcgtggcctcggctcactgcaacctctgcctcctgggctcacgtgattttcctgcctcagcctcccgagtagctggaactacaggcgcctgccaccatgccaggctaattttt

SEQ ID NO: 69192 - DNA, 706 bp, Homo sapiens
tgatctcagctcactgcaacctccacctcccgggttcaagtgattctcctgcctcagcctcccaagtagctgggattacagtcatgcaccaccacacctggctacttttttgtatttttagtagaggcggggtttcaccatgttggccaggctggtctcgaactcctgacctcaggtgatccacctgcctcggcctcccaaagtgctgggattataggcgtgagccaccgcatccagcccatttccatcacttgagccactcagtcygcgaaacttcgttaggacagccctaatgtcattgccaagcacaaactggccagtccccagccctcaccctgtgccctccgctgttctgacctgtctcatttgccagtggaaccttcattcctcaaataaggagtcgcttctctgagtctccagttgatcacttgaaaaattaggataataatacccacctcctacggctgtcacgctccttcaataaaatatgacagaaaatgcacctggtttgtagcgatgctcagtaattgctggcggcagtaatgtgacagttatttttactgttgtttttatgaatcgtgttattttaattagctgtcagtttccaggtctgagctggccatcctggagataaaagagcctcgtggttaggggctctgctcaccactatgtgcaggggaggaggccaccttgaggataagggaaa

SEQ ID NO: 69193 - DNA, 615 bp, Homo sapiens
tggaagctggagcagggggcggcattgccaatcaggaacccatggggagggtctccaggaycacccaagaggcccagcctcagctcacagccgtgtctgtccagggagacccggcgcccccgctcccctgccaaaaaaatccttccttgcttccctgggcaggcccagccctggaggggcaagagcaacacccagcaagagggaggggacagaggagaaactgaccgcacccctccccgatccctggactatgcggagctgagctgagctgagctggcggaggaggaaactctaaattctaagagtctcaaatttaatacaagagccgcctggactttgcattacccaaagcccctggaaaaacgacgtgaaatagctgcagttccttgcaaggggggagagtgagtctgccagacaggagtgaaggggggaattgagaaagaatgaataaagtgctgtatggatgttaaacttgttgaattgtcacaggcgccctttgagtggagcctgttaccatgcttgctttccagagggagccactgaggcacagagaggctaaaggatgccccagggtcacacagccagcacacagcagagctggaatcggatggggca

SEQ ID NO: 69194 - DNA, 615 bp, Homo sapiens
tggaagctggagcagggggcggcattgccaatcaggaacccatggggagggtctccaggaccacccaagaggcccagcctcagctcacagccgtgtctgtccagggagacccggcgcccccgctcccctgccaaaaaaatccttccttgcttccctgggcaggcccagccctggaggggcaagagcaacacccagcaagagggaggggacagaggagaaactgaccgcacccctccccgatccctggactatgcggagctgagctgagctgagctggcggaggaggaaactctaaattctaagagtctcaaatttaatacaagagccgcctggactttgcattacccaaagcccctggaaaaaygacgtgaaatagctgcagttccttgcaaggggggagagtgagtctgccagacaggagtgaaggggggaattgagaaagaatgaataaagtgctgtatggatgttaaacttgttgaattgtcacaggcgccctttgagtggagcctgttaccatgcttgctttccagagggagccactgaggcacagagaggctaaaggatgccccagggtcacacagccagcacacagcagagctggaatcggatggggca

SEQ ID NO: 69195 - DNA, 1703 bp, Homo sapiens
gcacaggccacaaggggaaactgaggggccccaggctaccatctgccaggcaccagacaaacaagtgagcccacctgagatcatgtcatcaccaaccaaccttccagctgaccacagagcatgatattaccctgcagataagagttcagcccagccagcccccaaaacggctcaggcagcccacagagtcatgagctcaagaaatcactgattttaagcygcagagatttgggctggtttcttacatggcaaaaactaactgacacagccactaacgtttgatttgaggattgggtattaggtgtaagtgttcaagacttctgtgcattggaaaaattgctttcagggcagactggcctgaaaattattctttacaccaaaagcttaagtttctaaaacctgctcagagctctagcacggacctcaaagggtggctgatggaacagcagaggtgtcctgatgcagagacacagggtcattcccaaggacttaggtctggggacaggtgttttacaggctcctttaggggtggcaagtctcccggaaacgtgattagtgaagacacattaacagcgaaactgacagagaacctcaacattctctggtaggaaaagccaggatcctggcagaggaagcaacgattcgagcagggaactgtgcaggacagagaacaatgcggccccaattttgatccgggggtaattagcttagctaaggagttccccagtccctaagtggagaggggatccagaaccccacaatttatttttatatcttagtgtatgtatctatgcatcacatatgataagacagaatatttatacagatattttagttaatggcctaataaaacatatacataattattattccagagcaaggttctgcaaaacacatttttctcctttctttttttttttttttttttttttgagatggagttttgctcttttagcctaggctggagtgcaatggtgcgatctcggctcactgcaacctcctcctcccgagttcaagccattctcttgcttcaacctcccaagtagatggaattacaagtgcccaccaccacgcccagctaatttttgtgtacttttagtagcgacagggtttcaccgtgttggccaggctggtctcaaactcctgacctcaggtgatccacccgcctcggcctcccaaagtgctgggattacaggtgtgagccaccgcacccagctgcaaaacacttttaattttcttcataaagtcctgacagtccccaaacactgtgacagacagatacctgctctggggaccagttacatcttcctgaaggtgtggagtcccttcgctggatgaggttgttgggtttcatctgactgtccaggcaatgcagtgaggcaggtgggagcccattttacagaccgggaaaccaaagcctagaaagttgagatgggttgttcaacgtcctccacctggtacacggcaggcctgggagtccaaccgagccagcccctctgactgcacacccagcagacctttcccagcgtcataggcactagaaccaatgccatctcccttcttcctgctgatggagggacagacccttgctctggtggccccacagccaaccctcgggtcttccttggagctcttccctgcaagtgagcacctagatgaaggccctggtcagctgcaggggagtcggggggaactcctccagg

SEQ ID NO: 69196 - DNA, 1703 bp, Homo sapiens
gcacaggccacaaggggaaactgaggggccccaggctaccatctgccaggcaccagacaaacaagtgagcccacctgagatcatgtcatcaccaaccaaccttccagctgaccacagagcatgatattaccctgcagataagagttcagcccagccagcccccaaaacggctcaggcagcccacagagtcatgagctcaagaaatcactgattttaagctgcagagatttgggctggtttcttacatggcaaaaactaactgacacagccactaacgtttgatttgaggattgggtattaggtgtaagtgttcaagacttctgtgcattggaaraattgctttcagggcagactggcctgaaaattattctttacaccaaaagcttaagtttctaaaacctgctcagagctctagcacggacctcaaagggtggctgatggaacagcagaggtgtcctgatgcagagacacagggtcattcccaaggacttaggtctggggacaggtgttttacaggctcctttaggggtggcaagtctcccggaaacgtgattagtgaagacacattaacagcgaaactgacagagaacctcaacattctctggtaggaaaagccaggatcctggcagaggaagcaacgattcgagcagggaactgtgcaggacagagaacaatgcggccccaattttgatccgggggtaattagcttagctaaggagttccccagtccctaagtggagaggggatccagaaccccacaatttatttttatatcttagtgtatgtatctatgcatcacatatgataagacagaatatttatacagatattttagttaatggcctaataaaacatatacataattattattccagagcaaggttctgcaaaacacatttttctcctttctttttttttttttttttttttttgagatggagttttgctcttttagcctaggctggagtgcaatggtgcgatctcggctcactgcaacctcctcctcccgagttcaagccattctcttgcttcaacctcccaagtagatggaattacaagtgcccaccaccacgcccagctaatttttgtgtacttttagtagcgacagggtttcaccgtgttggccaggctggtctcaaactcctgacctcaggtgatccacccgcctcggcctcccaaagtgctgggattacaggtgtgagccaccgcacccagctgcaaaacacttttaattttcttcataaagtcctgacagtccccaaacactgtgacagacagatacctgctctggggaccagttacatcttcctgaaggtgtggagtcccttcgctggatgaggttgttgggtttcatctgactgtccaggcaatgcagtgaggcaggtgggagcccattttacagaccgggaaaccaaagcctagaaagttgagatgggttgttcaacgtcctccacctggtacacggcaggcctgggagtccaaccgagccagcccctctgactgcacacccagcagacctttcccagcgtcataggcactagaaccaatgccatctcccttcttcctgctgatggagggacagacccttgctctggtggccccacagccaaccctcgggtcttccttggagctcttccctgcaagtgagcacctagatgaaggccctggtcagctgcaggggagtcggggggaactcctccagg

SEQ ID NO: 69197 - DNA, 1703 bp, Homo sapiens
gcacaggccacaaggggaaactgaggggccccaggctaccatctgccaggcaccagacaaacaagtgagcccacctgagatcatgtcatcaccaaccaaccttccagctgaccacagagcatgatattaccctgcagataagagttcagcccagccagcccccaaaacggctcaggcagcccacagagtcatgagctcaagaaatcactgattttaagctgcagagatttgggctggtttcttacatggcaaaaactaactgacacagccactaacgtttgatttgaggattgggtattaggtgtaagtgttcaagacttctgtgcattggaaaaattgctttcagggcagactggcctgaaaattattctttacaccaaaagcttaagtttctaaaacctgctcagagctctagcayggacctcaaagggtggctgatggaacagcagaggtgtcctgatgcagagacacagggtcattcccaaggacttaggtctggggacaggtgttttacaggctcctttaggggtggcaagtctcccggaaacgtgattagtgaagacacattaacagcgaaactgacagagaacctcaacattctctggtaggaaaagccaggatcctggcagaggaagcaacgattcgagcagggaactgtgcaggacagagaacaatgcggccccaattttgatccgggggtaattagcttagctaaggagttccccagtccctaagtggagaggggatccagaaccccacaatttatttttatatcttagtgtatgtatctatgcatcacatatgataagacagaatatttatacagatattttagttaatggcctaataaaacatatacataattattattccagagcaaggttctgcaaaacacatttttctcctttctttttttttttttttttttttttgagatggagttttgctcttttagcctaggctggagtgcaatggtgcgatctcggctcactgcaacctcctcctcccgagttcaagccattctcttgcttcaacctcccaagtagatggaattacaagtgcccaccaccacgcccagctaatttttgtgtacttttagtagcgacagggtttcaccgtgttggccaggctggtctcaaactcctgacctcaggtgatccacccgcctcggcctcccaaagtgctgggattacaggtgtgagccaccgcacccagctgcaaaacacttttaattttcttcataaagtcctgacagtccccaaacactgtgacagacagatacctgctctggggaccagttacatcttcctgaaggtgtggagtcccttcgctggatgaggttgttgggtttcatctgactgtccaggcaatgcagtgaggcaggtgggagcccattttacagaccgggaaaccaaagcctagaaagttgagatgggttgttcaacgtcctccacctggtacacggcaggcctgggagtccaaccgagccagcccctctgactgcacacccagcagacctttcccagcgtcataggcactagaaccaatgccatctcccttcttcctgctgatggagggacagacccttgctctggtggccccacagccaaccctcgggtcttccttggagctcttccctgcaagtgagcacctagatgaaggccctggtcagctgcaggggagtcggggggaactcctccagg

SEQ ID NO: 69198 - DNA, 962 bp, Homo sapiens
ttgtctactgcatccaatcacagaactacctccccctaaaaccaaaaaaaacagacaatcttctgtcattatggtgtgcatgctttaagtttttctctatataaagtataaataaataatattcagttttgttttgtttttaacataaatagcagtttggcttttcagcttaacagcatatctatattttttctatgtatattcctagggacccacatcattgtttttactgctatgtcatattccagagcacaaatgcactacgacttacttaatcactcatttattagtggagagctacactgtttccagtgtgttttttttttttttttttttggataaacagtgctacagtgatcataattatacaagcctcctagtgcccaatgctctaattttctgcaaaaaatacactgctctctacttttttctttgatcacagtaaacattcccaagacctcgttgtttccctattttagctttctgggaatgtggaaactttgttatgttacacagggttcccttctcatcatcttctctttccttctgtgttgtgatgagtaagattaaagcaccttctgacagaaatctctaaactctcatttttatgatttatttctgcagggagacatttactcagtgctatggaattatgattttctatctcaggggacaaagctaggactaaactccctaatatgcttattgtgacaaatacttaaaggttaaaatcaagctgctaaatctttaccttttgtgtctgttagctttcagttatttggcaatgtgggctatcaggataaattaactgttgtagccattacaactatgaattggtcaacatttaggttctaaacatctattctaaagaatttcggagtatccataatcctccttgcattgcatccttcttgcatagtctcttttgtmgaattttttctatgtttagagattgctcttaa

SEQ ID NO: 69199 - DNA, 706 bp, Homo sapiens
cctccctcctttgygctaatgttgtgtatattacagtattacagtttttgccttagttgtgtctgtattaaattaagaaaaaaagaaatagagaacatttcatatttccctacctttaccatgtccagtggattttactcctttctatagatgactttctgcctagcaataattctttctgccaagcaataattccttcagcctgaagatattcctttaacatttctatagtgtgtctgctggcaaagccttctctcagttttccgttatctgaaaatgtctttattttgcttttgtttttgaaggatattgtcactggatagaactctgggttgacaatcgtttttctttagaactctaaagatgccagtccatcatcctctggcctccagtggttataagaagccagacatatttgaatctttattctttgagtgtaacgtctttttccttccaggtgctatctttgtctttggtattcggtagtttgactacaatgtgcccagataacattttctcttacttttactgcttacagtgtgctgagcttcttggatttacacatttatatcattcagctattatttctttaaatactttttatgccccattttctgtgtcctctctctgtggggctccaatcacaagtatgttagaccacctggtgctatatgcctcattctctgtgtcctctctctgtggggct

SEQ ID NO: 69200 - DNA, 706 bp, Homo sapiens
cctccctcctttgtgctaatgttgtgtatattacagtattacagtttttgccttagttgtgtctgtattaaattaagaaaaaaagaaatagagaacatttcatatttccctacctttaccatgtccagtggattttactcctttctatagatgactttctgcctagcaataattctttctgccaagcaataattccttcagcctgaagatattcctttaacatttctatagtstgtctgctggcaaagccttctctcagttttccgttatctgaaaatgtctttattttgcttttgtttttgaaggatattgtcactggatagaactctgggttgacaatcgtttttctttagaactctaaagatgccagtccatcatcctctggcctccagtggttataagaagccagacatatttgaatctttattctttgagtgtaacgtctttttccttccaggtgctatctttgtctttggtattcggtagtttgactacaatgtgcccagataacattttctcttacttttactgcttacagtgtgctgagcttcttggatttacacatttatatcattcagctattatttctttaaatactttttatgccccattttctgtgtcctctctctgtggggctccaatcacaagtatgttagaccacctggtgctatatgcctcattctctgtgtcctctctctgtggggct

SEQ ID NO: 69201 - DNA, 706 bp, Homo sapiens
cctccctcctttgtgctaatgttgtgtatattacagtattacagtttttgccttagttgtgtctgtattaaattaagaaaaaaagaaatagagaacatttcatatttccctacctttaccatgtccagtggattttactcctttctatagatgactttctgcctagcaataattctttctgccaagcaataattccttcagcctgaagatattcctttaacatttctatagtgtgtctgctggcaaagccttctctcagttttccgttatctgaaaatgtctttattttgcttttgtttttgaaggatattgtcactggatagaactctgggttgacaatcgtttttctttagaactctaaagatgccagtccatcatcctctggcctccagtggttataagaagccagacatatttgaatctttattctttgagtgtaacrtctttttccttccaggtgctatctttgtctttggtattcggtagtttgactacaatgtgcccagataacattttctcttacttttactgcttacagtgtgctgagcttcttggatttacacatttatatcattcagctattatttctttaaatactttttatgccccattttctgtgtcctctctctgtggggctccaatcacaagtatgttagaccacctggtgctatatgcctcattctctgtgtcctctctctgtggggct

SEQ ID NO: 69202 - DNA, 777 bp, Homo sapiens
cagtctgtcactgtctggtccctggtggcaaagggaccgggtaaacccgttgtcaggccaccttggggctgtgagatgtctgtaaggtcggtagtgccagtatggtaaaggcatttgaggggtgggcaggtcggtgcacaagatcagcgtccaccctgctgtcaaccagggcagcaggagcatggccacctcagctgcaaatcaggagggtttccattattggacccaaagatcgcagaaaacccagtggaggcagtttgcaggcggtactaaccacacaatgcatttgctctgacacaggaccagggcacgtagtagacgggcaggggtcagggaacctgcctggggttctgggccaggctacatagggataaagcaagccccttaaccgactggatcccaggatcctggcccataaagggagagggttggaagaagatcttccacatcccttttgccctaacctggcagtcatacacccaaactggggggtagtgttggctttgtggttttaataaggttaaaagcaggccaagtcttagctcaagaagctggcaggctgagttaattccggagraaacaaacgggaagcccaagaccttggacatagatcttttattccctcctccttgaaattctccatccccaagcgcttattaatgtggaatttgctgcttgggggagaaccaactctccgacttcagaaacatttgtaagagcaaatttaataaagctaagaataataccattcagatgtaattcctttattttgcatga

SEQ ID NO: 69203 - DNA, 575 bp, Homo sapiens
acagactcccgtgcacgtgtgtccaagtgaggggcagtggctgtcactatcatgtgcgctgccggcggctgccgggcagatttctcttctgggtttgaaataaccrgaggcgatcttaagaacctactgacgacccgccgctctggaagaaatcattttccattctgcatctagcatcagcatttcacatccagatgcaggaagtcttcgtggaattttacatacattgcttggtttgcttccaagaactcatgattttgccttctggtttactctccttactgcttcaggcttgcagcgataggaacccatttctcccttgggttgctgtggcagcgtgacggtaatgcagattcaggagattgcagtatgaggttcaagtgtgggctgcgttcagatggggtcccttgacctgcctcatcctgtttccttaccatagtgcttcccatgtactgtagcatttttttctttttaaaatgatttatattatattattttattttttaaatgtttatttatttttgagacagagtttcactcttgttgcccaagctggagtgcgatggcgcgatctc

SEQ ID NO: 69204 - DNA, 575 bp, Homo sapiens
acagactcccgtgcacgtgtgtccaagtgaggggcagtggctgtcactatcatgtgcgctgccggcggctgccgggcagatttctcttctgggtttgaaataaccagaggcgatcttaagaacctactgacgacccgccgctstggaagaaatcattttccattctgcatctagcatcagcatttcacatccagatgcaggaagtcttcgtggaattttacatacattgcttggtttgcttccaagaactcatgattttgccttctggtttactctccttactgcttcaggcttgcagcgataggaacccatttctcccttgggttgctgtggcagcgtgacggtaatgcagattcaggagattgcagtatgaggttcaagtgtgggctgcgttcagatggggtcccttgacctgcctcatcctgtttccttaccatagtgcttcccatgtactgtagcatttttttctttttaaaatgatttatattatattattttattttttaaatgtttatttatttttgagacagagtttcactcttgttgcccaagctggagtgcgatggcgcgatctc

SEQ ID NO: 69205 - DNA, 575 bp, Homo sapiens
acagactcccgtgcacgtgtgtccaagtgaggggcagtggctgtcactatcatgtgcgctgccggcggctgccgggcagatttctcttctgggtttgaaataaccagaggcgatcttaagaacctactgacgacccgccgctctggaagaaatcattttccattctgcatctagcatcagcatttcacatccagatgcaggaagtcttcgtggaattttamatacattgcttggtttgcttccaagaactcatgattttgccttctggtttactctccttactgcttcaggcttgcagcgataggaacccatttctcccttgggttgctgtggcagcgtgacggtaatgcagattcaggagattgcagtatgaggttcaagtgtgggctgcgttcagatggggtcccttgacctgcctcatcctgtttccttaccatagtgcttcccatgtactgtagcatttttttctttttaaaatgatttatattatattattttattttttaaatgtttatttatttttgagacagagtttcactcttgttgcccaagctggagtgcgatggcgcgatctc

SEQ ID NO: 69206 - DNA, 389 bp, Homo sapiens
cctctgggccaggctgccccactccatgtttctgctcaatcttctcagggcccaggaggtttcaccacgttggcagggctggtctcgaactcctgaccttgcatgaagcccaagtcctccccacgttcaaggttccatggtctggcctggctctcccatagccacgctgaccttggaggccctcccctgcctgcagggctttgccactctctgagtgccccctccccacccccgcagcggtccatccccgagctgtccacacagaggcaggcrggcagtccatttcactgccactcagggccagcaccagccaggacccacacccggagcttgtcattgaagagctcggcccccacaggcctcctgctcccccttctctgcagccagag

SEQ ID NO: 69207 - DNA, 552 bp, Homo sapiens
ttctttattgacaaacttttgcattttgttccctgccatgtgtgcacacatgtgggtgtgtgtatcaacacatacttacaattacatacttgagggttttttgggcatatttagagtggattatttaaatttaagttatgttggatatatttctgggatggagcatttaaaattttgaagacttgccgcatatctcaaaaaaaactataattttatattttcacccacacagtatataagattttgatttaatcccccttttgatgaagcattttgcaaacaaatgtcatraaagtgaatttaagcaaagcattaagggggaaagcatgttctttcagtaaacatttagatacctagtatgagctagataggctcaggtaaacaaagattgaatatgaacttttatgaaaattacactctagaaggcataaaggtattagaaattctaacttgaatgtatgtcaaaaaagagatgaaagaaagagctttatgtatcttcatttgtcaggtattcattggagttttactaggtgcttacaacggtgctggatg

SEQ ID NO: 69208 - DNA, 555 bp, Homo sapiens
caaatctgagccttgaggtctgcttatagtgtttcgggtgagaattactccaagaatctctctagagggcaagaacccatcctccccaggccccccaggtctgctgacagatacaacactactagagccctctggcttgagtcaccctccagggtcttcagcttgatattttttgcttagtttccaagtatctgaagctctttctgagcacgtgctccagacagaagccagtggttactgtgctccactcacacttggccactgtccgttccagcccactttgaagcttctgatactctggcggcaactggctggtgctgggtagagaatgggaagcagggggtttgcatccctatgtagcctgtctgctgggcctccagtcctgtaactcccatccttgctgacatttctcttcccccaaccttcaggtccactggcccaagggccctgctgttcagattggtcagaaaccccagagtcagggagagcagayctttccctcccacaggactttctctaatcagcccagttcattattctaatcaggaccaaaca

SEQ ID NO: 69209 - DNA, 1635 bp, Homo sapiens
ataaaatctattgagggcaagggccgtagatgagacaaagcttattttgtgaaatagcaacagacatagactttttgtcatttggaccggcttaacacaaataagttttctgatcatattgggcacatatcaaccatcccagggtgtgcaagtgggcttaaatcttcaagaatattgaatgcagattgtgcctgaagttggcctccctttgaaagaatatgctaatcaaaagctattaaactgactccagggtctgcagagctggtcacatgacctggtttcagcactaacatgcctctgcaccatgtgatattttccataatgtgctttagtgtctatagattcaatatggaggtgtgtctgctgtgttgagtctatgatgcttccaatctttttttgtaaaatgtattttgctgatgtttttagaatttccaaatatctgtcaaaataacaatgagaatctttctatgaatgcagcacactgctataatctacattaaatttggagaattaactctgctaccatccctaaccatttaggtgtttcagtaaatatttatcccacatactcatactgtttgctaccggatgttattacaaaagaacgtagcaaaaaaacttctgggatgtggctcatctatcatattggacatcagtgttcaagctattactactgttggaattatgtgtcttcaggaattttgtaacagtgttctcaaggcatggtgtgagaacctaggagctcacaagggtaaacaaatccatttcagctggatccagatcttgaaccaccacacatgaaggatagaagcatacctctttctttaagcctaagattaaatatatagatctttagcatctaatcatacaaggcatctttgaacaaaagatgttgtccaagctttcttggatgcactgactctgccttccatcatgctcaataatgagaatgagtttaatgtgatcatatgggctctttgaagaacaggacatctaagcagcactcacatcttgtttctggagtgtgataaactccttggtgttctttctgaggggaagtattacatgacttaacctcacctgatgttatctcacctgttctttaccaataattaatactagttacactcagttatcaaggacctgtttaagtgtaggacctttggttccaccctgaacttggccattgtttcattcttggattctgactatggccgggtgctttgatgaggtctgatccagggaccaatggataaagactttgctgaagaagttaagaaayccttaaagaagattgcaataagcacattaatatatccctgttgaaaaggaaaatgaaataccagaataccatggcttcatatcactgtggctgatatataccctactcaatatatacctgatgcaggtcacgtttgcaagaactagactctgagtcagatatttgccagcaagagatttatgggggagtccttttgggattaataactggaagattgaatgaagcaagattaaacagagggcactgttgaattgagaagcaattacaacaaaggcctcagccaatcgtatggagacctgaagacctgggatggccctgaagaactttctcaaactggggcaagtgggtcgagt

SEQ ID NO: 69210 - DNA, 1032 bp, Homo sapiens
tgatgttacaaaatcatccatgggtaaaagattcacacaaagttcaggatagtccagtggattttaatgtaatatagtaaaattcaaaaaaatccattgagatagtttcaaattccacattgcagtaaacctttaagaaattaccacttgttgaattttagtgtagtatcaaagaagaatattgatagttatctgaaaaggctatgaagtactccttcttttccaactatccatctgtgtaaagctggatttttttccccatggagttcagttcaaacaacatatggcagtagatggaatgcagaagccgatatgagaatccagctatcttccatttaagctagacattaaagaggtttgcaaacatgtgaagaatgttccttgtctcgcttaatttttttgttctgttttgttttggaaaatagatatttgccctttaaaaaatgttatttatgttaacatgtaatggttttattgtgtataaataawattttaactttttctcagttttaatttaatacggtaaatatcactaacccacatgtgctaaagctctttgggagtcctcaattttaagagtgtaaattgttctgcaaccacaaagttagagaagtgctggtctaaggcaatgtctgtgcagtgttagaatagtagttgcttggttttggggtggacaagaatgctttcattgtatagctggaaggctgacacatagaacacgttatagaacagtactctctgtgtctcagtttggcatgatttttagcaggatatgtgttataagcacttgctggtaaagtagctagaaatagatgtttgactgtagagcagttactaaaatccagcatggttctaaaaatcttagggtttagagtttagtcttgtatatgagagacatttctggtaactctttgtctattaaggtaaaggcttgcaggaatgtagttaaagaattagtggtcttcataatgaatatataaaatatttcaactcaacagctggcctatactgatacatcagttgacaaagtct

SEQ ID NO: 69211 - DNA, 1032 bp, Homo sapiens
tgatgttacaaaatcatccatgggtaaaagattcacacaaagttcaggatagtccagtggattttaatgtaatatagtaaaattcaaaaaaatccattgagatagtttcaaattccacattgcagtaaacctttaagaaattaccacttgttgaattttagtgtagtatcaaagaagaatattgatagttatctgaaaaggctatgaagtactccttcttttccaactatccatctgtgtaaagctggatttttttccccatggagttcagttcaaacaacatatggcagtagatggaatgcagaagccgatatgagaatccagctatcttccatttaagctagacattaaagaggtttgcaaacatgtgaagaatgttccttgtctcgcttaatttttttgttctgttttgttttggaaaatagatatttgccctttaaaaaatgttatttatgttaacatgtaatggttttattgtgtataaataatattttaactttttctcagttttaatttaatacggtaaatatcactaacccacatgtgctaaagctctttgggagtcctcaattttaagagtgtaaattgttctgcarccacaaagttagagaagtgctggtctaaggcaatgtctgtgcagtgttagaatagtagttgcttggttttggggtggacaagaatgctttcattgtatagctggaaggctgacacatagaacacgttatagaacagtactctctgtgtctcagtttggcatgatttttagcaggatatgtgttataagcacttgctggtaaagtagctagaaatagatgtttgactgtagagcagttactaaaatccagcatggttctaaaaatcttagggtttagagtttagtcttgtatatgagagacatttctggtaactctttgtctattaaggtaaaggcttgcaggaatgtagttaaagaattagtggtcttcataatgaatatataaaatatttcaactcaacagctggcctatactgatacatcagttgacaaagtct

SEQ ID NO: 69212 - DNA, 1348 bp, Homo sapiens
ttggctttttttgtggtttttcaatwgcaagttatgtttgtaattgaatggttggcctctagaaagtcgaattgattccctagaaatattccaaagtttgcagcatttaatctcatacttatagtgttaccaggactgggtataggcaaaatcatgacaagtctttcccttcattttcccttagttttctatgtctcttctggtatttcttcctcatcaccccttgggatttctgtgctctcagtctactgcctagaactccatattaccatggcccaatacctagtgtaccttctgatacaaagtatatgctcaataaatatttctgaaatgagtaaatgaacaaatgaaaaacccctgaagactgacagaattcctcagggctctgctaaatgacaggagaaatcagatgaattcctgtgcttgaaacaatcaaagtcaatatgcgcatgtcacccacctttactcacaagcagcaggttcctttgctgatgctctatttatgaaaaggaaaccaagctggaagttgaatgacaattccactgggccttagcttaggatgccacaagaaaacaccacagactgggtggcttaaataacagacatttactttctcaccgtttttgaggctggaagtctgacatcagggtaccaacatgatcaagttttttgtgtggggtctcttctggcatgcagatagccacctttttactgcgtattcacagggtggagagggagggagcaagctctctggtgtccctttttatagggatacgaattccatcatgagggccataccatcatgacctcatctaaacctaatgacttcccaaacaccccatctccaaataccatcacatgaagggttaggacttcaacatatgagttttgggagggacataatttagtccatagcatactggtttcatttttaagctaattaccaaggatttctagcccaaaggtcagagtacaaggggactatattcctctgcattgaactgtacagaagtccttgacattataccgttagtcattccattcatggtcccttagatcaaatgatgcgatttcctacatcatcctacctcttctctcaaatctcaggtcctttcatcaagcatgaacaaacccgcagtgatgaacgccttaaatgtactttctgctgtcattcagagtatcatttttgccttgtccgagcttgaatgcaagctgtaaaaagcgatcatgtactgggtatttttattggcacatcacccatgtttgaattagataatcaacagtgcacctgtaataaaaaattaaacttgttctctttaagcactgtttctttcaaaatgagatcctg

SEQ ID NO: 69213 - DNA, 572 bp, Homo sapiens
ttcccacccccctcacagcccagtgtccccaggggagaagccatacgtttgcacggtgccaggctgcgggaaacgcttcaccgagtactcgagcttgtataagcaccacgtggtgcacacacactgcaagccctacacctgcagcacctgcggcaagacctaccggcagacctccaccttggccatgcacaagcgcagtgcccayggcgagctggaggccacggaggagagcgagcaggccctctatgagcagcagcaacttgagggtaaggggagtgggcagagggtgagagtggggacaagccaggcctccccatggcatctggtagcagatgtcagccttggctctcctctcccagccgcctctgcagccgaggagagtccgccacccaaacgaccccggatagcttacctttcggaggtgaaggaagagagagatgacatcccagcccaggtggcgatggtgactgaagaagatggggccccccaggtggctctgatcactcaggatggtgcccagcaggtacaggccctggagggcagaggtgccatactagctggcactctccact

SEQ ID NO: 69214 - DNA, 572 bp, Homo sapiens
ttcccacccccctcacagcccagtgtccccaggggagaagccatacgtttgcacggtgccaggctgcgggaaacgcttcaccgagtactcgagcttgtataagcaccacgtggtgcacacacactgcaagccctacacctgcagcacctgcggcaagacctaccggcagacctccaccttggccatgcacaagcgcagtgcccacggcgagctggaggccacggaggagagygagcaggccctctatgagcagcagcaacttgagggtaaggggagtgggcagagggtgagagtggggacaagccaggcctccccatggcatctggtagcagatgtcagccttggctctcctctcccagccgcctctgcagccgaggagagtccgccacccaaacgaccccggatagcttacctttcggaggtgaaggaagagagagatgacatcccagcccaggtggcgatggtgactgaagaagatggggccccccaggtggctctgatcactcaggatggtgcccagcaggtacaggccctggagggcagaggtgccatactagctggcactctccact

SEQ ID NO: 69215 - DNA, 1097 bp, Homo sapiens
ataatattggtttcataatgcaaatgccctataattccctattaattttctttaaatttaataggctgcagtggtaaaaccttagaagacttacatggaaagaattattctgtttccttcacattagcttttgacaatcagaaccctgggctaacattctggcactttctggtcatgtgagcccgagcctgtttttagtatttaatgggagaacatgaccctcattgccagaatcatgtttttctggagcacagggatagcgtggagttggaaaggcatatctctgtacttaatctatatgcctgtctgtcccaaattatatttccagtcttgatgtctttactgagtaccagacttgtatgtccctctctagttgacatatctttttggattttagtaggtatctcaaacatattttgccccaaacggagctcttgatttcgtacgtcctctcctactccacccatctacttccttgctttctctttccctacatccatgctaacaaactctgcctgcaaaacgcagccgcagtccttcttctcttgtatccccagtgcctggagcagtgcacagcacattatgaaccctggaaatactgtggaatggcggacaggactgggggtgactacctgtaggaatctaccttataccttagatgagaacacgtaagataagacaagtcagcaaagtttaaatctggtggattaaaaaawtttttatatcaaaataaacatcatatggctaaaaaattaaaatgtgtgacaaagcatatagtgaaaaacaggagccctgtgcactgcctcattcctacctctcaggccccgcatgtatcttgtggtatttaccgccaagttcctaaatagtctgctcatactgacacatgttgatttttcaatttggggtaaattgattgcccagtatggaagatgaggatttaactctcttagacttcctcataatatacctgtccatccctcaccacgctacacacaggaaaactttgcttgcctcatcctctgacaattatcacaattttgcagataaaccatccttccaggtttgcattattagaactatttagttattattattat

SEQ ID NO: 69216 - DNA, 1059 bp, Homo sapiens
aggttaattagcttgatttagccaattcacaatttataaatatattaaaacatcatgtttacaccataaatgtgtataaaacaacaacaacaaaaaaactgkggtacacccatataatggaatacatgcaataaccagatgaatctccagagaattatactgagtgaaaaaataccagtccccaaaggttacatgttgcctgattccatttatgtaatattcttgaaatgacaaaattatagaaatggagatcagactactggttgccagggaataaggaagggctatggtgggaggaaggcagatgtgactataaaggggtaatgagagggatttttatggtgatggtgaacattctgtgtcttgacagtatcaacatcagtgtgctggttgtgatatagtattatagatttgcaaaatgttacccctgggagaaactgggtaaagaatactcaggatacccaaaggatctctccgtattatttctcttgactgtatgtgaatctattttatttttgttccaaaataaaaagtttaattacaaattataaataaataaataaagcacattatttccatctagttcattggctcagtctaggactgaagcatgtcgaattctcccactgactctcacatttcccaagcctgtggaaacaagccaaacactcacccatcaaacccataatatttgctatatactgtgagtcatcaacagagaatctccttctgcctttcttctggtctacctcccctactaatcccatctttccagactctgagcataacatgcaaactcacagaacacaagggagtgggtaaagcaactccgaatgccataaaagtgggttgtgagccttgaatggaatacaagattttgaaggtggttccatccctattcactctggacaggccctgcatctcactccctcggggccttgcttagaaatactcaggtagctagttgttctcatgtggtattgagtgcaacatttaaataggaagtcataggaaaaggtgttttaaacagagttctaatgtggagatgtcaggcatcag

SEQ ID NO: 69217 - DNA, 1059 bp, Homo sapiens
aggttaattagcttgatttagccaattcacaatttataaatatattaaaacatcatgtttacaccataaatgtgtataaaacaacaacaacaaaaaaactggggtacacccatataatggaatacatgcaataaccagatgaatctccagagaattatactgagtgaaaaaataccagtccccaaaggttacatgttgcctgattccatttatgtaatattcttgaaatgacaaaattayagaaatggagatcagactactggttgccagggaataaggaagggctatggtgggaggaaggcagatgtgactataaaggggtaatgagagggatttttatggtgatggtgaacattctgtgtcttgacagtatcaacatcagtgtgctggttgtgatatagtattatagatttgcaaaatgttacccctgggagaaactgggtaaagaatactcaggatacccaaaggatctctccgtattatttctcttgactgtatgtgaatctattttatttttgttccaaaataaaaagtttaattacaaattataaataaataaataaagcacattatttccatctagttcattggctcagtctaggactgaagcatgtcgaattctcccactgactctcacatttcccaagcctgtggaaacaagccaaacactcacccatcaaacccataatatttgctatatactgtgagtcatcaacagagaatctccttctgcctttcttctggtctacctcccctactaatcccatctttccagactctgagcataacatgcaaactcacagaacacaagggagtgggtaaagcaactccgaatgccataaaagtgggttgtgagccttgaatggaatacaagattttgaaggtggttccatccctattcactctggacaggccctgcatctcactccctcggggccttgcttagaaatactcaggtagctagttgttctcatgtggtattgagtgcaacatttaaataggaagtcataggaaaaggtgttttaaacagagttctaatgtggagatgtcaggcatcag

SEQ ID NO: 69218 - DNA, 1059 bp, Homo sapiens
aggttaattagcttgatttagccaattcacaatttataaatatattaaaacatcatgtttacaccataaatgtgtataaaacaacaacaacaaaaaaactggggtacacccatataatggaatacatgcaataaccagatgaatctccagagaattatactgagtgaaaaaataccagtccccaaaggttacatgttgcctgattccatttatgtaatattcttgaaatgacaaaattatagaaatggagatcagactactggttgccagggaataaggaagggctatggtgggaggaaggcagatgtgactataaaggggtaatgagagggatttttatggtgatggtgaacattctgtgtcttgacagtatcaacatcagtgtgctggttgtgatatagtattatagatttgcaaaatgttacccctgggagaaactgggtaaagaatactcaggatacccaaaggatctctccgtattatttctcttgactgtatgtgaatctattttatttttgttccaaaataaaaagtttaattacaaattataaataaataaataaagcacattatttccatctagttcattggctcagtctaggactgaagcatgtcgaattctcccactgactctcacatttcccaagcctgtggaaacaagccaaacactcacccatcaaacccataatatttgctatatactgtgagtcatcaacagagaatctccttctgcctttcttctggtctacctcccctactaatcccatctttccagactctgagcataacatgcaaactcacagaacacaagggagtgggtaaagcaactccgamtgccataaaagtgggttgtgagccttgaatggaatacaagattttgaaggtggttccatccctattcactctggacaggccctgcatctcactccctcggggccttgcttagaaatactcaggtagctagttgttctcatgtggtattgagtgcaacatttaaataggaagtcataggaaaaggtgttttaaacagagttctaatgtggagatgtcaggcatcag

SEQ ID NO: 69219 - DNA, 2263 bp, Homo sapiens
tctatagggtcttcagaatatgggctggaatgctctgctgtggaagaattgagaactgagktcttgccaatgaggtgtctcagtggggaaccagctgtggtggcttgttggtgagaaggggctttctgaggttctgcaaggttattgacagtgaacttactaatattacttggggaagaataatttgaaccaacaattatatctgtgtttgaagaaacgaattcagtgccattctccagagctagggcagtaagattgaactcttcttcttcctgattcaatgatgagtttcggaatgacctgattcctaatgctgcagccagtctgttctggtaatcatagtcagcatcactctcttcatcttcaggttctaaacgatcatgcattttccgtgtagccatgactgtagattctggaggttcaaaaatctcatatgagtcttcatcatcatctgggatacatttaacatccctgaatttcagcctcagctttttgcttcttggactagaattcatggaagttaacatccaagttcctacagaagagagacagacagaagagagatctggaagtctgggaaaagacatgaaaacacaataatccattgtggcaggtaatttctaataaactttcgtcaggaatattcaagtatgggctgtggaccactgcttgtctgtgacctattgattactgggtcaaaataacacaaggagagaaaaatgagaatgaaatatttagtaaacttttgtttttctaaagcaatttgacattgctgtgactctaagcacatgaccagtgcgttcatctcgcttaacagaataaaaaacaaaagtgttgcttagtggagattagaggggaaaaaaggtctttcagcacagatagttgctcactattttaaaatatattaagaaagggatgaatcaagaataaaatggacttttaatatcataaatatcctaacagcacatcttgtcttagaattaaagggatggtgatgagctctatccccacaaataagagacatttagatgtttctaagtaataattcacgaggacaattttgaatctctgaaatggcatgcattgctggaacatcaaagatttcttggtgagtctccaatagttaccattgttggtgtctactgagtgctaggcacttggcgcatattactattttaatggtcaaagtaactctgtgagatgtgattacactgttttccagataaatgacttgtggctcagtgtggccaagtaacttgtgtaaggttacacagcaatcgattggcagatcaggacttgcattccagtctgacaaactccaaagctgttgctgaagcagcctttaaggcactgtacctgatgattgaagatgactgttgcaaaaaaccgaatagggcattttgataaaagaaatgctcttttgtggccaaaatatttatgcttcttcctcagagttatgccttatttttctgctgttgtatatttttacttcctactttgcccagagaaggaaaaatataacccacactaaagaactggatccatttaagtcattaatttctcaaagagaaatcatgagaaacattgaaagaaaagcctgcagggggtcagggagatacatagaggagcactggtagcctggagagttgcagcagacctttatagaccagaaattcaaagcaagcttcctctgtgagtgtccagactcttactcaccaacattatccattgtgaccgtcacagattctccacgcatggggaagagggtcaaggtgtcctcatgcctctttccatagatgaatgagtgcccagtgaagtggatggtcaaaatttcattctgggtccccacactacagaagtgccactggacagtgtcatcaaagcagaatccaagagtagttatgctctcaggcacatagccattgatagctgaaagtgtaaaatctgttaaaattccaagtctatgccaacaaaagggcatgtgtctaattatacctaagataaatgtctccatgttaatttggttgtgtcaaagcagtgattatccaagataagctttatctagtctaacatgtgactagaagatcaaactcagaattttcaaatgagagattattctcctaaattagccaaaggagaaatctcaggaaaaagataaagccttccatttacattgatttagtcattcatcaaatgtatagtaaatattttgtgctccattctctgcctttaaagatattctaataattccacttggaggaaa

SEQ ID NO: 69220 - DNA, 707 bp, Homo sapiens
acaccctgaaatagcaggtgtttttttctcttgtcaaacaatgatctggtctccgtgccgtcttcctctgcttgatgtacaagaagttaccaagatgctcccaagctttgtcccatgacagaactcctgaccattccaacatttagttgttgaatcttttggtgggggtgttcttaccttttttacagataagcaggggsccaatcagccccgagttgaaatcctcgatcagattttcatgggagtaatagatgtgtgtgaggcatggagggtcatcatgggtgggtccactgtcctcactgatactccattcataggtgtattctcggcctggagccacagcgtcgtccatcttctccgcagggaatgtgtggtcaaggtaagaagcacctggaggagtaacagccatcaagacatgtgggcagtttctgaggattgcgttttcaccactctcaaatctggggatagctaagatgagttctctggagatgcatatgtccttcaatagtgaacttttattatttggaaagattcacatatgcccatttctatgctcatgtacttacaaaggctttgataacatggtgatcttaagaataacaaatgttatttgtaaattaaagtttagcaagttaattttccagggtacctgaacaattattatttaaatataatcagagaattgaatcgcctttgattagtaaacc

SEQ ID NO: 69221 - DNA, 609 bp, Homo sapiens
aaaaaaactggagttattccttttagggaaggaccaccactcctgggccctggtggtgctggatccacacacctgtgggcactgccatgctccctgttgctgggacagagccaggactccatggggtggggaagccttgagagtcacaggtgagagccacacactcagcacctgtggctacgcctgcctttaacatgtcttgcttaaggccaggcrcggtggctcgtgcctgaaatcccagcacttcgggaagctgaggtaggaggatcacttgaggccaggagttcaagaccagtgtgggtaatatagcaagattccatctctacaaaaatattttttttaaaaaatgtctcactcaaaatgggaacctgccctactagaagcacaccctgcgaacgggtgaaggcgcaaagatcagaaaattacagacggccaacatgacagcaaagcgttccacagaaaattacagcggccggcgaccgacacaacaacaaaacagcaaaggcttctgcagaaaatgacagcggccaacacggcagcaaaacagcaaaggcttcctttcttacgtttctgttgtgagcatgtttgtttaagggctgctaaccttca

SEQ ID NO: 69222 - DNA, 654 bp, Homo sapiens
catccctgtccaggagaaagaggcagccgttaactcagagaggagcaggagggccagcaccgtgccaatagagctcctggccccgaccgccggtcagcaggcaatgatgaggacacctgtgagccaccaccactgagacacgtgcacacaggtgatgcaggcacccatgtgtgcacaggggaacatgtacacacaaaggttcacacgtgatggtaaagcccaggtgcccagccacgcgycttcctagctggtatttactgggcacctccacaaagcctccttgtgcctgcctgttctttagggcctgacagctaagagtggtttctacatttttttttcttcttttttttgagatggagtctcgctctgtcgcccaggctggagtgcagtggcacaatctcggctcactgcaagctccacctcccgggttcacgctattctcctgcctcagcctcctgagtagctgggactacaggtgcccgccaccacgcccagctaatttttttgtatttttagtagacacggggtttcactgtgttagccaggagagtctcgatctcctgacctcgtgatccgcccgcctcggcctcgcaaagtgctgggagtaattacaggcgcaagccacggcgcccggccaaggtttctacattttta

SEQ ID NO: 69223 - DNA, 654 bp, Homo sapiens
catccctgtccaggagaaagaggcagccgttaactcagagaggagcaggagggccagcaccgtgccaatagagctcctggccccgaccgccggtcagcaggcaatgatgaggacacctgtgagccaccaccactgagacacgtgcacacaggtgatgcaggcacccatgtgtgcacaggggaacatgtacacacaaaggttcacacgtgatggtaaagcccaggtgcccagccacgcgtcttcctagctggtrtttactgggcacctccacaaagcctccttgtgcctgcctgttctttagggcctgacagctaagagtggtttctacatttttttttcttcttttttttgagatggagtctcgctctgtcgcccaggctggagtgcagtggcacaatctcggctcactgcaagctccacctcccgggttcacgctattctcctgcctcagcctcctgagtagctgggactacaggtgcccgccaccacgcccagctaatttttttgtatttttagtagacacggggtttcactgtgttagccaggagagtctcgatctcctgacctcgtgatccgcccgcctcggcctcgcaaagtgctgggagtaattacaggcgcaagccacggcgcccggccaaggtttctacattttta

SEQ ID NO: 69224 - DNA, 654 bp, Homo sapiens
catccctgtccaggagaaagaggcagccgttaactcagagaggagcaggagggccagcaccgtgccaatagagctcctggccccgaccgccggtcagcaggcaatgatgaggacacctgtgagccaccaccactgagacacgtgcacacaggtgatgcaggcacccatgtgtgcacaggggaacatgtacacacaaaggttcacacgtgatggtaaagcccaggtgcccagccacgcgtcttcctagctggtatttactgggcacctccacaaagcctccttgtgcctgcctgttctttagggcctgacagctaagagtggtttctacatttttttttcttcttttttttgagatggagtctcgctctgtcgcccaggctggagtgcagtggcacaatctcggctcactgcaagctccacctcccgggttcacgcyattctcctgcctcagcctcctgagtagctgggactacaggtgcccgccaccacgcccagctaatttttttgtatttttagtagacacggggtttcactgtgttagccaggagagtctcgatctcctgacctcgtgatccgcccgcctcggcctcgcaaagtgctgggagtaattacaggcgcaagccacggcgcccggccaaggtttctacattttta

SEQ ID NO: 69225 - DNA, 1206 bp, Homo sapiens
cagggttaagataactcacgcacaaccatccttcatgaaagccctcgccctctcccagctattagaaaagctgccttcgggctgggcgcagtggctcatgcctgtcatcccagcactgtgggaggccgaggcgggcggatcacgaggtcaggagatcgagaccatcctggctaacacggtgaaaccccgtctctactaaaaatacaaaaaattagccaggtgtggtggcgagtgcctgtagtcccagctactcgggaggctgaggcaggagaatggcgtgaacccgggaggcrgaggttgcagtgaggcgagattgtgccactgcactccagtctgggcaacagagcaagactacgtctcaaaaaagaaaaggaagaaagaaagaaaagctgccttcggaagcacggcagctccagggatccgtgccgcacccaggggcctctcagagctgccaggagacacaggacgactgaagagagcgcccgacccagggctgcgtggcagacacggcaactcctgaggcatcctcggctgtcacagcaccactgagtgttgtgggcaatggtgagccgagtccaggtctggctcagccacggtgggcgtcaggaacaagtgaatctaaaactcacctaacacttgcctcggggtttgttgaagtgtcctgaagccaccaacctactggtttcttagacatgatacttggattgggtaacctccacaggcctccgtggattagacactgaccccacatctgtgtccacagcccacagcctctcgagtgccatgtggaatgttgtgagcttgccgccagcacaaaagctgagggcagctgccccaccggaatgatgctcttcacctgtccactttttacctctgatttgctttcgagtacgtgtagcaatttcacattccaaattgttaaacacttcagtacaaaccaagatgaacagaatatcaagaaaaaaaatacctatttattttaggtcctccctttaggaaacatatgtcccttttcttggagagaattaggagactttttgagaaaactgagttggcaggttactttttgttgtagtaacagagttttggggaagagggaaaccagatgctaggatgcatgtcaggcgctccgtgggctgcactgcacccaaccacctggcccgaggcttcaggaccacggcaggcactgcttcaactccagtaacc

SEQ ID NO: 69226 - DNA, 1206 bp, Homo sapiens
cagggttaagataactcacgcacaaccatccttcatgaaagccctcgccctctcccagctattagaaaagctgccttcgggctgggcgcagtggctcatgcctgtcatcccagcactgtgggaggccgaggcgggcggatcacgaggtcaggagatcgagaccatcctggctaacacggtgaaaccccgtctctactaaaaatacaaaaaattagccaggtgtggtggcgagtgcctgtagtcccagctactcgggaggctgaggcaggagaatggcgtgaacccgggaggcggagsttgcagtgaggcgagattgtgccactgcactccagtctgggcaacagagcaagactacgtctcaaaaaagaaaaggaagaaagaaagaaaagctgccttcggaagcacggcagctccagggatccgtgccgcacccaggggcctctcagagctgccaggagacacaggacgactgaagagagcgcccgacccagggctgcgtggcagacacggcaactcctgaggcatcctcggctgtcacagcaccactgagtgttgtgggcaatggtgagccgagtccaggtctggctcagccacggtgggcgtcaggaacaagtgaatctaaaactcacctaacacttgcctcggggtttgttgaagtgtcctgaagccaccaacctactggtttcttagacatgatacttggattgggtaacctccacaggcctccgtggattagacactgaccccacatctgtgtccacagcccacagcctctcgagtgccatgtggaatgttgtgagcttgccgccagcacaaaagctgagggcagctgccccaccggaatgatgctcttcacctgtccactttttacctctgatttgctttcgagtacgtgtagcaatttcacattccaaattgttaaacacttcagtacaaaccaagatgaacagaatatcaagaaaaaaaatacctatttattttaggtcctccctttaggaaacatatgtcccttttcttggagagaattaggagactttttgagaaaactgagttggcaggttactttttgttgtagtaacagagttttggggaagagggaaaccagatgctaggatgcatgtcaggcgctccgtgggctgcactgcacccaaccacctggcccgaggcttcaggaccacggcaggcactgcttcaactccagtaacc

SEQ ID NO: 69227 - DNA, 563 bp, Homo sapiens
gaaccctgagcttgtttttctgcaactagatggttccatctgggggtgacgggagacagtgacagatcatcaggcattagattctcatgagaagctcgcaacctagatcccttgcatgcacagttcacaatagggttcacactcctatgagaatctaatgctgccgctgctctgacaggacgcagagatcaggtggaatgtgagtgatggagcrgctgtgaatacagatgaagcttcgctcactcgcccaccactcaccacctgctgtgtggccttgttcctaacaggccatggaccagtatcggtctgtggcccagggggttggggacccctgatttatttaatattccccattgttggacactgtggttaatttctacttcttgcttatcagtcccgttaatatgggcatctttaccacctctgagtgcttgccccaaccccgcctgggcccagggatagacagtcggataccactcagtcctgcccgcaaggagcccacagtctggtttcaactagtctcttactggctttgtggtttcaggtcggatgaaccctctccc

SEQ ID NO: 69228 - DNA, 1354 bp, Homo sapiens
cccaacacgtgatgaccaaaaatgtgcccaaacattggcaagtatcgcctgggagcaaaatcaccccaggttgaaaactgtagggaattagggatattcatactagggataaggacatttccaaagaggatagtggatggggtcactaatgggatttccagcaggattgcagacagggaggtgaaaatttaggacaaatcatgcaaagtaggtgtttgcctccaccttctacatgagacagactcagataaacggttagggatgaaggggatgaagtctcccattttatagatggggaagtagaggtccacagggaagggctttgttatctggcaagcagtgagacctgggtgcctaaaacacacccgtacaaatgcatatgcatgtagtatgtgcatatgtattagataaatatttgacatgtattatatgtagcaactctattagaaatggaactctgttagaaacgtagaactcttgaggccaagacttcgagaccagccaggccaatgtggtaaaaccctggctctacaaaaaatacaaaaattagctgggcatggtggtgtgcacctgtagtcccagctacacgggaggctgaggcacaagaacctcttgaacctgggaggtggaggttgcagtgagccgagattgcacctctgcactccagcctgsgtgacacagcaagatcctgtctcaaaaaaaaaaaaaaaaaaaagatatggggtcacaaataggagagaaatttttttagatttcttttttctgtgtacccatgtgtgagcacccatacactcgcatacacgcatgcacacacagatacaggtgaatcctaacctccttgcttccttttgttagttcagggaggagaaagtggggggaatttggggtgtatttactacccgcagtattcctattttgtgtgttacaatccattactactatcagggctagctgcataatttgtggggcccagcacaaatgaaaatgcagggcccggggtggggacaaggaagctaatttcctcttctcataaactggattttccatttgatgcaaagggacaatgcccagggaactgtaccctccatgctggtttgttctggattgttggatggcactggtaagaggccctagctgaatggcctgcagaatgtgctgtgctactgtcagattagtggagggaaactgccttcttgatcaccccatggtgctatgaaagttgcagatacaggataaagtccactctactcagacccagacaaattggagccaggagagcacaaaggagaggagctcatccttgcatgtctaaagctaaaagctgtttccaggcaataacccacaagaaattctc

SEQ ID NO: 69229 - DNA, 717 bp, Homo sapiens
acaagtggcttcaggagtggtccatagacacagacaaaaacggggattggggctgagcttgcccactgcctggcaggccgagaatgccatccacgttggttggggacagagaaagtccatggcacaaggtgcagctgagctgctgtggatatccccagcacggacctgagaagatgccctggttcccgggtgctatggcaggtggtgtgatagaagcctctacacaataatgacagggtgggagggaaaacctacaacagggaagctggctggttactgctcagctgtgttgatgccctataaaaggagaatgagaatctgagggattctaacagctgtcactggctaygtgtgaggcctctgcagtgtctcatggagaggcccttatttcctgtagcgaaagggtagatagtgtggaatggtagctgaagatatcattgtgagggttacagacctccagagatgtttgacattcagccaaggcaggcctgttgtggaaaatcagggccctggtggggaaacatgagattctgcaaactaggacagcattatcagatgggtgccctccagtaccctctgggcatgcagagaaggctcgccttttccagtaatggttcccacttcctacgctggaagatgctgcagaagcctcacccttataatgcagcaggaattccactcaggagctttgcaggaactagctggcatgtccacata

SEQ ID NO: 69230 - DNA, 717 bp, Homo sapiens
acaagtggcttcaggagtggtccatagacacagacaaaaacggggattggggctgagcttgcccactgcctggcaggccgagaatgccatccacgttggttggggacagagaaagtccatggcacaaggtgcagctgagctgctgtggatatccccagcacggacctgagaagatgccctggttcccgggtgctatggcaggtggtgtgatagaagcctctacacaataatgacagggtgggagggaaaacctacaacagggaagctggctggttactgctcagctgtgttgatgccctataaaaggagaatgagaatctgagggattctaacagctgtcactggctacgtgtgaggcctctgcagtgtctcatggagaggcccttrtttcctgtagcgaaagggtagatagtgtggaatggtagctgaagatatcattgtgagggttacagacctccagagatgtttgacattcagccaaggcaggcctgttgtggaaaatcagggccctggtggggaaacatgagattctgcaaactaggacagcattatcagatgggtgccctccagtaccctctgggcatgcagagaaggctcgccttttccagtaatggttcccacttcctacgctggaagatgctgcagaagcctcacccttataatgcagcaggaattccactcaggagctttgcaggaactagctggcatgtccacata

SEQ ID NO: 69231 - DNA, 717 bp, Homo sapiens
acaagtggcttcaggagtggtccatagacacagacaaaaacggggattggggctgagcttgcccactgcctggcaggccgagaatgccatccacgttggttggggacagagaaagtccatggcacaaggtgcagctgagctgctgtggatatccccagcacggacctgagaagatgccctggttcccgggtgctatggcaggtggtgtgatagaagcctctacacaataatgacagggtgggagggaaaacctacaacagggaagctggctggttactgctcagctgtgttgatgccctataaaaggagaatgagaatctgagggattctaacagctgtcactggctacgtgtgaggcctctgcagtgtctcatggagaggcccttatttcctgtagcgaaagggtagatagtgtggaatggtagctgaagatatcattgtgagggttacagacctccagagatgtttgacattcagccaaggcaggcctgttgtggaaaatcagggccctggtggggaaacatgagattctgcaaactaggacagcattatcagatgggtgccctccagtaccctctgggcatgcagagaaggctcgccttttccagtaatrgttcccacttcctacgctggaagatgctgcagaagcctcacccttataatgcagcaggaattccactcaggagctttgcaggaactagctggcatgtccacata

SEQ ID NO: 69232 - DNA, 717 bp, Homo sapiens
acaagtggcttcaggagtggtccatagacacagacaaaaacggggattggggctgagcttgcccactgcctggcaggccgagaatgccatccacgttggttggggacagagaaagtccatggcacaaggtgcagctgagctgctgtggatatccccagcacggacctgagaagatgccctggttcccgggtgctatggcaggtggtgtgatagaagcctctacacaataatgacagggtgggagggaaaacctacaacagggaagctggctggttactgctcagctgtgttgatgccctataaaaggagaatgagaatctgagggattctaacagctgtcactggctacgtgtgaggcctctgcagtgtctcatggagaggcccttatttcctgtagcgaaagggtagatagtgtggaatggtagctgaagatatcattgtgagggttacagacctccagagatgtttgacattcagccaaggcaggcctgttgtggaaaatcagggccctggtggggaaacatgagattctgcaaactaggacagcattatcagatgggtgccctccagtaccctctgggcatgcagagaaggctcgccttttccagtaatggttcccacttcctacgctggaagatgctgcagaagcctcacccttataatgcagcrggaattccactcaggagctttgcaggaactagctggcatgtccacata

SEQ ID NO: 69233 - DNA, 747 bp, Homo sapiens
taatttacaccccgagtgtggccccgtcaaagacgggagtgaccactgaaatgataaaagacctgcgcggcccagggcgctggggcgcatagaatgctgtgacagcgccgcctcgcgtcccttctctgacctgccccaggcggacgcggtgaagtgtgttggcctggrggctggaatacaccggggatcaagtgcagagagtggtgaaaggagggaaggataggggaacgtgttaagaaaggagggaagagataggaagaaaaggggagagaaaaagtaaaggagagataaaatttaaaagacgtagttttattatttatttttgacctttatctagttttacttatgaacatttttactatagctttctctctttctgaatctgtaaatatactgctattattgttatttcagagcctgtgagggtaagttgcagacagcatgaccctctacctccagatgagtcagggtgtgtctcctgggcacaagaacagggtttttgttttgttttgtttcacataagcaaagtacaaatctcaaagacgataatatttttaaatcatcatattgggacatactttgcatgcaataaactgcatctatttaaagtgttcaacttgttgaattttagctgttgtacacacccacatctccactaccacagtgaagataaagaacatttcaattgtctcccaaagaagagttatattataaaattctatacagtcattaaaaagagtaagatcg

SEQ ID NO: 69234 - DNA, 679 bp, Homo sapiens
ccgggctgggatcctgggtggctcctgagtgcaggccctgctcgcctctgtccctgcatctctctttctgccaacaaccccctggctgaaggcctccccaggcctgcagagatttgaaggtctggagttcatcttttgttttctaggtgtaaaaacaggccagtgtgtggtgttcaatgggacccacaggacctgtgagatctggagttggtgcccmgtggagagtggcgttgtgccctcgtaagtgtccccacaatcccctaccccaactggcgcagggccccaggcctggcagaggctgtcacctcccttccacctgcaggaggcccctgctggcccaggcccagaacttcacactgttcatcaaaaacacagtcaccttcagcaagttcaacttctctaagtaagcagagtgggtctcatctgccccaagaccctccttgtcccctacctcatctgacctttcccactcctcccaggtccaatgccttggagacctgggaccccacctattttaagcactgccgctatgaaccacaattcagcccctactgtcccgtgttccgcattggggacctcgtggccaaggctggagggaccttcgaggacctggcgttgctggtgggtcccaagttgggggcagggttcctagagggctctgggagagggtcccgggccc

SEQ ID NO: 69235 - DNA, 776 bp, Homo sapiens
ggtttcaccatgttggccaggatggtctcgatctcttgacctcgtgatccacctgcctcagcctcccatagtgctgggattacaggcgtgagccaccacgcccgacctttttttttgaaacggagttttcactttcttgtggtccaggctggaatgcaatggcgtggtcttggctcactgcaacctctgcctcctgggttcaggtgattttccagcctctgcctccagagtagctgggatgacaggtgtgcaccaccacacccaactaatttttgtatttttagtagagatggtgttttgccatgttggccaggctggtctcgaacttctgacctcaggtgatctgccgacttcagcctcccaaagtgctgggattacaggcatgagccaccaagcckgtttttttgggggggttttttttttttttttttttgagatgaagttttgctcttgttgcccagactggagtgcagtggcccgatctcggctcactgcaatcctttgcctctcgggttcaagcaattctcctgcctcagcctcctgagtagctgtgattacaggtgcacaccaccacacccagctaatattttgtgtttttactagagatggggtttcaccatattggtcaggctggtctcgcactcctgacctcaggtgatccacctgcctcagcctcccaaagtgctgggattacaggtgtgagccactgtgcctggcctcaagtttcataaattgcatttattatcatgtctttgagtcttctaagcagatctatt

SEQ ID NO: 69236 - DNA, 776 bp, Homo sapiens
ggtttcaccatgttggccaggatggtctcgatctcttgacctcgtgatccacctgcctcagcctcccatagtgctgggattacaggcgtgagccaccacgcccgacctttttttttgaaacggagttttcactttcttgtggtccaggctggaatgcaatggcgtggtcttggctcactgcaacctctgcctcctgggttcaggtgattttccagcctctgcctccagagtagctgggatgacaggtgtgcaccaccacacccaactaatttttgtatttttagtagagatggtgttttgccatgttggccaggctggtctcgaacttctgacctcaggtgatctgccgacttcagcctcccaaagtgctgggattacaggcatgagccaccaagccggtttttttggggggkttttttttttttttttttttgagatgaagttttgctcttgttgcccagactggagtgcagtggcccgatctcggctcactgcaatcctttgcctctcgggttcaagcaattctcctgcctcagcctcctgagtagctgtgattacaggtgcacaccaccacacccagctaatattttgtgtttttactagagatggggtttcaccatattggtcaggctggtctcgcactcctgacctcaggtgatccacctgcctcagcctcccaaagtgctgggattacaggtgtgagccactgtgcctggcctcaagtttcataaattgcatttattatcatgtctttgagtcttctaagcagatctatt

SEQ ID NO: 69237 - DNA, 776 bp, Homo sapiens
ggtttcaccatgttggccaggatggtctcgatctcttgacctcgtgatccacctgcctcagcctcccatagtgctgggattacaggcgtgagccaccacgcccgacctttttttttgaaacggagttttcactttcttgtggtccaggctggaatgcaatggcgtggtcttggctcactgcaacctctgcctcctgggttcaggtgattttccagcctctgcctccagagtagctgggatgacaggtgtgcaccaccacacccaactaatttttgtatttttagtagagatggtgttttgccatgttggccaggctggtctcgaacttctgacctcaggtgatctgccgacttcagcctcccaaagtgctgggattacaggcatgagccaccaagccggtttttttgggggggttttttttttttttttttttgagatgaagttttgctcttgttgcccagactggagtgcagtggcccgatctcggctcactgcaatcctttgcctctcgggttcaagcaattctcctgcctcagcctcctgagtagctgtgattacaggtgcacaccaccacacccagctaatattttgtgtttttactagagatggggtttcaccatattggtcaggctggtctcgmactcctgacctcaggtgatccacctgcctcagcctcccaaagtgctgggattacaggtgtgagccactgtgcctggcctcaagtttcataaattgcatttattatcatgtctttgagtcttctaagcagatctatt

SEQ ID NO: 69238 - DNA, 632 bp, Homo sapiens
cacattatcagagagataaaagtgttccctctccattgttaggggaccagggccaggcagggaagggggtgggaaggtatgagagcaactcacttggctttcttggcctcccctccactactgtttgtactgctggaggctgggcagtgcaggtaagcctgggtttcttgtgagtgctaagggctgcagaagcaggcagcaggcaccatctgaccttccccgattatacctgagagctttctgcaggatcaagggccagagtacagggtggactytcagggtgggactcagctatagaagtagtacaagagccaaacaatgatcatggtaatcatagtaataatagaagcaaacctgggtgtccgaggcattgttcttccttgtctctttcttatctttgcttcttttcaaactcttactatgctgggaagatgggaagtgtctatcttcattatttacacatggagagaccaggctcaaggtcatactgtgcatccatggtagggccagtaaagtaataataatcatgacggatatcattgttttgagtgttgactctgtgttgttatttaatcttatctttactacagtcccacagcaatggcacaattatcttcccatttgacagagaa

SEQ ID NO: 69239 - DNA, 632 bp, Homo sapiens
cacattatcagagagataaaagtgttccctctccattgttaggggaccagggccaggcagggaagggggtgggaaggtatgagagcaactcacttggctttcttggcctcccctccactactgtttgtactgctggaggctgggcagtgcaggtaagcctgggtttcttgtgagtgctaagggctgcagaagcaggcagcaggcaccatctgaccttccccgattatacctgagagctttctgcaggatcaagggccagagtacagggtggactctcagggtgggactcagctatagaagtagtacaagagccaaacaatgatcatggtaatcatagtaataatagaagcaaacctgggtgtccgaggcattgttcttccttgtctctttcttatctttgcttcttttcaaactcttactatgctgggaagatgggaagtgtctatcttcattatttacacatggagagaccaggctcaaggtcatactgtgcatccatggtagggccagtaaagtaataataatcatgayggatatcattgttttgagtgttgactctgtgttgttatttaatcttatctttactacagtcccacagcaatggcacaattatcttcccatttgacagagaa

SEQ ID NO: 69240 - DNA, 646 bp, Homo sapiens
cctactgtggcaaatggcagcatctcttttaaaaggctaaataatattctattctgtatacataccacattgccattatcctttttgtttgtttgtttgtttgtttgtttgagatggagattcactcactctgtcacccaggctggagtgcagtggcgtgatttcaggtcactgtaatccctgccttctgggctcaaacaattctcctgcytcagcctccggagtatctgggattacaggcatgcaccaccactcccggttaatttttgtattttttgtagagatggtgtttcaacatgtttgtcaggctggtctcaaactgtgacctcaaaaaatcaacccacctcagtctttgaaagtgctcagattgcaggcgtgagccatagcatccagccacttttctgcatttttttttcattgacacttagattatttcaatatcttggctcttgtgaatagcgctgcagtaaacataggagtgcagatatctccacaaggtggtgattttttctatcttgggtatattcccagaagggaggttgctggtcatacagtagttctagttctaattgatttaagatcatcttactgctttccatagtggtggagattcagattagtgtagctattatgaaaaacagtttca

SEQ ID NO: 69241 - DNA, 609 bp, Homo sapiens
aaaagtaaaataaaataataattgcttagtgagtttcatggcacaatcacgttatgaataatcatattttcccaaatgctgtcattgccactaactcctccagatacatggtatattatccaattctgtgagttggaattatttcgttgctttgcagaatctttttttgttaatctagttccacttgttcaattatgctcctccgggagtctcacatctgctctgggcactgccttcttctcaggcatcccacactggagcttgctatagaggaggaggcatgaaaacagggccctccctctactggtgaaaacaagcccagacctggccctgcagctctgggagaagagccacagcmctgggattcccaggggtttccatgtggtaatcagggctgaacacagagctcactatggggtttgagctaaccagaatttttcttgttgctattttaaaaggtgactcatagagaaatagagtgagtgagagtgagtggatataagtgagaaaaacagtagatgtgtttggcagtttctgaccaggacgtttgtgtattttcaggtgttcagtgtgaggtggagctgatagagtccatagagggcctgagac

SEQ ID NO: 69242 - DNA, 739 bp, Homo sapiens
aatgtgctctggagactctttcagcactccctcaacatagggagaagaaaaacaaattttcctttgtcttatgatatgagtttatagagtcttgttctctgtaactagtaacttcaagtattctgttttatctaagaagcacaacgaaggtcatgagaagcctagcaggccagaactacagctgtctaggtaccggagtgagtgttatgagatcaaccagtgcaaggctctttagaacaaaacctagataacagacatctgggttgcatagcaatggtcatgtgtaatcctgagttatgaacctgttacaatttgattaactgtctctgtcctgcctccgtatccctgcttttgtgcactctaagcttgcttcaagctagcccaccccattttgggaagtgtgtataaaagtcaagcgctctctttgttctgtgcccagtctttggtcattgagtctgctgggtctgggtgtactcagtaataaaaatatcctcctgtatacaccccaagatctctctctggtcctccggattctgcaacatttcaggcagattcacatctctaaaaggccagcaagttctggtcaatcccataatgaaaatcctttaatgagacttggcamacgtgacaataagagactccttgtataatgccctagagttggattagacacactgtgagctcttgggtggtggttctgaataaggcagtttgtgcagcaaatgcaaacacatgcatg

SEQ ID NO: 69243 - DNA, 1013 bp, Homo sapiens
tgcatcttggaatttttttctccaagtctgcagttgtyttttactcccttatccctgtgtattgcagaaaaatgtttgtgtgtgtgtgtgcctgtgtatgtacaaatttagattttaaaaatgtacatttttattcatttaaagatcatgtctttggcagtatatctgaaatctcattgtaaaagacacaatagtcattattttttccatgtctctaatcttaggacacaatcaactcatgagtgtttaaccttccctacctgattggaggactatccacctgagacatttggaatacttctgtaaggagatgtgtccttcccattatttctttatttagtcatctattgatgttcctattggtttatggatgtctatttcatactccgaagaagatccttgttacattacttgttttattgttcaaaacaccacagctttattaggtgctgggagctcatttagtttggatcctgcatccttacagcacacctcatctttttgtttttagacatttccctgtttccaagtattacaataaattctaagcttgttctctacgttaccttttttgtacatagaatcagccatttttctaaagactgctcgtttttcatgttaaagaacagtattgaaatttaaaaatgtgatcctgggtatgtgtgttgttaatgtggtatcagtacttcttctaggatatctccaccaattggcctagtaaatgggcatgtttataggaacccaagtttatggacacatcgaaactatttatgtatctaatcctctgtaatgtgattacattaaaaatgagaacacactggtgtctccatccaactatgctaccatatggatgtttccagccttccttccctcactgtccataaccacccactgcaaagtgaggaaccccatcccaccatatgccattttattacttagctgcacaatttcaggacacatgcatagcagtatcagaaatgtaaagctcgttggaaacatgtttatctactaga

SEQ ID NO: 69244 - DNA, 1013 bp, Homo sapiens
tgcatcttggaatttttttctccaagtctgcagttgtcttttactcccttatccctgtgtattgcagaaaaatgtttgtgtgtgtgtgtgcctgtgtatgtacaaatttagattttaaaaatgtacatttttattcatttaaagatcatgtctttggcagtatatctgaaatctcattgtaaaagacacaatagtcattattttttccatgtctctaatcttaggacacaatcaactcatgagtgtttaaccttccctacctgattggaggactatccacctgagacatttggaatacttctgtaaggagatgtgtccttcccattatttctttatttagtcatctattgatgttcctrttggtttatggatgtctatttcatactccgaagaagatccttgttacattacttgttttattgttcaaaacaccacagctttattaggtgctgggagctcatttagtttggatcctgcatccttacagcacacctcatctttttgtttttagacatttccctgtttccaagtattacaataaattctaagcttgttctctacgttaccttttttgtacatagaatcagccatttttctaaagactgctcgtttttcatgttaaagaacagtattgaaatttaaaaatgtgatcctgggtatgtgtgttgttaatgtggtatcagtacttcttctaggatatctccaccaattggcctagtaaatgggcatgtttataggaacccaagtttatggacacatcgaaactatttatgtatctaatcctctgtaatgtgattacattaaaaatgagaacacactggtgtctccatccaactatgctaccatatggatgtttccagccttccttccctcactgtccataaccacccactgcaaagtgaggaaccccatcccaccatatgccattttattacttagctgcacaatttcaggacacatgcatagcagtatcagaaatgtaaagctcgttggaaacatgtttatctactaga

SEQ ID NO: 69245 - DNA, 715 bp, Homo sapiens
tatttttaccctccccctccaaacaaaatgtgtaagacactagacatggtagctctgtaacggggttcgtcatgtattaaactgtgtacccaaatgatatgtcaaagtcctgacaaccagcacttcagaacacgtccttatttggaaatatggtagctggagatgttattagtgaagatgaggtcttacttgagcagggcaggccctcaatgtgggaagatgggtgtctttctaagtacaaggaaatttggacacagagacagagacatacagtgtgccatatgacagcagaggcaaagatcagagtggtgcagcagtaaaccaatgcatgtccgggattaccagtcacctccacaagtgaggaaagggcaaggaagaaktctcctgagtctcagagggagtgcagcccagctcacacttgattttggacttctagtctctagaactgtgagagaatacagtcctgtcatttttaagccacccagtttgtagtatttcattttggcagccctaggatattcatacagaattcttcacccaaaaggaagcactctttcacacaaacagtcaaagtcctggatgacagacaacctggagactgcaaacctccaaggaatcaaaggaagttctataaattctaggggccccatctttcaaaggctgctcctcaagtccacacccacactttggaaggagaatcctgctcttggacatg

SEQ ID NO: 69246 - DNA, 538 bp, Homo sapiens
ggctgtggggaaggcggtggagcccaggcctccacaggctccccacaggctccccacaggctcgcgcggctctggttgctgggctccgcacgggccgcgtgggggcgcctgctgggagcgaggaggcgccatcctggctcgcctgctccaggaggacrctctgggcctgcgcagatgcagttctccaggatgggcgcgggcgctgggggcggcgctccttgggctgctgcgcctccactgagccgcctgggtgtgaggacctcgcgccggcgcctccgggaaggacgcggagccgccgcggccgatcccagggctgcagctgctgcccgacgcccgcgggaaggcccttccgccaccgcccgggggttcgaacttggagcagctgctgccagctgaggcgccagcggcgtcgggagctcctcagagtcagtgttttgtgctggattcggcatgtcctctgaaaactcgggaatttgtcactgaaatggtgacaggaggtgagaagtttttttagacgttgccttcgctggcctgacgc

SEQ ID NO: 69247 - DNA, 912 bp, Homo sapiens
cagatgaagagagagggcaaggtctgggaaggtcctgaacacagagcttctatgccttctttgagaacatggagttggggtgtgtcaccgtcctagcacagcagcgtgttcaacaaccagaaagctcctctgagcttagtgcttagaatttttattagggtttcattacataggcatgattgaattattggctgtgtgattgaacttaatctgtagcctctctcttctccccagaggtcaagctcactaaagccccaactctgtaatcacagttattctttctggtaagcagttcccctcctgagtcatctccttagcataaactcgggtatgaaccaaggatttagagtctgcttcctaggacccagggacaaaggccaaattctttataatatggcactgctacatacgaaaccaagctaggagtttggaggagggagagagattcctgacatgggtggaaatataaaaaatttaataaattttagaggtccttaaagttaacagagaagtcaagatgaatgtgttgattggatgatttagaccrggagaaactagattattactaaaataagctacttggtgtcagtaaggatctgggctctgtcatttattagttctgtgaccttgggtgttacttatccactttaagtctcagtaaaatatgcataatgaggattgtttttagaatgaagttattatatgagcctattgtcaaacccatagagggcacccaataaaagctagctttgatttttcagtcttacactgtagctgagtttaagttagaacagatgaggttggaagacatggaaacagttaaaatggagaaagattagttaatatttatacagttacaatagagatggtataaattaagctatgtaaaatttattcagaatgttgtttttt

SEQ ID NO: 69248 - DNA, 1691 bp, Homo sapiens
ttctttataccaaccaacatctcttgtgtattctaccaggtcaactagaacaacagttartgagatgggattatggagacagcatgcccatttcccatcccatttccttttctcgccccttcttttatgctcttctttcattttttgagggatccctacagactcttaagtattgtatctttatatacattgaccattccagaatctttctcccataacattcatggcaatcaaccagaactatctgtctataggtcacaatattctagtataaacaaaagaagggaatgaatgctttcagggcctcctggctagtgcccttcatgtctctgacaaactgcctgacagtgactcctcttctctttgttctgtaacaaagaagacagcctcaaagaacatcagataaaatggagttttaaagttcacaatctggttattttaaggatttttatacccttttaccaagcgtcagaactatctgatatctaaataagtattgtagatacagattactgatgtcaatcttctcagtatctacttggaaggtcagttgaagcactaaatctagttttgggttttgtattccaaaagcaagaattcaagtaacagaatgcacttttttatttacttcaaaagcactccttttgaaatttgcaagtatggagttactgagaactcaggatgcgatgtacagaaagtataagccatttaattacaataaaaactcctcagggtacatttaatagaagcattgaagataatttgaaagcagaaaagtggtaactatagagctttactcttaaaatgcgaaacatcacatttctaagtaacagggtctaagtgttttatccaagtgttactaaaaagtaattaagcactttacagtgttaattaactatttccaacctttttatttttacttgttttttcctttaagctctgttggacttgacaacttttttattttgtgttaagagtcgtacattagaaactagcaacaagtttaaaagttactgctatacgtatgcattataattttgctttttttgccaatatatttgagagcataatgattttatatggatatctacaaaggcatgtggaacaattaaagtaaaattaaatttgttgcttcttttgttatgattttataataatgattgtcatttaaaataatatctagcatctattttaaactacaagctcattatttatagcatttattgcttctagaacaatattttatatatataactgatactatttttcttgtaggtgtgatttcttacacagaatatctttttcttttatgtattttaacaagtaagtatacttattgcttttatttctggatgcagctttattttttaaacgaatcttggaaagcagatcttaggttctcttactcttgaaaatcaatatccatgctgttctgcaaaattcatgtttaatgctacagaaaaatgctaagcatagcactgtaaagagtcaaaaacataaatgctacagcttatggtatagtaataaatgctcataaattataaatttaatattacgtgtcaattcttgtggttttaatctacctcagactccaaaggtcatgacatgtaataatttataaattccctactgtactcatttgaatcatattttctgccagactgatgtgagagagagtgtctcttaactat

SEQ ID NO: 69249 - DNA, 660 bp, Homo sapiens
aatagaaaatactattaatgtattccttagagtaacatgctctgcttttagcatatatattacactctgtctttacctacactctccgagtaaaaagaaagggaaatcaacagccattttcttttcttcttttgttttctttttaaattatggccctacctcctgaacagccattttattttctacttttcctttgtaacatagctgtaaaaattcctcagaaaacctctgaaagagcttcatatttacttcagaagctgaaactcagaggaagtctatgacatcattctttttcttagtaggaaagagaaaatataaaaatcctcatcagaagctaaytagtagccattcaaagggaaacaagcagactgattactgggatttatcagtaggcttaaactctcacccacgcagcccttgcccacgtgtagtccctgagccaagccactggagctggagccttcattccagtgctttgcagaatgatggggagatggcggttttcaatttgattacaatagatatagatgtgtttctgccatccgaaaatggccaaggttagtgttgctttcttatgatggtacacaactgtattttaggaactttcagaatgggcctgtttttctgcagaacgttctatgtccatactgccaagttcca

SEQ ID NO: 69250 - DNA, 726 bp, Homo sapiens
tccatataagtaattgttttgtttacttacaagatactttaaattttttctacagaaatcactactcttttccattaagtaaagcctgtcatttcctttacatttttaaaggattactctgttaatgatttcaacaatttctggaatgtgtaagatgaaaatctcacagattataatgccatatgccatatactacttaggactttatgggggttttytttgtatgtttggtgttttttaagatggagttttgctctgtcgcccagctggagtgtagtggcatgatctcagctcactgcaacctccaactccctggttcaagtgattcttctgcctcagcctcccaagtagctgagattacaggcacatgccaccatgcccagctaatttttgtatttttagtagagattgggtttcaccatttcagccaggatggtcttgatctcctgacctcatgatccacccacctcggcctcccaaagtgctgggattacacgcgtgagctactgtgcctgacctatgatttatttttctaatgtaatatgtcatcactgtatgaaccatttttctaactttgacaatttttatttttcccttaatctcataagcagttttcatatagggtcattatgcatttttttttagaaaaatacgtctcagaataacgttgctaaaagaaaatagatcctaatattgctctagtttaaactacatatgcaaattgca

SEQ ID NO: 69251 - DNA, 726 bp, Homo sapiens
tccatataagtaattgttttgtttacttacaagatactttaaattttttctacagaaatcactactcttttccattaagtaaagcctgtcatttcctttacatttttaaaggattactctgttaatgatttcaacaatttctggaatgtgtaagatgaaaatctcacagattataatgccatatgccatatactacttaggactttatgggggttttctttgtwtgtttggtgttttttaagatggagttttgctctgtcgcccagctggagtgtagtggcatgatctcagctcactgcaacctccaactccctggttcaagtgattcttctgcctcagcctcccaagtagctgagattacaggcacatgccaccatgcccagctaatttttgtatttttagtagagattgggtttcaccatttcagccaggatggtcttgatctcctgacctcatgatccacccacctcggcctcccaaagtgctgggattacacgcgtgagctactgtgcctgacctatgatttatttttctaatgtaatatgtcatcactgtatgaaccatttttctaactttgacaatttttatttttcccttaatctcataagcagttttcatatagggtcattatgcatttttttttagaaaaatacgtctcagaataacgttgctaaaagaaaatagatcctaatattgctctagtttaaactacatatgcaaattgca

SEQ ID NO: 69252 - DNA, 840 bp, Homo sapiens
tatatagaacaacaaaagacctagaatagccaaatgtattctgtgcaaaaagaacaaaactggaggaatcacattacctgaaaggaaatcagtatggccaagagatatccgcactcccatgcttatggcagcattattcacwgtagtcgagatttggaagcaaactaagtggccatcaacagacaaatgtataaagaaaacatagtacatatatacaatggagcaagactctgtctcaaaaaaaaaaaaccaaaaaactgataaacatccatgtatctaaattgttgtgtaaatctctatcacctgagattaaatttctcaggtatcttttctggttccatttctatatacattttaaagatttttgatgctgtttgtatgcttttctctaggattgtatctgctattatggcagaggaataccctttaaaaaattcttgagaattatagatgaagtatggtttctcatcaatttatgtttatttgtttactgttgagattgaatttattttttgcaattatttataacaagagcaatacaacaatagtaccgatagtactgataaaagaaaatcctgaaataacactatagctactgtgctaggcaccattctagattcacatttattaagacgcttagacctcaaaatcaccctaagaggtgagtactgttgttatccccatttcacagatgaggaaactaaagttaaataagttagtgagctgtaagaggcagagtgaggattcaaaaccaggcattgtggccccagagtgtgtgttcttaacaactctaccattttgcgttttgatgttgagaacaggaaagaaaatgcagtttag

SEQ ID NO: 69253 - DNA, 840 bp, Homo sapiens
tatatagaacaacaaaagacctagaatagccaaatgtattctgtgcaaaaagaacaaaactggaggaatcacattacctgaaaggaaatcagtatggccaagagatatccgcactcccatgcttatggcagcattattcactgtagtcgagatttggaagcaaactaagtggccatcamcagacaaatgtataaagaaaacatagtacatatatacaatggagcaagactctgtctcaaaaaaaaaaaaccaaaaaactgataaacatccatgtatctaaattgttgtgtaaatctctatcacctgagattaaatttctcaggtatcttttctggttccatttctatatacattttaaagatttttgatgctgtttgtatgcttttctctaggattgtatctgctattatggcagaggaataccctttaaaaaattcttgagaattatagatgaagtatggtttctcatcaatttatgtttatttgtttactgttgagattgaatttattttttgcaattatttataacaagagcaatacaacaatagtaccgatagtactgataaaagaaaatcctgaaataacactatagctactgtgctaggcaccattctagattcacatttattaagacgcttagacctcaaaatcaccctaagaggtgagtactgttgttatccccatttcacagatgaggaaactaaagttaaataagttagtgagctgtaagaggcagagtgaggattcaaaaccaggcattgtggccccagagtgtgtgttcttaacaactctaccattttgcgttttgatgttgagaacaggaaagaaaatgcagtttag

SEQ ID NO: 69254 - DNA, 932 bp, Homo sapiens
tggacacatttgcctcaatctagtaccaaactaaatcctacaaacacttcaagctacttccaggagccctgaagtcttttcatttaattaagcagccttgaacccaaattatgcctaagcttccagcaagttttcagagtggtaaggaaacccagacagtgaagtagaaacctagaagttcactgggatgagtacaggtaatacttggtgtccccsctttaacccaactgcaaaccagcctgtccttggaacttttttttcccctctagaggaaccattctggaagggaagcactctgcttagcatatgctctgttaaaggcttcagttaaacatacatgcacccctagaaagaaatatgtgcaaagcattccagattatgcacgtgcatctgtctccttaaactgcactccagagactaaagcagaacacagaggctgtcatggatattacacagtctacagcgagtgaatgacttccattgtgacagaaaagcaactgtacattatacatgcatacaattcttttcctcttaaaactctactacccacacagtaaatattgctataaacccacagtgggccaagaaaaacaaactttgtatacactccttgcaaacccaagacatgaaaccatgaaatcgaaggaaatttacctatagtttcaccaagtataatggaagcaaataataaagatgaatatgaccagtaacaattatatatttaactctgcaagctctgtaagtaatgttgttctctttttcatttagactgtgaaaattaattttgcccttaaaaatgtaaaacaaaaggaggatgttatttaacctcaaggaatcatttatctttgaccattgttattgttttcagtttctttagggttgtaattatttattacaatatatatttatacaagtacatgaccactgttgaa

SEQ ID NO: 69255 - DNA, 691 bp, Homo sapiens
gtggatccttcatgaataaattaacaccatccttaggtcaaggagtgaattctcagtctattacttccttccagagctgcttgtgtaaaacagcctgccayggctctcccttctctcttgcttcctctctcaccatgtgatctctgcacatggctggctcctcttccactttctgcagtgagttgaaacagcccgagaccctcgccagttgcagatgcttaatcttgaattttccagtcaccagaactgtaggccaaataaacctcttttctttataaactacccagtctcagatattctgttacagcaacactaaatgaacaaagatagtcatcatgtcactgaggatgctgacatattgacatcacataggttattagccctttttggaaggaggctcacatctttttcaagacagccatgggaggttcctgagttcagagagatagcatatattccttttgtcttcacaccattagccataaacctatgacataaatagtaatgctgtgaaataaacatacagaaaataaacatttggatttgtaaaagccccataaacatttccatttcttttccttctctttctcctcctcctccttctcttcttcctccttctccttcttcctcttttttgccaaataaaaaatttcaaatcattaacttctataaataactcatctataaggga

SEQ ID NO: 69256 - DNA, 691 bp, Homo sapiens
gtggatccttcatgaataaattaacaccatccttaggtcaaggagtgaattctcagtctattacttccttccagagctgcttgtgtaaaacagcctgccatggctctcccttctctcttgcttcctctctcaccatgtgatctctgcacatggctggctcctcttccactttctgcagtgagttgaaacagcccgagaccctcgccagttgcagatgcttaatcttgaattttccagtcaccagaactgtaggccaaataaacctcttttctttataaactacccagtctcagatattctgttacagcaacactaaatgaacaaagatagtcatcatgtcactgaggatgctgacatattgacatcacataggttattagccctttttggaaggaggctcacatctttttcaagacagccatgggaggttcctgagttcagagagatagcayatattccttttgtcttcacaccattagccataaacctatgacataaatagtaatgctgtgaaataaacatacagaaaataaacatttggatttgtaaaagccccataaacatttccatttcttttccttctctttctcctcctcctccttctcttcttcctccttctccttcttcctcttttttgccaaataaaaaatttcaaatcattaacttctataaataactcatctataaggga

SEQ ID NO: 69257 - DNA, 2752 bp, Homo sapiens
ccctggctcttacagttttagtagtgcatgcagtactcacttccaactaccaatgcctgcaactgaggcctttttttctttgccaccacgcacatagcaggccagataagctgaaaagaattaaccctcctggcagcagccctcaatctatgactgaagggaattggagtataaatacctcagctcttcctccccgtgactgaaataattctgaggcacacatttacgctgttgcctacattttctcagcagaatgcagctccagttgttggatgcaggacacttatgcagtggacctaaggcaacctcagggcccctttttaaagagggggtacacagcagctagaggaaaaatgaagtctgaagtcctgacccaagttcatctcacagtagatccagcagatctctggaactgccaagtagaaatttctctgttgcccaaatacataatcaaaatggctgtatttatagctgtgaaccatcacactagtccctggtctgtatagtttgaaaggccaaatggaagccacctaaaaatgccctccacaataacaaaagtaatatcacatcttgggcaggatggtcagaagcaagggctatggtccccttcgtaccccatcttgatttaatttaacaagttagcccaccacagtgtccgtgttgtaaaggcatgggtcaaggaaccacttggagaacttgtgcttctcatttccacaacttttcgccatgccgggccagaggttctggttcctggtagggagagggatccttctagaaggaggtagaataaagtttccactaaatttaaagttatatcttctcccttggcattttcagcttcttattccagttgaccaagatgcaataaagaagccctcattaatgaggatacatggttgctatgatattataagggcagggaagactatgtcctgtgaccctttgctaggggtttctctggctactaaagcatgcttgtccatgttctggagaagttaacacctcccaggagaagctctgttccaaagctgatggaatttgttgtataaacatctcatttttctcacccttacttaactccaagacacatgatctacactgttttccaaagttcctgagaagggttaagctacagtagtccttgcagtacttttcttgaaaacacactcttctacttgtgagtgagcttctctcccttctctgtcttcattccctactcccttacgccttccaaataaagttcttgcactctaatccttgtttcagtgtctctaggagtactccaaataaggcagggtccttgaaattttgttttctctttaaaaagcatgttaccattttaaaaacactgttgtagtgcccagccagcatacacgcttcaataattgctgggataacatcctacaaagcaatgatctaattgcttacatgctcatagtcatgaatgaaagatgcaagaaaatgttctttgagagggctcaaattatacactaaattttaaaatgcatgcaaaaaacatttgcatatatatatayatacacacacacacacacagccattttaaatttggatacttagaaggacaaatttcttttctttgagaaacttccctacgtggaacagctcatctaagtcttagatcctcgatgaggctgcttataaggctgtctaagttgtattctgcataactcaagggtgacttgcaacctgtagcccacatcttctggaaccttctggaattctggcacaactggatttacagcatgcctttgcaaatggttatctatctccttagatattatcaccacaatgcaaaatgaatggttatctatctccttagatattaccaccacaatacaatacaaaatgaagtgagccagcccatcaaagtcaagcgctcccctgcccgaaaagaaatgttagactgtggatattgaagctaattttattcaacgcagttttcattgccctgaggcactttatctactgctggaatgtactcactgaatcatattttaaaccagtattctctccgattctatatgcgcctcaaagtctaagctcattggaactggataaagggctactgtcaagttcaatttagtcaagattacctcctcaacaatacttcaaacattttattcacataaatcatacaggaggattagaatatgcactcagttaaaaaagattactttgccattctgatgatcatgcacagtcttattgctaataaactcctttgtatagtttcccacacaaacaagtagagtttctcatgggaaataagcttttgcagttttttttgaaagaaatatacactaagctttctatttgttttaaaaatcaacaaaacagtaccttaaagggaatacactactggaatattacagaaaattaaatctctacgaagcctgttgcaaatgagtaagtcaccttttgaggttttaaaaatcattttcataagtgatttccattgaccacatgatgatatgagtaaactttagagaacatgttaaacattttcagcctgcattgcatattacctgtctgcctggtttttttcaaggtttgcatttcaaatgctttcccagttccgtagccactctctcagtacctcgctattgtctggtactcaactaaattcaaactttggtgttacctgccaggtcgtgcagggaggctgagatttttacctctgcattaaaacaagggatccagtggatttttctaagacccatacttagatgca

SEQ ID NO: 69258 - DNA, 2752 bp, Homo sapiens
ccctggctcttacagttttagtagtgcatgcagtactcacttccaactaccaatgcctgcaactgaggcctttttttctttgccaccacgcacatagcaggccagataagctgaaaagaattaaccctcctggcagcagccctcaatctatgactgaagggaattggagtataaatacctcagctcttcctccccgtgactgaaataattctgaggcacacatttacgctgttgcctacattttctcagcagaatgcagctccagttgttggatgcaggacacttatgcagtggacctaaggcaacctcagggcccctttttaaagagggggtacacagcagctagaggaaaaatgaagtctgaagtcctgacccaagttcatctcacagtagatccagcagatctctggaactgccaagtagaaatttctctgttgcccaaatacataatcaaaatggctgtatttatagctgtgaaccatcacactagtccctggtctgtatagtttgaaaggccaaatggaagccacctaaaaatgccctccacaataacaaaagtaatatcacatcttgggcaggatggtcagaagcaagggctatggtccccttcgtaccccatcttgatttaatttaacaagttagcccaccacagtgtccgtgttgtaaaggcatgggtcaaggaaccacttggagaacttgtgcttctcatttccacaacttttcgccatgccgggccagaggttctggttcctggtagggagagggatccttctagaaggaggtagaataaagtttccactaaatttaaagttatatcttctcccttggcattttcagcttcttattccagttgaccaagatgcaataaagaagccctcattaatgaggatacatggttgctatgatattataagggcagggaagactatgtcctgtgaccctttgctaggggtttctctggctactaaagcatgcttgtccatgttctggagaagttaacacctcccaggagaagctctgttccaaagctgatggaatttgttgtataaacatctcatttttctcacccttacttaactccaagacacatgatctacactgttttccaaagttcctgagaagggttaagctacagtagtccttgcagtacttttcttgaaaacacactcttctacttgtgagtgagcttctctcccttctctgtcttcattccctactcccttacgccttccaaataaagttcttgcactctaatccttgtttcagtgtctctaggagtactccaaataaggcagggtccttgaaattttgttttctctttaaaaagcatgttaccattttaaaaacactgttgtagtgcccagccagcatacacgcttcaataattgctgggataacatcctacaaagcaatgatctaattgcttacatgctcatagtcatgaatgaaagatgcaagaaaatgttctttgagagggctcaaattatacactaaattttaaaatgcatgcaaaaaacatttgcatatatatatatayacacacacacacacacagccattttaaatttggatacttagaaggacaaatttcttttctttgagaaacttccctacgtggaacagctcatctaagtcttagatcctcgatgaggctgcttataaggctgtctaagttgtattctgcataactcaagggtgacttgcaacctgtagcccacatcttctggaaccttctggaattctggcacaactggatttacagcatgcctttgcaaatggttatctatctccttagatattatcaccacaatgcaaaatgaatggttatctatctccttagatattaccaccacaatacaatacaaaatgaagtgagccagcccatcaaagtcaagcgctcccctgcccgaaaagaaatgttagactgtggatattgaagctaattttattcaacgcagttttcattgccctgaggcactttatctactgctggaatgtactcactgaatcatattttaaaccagtattctctccgattctatatgcgcctcaaagtctaagctcattggaactggataaagggctactgtcaagttcaatttagtcaagattacctcctcaacaatacttcaaacattttattcacataaatcatacaggaggattagaatatgcactcagttaaaaaagattactttgccattctgatgatcatgcacagtcttattgctaataaactcctttgtatagtttcccacacaaacaagtagagtttctcatgggaaataagcttttgcagttttttttgaaagaaatatacactaagctttctatttgttttaaaaatcaacaaaacagtaccttaaagggaatacactactggaatattacagaaaattaaatctctacgaagcctgttgcaaatgagtaagtcaccttttgaggttttaaaaatcattttcataagtgatttccattgaccacatgatgatatgagtaaactttagagaacatgttaaacattttcagcctgcattgcatattacctgtctgcctggtttttttcaaggtttgcatttcaaatgctttcccagttccgtagccactctctcagtacctcgctattgtctggtactcaactaaattcaaactttggtgttacctgccaggtcgtgcagggaggctgagatttttacctctgcattaaaacaagggatccagtggatttttctaagacccatacttagatgca

SEQ ID NO: 69259 - DNA, 861 bp, Homo sapiens
agcctgtaaaacaagatggtctctaaggacccactcaactatgaatttgggatttgggaatttgtttaaagcaatatttcagtaagttaatgtgttgtaacctgcagtgatttcatatggatttttatgtagatctccttatgattttgatgacaatatggtattcyatcaatgttatatagcattgtgttcttacctagttcccagcttgtgctttttgagtttttactatcataaatagtgcatttataaacattattatataaataacttgatctcatggttcatatgtgtaacacacagaaagcattcaatttactcaataaggataaatgtcttatcctatatgtttcctgcagtgagaataaagacaaagaatgttgtggaacagagaagccagaggctgaggcacagctagatttgaatcttccgtttatcactaaccagcaaagtggtgtgtgatcagtagtttccctagaacccagttgccttatctggaatgtgaatatattattgcttatttgtttatttaattgattacttctttataatctgggatctgtgtccttcttccctcctgaaagaataaaccccttgagggcaaataacacatctgtggtttatcatcagattcctagcacctagaacaatgtctgacacataccagagctcaggaagtatgttttggcttccacaggggtttaggccgcatgtcagaagtcagttcttagtcattcattcattcagtatttaaagataattactgagtactgatgtgtacactgcatgtattgggagttaggtcagctaggcaaacaacaaagtattaatgtatttcatatctatggtgctgtgtcacct

SEQ ID NO: 69260 - DNA, 861 bp, Homo sapiens
agcctgtaaaacaagatggtctctaaggacccactcaactatgaatttgggatttgggaatttgtttaaagcaatatttcagtaagttaatgtgttgtaacctgcagtgatttcatatggatttttatgtagatctccttatgattttgatgacaatatggtattccatcaatgttatatagcattgtgttcttacctagttcccagcttgtgctttttgagtttttactatcataaatagtgcatttataaacattattatataaataacttgatctcatggttcatatgtgtaacacacagaaagcattcaatttactcaataaggataaatgtcttatcctrtatgtttcctgcagtgagaataaagacaaagaatgttgtggaacagagaagccagaggctgaggcacagctagatttgaatcttccgtttatcactaaccagcaaagtggtgtgtgatcagtagtttccctagaacccagttgccttatctggaatgtgaatatattattgcttatttgtttatttaattgattacttctttataatctgggatctgtgtccttcttccctcctgaaagaataaaccccttgagggcaaataacacatctgtggtttatcatcagattcctagcacctagaacaatgtctgacacataccagagctcaggaagtatgttttggcttccacaggggtttaggccgcatgtcagaagtcagttcttagtcattcattcattcagtatttaaagataattactgagtactgatgtgtacactgcatgtattgggagttaggtcagctaggcaaacaacaaagtattaatgtatttcatatctatggtgctgtgtcacct

SEQ ID NO: 69261 - DNA, 861 bp, Homo sapiens
agcctgtaaaacaagatggtctctaaggacccactcaactatgaatttgggatttgggaatttgtttaaagcaatatttcagtaagttaatgtgttgtaacctgcagtgatttcatatggatttttatgtagatctccttatgattttgatgacaatatggtattccatcaatgttatatagcattgtgttcttacctagttcccagcttgtgctttttgagtttttactatcataaatagtgcatttataaacattattatataaataacttgatctcatggttcatatgtgtaacacacagaaagcattcaatttactcaataaggataaatgtcttatcctatatgtttcctgcagtgagaataaagacaaagaatgttgtggaacagagaagccagaggctgaggcacagctagatttgaatcttccgtttatcactaaccagcaaagtggtgtgtgatcagtagtttccctagaacccagttkccttatctggaatgtgaatatattattgcttatttgtttatttaattgattacttctttataatctgggatctgtgtccttcttccctcctgaaagaataaaccccttgagggcaaataacacatctgtggtttatcatcagattcctagcacctagaacaatgtctgacacataccagagctcaggaagtatgttttggcttccacaggggtttaggccgcatgtcagaagtcagttcttagtcattcattcattcagtatttaaagataattactgagtactgatgtgtacactgcatgtattgggagttaggtcagctaggcaaacaacaaagtattaatgtatttcatatctatggtgctgtgtcacct

SEQ ID NO: 69262 - DNA, 861 bp, Homo sapiens
agcctgtaaaacaagatggtctctaaggacccactcaactatgaatttgggatttgggaatttgtttaaagcaatatttcagtaagttaatgtgttgtaacctgcagtgatttcatatggatttttatgtagatctccttatgattttgatgacaatatggtattccatcaatgttatatagcattgtgttcttacctagttcccagcttgtgctttttgagtttttactatcataaatagtgcatttataaacattattatataaataacttgatctcatggttcatatgtgtaacacacagaaagcattcaatttactcaataaggataaatgtcttatcctatatgtttcctgcagtgagaataaagacaaagaatgttgtggaacagagaagccagaggctgaggcacagctagatttgaatcttccgtttatcactaaccagcaaagtggtgtgtgatcagtagtttccctagaacccagttgccttatctggaatgtgaatatattattgcttatttgtttatttaattgattacttctttataatctgggatctgtgtccttcttccctcctgaaagaataaaccccttgagggcaaataacacatctgtggtttatcatcagattcctagcacctagaacaatgtctgacacataccagagctcaggaagtatgttttggcttccacaggggtttaggccgcatgtcagaagtcagttcttagtcattcattcattcagtatttaaagataattactgagtactgatgtgtacactgcatgtattgggagktaggtcagctaggcaaacaacaaagtattaatgtatttcatatctatggtgctgtgtcacct

SEQ ID NO: 69263 - DNA, 935 bp, Homo sapiens
ctgtactgaaatggatcacatgaactttttgaataatgaataacatatttacattattctggtcttttttgctacagagtacaagagaaatgtgaaggacaaacaaccttattgttactcttataaattatgtaaaatatttttgtattcttcctgcattgctaactctaggtattgttggatgccctgtctacttttaaaaatgataaattgagccgggcacagtggctcatgcctgtaatcccagcactttgggaggccaaggcaggcagatcacctgagatcaggagttcaagaccagcctggccarcatggcgaaaccacatctctactaaaaatacaaaaattagctgggtgtggtggtgggcacctgtaatcctatctgctcaggaggctgcggtatgagaatcatttgaacctgggagatggaggttacagtgaggcgagaccactccagcctgcgagacagagcaagactctgtctcaaaaaaaataaaaataaaaataaacaaataataaaaaagataaattggtcaagtggctgaagattgaaagcctgatttatctcaccgaaccactagtaatggtagtatgttaatatattagtttttataaggattttaaaaaccctgaggacccacattatttctctcagtttttgaagtatttagtagagttgaatttttatttttaattttgttttactttcagttgattgatcgttgccgccttttggtggtgagctcctgtggcgtgtgttggtgaaagttggagatgctggtggtgtaaggcaggcgaatgatattactaaagtggaggcagctctaggagtggggactgtagacatcagcctgtagttgttggtaccaactgtaattgaaagtttgagtcatctgtttaaagaatgggcctttccttcatcatgtcattttaat

SEQ ID NO: 69264 - DNA, 935 bp, Homo sapiens
ctgtactgaaatggatcacatgaactttttgaataatgaataacatatttacattattctggtcttttttgctacagagtacaagagaaatgtgaaggacaaacaaccttattgttactcttataaattatgtaaaatatttttgtattcttcctgcattgctaactctaggtattgttggatgccctgtctacttttaaaaatgataaattgagccgggcacagtggctcatgcctgtaatcccagcactttgggaggccaaggcaggcagatcacctgagatcaggagttcaagaccagcctggccaacatggcgaaaccacatctctactaaaaatacaaaaattagctgggtgtggtggtgggcacctgtaatcctatctgctcaggaggctgcggtatgagaatcatttgaacctgggagatggaggttacagtgaggcgagaccactccagcstgcgagacagagcaagactctgtctcaaaaaaaataaaaataaaaataaacaaataataaaaaagataaattggtcaagtggctgaagattgaaagcctgatttatctcaccgaaccactagtaatggtagtatgttaatatattagtttttataaggattttaaaaaccctgaggacccacattatttctctcagtttttgaagtatttagtagagttgaatttttatttttaattttgttttactttcagttgattgatcgttgccgccttttggtggtgagctcctgtggcgtgtgttggtgaaagttggagatgctggtggtgtaaggcaggcgaatgatattactaaagtggaggcagctctaggagtggggactgtagacatcagcctgtagttgttggtaccaactgtaattgaaagtttgagtcatctgtttaaagaatgggcctttccttcatcatgtcattttaat

SEQ ID NO: 69265 - DNA, 935 bp, Homo sapiens
ctgtactgaaatggatcacatgaactttttgaataatgaataacatatttacattattctggtcttttttgctacagagtacaagagaaatgtgaaggacaaacaaccttattgttactcttataaattatgtaaaatatttttgtattcttcctgcattgctaactctaggtattgttggatgccctgtctacttttaaaaatgataaattgagccgggcacagtggctcatgcctgtaatcccagcactttgggaggccaaggcaggcagatcacctgagatcaggagttcaagaccagcctggccaacatggcgaaaccacatctctactaaaaatacaaaaattagctgggtgtggtggtgggcacctgtaatcctatctgctcaggaggctgcggtatgagaatcatttgaacctgggagatggaggttacagtgaggcgagaccactccagcctgcgagacagagcaagactctgtctcaaaaaaaataaaaataaaaataaacaaataataaaaaagataaattggtcaagtggctgaagattgaaagcctgatttatctcaccgaaccactagtaatggtagtatgttaatatattagtttttataaggattttaaaaaccctgaggacccacattatttctctcagtttttgaagtatttagtagagttgaatttttatttttaattttgttttactttcagttgattgatcgttgccgccttttggtggtgagctcctgtggcgtgtgttggtgaaagttggagatgctggtggtgtaaggcaggcgaatgatattactaaagtggaggcagctctaggagtggggactgtagacatcagcctgtagttgttggtaccaactgtaattgaaagttygagtcatctgtttaaagaatgggcctttccttcatcatgtcattttaat

SEQ ID NO: 69266 - DNA, 1498 bp, Homo sapiens
ccctgctttcagtttttttggtcatataaccagtagtagaattgctggatcatatattaattctgtttttagttttttgaggagctgccatattgttccccacagcagtggctattttacattaccgtggacacaaggatcccaatttctgcatatcctcatcaatacatgttattttctgggttttttttctttttgtagtagtcatcctaagggatactgaagtctgaagggtttttataattataagtttgctctaaactgaaacaaaaaccagaatcatccacttttacctccattcacacaaaaggaagtttaaaacctgcctggtttgtttccatgattttaaaagatagaaaaagttccatttattttaaaagagaagattttatttttctcatttcagtaaagcttatcacaggatctccatcgcctttatctttatcactgttgtggttctcagatttgaggtagttgtgattcataaagttgaacaagtagaatctgctgagatgaggccttaattgatcatttttacaagacatcatttttggcagaatcaaatgatagtgaagctagcctaagaaataactgtggaatctaagaagcgaggcaaggacatttgaccaagcaaaattgactttttgtcccacttacaacagcgctaagagggaaagtttcgttcattctcagattaagttataggtaagtggattacaccagagcacatattgccaaaaacctgtcatcctgctcaacatttctacctctaaaaaagtagcaatcaagttctatttattctgaggatcagttatattctatattcatgtgtataatggcagggatttaaaaataatctgggtaaatttgaactgcaaatagcatgtaaatatcactgacccgtaatagtcttagttcttctctacaagggtatatggtcagcccttattgggagtaaaaacacctcggcacattagtgaggcttccttgaccccacagagtctctcagcaatttcatcccaattccctggatccaggtaagtaacagacatgaatgaaacaggctagtgcaaaatagaaaggggtggtggcaaactgtgttaaaccaaagaggaatcaattaaaaaaaaaatacagtgtgtcccaaaacacgcatttgagttgggagcagtgattgatccaacatttatagagaaccctgcagagtccctgacattgtgggaagaatagaagtagaatgagcccagaaaacccgtgtttttattttagatttctttaaatacgtgagaatacaatggcatataatgcaatattttcccttctcaaaaatatatctagaaagaaagagatggggaaatgcacagcagccgttggtggargttgaccctggaagctaattctagaataacttaaaaatgtaagttgttcaggtttcccttttatagctgttctgagtagcacagaaactcaattttgcttggtagaaggtccttgcctt

SEQ ID NO: 69267 - DNA, 1498 bp, Homo sapiens
ccctgctttcagtttttttggtcatataaccagtagtagaattgctggatcatatattaattctgtttttagttttttgaggagctgccatattgttccccacagcagtggctattttacattaccgtggacacaaggatcccaatttctgcatatcctcatcaatacatgttattttctgggttttttttctttttgtagtagtcatcctaagggatactgaagtctgaagggtttttataattataagtttgctctaaactgaaacaaaaaccagaatcatccacttttacctccattcacacaaaaggaagtttaaaacctgcctggtttgtttccatgattttaaaagatagaaaaagttccatttattttaaaagagaagattttatttttctcatttcagtaaagcttatcacaggatctccatcgcctttatctttatcactgttgtggttctcagatttgaggtagttgtgattcataaagttgaacaagtagaatctgctgagatgaggccttaattgatcatttttacaagacatcatttttggcagaatcaaatgatagtgaagctagcctaagaaataactgtggaatctaagaagcgaggcaaggacatttgaccaagcaaaattgactttttgtcccacttacaacagcgctaagagggaaagtttcgttcattctcagattaagttataggtaagtggattacaccagagcacatattgccaaaaacctgtcatcctgctcaacatttctacctctaaaaaagtagcaatcaagttctatttattctgaggatcagttatattctatattcatgtgtataatggcagggatttaaaaataatctgggtaaatttgaactgcaaatagcatgtaaatatcactgacccgtaatagtcttagttcttctctacaagggtatatggtcagcccttattgggagtaaaaacacctcggcacattagtgaggcttccttgaccccacagagtctctcagcaatttcatcccaattccctggatccaggtaagtaacagacatgaatgaaacaggctagtgcaaaatagaaaggggtggtggcaaactgtgttaaaccaaagaggaatcaattaaaaaaaaaatacagtgtgtcccaaaacacgcatttgagttgggagcagtgattgatccaacatttatagagaaccctgcagagtccctgacattgtgggaagaatagaagtagaatgagcccagaaaacccgtgtttttattttagatttctttaaatacgtgagaatacaatggcatataatgcaatattttcccttctcaaaaatatatctagaaagaaagagatggggaaatgcacagcagccgttggtggaggttgaccctggaagctaattctagaataacttaaaaatgtaagttgttcaggtttcccttttatagctgttctgagtagcacagaaactcarttttgcttggtagaaggtccttgcctt

SEQ ID NO: 69268 - DNA, 517 bp, Homo sapiens
tgtccaaagacacatgggtggtaactcgtagagattattagctagctcagggcttcttccctctttgggccacagctgtacccttgcttattgtacctgaacacctgcagtttctttcattgctctttaagtgatgacatggtctcccagacccctcaccccatccagttgactcttcactgaacttaactggtcagcacttaagaaaaagatggtttaagcattcaagaaaaacatggatgccaagtatccattgattcaggaaatatttgagtatctgccatgtgccaagcactctaggtatttgggataaaccagtgaacagagcagtcaaacaaatccctgtcttcatgcatkgtacactgagggttcatgttgtggcttagtccctgtccccacaatcaacactgaagaggactttgaaataggggacagaaaagttgcagaagcaggcttgtgctgttaaggcattaaggtgggaattctatacgaaaagttcaaatgatgtattaaatat

SEQ ID NO: 69269 - DNA, 893 bp, Homo sapiens
tgatacagtgctttcctagtttttatatctgagtagcatggttcattatgagacgaccaaaaatattttaatgctcaagaacataaataaatgtcctagtaggatagagccaaaattacttgggttcaaatctcagtcacaccactcagctgctacatcacttgagcaaattactcaaactttctaagcctactttttgttttgttttgttttgttttgttttgacacagaggcttcctctatcacccaggctggagtgtagtggcacaatctcagctcactgcaacctcggcctcccaggtttaagcgattctcctgcctcagccccctgagtagctgggattacaggcatgcaccaccatacccggytaatttttgtatttttagtggagacagggtttcactacgttggccaggctggtctcgaactcctgacctcaaatgatctgcctgcctcggcctcccaaagtgctgggattacaggcatgagccaccgcacctgacctaagcctacatttcttcatttttaaagtggagatattattagtcccttctctagaagatgaaatagcacaggtgaagcactcaccccagtgcctgaccacagtaactttgcagataaattgtataactgttacggcttgcaagagtccattgattccagtgtgtttgaagactcctggaagacaggcttagggttccataacagaaatataacagttaaaaagcagcattgctggcctcgtattcaaatttgatgcatatgaacacacagacatagctattatggtggagtgtacactcacttcaagtctttcccttccgctactattgttcttgacattatacgcaatagaattttcctaatttggaggagattttatgtaaatcag

SEQ ID NO: 69270 - DNA, 540 bp, Homo sapiens
gagacttgggtaggaggcccggtgggacccgcgagctttctctcccagcccgatgcagcagttcattaagcggctgtgtttcctcctaactggcgaaggactcaggtgggcggagcagagctcagcttgggaggaggcggacgcgagtagctcggcagggggactcgcttggctttcgtgccatccgtggacacagtcgcgcgggtaggtgaccgggttggatttcaaagtccagcaggaaatcctgccctctgggttgcacttcctggatgagcctctgacgtctcaagcagcattgttttaatgctttgatgaagctcagcacgctgccgaaatctcggcagtattttttcttttctttttgcatgtgagagaaaggacaacaaattgcagttttatccatttgtattatttctttasaaaactcaacactctttttgttggaggtggggaaatgagaaggtgatgttttgttttgctttttttcctattttttttttttaaaggaggagaagatgacagtgttctccctaaggatga

SEQ ID NO: 69271 - DNA, 595 bp, Homo sapiens
ccttcaaagatacacagtgcctcccctaccctcatctcttaatgttctttaaggcccctttttaccatcatacaaaaaatgacttaattttctgttacatgctaaacttattcacatagctaaacttttgaaaatactatttcttcagtctggaatgttctactctagtagtccaagtaataaaatcaccctttatgatgtagcttaattattgaaatctttgagaagggtgaattttatggcatatgaaatatatcttaataacgatgctattaaaaacaacaaaacattgatgactcttttataagaaacttccctctcttaaytcattctaccatacagtcaggtacctgaaagcagatattaacacgtatacatgtacatgcacacgatactaggttagggaccaatttttttctcccttaaaaccctgcatacctacctattaactgtgtttataggtttacttgtttattttccatctagacttggagcctttaatgtggtagccattaatagcacgtggctgttgagctcttgaaagatggctagtccaaaatgagatatgctggaaatgtaaaattcacacacaaca

SEQ ID NO: 69272 - DNA, 595 bp, Homo sapiens
ccttcaaagatacacagtgcctcccctaccctcatctcttaatgttctttaaggcccctttttaccatcatacaaaaaatgacttaattttctgttacatgctaaacttattcacatagctaaacttttgaaaatactatttcttcagtctggaatgttctactctagtagtccaagtaataaaatcaccctttatgatgtagcttaattattgaaatctttgagaagggtgaattttatggcatatgaaatatatcttaataacgatgctattaaaaacaacaaaacattgatgactcttttataagaaacttccctctcttaattcattctaccatacagtcaggtacctgaaagcagatattaacacrtatacatgtacatgcacacgatactaggttagggaccaatttttttctcccttaaaaccctgcatacctacctattaactgtgtttataggtttacttgtttattttccatctagacttggagcctttaatgtggtagccattaatagcacgtggctgttgagctcttgaaagatggctagtccaaaatgagatatgctggaaatgtaaaattcacacacaaca

SEQ ID NO: 69273 - DNA, 1431 bp, Homo sapiens
gcacaaagttaatctaaggccttctctgttcaaaactgtcaggtccacagttttgattcatggaagcttctgtaggctattctataggttggtgcaaaagtaactgcagcttttgtcagtaaaagtaatgccaaaaaactgcaatttctttcgcaccaacctaatatgtacatctgaatgggctgtaagcagacatctgcccctggcaacaaccaactgatgatttttttttttttttttttttttttgagacggagtctcgctctgtcacccaggctggagtgcagtggtgctatctccgctcactgcaagctccgcctcccaggttcacgccattctcctgcctcagcctcccgagtagctggaactgcaggcacctgccactgtacccggctaatttttttttttttttgtatttttagtagagacgaggtttcacggtgttagccaggatggtctcgatctcttgacctcgtgatcttcccgcctcgacctcccaaagtgctgggattacaggcgtgagccaccgtgcctggctgatgatattttataattaaattaatccattcagacagactttctgatattcagattttaaaatgcaaaagaggatagggcagttatttgcaagataaatctctctcaatagtaagtatagttttgtataatattgtataaaaacaatgctaataacaaaatgtattgaaaattcactatattggacattgaatgttatttacattacctcattcaaactccacaagaataaagtttggattgccattctacatttacagttgagttaagtggctcagaaagtggaaacaactgggccaaagtggaggaggaattagaactcaagtctgttttgctcatttttgctaccatgtgaagctatctttagggtgtcagccataagttttgatcaggttgtcctgccactgacttgataaatcagcccctcaggaaataatctacatgcagaacttccaactgattggagaaaacagaagctcagaaccctgcatttctgtcgcataccattcttagtgtagaattggaactttcaatactggaaccctgctctgagactctgcaggcctaatcatcaacgcctcctctaggtgccagccatagaaggaccacgttgggtctggcccttatttcagggaaaaggagactttctgcccagtctccaggctgctgaatcagcctctttcttcctttggctttcagaatttactttcaaccctttatttttcagtttgatggcctcacacagactgacttttgtgaattgacagagataaaagraaataaaaacctggttatgaaccactgagtctataaactggatactttcctagatgtgtggaaaatataacagtgctagtttttttttttgttgttcctcttggactgtgagtacaa

SEQ ID NO: 69274 - DNA, 517 bp, Homo sapiens
gacgtgttcctctacattgtaaaggaccctaaagttcatctaatagtcagtgatggaacagactcagagagtggtctatttgctcaagatcccagaactagttcatagcagarctaggtaaaaattcaagtctcttgactcttaactttagcctgatattgaggccaaatgacagctttaattacgacagagaagtattaagaatgtcattttggaaaattcaaagtccactagaggaaaactcatttcagttagaggctgtttcttgcaatctatttctaattcttggtcttaggcctcccatgtgtactgacagctggtaatatatttgggtctttgaagaaagcaacaggacctgtttctttctacgcactaactgtggctaagcaacaagacctactctctactggcaacagaattggaacccttaacttcctgtcagccacagcccacactggatttccctagaattttctagaagcaaatggctaccacaggaagaaaaccatagaattca

SEQ ID NO: 69275 - DNA, 517 bp, Homo sapiens
gacgtgttcctctacattgtaaaggaccctaaagttcatctaatagtcagtgatggaacagactcagagagtggtctatttgctcaagatcccagaactagttcatagcagaactaggtaaaaattcaagtctcttgactcttaactttagcctgatattgaggccaaatgacagctttaattacgacagagaagtattaagaatgtcattttggaaaattcaaagtccactagaggaaaactcatttcagttagaggctgtttcttgcaatctatttctaattcttggtcttaggcctcccatgtgtactgacagctggtaatatatttgggtctttgaagaaagcaacaggacctgtttctttctacgcactaacwgtggctaagcaacaagacctactctctactggcaacagaattggaacccttaacttcctgtcagccacagcccacactggatttccctagaattttctagaagcaaatggctaccacaggaagaaaaccatagaattca

SEQ ID NO: 69276 - DNA, 517 bp, Homo sapiens
gacgtgttcctctacattgtaaaggaccctaaagttcatctaatagtcagtgatggaacagactcagagagtggtctatttgctcaagatcccagaactagttcatagcagaactaggtaaaaattcaagtctcttgactcttaactttagcctgatattgaggccaaatgacagctttaattacgacagagaagtattaagaatgtcattttggaaaattcaaagtccactagaggaaaactcatttcagttagaggctgtttcttgcaatctatttctaattcttggtcttaggcctcccatgtgtactgacagctggtaatatatttgggtctttgaagaaagcaacaggacctgtttctttctacgcactaactgtggctaagcaacaagacctactctctactggsaacagaattggaacccttaacttcctgtcagccacagcccacactggatttccctagaattttctagaagcaaatggctaccacaggaagaaaaccatagaattca

SEQ ID NO: 69277 - DNA, 663 bp, Homo sapiens
caaactggctctgagtaatgcctttatgagtctgaccacatcctcccctttcattgccaaaaacaaggggccagagattaaccatagctcaagctccaagacttcagggaaggtgactcgcttgctgggtcagggccatatttaaggaaggctccttcaactcctttgggtcctagactagactgtgtccttcaaatcttataaaaaatgcactgtcaacagccagtcagaaaatattaatgaggtgggcaasatatgcccaccaaaaggggagggttgcaaaaattgctgagacaacactcaggagggtgatatttttgaaaaatttgccctctatttctagtgactttcatacacagttgctgctaattccctcaatgacactggaaatacttaagattctatatttggtttcacaaaattaagcatgatttgaattagaagagatagtagtgataatctaggccaatcccagcccttttgtttttctgaagagatgtaggggattttatttttctggctgcccaacaatcaatgtcatcttgttaaccagactcccgttttcctttgtgagtttgtggtagacagaattctaaaatggcccctaagatttgtgtgccctaatatatattccttgtatgatcctctttgcctgagcatgca

SEQ ID NO: 69278 - DNA, 2184 bp, Homo sapiens
atgtactgtagtatgtaagagcttaccactggggaagctgcgtgaagagtgcacaggacatctcggtactaattttgcaactttctgtgcatctttagttatttgaaaacaaaaagagaagaaaaaaaaagaggaggaggcaggacattaaaaaatataaccttatggatgggcttggtggctcacgtctgtaatcccagcattttgggaggccgaggccggcggatcacgtgagggcaggagttcgagaccagcctagccatcatggcgaaaccccatctctactaaaagtacaaaaattagccaggcgtggtggcaggcgcctgtaatcccagctactcaggaggctgaggcaggagaattgcttgaacccgggaggcggaggctgcagtgagcagagatcttgccacttcactccggcctgggcaaaagagtgaaactctgtctcaaaaacaaaacaaaacaaaacaaaacaacaacaaaaaactccttattcaaaaatcgaggccattccagataaaggaactctctttatatctacagttttggctccaaactttattgtggcttcgtaccttagtgaactggattagtgagcatgtgtgattgcagtgactgcctaaaaaagagacagggcagcctgccctgtcccatgagtccttcccgttgggcttccataaaaggggtgaagtgtccttccccagcaggaggcggcattgagtaattctcatgacaccagccttaaagaaggacttacttggcctgcagtctgccacacacatctccctcagggccccagcagggcctctgcagctrgtaggtgcttaatggaggattttaggattttgcatcttggttatctcatctttgaggactcgacctacatctggcaagtctaggagatggaattgaggagggcatatgcacagagtactgggaattagagagctgagtcactggagagtctcgaacctcagagcagctgcctttctcttggactcaggccaagattgagggagactgacgacatattgcatctcacaggttcccaggggcacaaggctatttgcgaccacagcagctccgtttggctaaggaggccttgggtttctgagggataggaagaatcagagcagagaagagcagatggaatggtgaccgacgtagggccctgaagtttacttagggttgtcttctagaaatgtgaggtgctgtgtttacaaaaaaagcatagcttgcactgctctcagtctcaggttcccaggggaaagggctaaataaggacaatctgcaatgcattggaaggaaaaactgagaggcttatacatttatgagaggtatccccactatgtatttgtaaatcttccagaatgtaggaatgtccagatgccattaaaaaaaaaaagactaactgtatttattcatttatctatttttattgacattgtaattgtatatattcagatgccctttttttttttttgagatggaattttgctcttcttgcccaggctggagtgcaatggcatgatctcagctcactgcaacctccgcctcctgagttcaagcaattctgctgcctcagcctccggagtagctggggctgggactacaggcatgcaccaccatgcccagctaatttttctgtactttagtacagacggagtttcgccatgttggccaggctggacttgaacccctgacctcaagtgatcctcccgccttggcctcccgaagtgctgggattacaggactgagccacctcgctcagacttttttttttttttaaatggaacccttcacaaatttgtgtgtcatccttgagcaggggccatgctaatcttctctgtatcagatgccactttcatttttagacggagtctcactctgttacccaggcacctgccaccatccccagctgatttttttgtatttttagtagagacagggtttcaccatgttggtcaggctggtctcaaactcctgacctcaggtgatccacccaccttggcctcccaaaatgctgggattacaggtgtgagccaccgctcctggcctttttgttttttaaactcagcactcatcttagtattctaatatattatctcctaaataagtttttatttaactatttaaaatttttatcagatttatacagatatgtaattttaaaagccaaatata

SEQ ID NO: 69279 - DNA, 632 bp, Homo sapiens
atgacatttccgttgtttggtgagaagctcctcagctccctggtatacagcctcccattttgcaactaactgataaatctgacttcatgggactatacatttgctcctgcactcttggtcgattggactagggtacaagtgactctccagacccctctccatgctaatagtctagtggcccttcttccgtcaattctaatcctcctcgtgatctatcttctcaggaaagctctgcccatttccatgctcagtcactcacaggcaaaacctcagtcctactgacaatccaacaccaaccatgactacagccagggaaatgagcatgatggcctggggctgtaaatgtccactcagtttgatcacatgtttggatgtgtggctcacgctaactgtatttgtgcctgtggacattgggcctgtttactgggaggtgttgctggttggctcacgggtggatcctgtagtggtcctgaagctgggggctgaggtggtagatgatgctcccatagtggatgtacccaggtcagaggtgtttgagactattccsgtcacaggatggctgcagcagaggccatggagtccattccaggggccatggtgacagagctaggggcggtaggactggttccagg

SEQ ID NO: 69280 - DNA, 1442 bp, Homo sapiens
tttatctagttaaaaagaacacctggctgggcacggtggctcacgcctgtaatcccaacactttgggaggctgaggagggaggatcacctgaggtcatgaattcgagaccagcttggtcaacatggtgaaaccccatctctactaaaatacaaaaaatagctggggtggtggtgtgtgcctgtaatcgcagctactcaggaggctgaggcaggagaatcgcttgagcccgggagacagaggttgcagtgagctgagattgtgccgttgctctccagcctgggcaacaagagtgaaactctgtctcaaaaaaaaaaaagaacacctctggtatttttattttttacaagttaaattaagattagcccggagggatgataactttatgatgatcaatgtatgtattcgagaaatatttcaggtttttaaagtatttaagtgtttgttacatataggtatcacacatttcaaagtaagttcattccagagtattttatctttttgttgatattataaatagtatcttttcttctgttatatcttctacctaaatgttgatttggatacatgaaaactatttacttcttcctatagctattttattctgcatgttagggtagaaaacaaaactgtaataatggagaaaactgtaaatgagatgactcaaacaaaatagtttatttccatctcaacagtcctgggtaggtttatcaagatggtgagtggttgtactctatgaagtcacttagggatgcatgctattagaagttcttctatcttcaacatgtgattacaagatcaatttgcttcaaccaatgatgaagggtttcaagaagggctgaagttcaaggtctctttaatctgtgaggtgactgtttcatttatcacaacttatattcctttgtcaagaccctagtcacatggctacatctaactgcaaagagggctaggaaatgtggtccggccaggtctcagctatactttatttgtttgagagaaggaaaatggattttgtggtcagttagaagtcattacacagaccagcaatggtcaccaataatccacatatactctacttttcacatttagaaaaaactcacctcaccccctagggaaatatctcatccagttatgacatccagctcaaaatccaggatctttaggtgacatgcagttttctattggatatacacttgagtcctcatggcccagtgacccataaagtaataaaatctaaattatcacyctctaccacgtaaacacagataatatacaatggtgaagtgagaacaggataatggcaaaagaaactcttatttaaaaaacagaaacacacaatcattggcccacagcaatgattaaatcttactgggtaggaatcctaaattatccttgccctctcaatggagtaagttccaagcttagtccatctgactatcactgg

SEQ ID NO: 69281 - DNA, 1269 bp, Homo sapiens
caaatgataggtaagtttattataaaagcagaaataaggaaaatgcgattttccaccatgagccaggccccgtgagaagctatgtcaggcgtgagcgagttggtggggtcaccactcgttcctgtaggaagaactagagattccaaaaatgctgataacaatcacacacatagaacttattttggccaaacaccataataaatatttgtatatattaactcatttaatcctcacaacaacctcaggaggtaggtgcccatcttgtacataagagaactgagacatgtggaggccgagcagctggtctcaaatcagctgatagtaagtcgcagagccagcatttgaagtcttgtggtttggctcccgagtctgtgctcatgaccattatgcagtggtatgttgtatgcccaggacctaccggtaagaagtgggctcgaagtccaaagaagcgtgaagactggatattcctgcggcctctcagcagcatgggtcatggacacctgttccaatacatcgtggctgcacatgcatctctgattctctctgtgtctgctcttcttgccaactaatgacacattcatcatggatcccttctgaatctccgagaggacctgatggtttcagttaattactattgtccctctttgataaggtcttccttgacaggtgacctcatagacttgtttggccaattatctgctgttcagactcccacccctggcctgatcatctgyggtgacgtcagaagggaccaaggggggcctggaaggcatcttcagtataactgaattctctcctgaggagagaccctgggggctgtcagtctcctcctactcctagtacaagttctcttggtgacattaactccatctgggatgcagaaattgctagctgtcactttcaggggtgttctttccttggctaatgtcttgctcttagatttgggatcttatgtttctctgagatctgcagcttcttgccaaataactataccttttttctgaacatctgcactaggctctttctcctcccctctccttccagcccccaactctctgtcccagtccttcttgtgcaaacgatccagactggctttcattaaacaccacttctcccttcattcctgactcagaaacctcactatgtcttggtgtcatccatttagcctgttgacttctcgtcttccccattcctgaacattccagcctaaccaggttggtttcctcacactcctacaaaggtaccgtggctttttcctacctctatgct

SEQ ID NO: 69282 - DNA, 1269 bp, Homo sapiens
caaatgataggtaagtttattataaaagcagaaataaggaaaatgcgattttccaccatgagccaggccccgtgagaagctatgtcaggcgtgagcgagttggtggggtcaccactcgttcctgtaggaagaactagagattccaaaaatgctgataacaatcacacacatagaacttattttggccaaacaccataataaatatttgtatatattaactcatttaatcctcacaacaacctcaggaggtaggtgcccatcttgtacataagagaactgagacatgtggaggccgagcagctggtctcaaatcagctgatagtaagtcgcagagccagcatttgaagtcttgtggtttggctcccgagtctgtgctcatgaccattatgcagtggtatgttgtatgcccaggacctaccggtaagaagtgggctcgaagtccaaagaagcgtgaagactggatattcctgcggcctctcagcagcatgggtcatggacacctgttccaatacatcgtggctgcacatgcatctctgattctctctgtgtctgctcttcttgccaactaatgacacattcatcatggatcccttctgaatctccgagaggacctgatggtttcagttaattactattgtccctctttgataaggtcttccttgacaggtgacctcatagacttgtttggccaattatctgctgttcagactcccacccctggcctgatcatctgtggtgacgtcagaagggaccaaggggggcctggaaggcatcttcagtataactgamttctctcctgaggagagaccctgggggctgtcagtctcctcctactcctagtacaagttctcttggtgacattaactccatctgggatgcagaaattgctagctgtcactttcaggggtgttctttccttggctaatgtcttgctcttagatttgggatcttatgtttctctgagatctgcagcttcttgccaaataactataccttttttctgaacatctgcactaggctctttctcctcccctctccttccagcccccaactctctgtcccagtccttcttgtgcaaacgatccagactggctttcattaaacaccacttctcccttcattcctgactcagaaacctcactatgtcttggtgtcatccatttagcctgttgacttctcgtcttccccattcctgaacattccagcctaaccaggttggtttcctcacactcctacaaaggtaccgtggctttttcctacctctatgct

SEQ ID NO: 69283 - DNA, 1269 bp, Homo sapiens
caaatgataggtaagtttattataaaagcagaaataaggaaaatgcgattttccaccatgagccaggccccgtgagaagctatgtcaggcgtgagcgagttggtggggtcaccactcgttcctgtaggaagaactagagattccaaaaatgctgataacaatcacacacatagaacttattttggccaaacaccataataaatatttgtatatattaactcatttaatcctcacaacaacctcaggaggtaggtgcccatcttgtacataagagaactgagacatgtggaggccgagcagctggtctcaaatcagctgatagtaagtcgcagagccagcatttgaagtcttgtggtttggctcccgagtctgtgctcatgaccattatgcagtggtatgttgtatgcccaggacctaccggtaagaagtgggctcgaagtccaaagaagcgtgaagactggatattcctgcggcctctcagcagcatgggtcatggacacctgttccaatacatcgtggctgcacatgcatctctgattctctctgtgtctgctcttcttgccaactaatgacacattcatcatggatcccttctgaatctccgagaggacctgatggtttcagttaattactattgtccctctttgataaggtcttccttgacaggtgacctcatagacttgtttggccaattatctgctgttcagactcccacccctggcctgatcatctgtggtgacgtcagaagggaccaaggggggcctggaaggcatcttcagtataactgaattctctcctgaggagagaccctgggggctgtcagtctcctcctactcctagtacaagttctcttggtgacattaactccatctgggatgcagraattgctagctgtcactttcaggggtgttctttccttggctaatgtcttgctcttagatttgggatcttatgtttctctgagatctgcagcttcttgccaaataactataccttttttctgaacatctgcactaggctctttctcctcccctctccttccagcccccaactctctgtcccagtccttcttgtgcaaacgatccagactggctttcattaaacaccacttctcccttcattcctgactcagaaacctcactatgtcttggtgtcatccatttagcctgttgacttctcgtcttccccattcctgaacattccagcctaaccaggttggtttcctcacactcctacaaaggtaccgtggctttttcctacctctatgct

SEQ ID NO: 69284 - DNA, 1269 bp, Homo sapiens
caaatgataggtaagtttattataaaagcagaaataaggaaaatgcgattttccaccatgagccaggccccgtgagaagctatgtcaggcgtgagcgagttggtggggtcaccactcgttcctgtaggaagaactagagattccaaaaatgctgataacaatcacacacatagaacttattttggccaaacaccataataaatatttgtatatattaactcatttaatcctcacaacaacctcaggaggtaggtgcccatcttgtacataagagaactgagacatgtggaggccgagcagctggtctcaaatcagctgatagtaagtcgcagagccagcatttgaagtcttgtggtttggctcccgagtctgtgctcatgaccattatgcagtggtatgttgtatgcccaggacctaccggtaagaagtgggctcgaagtccaaagaagcgtgaagactggatattcctgcggcctctcagcagcatgggtcatggacacctgttccaatacatcgtggctgcacatgcatctctgattctctctgtgtctgctcttcttgccaactaatgacacattcatcatggatcccttctgaatctccgagaggacctgatggtttcagttaattactattgtccctctttgataaggtcttccttgacaggtgacctcatagacttgtttggccaattatctgctgttcagactcccacccctggcctgatcatctgtggtgacgtcagaagggaccaaggggggcctggaaggcatcttcagtataactgaattctctcctgaggagagaccctgggggctgtcagtctcctcctactcctagtacaagttctcttggtgacattaactccatctgggatgcagawattgctagctgtcactttcaggggtgttctttccttggctaatgtcttgctcttagatttgggatcttatgtttctctgagatctgcagcttcttgccaaataactataccttttttctgaacatctgcactaggctctttctcctcccctctccttccagcccccaactctctgtcccagtccttcttgtgcaaacgatccagactggctttcattaaacaccacttctcccttcattcctgactcagaaacctcactatgtcttggtgtcatccatttagcctgttgacttctcgtcttccccattcctgaacattccagcctaaccaggttggtttcctcacactcctacaaaggtaccgtggctttttcctacctctatgct

SEQ ID NO: 69285 - DNA, 1269 bp, Homo sapiens
caaatgataggtaagtttattataaaagcagaaataaggaaaatgcgattttccaccatgagccaggccccgtgagaagctatgtcaggcgtgagcgagttggtggggtcaccactcgttcctgtaggaagaactagagattccaaaaatgctgataacaatcacacacatagaacttattttggccaaacaccataataaatatttgtatatattaactcatttaatcctcacaacaacctcaggaggtaggtgcccatcttgtacataagagaactgagacatgtggaggccgagcagctggtctcaaatcagctgatagtaagtcgcagagccagcatttgaagtcttgtggtttggctcccgagtctgtgctcatgaccattatgcagtggtatgttgtatgcccaggacctaccggtaagaagtgggctcgaagtccaaagaagcgtgaagactggatattcctgcggcctctcagcagcatgggtcatggacacctgttccaatacatcgtggctgcacatgcatctctgattctctctgtgtctgctcttcttgccaactaatgacacattcatcatggatcccttctgaatctccgagaggacctgatggtttcagttaattactattgtccctctttgataaggtcttccttgacaggtgacctcatagacttgtttggccaattatctgctgttcagactcccacccctggcctgatcatctgtggtgacgtcagaagggaccaaggggggcctggaaggcatcttcagtataactgaattctctcctgaggagagaccctgggggctgtcagtctcctcctactcctagtacaagttctcttggtgacattaactccatctgggatgcagaaattgctagctgtcactttcaggggtgttctttccttggctaatgtcttgctcttagatttgggatcttatgtttctctgagatctgcagcttcttgccaaataactataccttttttctgaacatctrcactaggctctttctcctcccctctccttccagcccccaactctctgtcccagtccttcttgtgcaaacgatccagactggctttcattaaacaccacttctcccttcattcctgactcagaaacctcactatgtcttggtgtcatccatttagcctgttgacttctcgtcttccccattcctgaacattccagcctaaccaggttggtttcctcacactcctacaaaggtaccgtggctttttcctacctctatgct

SEQ ID NO: 69286 - DNA, 1376 bp, Homo sapiens
cacacagattcacacacacgggcacacacacacaggcacacacacacacacacatgcagcctgagtgagcgttgtgggacaggctgacttcaggggtggagtaacaggagtctctcagttccttctcagtggactttgtctctttttcctggaggtggaggagactgtactccatgaggggaagtcctctgaagaaggggggagatactcaggagcggggtccagagatggacagggatggagaagtggagacaaagcggagggggcggggcaagaagggagcccaygaggaatggggagagggaggaccttctagaggtcagaaatatcacacgcagaatttggttctttgtttttgtgttttattaagatggatttagtaaaccagccgaagtgcaagatatggagtctacatagcaaaggacacgtcttagtctcctgctagtttgaactcatcagtagtagctaggagaagagtgccagaagccttgcgtggggcgcgcaacgcccctttgcagcgaccccattctctgcatcccacggacctccccaccagggaccatgttggtcccctcccacccaacaggaaggaaaggaagaagtctgaaggctttggatcctccctagcgcactttttctcgccatttattcccagagtgtccttgcctccgctccgctatcccaaccccactataacaaagcacatcctgcgcgctggggccagaaatcctcctttggcctctgactcactggtgccatttcactgtgtcctgtccttccggccattgtcactgggtgaagccccagagagcttgagcttggagcccaagagagctggattcttagagcgtagctgtccgcacaaacattcttttttttttttggtctttattattattattattattattattattattattattattatactttaagttttagggtacatgtgcacaatgtgcaggttagttacatatgtatacaggtgccatgatggtgtgctgcatccattaactcgtcatctagcattaggtatatctcctaatgctatccctcccctctccccccaccccacaacaggccccagagtgtgatgttccccttcctgtgtccatgtgttctcattgttcagttcccatctatgagtgagaatatgtggtgtttggttttttgtccttgcgatagtttactgagaatgatgatttccaatttcatccatgttcctacaaaggacgtgaactcatcattttttatggctgcatagtattccatggtgtatatgtgccacattttcttaatccagtctatcattgttggacatttgggttggtttcaagtctttgctattgtgaatagtgccgcaataaacatac

SEQ ID NO: 69287 - DNA, 1376 bp, Homo sapiens
cacacagattcacacacacgggcacacacacacaggcacacacacacacacacatgcagcctgagtgagcgttgtgggacaggctgacttcaggggtggagtaacaggagtctctcagttccttctcagtggactttgtctctttttcctggaggtggaggagactgtactccatgaggggaagtcctctgaagaaggggggagatactcaggagcggggtccagagatggacagggatggagaagtggagacaaagcggagggggcggggcaagaagggagcccacgaggaatggggagagggaggaccttctagaggtcagaaatatcacacgcagaatttggttctttgtttttgtgttttattaagatggatttagtaaaccagccgaagtgcaagatatggagtctacatwgcaaaggacacgtcttagtctcctgctagtttgaactcatcagtagtagctaggagaagagtgccagaagccttgcgtggggcgcgcaacgcccctttgcagcgaccccattctctgcatcccacggacctccccaccagggaccatgttggtcccctcccacccaacaggaaggaaaggaagaagtctgaaggctttggatcctccctagcgcactttttctcgccatttattcccagagtgtccttgcctccgctccgctatcccaaccccactataacaaagcacatcctgcgcgctggggccagaaatcctcctttggcctctgactcactggtgccatttcactgtgtcctgtccttccggccattgtcactgggtgaagccccagagagcttgagcttggagcccaagagagctggattcttagagcgtagctgtccgcacaaacattcttttttttttttggtctttattattattattattattattattattattattattattatactttaagttttagggtacatgtgcacaatgtgcaggttagttacatatgtatacaggtgccatgatggtgtgctgcatccattaactcgtcatctagcattaggtatatctcctaatgctatccctcccctctccccccaccccacaacaggccccagagtgtgatgttccccttcctgtgtccatgtgttctcattgttcagttcccatctatgagtgagaatatgtggtgtttggttttttgtccttgcgatagtttactgagaatgatgatttccaatttcatccatgttcctacaaaggacgtgaactcatcattttttatggctgcatagtattccatggtgtatatgtgccacattttcttaatccagtctatcattgttggacatttgggttggtttcaagtctttgctattgtgaatagtgccgcaataaacatac

SEQ ID NO: 69288 - DNA, 641 bp, Homo sapiens
tcccttgagcccaggaggtcgacactgcagtgcatggtgatcatgccactgcactccagcctgggtgacagagyaagaccctgtctcaaaaatagtaatatgatgatgataaatttagagcaaatgcaaattaacgtgtaataatacatcctctcttgtgaaaatgtattagttatttactattgtgtaacaaattatgtaaaacttagcagctcaaaacagcaaatattcatcatctcccacagtttctaatggtcaggaatccaggagcggttttcctgagtgcttctggctcagggcctctcacaaggttgcagtccagttgtcagcctagggctgcatcgtctgagggcttcactggggctgaggattcacatgaaacatggcttagtcacatggctgttggaaaagcctagttccttgctgtctggtcccaggggacctcagttcttagccacatggaccttcctgcagggctgcttatggcacagcagctgggtccccaagagctcatgatcccagagacagagagagagaaggtggaagccatagtgagtttcacattctacacccagagtcacaaactgttatgtcagcattactctatcagttagaagttgtattagtctgttctcacactg

SEQ ID NO: 69289 - DNA, 641 bp, Homo sapiens
tcccttgagcccaggaggtcgacactgcagtgcatggtgatcatgccactgcactccagcctgggtgacagagcragaccctgtctcaaaaatagtaatatgatgatgataaatttagagcaaatgcaaattaacgtgtaataatacatcctctcttgtgaaaatgtattagttatttactattgtgtaacaaattatgtaaaacttagcagctcaaaacagcaaatattcatcatctcccacagtttctaatggtcaggaatccaggagcggttttcctgagtgcttctggctcagggcctctcacaaggttgcagtccagttgtcagcctagggctgcatcgtctgagggcttcactggggctgaggattcacatgaaacatggcttagtcacatggctgttggaaaagcctagttccttgctgtctggtcccaggggacctcagttcttagccacatggaccttcctgcagggctgcttatggcacagcagctgggtccccaagagctcatgatcccagagacagagagagagaaggtggaagccatagtgagtttcacattctacacccagagtcacaaactgttatgtcagcattactctatcagttagaagttgtattagtctgttctcacactg

SEQ ID NO: 69290 - DNA, 641 bp, Homo sapiens
tcccttgagcccaggaggtcgacactgcagtgcatggtgatcatgccactgcactccagcctgggtgacagagcaagaccctgtctcaaaaatagtaatatgatgatgataaatttagagcaaatgcaaattaacgtgtaataatacatcctctcttgtgaaaatgtattagttatttactattgtgtaacaaattatgtaaaacttagcagctcaaaacarcaaatattcatcatctcccacagtttctaatggtcaggaatccaggagcggttttcctgagtgcttctggctcagggcctctcacaaggttgcagtccagttgtcagcctagggctgcatcgtctgagggcttcactggggctgaggattcacatgaaacatggcttagtcacatggctgttggaaaagcctagttccttgctgtctggtcccaggggacctcagttcttagccacatggaccttcctgcagggctgcttatggcacagcagctgggtccccaagagctcatgatcccagagacagagagagagaaggtggaagccatagtgagtttcacattctacacccagagtcacaaactgttatgtcagcattactctatcagttagaagttgtattagtctgttctcacactg

SEQ ID NO: 69291 - DNA, 641 bp, Homo sapiens
tcccttgagcccaggaggtcgacactgcagtgcatggtgatcatgccactgcactccagcctgggtgacagagcaagaccctgtctcaaaaatagtaatatgatgatgataaatttagagcaaatgcaaattaacgtgtaataatacatcctctcttgtgaaaatgtattagttatttactattgtgtaacaaattatgtaaaacttagcagctcaaaacagcaaatattcatcatctcccacagtttctaatggtcaggaatccaggagcggttttcctgagtgcttctggctcagggcctctcacaaggttgcagtccagttgtcagcctagggctgcatcgtctgagggcttcactggggctgrggattcacatgaaacatggcttagtcacatggctgttggaaaagcctagttccttgctgtctggtcccaggggacctcagttcttagccacatggaccttcctgcagggctgcttatggcacagcagctgggtccccaagagctcatgatcccagagacagagagagagaaggtggaagccatagtgagtttcacattctacacccagagtcacaaactgttatgtcagcattactctatcagttagaagttgtattagtctgttctcacactg

SEQ ID NO: 69292 - DNA, 641 bp, Homo sapiens
tcccttgagcccaggaggtcgacactgcagtgcatggtgatcatgccactgcactccagcctgggtgacagagcaagaccctgtctcaaaaatagtaatatgatgatgataaatttagagcaaatgcaaattaacgtgtaataatacatcctctcttgtgaaaatgtattagttatttactattgtgtaacaaattatgtaaaacttagcagctcaaaacagcaaatattcatcatctcccacagtttctaatggtcaggaatccaggagcggttttcctgagtgcttctggctcagggcctctcacaaggttgcagtccagttgtcagcctagggctgcatcgtctgagggcttcactggggctgaggattcacrtgaaacatggcttagtcacatggctgttggaaaagcctagttccttgctgtctggtcccaggggacctcagttcttagccacatggaccttcctgcagggctgcttatggcacagcagctgggtccccaagagctcatgatcccagagacagagagagagaaggtggaagccatagtgagtttcacattctacacccagagtcacaaactgttatgtcagcattactctatcagttagaagttgtattagtctgttctcacactg

SEQ ID NO: 69293 - DNA, 1432 bp, Homo sapiens
gtcagttttgataaaagcgttttcctcttgcttttcctcgatatgttcagaaccatcatattggtagcaagtttcatgtcctgtagttttcttaaccaaccccctgctagtggacatttaggttagtctcagttttttccttctgtaaataaagctgcactgagcaagaagtgactgatgccaagtgactagatgaccttaggtatgacctctctgggtcttggtttcttggtctaaaaacaaaatgacaggattcgactgggtgattaaaatctcctctgatctacataggaattgttttcaagacatttctgcattcctctagtgacagggtgctcactacctcatgagtatttcagtgacaactgtaatggtcaataaagtatccactttccacctccctgcagctcctggccctggctttattctctggggctccacacattcagtttacactcagtggccagtggctgggaccattgtagaaaataaggaaactccaattccttccttcttttcttcctctttcatctcttcctccctctctacatccctctctctcttccttccttcctcgacacttaccatgtaccagaccttctgccaggcacatggatgggacacagggaagttggctgcagggttagactaagtcccaagccccctaaagctcatgccaggggactggactgtccagtactgagggatggggatgctgaggctggtggccttcctcaaatgcactgtagtgccccagacagagtcctgggctgccctgtgaggaggtgaccagaggtagagcaacttcaccctaaggctggatcaggatcccctccaggtttttactagagccaaacccacatctcctttctcttctgccacccccccttaaaatgcttagaaacacatagatttaaatacaaattcaaatgtaagtaatttcaactgtgtaactatgaggagtcagttctacgtgggtcctatctgtatcctccccagggctcagctccattctttgctttcattcattctcattcaatacattgttgttaagagctcactgggtgccctctctgtcatgtagtaaggttttaaaaagaagcctcttctgagcttcagtttccttattcataaaataggagtattgatccgttccttgcttttcttacaaggatatgctgaagatgactgaagtacagagtaaagaaggttatgtttgggtgtcaaaggaatagaatgccctctttcaaactgagcacagcaggaacctgtaacaggaacacagcaacttgttgaatgaatgacaatattggaaaacatacatttcctcccctccccatcatagtccctctgcttccgtgttaactccatagagaggccagcacaaccagccttgcagcctgagataaggcctttggcgggtgyctcccct

SEQ ID NO: 69294 - DNA, 738 bp, Homo sapiens
ttgagtacacgtttagagaacgtaccatgaaattaatgtttagaataatccatggctccagaggctccatcaccccccaaatagtacatatttagagaattaataaagaattttctaaacatccccaagaaaaaaaaattatttttaattactaatcaggaaagccctgggtgtaagtcagatttaccactgactgggtgtgtgtctgagcaagttacctgtttcttcatatgtaagctggagattataataattaataggaactgcttattaaggttgttgggaatattaagtgagataatgaatgaaaagtgttcacctaccawacaagtgtcctaaaacctttttttttttcctcttcaggctattaaagaagcatttagatactttccttaaaggcaagagtggactgagggtattttttcctctttgcggaaaagcggttgagatgaaatggtatgagcagataaacattaacagaattatcttgccttaatgatgaattctttgggtgatttaacaggatgtgagttttaaaactccattttcaggaaatacacagaaattccttatttttctattagtgatgggtatataattggaaataatattctcaaacagtaagaaacaacagaaacaggtatgaagtctttctggattgagttttgaaattaaaaaatcagtttggagccaatggggggagaaaaaacagccttcccttttacatttcctggatcc

SEQ ID NO: 69295 - DNA, 757 bp, Homo sapiens
ctttaaaatacagattcccaaggcatgcccccagggcttggtttaagaaccctgcatttgacacaagcacttcgggtacctcggaaaggagtgtcctgcaaccacactgcaagaaacatttttcagttgttcaagctttcctgtttccccagatcttcaaataatttactattctcccccatgcttcctcctctgaaaacatactccaaaaagggagggaggaaagaaggaagggagggaaaagaggaagatgagagaaaggacaacatttcctgagcatctatcctgggcttttatacacagctccacactgtcacttcaaggcaactattattctgcccatttcagagatgtggaaactgaggctaagactatcagcaacccacccaaggccatgtaaaagtggaggacaaggaatttagacctgggtcctgggtctggagctgcttcccccagatccttccttctcaccagacatactgatcaacagaccaacacatagaacttcyagcttaacggagggtccaacttgcctagaaagtgatggtctcttaccaaagagagttcaagactcgtacctggaatagaaagtctttcatttttttcatatcagaaaaaaaaaaacaaataaagaaaaaattactcattctcccagtattaaatttgtgcaccaacaccctttggccttttttgctttgatagtgtatttttttctgcacttggctttgaagtcactaaaaagataaactgaatgcag

SEQ ID NO: 69296 - DNA, 598 bp, Homo sapiens
atctgtatataagtaacccatttctctgaaagcatttaaacctcttatactccaccaaacacagtgcttttatttgaaataaatgtatccagctctttggggaacatatggtatatttctctcttattaataattcagttcaaatgagcaaaaattagttggtgcagttacggctgattttgtcctgaaaagatctgcattaattttagacgttttgtaaattgggctattaaataaaagcattatatgtgaattaccctttaaattttaagcaacttggtagtttaatggyattttctagtcagattcattttcaatctctaaaaaattatagtcattatggtaagacaaatttttaaaagctgtgccttctatccaattacatattgtactaataagtaaactagcaaactttcatgttctcctttcagtgttgtcctgcttggccacatcttttgatggcatctgtcttctgagatgttccctggagggaggttggtcctaactgagcagctccaataaagaagcggactccaagggagctgagttcatctgggaggggatttgtcatggcgccctgcagcatgtcttttggagg

SEQ ID NO: 69297 - DNA, 518 bp, Homo sapiens
ctaaagactccaataagttagcgtgtgggtgggtggctccagatagtgtctggaagaccacatcattttctttttgtaacagctttgtcgaggtatgattgataaagaattgcacctttaatgtgtacagtttgatgagtttagacaattggatgagtttgtgcaaaacgataccatcatgtatgtgaccctttgtaatctggtttctgcttaattgttttccctttcactttctgttactatcttcttaccttatgctttaggtattaggaaaatctgttttctcaagttcctttgcacacacacttgcctttgcctgaaacacttaggctttcctttgatgacttgatgagttcctgcacgtccttcaacactcaccctgtgttaatcatagatgatacyttccctgatgcaagtattttaaggagaggaatgaagaaagctcttggaatcagagagaagagagattacttctggttgtaataaaattccccacatctttgttcccatgacagatg

SEQ ID NO: 69298 - DNA, 482 bp, Homo sapiens
atggtggctcatgcctgtaatcccagcactttgggaggccgaggcaggcgatcacctgaggtcaggactttgagacaagcctggccaacaggtgaaaccctgtctctactaaaaagacaaaaattagccaggcgtggtggcaggtgcctgtaatcccagctactcaggaggctgaagcacgagaatcacttgaacctgggaggcagaggttgcagtgagttgagattatgccatcgcactctagcctggacgacagagcgagactcagtcacacacacacacacacacacacacacacacacacacacacacacgataaaattatgaaaaattttgagatggcaatagaagaacattaaaccaagcctgaggtctttctgagcatgggcccagcrgagctggccctaccttcgcatttgctatcatcactctactttaggaaagagcccaacccaatcttaatttacttatgtaggtatgca

SEQ ID NO: 69299 - DNA, 730 bp, Homo sapiens
tctctttgtcaccaaactgaagtatactggcaagaacatggctcactgcagactcaaccacctgggctgaaggagctaatgctcccatctcagcctcctgagtagctgagaccacaggtgtgtgccattatgcctgggtaattaaaaaaggttttttcatagagataggggccttgtcatgttgcccaggctggtcttgaactcctgggctcaggtgatcctcccgcttgagctgggattgcaggcatgaaccactgcgcctggcctgttgtgctatttcttttcttttcttttcttttttttgagatggagtctccctctttcgcccaggcggaactgcagtggcgcgatctcggctcactacaagctccgcctcccgggttcacaccattctcctgcctcagcctcccaagtagctgggactacaggcgcctgccaccgcgcccggctaattttttgtatttttttagtagagacggggtttcaccrtgttagccaagatggtcttgatctcctgacctcgtgatccacctgccttagcctcccaaagtgctgggattacaggcgtgagccaccgcgcctggctgtgctatctctattctatggaacttaatgatattttcttgtgacctaaaatataattaattttaagaatattccatatgtacttaagaagaaagtgtgtgtgtgtgtgtgtgtgtgtgtgtgtgtgtatgtgtgtgtgtgtata

SEQ ID NO: 69300 - DNA, 581 bp, Homo sapiens
tcctcctctcacatcactgagtccctgtcctggaaacaccctacaggtggacaatctccccatagtatggaagtttccaaaatggctccacagggaagagttgagctgaacacacccactctttctcatgggcatcaaatatatctaatttttctggggaaatcatcaatttctagctggaatcctgattaatcgacagactgtgagaattaaaaattttaaaaatattcagacatatccagagtccagtayttaaattctctggaattttgtgagccaatctttaaacatagttattattgtagtttagagttcatgaacctgaattaaatagattctagtaaacataaagtgccttagttgtctattgttgcataaaaattactcctaaaattaacatattcttaatgagaacacatatgcattaatctgttttcgcactgctataaagaaataccttatttataaaagaaagaggtttaactggctcacagttccacatggctggggaggcctcaggaaacttacaatcatggtagaaggcaaaggagaagcaagaactttgttcacaaggtggcagg

SEQ ID NO: 69301 - DNA, 581 bp, Homo sapiens
tcctcctctcacatcactgagtccctgtcctggaaacaccctacaggtggacaatctccccatagtatggaagtttccaaaatggctccacagggaagagttgagctgaacacacccactctttctcatgggcatcaaatatatctaatttttctggggaaatcatcaatttctagctggaatcctgattaatcgacagactgtgagaattaaaaattttaaaaatattcagacatatccagagtccagtatttaaattctctggaattttgtgagccaatctttaaacatagttattattgtagtttagagttcatgaacctgaattaaatagattctaktaaacataaagtgccttagttgtctattgttgcataaaaattactcctaaaattaacatattcttaatgagaacacatatgcattaatctgttttcgcactgctataaagaaataccttatttataaaagaaagaggtttaactggctcacagttccacatggctggggaggcctcaggaaacttacaatcatggtagaaggcaaaggagaagcaagaactttgttcacaaggtggcagg

SEQ ID NO: 69302 - DNA, 1644 bp, Homo sapiens
cccagcacttcagccctggggaggtcccaagtgtgccctctgccccctgtttggggtgggaggatgggtgaatctctcagcctctctccttacactccaggcagtggttggaggatgctctgagggagaacgaggcaggctcctgcttcatcttcctcgtgggaaccaagaaggaccttctggtgagcagagtggcactggtggtctgggtggcccttgggaaaatgcctccccttacagccctcattggaggagccatggggagggagggaggcagcacagtgggaagcaggcagctgcctatccccctgggcctccctgcaggagagccgggacgctgggtcaacaagggccatttctcccagtcaggggccgcatgtgagcaggccgaagcagacgctgtgcacctggccagggagatgcaggccgagtactggtcagtgtcggccaagactggtgagtgggccagggctgtcaccatggtggggcagagccctgctcttgggccagtcctgtggggcctgccatgcagtgtttccctctgtagccagtcgtctgttccctctgtggccctggtgcacactggcatcacagccctgctgtgctggtgcctggcagcactttcattgcctaagaggagctgcgtcatctctagaaggaagctgggaggcctgcctcacggatgggggaatagtgaccccaaccctgtgtcatgccgtgctggcctgttctccataaccggagaaccccataactactcataactaccccataactactcatgaggcacgttccattttagtcctgtgaagtaacttccagggccacagggtggcagggccaggatccaaacacaccctcacctgtaaccactgcactatcctgcctctggccctgaaatgccaggcatgtgacatcacctggcatagagaagggcccagtgacaggggctcccatcccttcccagtatcactgtggctcaaagaccccagctctcactgaactcactccccaccgggtctacccctggccatactgggtccccagcccaaggcaagatgcccagcatctttgagcctccatctcatctgggaagcaggtgatgccatccatctcccttttttgtgaaaaaacgttttaaattacaaaagccaggtgtatttactgaggaaaacagaaaatccaaagacacaaagagcagatggcaaacacaggttgttgggggatgaaatgaagtcatacgcagggcctggcacataataggcccccaaggctctggggactcaggaattgggcccagtagtctttaccctgtgtaagaggggacagcagatatctagtcggagactgggtgagcactgagggttggcgtcacaagtagaagcaccactttcagcccagcgcaaacaactggcagtgccttccactgctcctttccaacagtgagaactgctctgtgagaacccttcctccyttatcagagtaacagtgagttcaccgacagctcactatggaccaagcaggactgccctatgcggttgtgcaggttgctggctgcacaagggcagtgtgcgtgttaagggctggaaaccagcccgctctctgatgggcagccacctctacctggaggaggatgcataaagg

SEQ ID NO: 69303 - DNA, 803 bp, Homo sapiens
ggtcagacaccctccctagccctccctgttctcctgacacatggacctcatgggcatccatgaggtcctcatagcccaggctgggcgtcccaggctctgcagatgtgtcctggccccggctctcccagtctgcacctttgccctctctgttccagtgcctggaaggccctctcttggcttgtgtcaggccattcaggccttgaacagcaggcccagaagcttcagctcacagctctgactgtcagggccggcatcccctgcccagtgtcagctacaggattcctggttgatgctaaattacttctcccctccttacagaaatggaagggagtccgcccgagacccaggagagcaagaggccctccagcctgggctgctgctaactggrgcctgcgtggaaggcctccgctccctgcacacacacggacaggaatttccgtgactgtggtgtggagactggagcccaagctctgcagcgtgtcgccctcaagctgtaggcccatgttccagtccctccacccacccaccgggctcagctccagggcacagtcacttgtccgttgcaggttgggcactagaaaaggcccccactggctgcctgggagccccacaccaccgggccagtgcaggcactgtggtgatcccataaaaggccagtccatttgcagggtcatcagacagtcacctttggcctcaagaggcctcagaactgcaaactcctgcgtcggtctatactactcggccatggcccacatcagcagtcaaccctgcactctttcccagcgatcttggatgtgtcccca

SEQ ID NO: 69304 - DNA, 803 bp, Homo sapiens
ggtcagacaccctccctagccctccctgttctcctgacacatggacctcatgggcatccatgaggtcctcatagcccaggctgggcgtcccaggctctgcagatgtgtcctggccccggctctcccagtctgcacctttgccctctctgttccagtgcctggaaggccctctcttggcttgtgtcaggccattcaggccttgaacagcaggcccagaagcttcagctcacagctctgactgtcagggccggcatcccctgcccagtgtcagctacaggattcctggttgatgctaaattacttctcccctccttacagaaatggaagggagtccgcccgagacccaggagagcaagaggccctccagcctgggctgctgctaactggggcctgcgtggaaggcctccgctccctgcacacacacggacaggaatttccgtgactgtggtgyggagactggagcccaagctctgcagcgtgtcgccctcaagctgtaggcccatgttccagtccctccacccacccaccgggctcagctccagggcacagtcacttgtccgttgcaggttgggcactagaaaaggcccccactggctgcctgggagccccacaccaccgggccagtgcaggcactgtggtgatcccataaaaggccagtccatttgcagggtcatcagacagtcacctttggcctcaagaggcctcagaactgcaaactcctgcgtcggtctatactactcggccatggcccacatcagcagtcaaccctgcactctttcccagcgatcttggatgtgtcccca

SEQ ID NO: 69305 - DNA, 803 bp, Homo sapiens
ggtcagacaccctccctagccctccctgttctcctgacacatggacctcatgggcatccatgaggtcctcatagcccaggctgggcgtcccaggctctgcagatgtgtcctggccccggctctcccagtctgcacctttgccctctctgttccagtgcctggaaggccctctcttggcttgtgtcaggccattcaggccttgaacagcaggcccagaagcttcagctcacagctctgactgtcagggccggcatcccctgcccagtgtcagctacaggattcctggttgatgctaaattacttctcccctccttacagaaatggaagggagtccgcccgagacccaggagagcaagaggccctccagcctgggctgctgctaactggggcctgcgtggaaggcctccgctccctgcacacacacggacaggaatttccgtgactgtggtgtggagactggagcccaagctctgcagcgtgtcgccctcaagctgtaggcccrtgttccagtccctccacccacccaccgggctcagctccagggcacagtcacttgtccgttgcaggttgggcactagaaaaggcccccactggctgcctgggagccccacaccaccgggccagtgcaggcactgtggtgatcccataaaaggccagtccatttgcagggtcatcagacagtcacctttggcctcaagaggcctcagaactgcaaactcctgcgtcggtctatactactcggccatggcccacatcagcagtcaaccctgcactctttcccagcgatcttggatgtgtcccca

SEQ ID NO: 69306 - DNA, 834 bp, Homo sapiens
cactggcttctgggtgttggagactcacaggttagtgctgggggtgggttatccacagagaccccaagggacagcccacggcacccgccacctgcttaaatcctttgctctgtgtcatcctcagaccacccagtctcagctatgacctgatgcaatgtcctgctctttttaaacgctggacacttttatattacacatcttttttttttttttttttgagacagagtctcactctgtcacccaggctggagtgcagtggcatgatgttggctcactgcagcctccacctccagggttcacagggttcaagagattctcgtgcctcagcctcccaagtagctgggattacargcacgtgccaccaagcccagctaatttttgtatttttagtagagacatggttttaccatgttggccaggctggtcttgaaatcctgccctcaggtgatgcgcccaccttgggctcccaaagtgccgggattacaggcatgagcctcacaccctacatatcttacaattacctggggtttaaagtattggggggtctcatgatgccgacacaacagcttcatccctgtctgcagatctcacctctgtccaccactagagttaggggctctggcaggtggtgttgggtgccccgcgtgaagcagttcctgctgcctggccagttgagtccaagtctgtaatggagcctgatggagaagatgctttctcattgtggaggatctgtttcgtcttctggcccctctttgttcctgtccttggagttgcatggggtcatttacacacggaggccacttctaggcatggacagcagaagcggcttcatgg

SEQ ID NO: 69307 - DNA, 601 bp, Homo sapiens
aattcattccaatcatgtaaagttaacttggctccctacacactgtctcccaagctttgttttcttgctcagacactgaatcccaaggagtgatctcatcccattgtacataattttttaatagaactaaatgtaggtctttcaaaaatatatatacaaagaaaaaaatctttatttaatatgtgatacattttaggagcgggaaatagattatattcaagttatttgaaatttgaaaacaaagctgttattttatgaattaagtacaagttaatcactaacttgtccatttccatgatacatgcagattcatcagttttctggtcaagacctgagtctcagcctggaggacattatgttaagcaaaataaatcaggtctggaaagataaataccacatgttctcactcctatatgggagctaaatgaaaaatgctgagctcacagaagcagarcatagaattgtgggtatagaggctgggagggtaaggggcaggggagcttggggagaggttggttattggatacagaattatacctagatgggagaaatgggctttagtggaggctgggaagggtaagggggaggggagcttggggag

SEQ ID NO: 69308 - DNA, 719 bp, Homo sapiens
ccttgaggtcaggagtttgagaccagcctggccaacatggtgaaaccctgtctctaccaaaaatatgaaaaattagccaggtgtggtggtgcgtgcctayaatcccagctatccaggaggctgaggcaggagaatcacttgatcccaggaggcagaggttgcagcgagctgagatcatgccactatactgcagcctgggtgacagagcaaggctctgtctcagaaaaaataaataaataaaaatttaaaaagtaaaaaattgtgttaaaaccaaatcctcactgcagtggtattaagaggtgggccctttaggaagtgattgggtcatgggggctccaccctcttgaatgggattagtgcccttatgaaggaggcttgagggagtcttgccctccatgtgaggacacagaaggcgccatctacgaggagcaggtcctcgccagacactaaatctgctggtgccttgctcttggacttcctagcctccagaaaactgtgagcaataaatttctgtttgtaaattaccagtctaaggtattttgctatagcggcccaaatggactaagacaaacatactggcctttacctaaaccacctatgaaatttgaaaggctgaaatattaagaaatgagcaaaaggtaactgaaataccactaaagtcagatgccagcctatctgtgtcctttgttatttaatataacatagagtggtggtggggg

SEQ ID NO: 69309 - DNA, 719 bp, Homo sapiens
ccttgaggtcaggagtttgagaccagcctggccaacatggtgaaaccctgtctctaccaaaaatatgaaaaattagccaggtgtggtggtgcgtgcctataatcccagctatccaggaggctgaggcaggagaatcacttgatcccaggaggcagaggttgcagcgagctgagatcatgccactatactgcagcctgggtgacagagcaaggctctgtctcagaaaaaataaataaataaaaatttaaaaagtaaaaaattgtgttaaaacyaaatcctcactgcagtggtattaagaggtgggccctttaggaagtgattgggtcatgggggctccaccctcttgaatgggattagtgcccttatgaaggaggcttgagggagtcttgccctccatgtgaggacacagaaggcgccatctacgaggagcaggtcctcgccagacactaaatctgctggtgccttgctcttggacttcctagcctccagaaaactgtgagcaataaatttctgtttgtaaattaccagtctaaggtattttgctatagcggcccaaatggactaagacaaacatactggcctttacctaaaccacctatgaaatttgaaaggctgaaatattaagaaatgagcaaaaggtaactgaaataccactaaagtcagatgccagcctatctgtgtcctttgttatttaatataacatagagtggtggtggggg

SEQ ID NO: 69310 - DNA, 674 bp, Homo sapiens
caaaatcttcccagggaaaaagctgggagaaagtgggaagggaaggagggaaagggcagggggtgggtgggcagaacctgctcctgaggtggggtaggcgcccagctctgctccccactgacggcctgtctggcttcttcctccagtgctcagcattggggagggcggtttctgggagggaaccgtgaaaggccgcacgggctggttcccggccgactgcgtggaggaagtgcagatgaggcagcatgacacacggcctggtgagtgaccccacggcyccccgggcagctcccaaggggaccaccccttccagtttccctttgttctctcttggtgctaaatccacatggatattcatagagaaaagactagaggtaaactcaaacaaacactcaaagtagatgcaaacttgtgtacatgacacagacacgtgtgcacacactctgcatatacttgggaacatgcgtgtatgtaacctgacgcttcacgtgcagtggagacacataggacgtgtgtgacggggcctctgtctgtgtgatcccacattgactcccagtgacttgcaccccaccagcacagtccttcagaaacaccaggtgtgtggaacgcatgattcctgcgtagctggcagacatgtaaggaggtcagtgtgagaaaagaggcgtttttccaaa

SEQ ID NO: 69311 - DNA, 1155 bp, Homo sapiens
gggatgtctggttatatctgatttctgacctctgggcatggaggtctgtctgcagaggcccgggcccgggcacaaagggagagaggcctccattgtcccgcaggggccgaaatgcagacggtgcatccccggtgacctccgggacccttctctgatcaccaggattctcttggactctagggtccttgtcctgctcaggcatccctgccccgctctccttgagggccctcaacactatcttccctggacacaagtctggggacagccgggtgttgtggaccccaaaggggtgactcccggctcctgggccccacagagagtccatgttctcagtgcagtggctgagctggaggacgccctggaactcggagcacacagcactggcttgctgtggtacctgtgcaatcaaattgaaggcaggatcccaggaaggaacgcagcgcttgcaggatcaccgaaaaccttcttagagttgtcttgacaccactgatgtcaagtgtctgggtacttgtaggatggcctgccactcagtgcacgggcaggagcaacggggagatcccacaggcaaagtgaactgggggatgggctgaacgggctccaggcaactgagccctactggcaggtcctcggcctgggcccgaacaggaaggaggggcacagagtgcccaggtaaccgctcctgggagcagtggggaaccgtcggttgcttgaactctcgagagctgggctctgagcgtcctcgtccagccgccaactcggccaacggctaagccagcagtttcttctgttgccgggcaacgcgccttttaaacctgagggagcgggcgcgtgagcacatcacggcgcccgtgacagagcsagcttaacggattaataagcgcagccaggtacccgcgcgaggcacttgctggcaatggcgggaggcggacgtggggggtcatgcaataggtactggaaggagagaggcgggcacaaaggtcgcgggaggaacaggtgcccacaatggcggcagatctgcccgtggatcactgaagattcctgctctcctgctgaggtggagattgcagtgagctgagatcgcaccattgcactccagcctgggcaacagagtcagactctctctttttttttttttttttttttttttgagatgga

SEQ ID NO: 69312 - DNA, 516 bp, Homo sapiens
ctttgaatgaggccaacacaaattcgtaaactttcttaaaacattatgagattttttttttttgcaattttttttaaagctcatcaggtatcattagtgttagcatattttatgtgtggcccaaaacaattcttcttcaagtgtgggccagggaagccaaaagattgaacaaccctgtcataaggtatgtcattattgggatgatttccagctgaaaaacttcagtgtgttatttcttattgatttttcacagtgaaacttaataaaattgtaatcgctaagaaaaaaaagttgttttctttttttcttatattaatactgtttggctggacatggtggctcatgcatggaattccacactttgggggaggtcaagttgggaggatcacttgaggccaggacttagagaccagcctgggcaacagagtgagacctcatctctacacattttttttaaagtatgtatatataaaagcaagaagacctascattaattctgaaaattaatgtgtacta

SEQ ID NO: 69313 - DNA, 583 bp, Homo sapiens
tggatttcaagcatatctggaaatcttcattcacacgttcaccttagcatttcttccttggcggtgacctgcatgttgctggagtcctgtgctgttgccctcttctcttgcatgcctgctggcatttcagctggcctttcagctattgctgtcctcatagcagcatgcctctgccgtggygtccatcacattgcatggaaaaggttactggttttttgcctgtcctccctcctagatctttgctatttgagggcagggtcctctttttcttctttgtgtccccagcacataacagagcctggcacatagtatgccttcagatgccacagctgcctttctgctcgtgtggcttcccactatcacaggtcctaagatgctgagctgattgaattgattcaatcacaggaacctaccacactcaaagacacacacactgaaattatatataaaattttctgtgggccaggcatggtggctcacgcatgtaatcccaacactttgggaggctgaggcaggcagatcatttgaggtcaggagtttgaaaccagcctgaccaacatggtgaaaccccatctctactaaa

SEQ ID NO: 69314 - DNA, 1302 bp, Homo sapiens
caaaatattgtaccttatcatctgccctcaaattgattctcttgttcactttcctctttctactatgaataccatctctcccttaattatccatgtctgaggctttaaaataacatagccattttctctcctttgtcttccaaactgttcagtcactaaatgctatttgttcttcttgcaagattctaamcttcatccaattctttcaaatccacattttcacacctaaatattttcatagtcctttaaatgggtctcaacctccagcttctttccactatccatcaacactgagcctgtttaacactgctgagtttaccttcctggcagaccaattttcctgtttgacagccttcaataatctccagtgtctgcaggtaaagtataaacctcttaggtttggactaaaatctctgtggttttgaaaccattcttcctttccatctgattctcaatgctcctcaaagggaacccccaagttagagtaaacttactactctcctctgagctcagtgagtatttcttcttcagttcttcctgcctggcactcctctctctgcacctctgcccgacaaacttctagtcttcctcctgagtcaaattccagctggtcctatcaccgtcccatttaacactagtattctcttccttgaattattacacaattttatccctcagtttggcaatcatataccatgcattgctgcttatggtttaatgtgtatgattgtttcattcccaagtaggaaataggtccctgatgggagacgctaggactcttactttttcagaattgtccaagtgatctgcatataggtgtttaacaaacacttgttaaatatataattaatctaacatataattttattaaactatgaatccaaatcaatacttttttttaccaaatataggaaacttttgatcctacaaagcacctttaaacttgtagaaatagaacatgatgaattgtccacttttctccaaacccaacatcaaaggaaacaattttaataattctccaaagaaatattatcagagaagtatactttaaggtccaaacatactcaacaaaatccatctaattttatcgttcagggagattttgcaattcaacctaacatttaaaagctcattaatggtcttagcacaggtaaaaacctataaaaacatctctttagaactgtaacattcaactactgcaaatgcaaagttattttacacattcttaaagcgatttctcccccattgttagaattctgtttttcttgagaaatataaattgtaaaacattgtgtactctat

SEQ ID NO: 69315 - DNA, 1003 bp, Homo sapiens
aagcactgtaaaccattatcttctccaaaataggtcaaacatttactttatatctatgccattaatttctcagaaaatgctatttaactttaagctcaatccttatccatttcacagtaattttctaattagtggagtccaaattaataaggtcgtgcttttactgttggagtcaatccaaaaaatctgcacccatgagcacgtgcgtgcacacacacacacacacacacacacagagagagagagagagagagagagagagagagagagagaagcattccctggctccaggattccatcccctccaaaaaccccagactgctgagctctttctgaattacttggaactttcccaccgccctttgtaccattcttggacactttccttcatttctaccttatatcattatttgtataagcttgacaaaacaggggaaatcaggagaatatcaaaagaatggacatttttataccagaattgctttttcttttttaaccaaaggtactgtttcaggrtaatattcttgcgggccaaattcatcatatccctatttttaataagatcattcctggcaacattcatggaattattaaactatgtatattttttaaaagtagtttcaaatttctgtcatttcagcaagaaacgtatatttattgaacaaaaagaagctgtactaccttaaaattctgctgtttcttgcagacaaatcagcaggaagcatataatctaaccctttggggtctgaacataatatgaggcctgcgaaaatgctataaacttacagggattattgtcttgctttgggttcgtgaattttccccctgatatctttaacacttactcaaagtgcagactgttatttcaaccaatattctaccaacagtctgtggattcccattgtctagattacactgggaatgccactttatatataatgaccaaccaacgtataggtttttagaacaaatgtaagaagaaagacataagaggaaagactgt

SEQ ID NO: 69316 - DNA, 2063 bp, Homo sapiens
caccctgtgcacactgtggagctgggtggatggggtgtgctcaggaggggctctcggccctcggctgggagtcagaggcgtggtgggtggggcggggaggggtgtcacagctgcagggcagccttgatgtctgcacttggctttttaatttgtagtcacagccaacaagtgtggaaaccgcctcaggaccggcttgagtggagcggctgcgggagttacttcatgactgtggtctcacgctgtgtttcgccacccatccctgcctggcctggcttccttccttcctcctgggtacgttggcccttggctctctcctcattaactggcccctcggaccccggctggccagctgtctgcagcctcctgggtgacaccttcacccctgcctcctcgggggtctgctgccgccacatcaatctccctaacaccctgggcatgccacccctctggagacctccctagtctctctcgcagggcccccaacctgctcagcccaggcccactgccctctccctgcccggacacgtgctcccgtggcccggccgtgcctgcccacacacctgccctctctgaggttcacatgtggcatccaggggcccttccccaacagctctgcctggtgcagcctccccctcagcctcctcttccccccgagcagggtttgcagaggcccagaggctgccgggatgagtagatgttgggatcctgcttactgggcgtgtcttatcccccagagcaatggccttggaggtcagggacccagcatggccatgctggcttggggtttaggagctgtctcaccagagccccgcctcagcccacagccccgggcctgtttccttgaaggctccccagagccccatgcctggttttctggccagagcccttggcagtgacccctgctctccgcctgcagctctgggcgtcctctcagccccaagccctgataggtgccccctgtctctgtgcctgcagccttcaggagtggcccacacattggcttttatctctgggctctctgtcacctcctctccctcctgccaccctctgctcacaggctgcgggtgtggggcatccaggagctggcyggtggaaagaggagcaggtgcccttacgcagtggggagcagacacacttgtgctgcttttcccttggggcttggggtggccactggggcaggacatgaggacagaccagccctcgtccccccagtgcagggggcagatctcactgccaggtgaaaccctgctgaccatccatgtggacccctcagcttggctggatgcaggaggtggttgcacagttgcaggtggggcatggagggagtggagcagccccttaccccaacacaggccccattcctgcttaaccggatgttccgaggagaagcacagcccaacaggtgtgcacaggaagctcccatcagtgctgtcctgggaaaggcccatcctgaatgaagtgtgttgctcagatccgaagagcgctgcatcttcacaggtcagggtggaaacctcctggtgcacggcccgggaggggcacccgtggcagggccagcccctgtgaggctgcacagatgagctcgagcagagagtctggggccggccacatcccacgtccgaccctgagctggggccctgggggagcccctgtggctttcgtaccagccacgcctgtatgtagagagctgagtgtctgctgtggaagaccacgagtcacatggcagacatgggcactcggcccaggcgatgctgacccatccatcagctcctacaggaccacaagctcccgttgtggtggccagagactcccaatggccacagacccactcagggctctctctggggtcttccggagaaaaggaaagctcaatgagctccttaaacctttcacttcaagttgttgcttttaaacattttgcttcgtggcctttcttgctccttctgtaaaaatctacattgtgctaccatttttttttttttttggcaaggtgtcactctgccacccaggctagagtgcagtgctgtgatcatgactcactgtagcctcaaactcctgggctcaaa

SEQ ID NO: 69317 - DNA, 2063 bp, Homo sapiens
caccctgtgcacactgtggagctgggtggatggggtgtgctcaggaggggctctcggccctcggctgggagtcagaggcgtggtgggtggggcggggaggggtgtcacagctgcagggcagccttgatgtctgcacttggctttttaatttgtagtcacagccaacaagtgtggaaaccgcctcaggaccggcttgagtggagcggctgcgggagttacttcatgactgtggtctcacgctgtgtttcgccacccatccctgcctggcctggcttccttccttcctcctgggtacgttggcccttggctctctcctcattaactggcccctcggaccccggctggccagctgtctgcagcctcctgggtgacaccttcacccctgcctcctcgggggtctgctgccgccacatcaatctccctaacaccctgggcatgccacccctctggagacctccctagtctctctcgcagggcccccaacctgctcagcccaggcccactgccctctccctgcccggacacgtgctcccgtggcccggccgtgcctgcccacacacctgccctctctgaggttcacatgtggcatccaggggcccttccccaacagctctgcctggtgcagcctccccctcagcctcctcttccccccgagcagggtttgcagaggcccagaggctgccgggatgagtagatgttgggatcctgcttactgggcgtgtcttatcccccagagcaatggccttggaggtcagggacccagcatggccatgctggcttggggtttaggagctgtctcaccagagccccgcctcagcccacagccccgggcctgtttccttgaaggctccccagagccccatgcctggttttctggccagagcccttggcagtgacccctgctctccgcctgcagctctgggcgtcctctcagccccaagccctgataggtgccccctgtctctgtgcctgcagccttcaggagtggcccacacattggcttttatctctgggctctctgtcacctcctctccctcctgccaccctctgctcacaggctgcgggtgtggggcatccaggagctggccggtggaaagaggagcaggtgcccttacgcagtggggagcagacacacttgtgctgcttttcccttggggcttggggtggccactggggcaggacatgaggacagaccagccctcgtccccccagtgcagggggcagatctcactgccaggtgaaaccctgctgaccatccatgtggacccctcagcttggctggatgcaggaggtggttgcacagttgcaggtggggcatggagggagtggagcagccccttaccccaacacaggccccattcctgcttaaccggatgttccgaggagaagcacagcccaacaggtgtgcacaggaagctcccatcagtgctgtcctgggaaaggcccatcctgaatgaagtgtgttgctcagatccgaagagcgctgcatcttcacaggtcagggtggaaacctcctggtgcacggcccgggaggggcacccgtggcagggccagcccctgtgaggctgcacagaygagctcgagcagagagtctggggccggccacatcccacgtccgaccctgagctggggccctgggggagcccctgtggctttcgtaccagccacgcctgtatgtagagagctgagtgtctgctgtggaagaccacgagtcacatggcagacatgggcactcggcccaggcgatgctgacccatccatcagctcctacaggaccacaagctcccgttgtggtggccagagactcccaatggccacagacccactcagggctctctctggggtcttccggagaaaaggaaagctcaatgagctccttaaacctttcacttcaagttgttgcttttaaacattttgcttcgtggcctttcttgctccttctgtaaaaatctacattgtgctaccatttttttttttttttggcaaggtgtcactctgccacccaggctagagtgcagtgctgtgatcatgactcactgtagcctcaaactcctgggctcaaa

SEQ ID NO: 69318 - DNA, 2063 bp, Homo sapiens
caccctgtgcacactgtggagctgggtggatggggtgtgctcaggaggggctctcggccctcggctgggagtcagaggcgtggtgggtggggcggggaggggtgtcacagctgcagggcagccttgatgtctgcacttggctttttaatttgtagtcacagccaacaagtgtggaaaccgcctcaggaccggcttgagtggagcggctgcgggagttacttcatgactgtggtctcacgctgtgtttcgccacccatccctgcctggcctggcttccttccttcctcctgggtacgttggcccttggctctctcctcattaactggcccctcggaccccggctggccagctgtctgcagcctcctgggtgacaccttcacccctgcctcctcgggggtctgctgccgccacatcaatctccctaacaccctgggcatgccacccctctggagacctccctagtctctctcgcagggcccccaacctgctcagcccaggcccactgccctctccctgcccggacacgtgctcccgtggcccggccgtgcctgcccacacacctgccctctctgaggttcacatgtggcatccaggggcccttccccaacagctctgcctggtgcagcctccccctcagcctcctcttccccccgagcagggtttgcagaggcccagaggctgccgggatgagtagatgttgggatcctgcttactgggcgtgtcttatcccccagagcaatggccttggaggtcagggacccagcatggccatgctggcttggggtttaggagctgtctcaccagagccccgcctcagcccacagccccgggcctgtttccttgaaggctccccagagccccatgcctggttttctggccagagcccttggcagtgacccctgctctccgcctgcagctctgggcgtcctctcagccccaagccctgataggtgccccctgtctctgtgcctgcagccttcaggagtggcccacacattggcttttatctctgggctctctgtcacctcctctccctcctgccaccctctgctcacaggctgcgggtgtggggcatccaggagctggccggtggaaagaggagcaggtgcccttacgcagtggggagcagacacacttgtgctgcttttcccttggggcttggggtggccactggggcaggacatgaggacagaccagccctcgtccccccagtgcagggggcagatctcactgccaggtgaaaccctgctgaccatccatgtggacccctcagcttggctggatgcaggaggtggttgcacagttgcaggtggggcatggagggagtggagcagccccttaccccaacacaggccccattcctgcttaaccggatgttccgaggagaagcacagcccaacaggtgtgcacaggaagctcccatcagtgctgtcctgggaaaggcccatcctgaatgaagtgtgttgctcagatccgaagagcgctgcatcttcacaggtcagggtggaaacctcctggtgcacggcccgggaggggcacccgtggcagggccagcccctgtgaggctgcacagatgagctcgagcagagagtctggggccggccacatcccacgtccgaccctgagctggggccctgggggagcccctgtggctttcgtaccagccacgcctgtatgtagagagctgagtgtctgcygtggaagaccacgagtcacatggcagacatgggcactcggcccaggcgatgctgacccatccatcagctcctacaggaccacaagctcccgttgtggtggccagagactcccaatggccacagacccactcagggctctctctggggtcttccggagaaaaggaaagctcaatgagctccttaaacctttcacttcaagttgttgcttttaaacattttgcttcgtggcctttcttgctccttctgtaaaaatctacattgtgctaccatttttttttttttttggcaaggtgtcactctgccacccaggctagagtgcagtgctgtgatcatgactcactgtagcctcaaactcctgggctcaaa

SEQ ID NO: 69319 - DNA, 2322 bp, Homo sapiens
tgcctgtagtcccagccacttgggaggctgaagtgggaggatcgcttgagcctgggaagttgaggctgcagttagcagtgatcgcaccactgcacgtgagtctgggtgacagtgagactgcctcaaaaaatgtttttaaaaatacagtcgtattggctgttscaaatgatggtgccatgaacatgggtgtacaagcatgtgctgctcttatgatacaatgctgatgtgctccccatcaaaagctggggtctatattccctctccttgcacctgggaaggttgtgacagaaatgatgctatgtgacttccaggctagatcataagaggtgatacaacttgctcctcatcctctttagtggctcactcttggagcccagtcgccatgttgtgagcaactcagaccagacttagaggccacatgtagatgttccagctggcagccagcatcaactaccagatagagggaaagagttttccaagcaaccccagcctctgtgactatctgagcaagaaccacccaggcgagcccagtcaaccccagagccatgagagatgacagaaatgactgttgctgtttcaggccactgaggtttggggtgtttggagtgcagccactacatgcaccctacaaagaagtctgccctgggatgggaccccccacatcccacagccacctccaaacacaggaccagagaccccaggatcagcaggccaaaatgaccataaaggaagcccaagcttgccaccctgtcaacgaggaagtcccagatgggagatagtaatgcgagaacaaaggaaaacgtaagcaaccttgatgatgtgaaataatagtaaagctgatggaaacggggaggtagagcaggaagatttcttcatcttgcacagtggggtccgtcataaaatatctacagcaatagaggtctggggcaggtccaggctccactaggtggctgtaaggtggcttgttggacggacccgagtcactggtgtcactagtccctgaaatcacagcatctccactgctctgacaatgacaggtttagaggttaggccccagcctgctgggtatgcatttcctttagtgctggagatggactcagaatgcgtatgtgaccctatgtgggccagcaattggccagtgcaagattgctggggattctgggaccggggtccttattttcaagatacagccatgtgaaaaaatggctcctaccaacacacgaagagggaaactccgcactcctattgcttggcagccatccttccatcactaagggaaccagccttaggataaagctgaggggtggagcaatggaaggtactcaggtttctatcacagtttttgtttgtttgttttttgagacagagttttgctcttgtagcccaggctggagtgcaatggtacgatctcagctcactgcaacctctgcatcttgggttcgagcgattctcctgcctcagtctcccaagtagctgggattacaagcgcccaccaccacgcccagctaatttttttgtatttttagtagagatggggtttcaccatgttggccaggctggtctcaaactcctgacctcaggtgatctgcccgcctcaggctcccaaagttctgtgattacaggtgtgagctactgcgcctggccccagctaatttttatatttttagtagagatggggtttcaccatgttggccaggctggtcttgaactcctgacctcaggtgatctgcctacctcagccttccaaagtgctggaattacaggcatgagccactgcgtccagcctctatgatggttctgtaaagcctgtaagctgaacagccctggagcctgccttacctctgaacatccactggcatgagccaataaattgctatattaagaccgttctagttggatttttttccttttttttttttttagacagggtgtcactctgtcacccaggctgcagtgcagtggtgtaatcatagctcactgcagtctcaaactcctgggctcaagcgatcctcctccttcagcctcctgagtagtttggactacaagaacgtgccaccacacctggtgaatttttaaatttttcttttgtagagacgaggtcgtgctatggtcaccccggctagtttagaactcctggtctcaagtgatcctcccacatcggcctcccaaagtgctgggattataggcatgagccaccatgcccagctgtttctttcctttttaaaacattttttattgagatacaattcacataacataaaattaatcactttaaagtttatacttcagtggctttagtatattcactatgctgtacatgca

SEQ ID NO: 69320 - DNA, 827 bp, Homo sapiens
aagaagatgaaagagaagaaaacagaaagggaagaagaaagggtagggcagctaaggcaggaaaggaggccagaagattgctttggaatgaaggaaaagaatgaaagtcacccccaaaacagaagaattgtttctaaagaacttaaattttggtcacacctagaatccataagctagaaaaaactattgagtgatcctgtcctaacccgtcatgtcatgatgagaaaaccgatgatgcccagagcaaggaagcaatttgctcaaagtcccctggtgagttatagaaaaagatgggaatagaagactgacttcttgatgttggacacatcctttgcacacacaaggactcttaaaagagcccatgattattggacttggcattagccatgactgtagttggactcttttgtgggagttacggcaatggtttgagtcttatgcatatacagaaaaaaaaaawatatatatatatatgtatataatgcaaattttaactatagttaagcatgtatacataatatatatgtttacagtattacacatttctttgattattctatgtaatgtatactttaaatagaagcaataatatgttttctactaaaccatgctctaacgttcactgagttttttaattcacctgaccaaaagtcttcaccgcaagtacattcaaatggaggagacagataaggaaagcaaatatggccatttatttacattttccaaaagcacatgttaaacattacctccactttagcacagcattatcctagcaacagcttttatttcgatcttattttcaagacatgtgaataaaagggatggat

SEQ ID NO: 69321 - DNA, 580 bp, Homo sapiens
ggctggaatcctaactctgtcacttattaacaatgtgatcttaggcaatttacttaatctctctgaacctcagctactctcgtcagtacaatgagttatccttatctttacatggcacagtattattatgatatcaaaaattcattgagtatttactctgcatattagtcaaggttctccagagaagtagaaccaatgatacacacacacacacacacacacacacacacacacacacacacaatttattataaggaattgacttacatgattatgatggctaacaagtccaaaatctgcagtatgggtcagctggcaggaaacccaggagagtcaatgttccagtttgagtctgaaggcagtctgttggggaatttcgtccttctctgggaggccagcctttttgttctatacaggccttcaaccgattggatgaagttcacctttattagtgagggcaatctgctttaaccaaastttactgatttaaatgttaatctcatccaaaaacacccacccagttgacacataaaattaaccatcactctctgtaagcactttctatgcattaagtgatagc

SEQ ID NO: 69322 - DNA, 870 bp, Homo sapiens
gttttccctaggttttcttctagttttttatggttttgagtcttatgtttaagtctttagtccatcttgtgttcatttttgtacatggtaagaggtagggttccaccttcattgttctgcatatggcaatataatattcccagcaccatttattgaagagagtgtccttttcccagtatatgcttttgatggctttgtcaaagatcaatggcctgtaaatatatggctttatttctgggttctctgtcctgttccattgatctatgtgtctttttataccagtaccatgctgttttggttactacagccttgtaatataatttgaagtcaggtaatgtgatgcctccagctttattctttttactcaggattgctttggttatttgggctttttttttggttgcatatgaattttagaattagtttttctaattcaatgaaaagttaacattggtatttttatagggattacattacatgtgtagattgctttagacagtgtggtcattttaacaaaaataataaagcaaagttaggatcagtgtcttgacttttaggcatgttgagatgatctcttttttttttttttttttttttggatctcagctcactgagctgcaaactccgcctcctgggttcacaccattctcctgcctcagcctcccgagtagctgggactacaggcacccaccaccacaccyggctaattttttgtatttttcacagagacggggtttcaccatgttggccaggatggtctcaatctcctggcctcatgatccacctgcctcggcctcccaaagtgctgggattacaggtgtgagccaccgcgcccagcctgagatgatgtctttctaacaaagccattct

SEQ ID NO: 69323 - DNA, 805 bp, Homo sapiens
catactgggcttaatacctagatgatrggttaataggtgcggccaaccaccatggcacatgtttatatatgtagcaatcccgcacatcctgcacatgtaccccggaagtttaaattaaattaaattatttaaaaaatcatctacttctctgcttctccactgggtactcacccaagatgtaccccagacctctgtctctggctgctcagctggggaggctgccagacacccttggtggttctgcctagcagtatacttagcaacatgtcagaggtagaaggactgttgaattagagaggagggaacaaaaagagcccagagcaaatctggagcccatttgaataatcaatcactagccaaacctgagcattggtgctatttatttgggaatctttaagttgtaataatgacatgtttattcatggctcaacttttttctagatcagatatttcaaagaatgcacacacacatgcacacacagacagtcacacacatatgttttcctgcttttcctgtataggatacctgaaataaagcataaagaagagcatttcagagttaaggggtaagagaggagccaaggaaagagataagcagaaaagacagaatgaaataaatatcaatgcaagggttactgtagtctggatttacctaggacattctcattttatgcctgctatagaccaattaataactgttaataactatataaactcaaaatttattctgatttagaaggaaattatatggtcattctataaagtccattattttaaagagaaatactttccatttttatagctt

SEQ ID NO: 69324 - DNA, 805 bp, Homo sapiens
catactgggcttaatacctagatgataggttaataggtgcggccaaccaccatggcacatgtttatmtatgtagcaatcccgcacatcctgcacatgtaccccggaagtttaaattaaattaaattatttaaaaaatcatctacttctctgcttctccactgggtactcacccaagatgtaccccagacctctgtctctggctgctcagctggggaggctgccagacacccttggtggttctgcctagcagtatacttagcaacatgtcagaggtagaaggactgttgaattagagaggagggaacaaaaagagcccagagcaaatctggagcccatttgaataatcaatcactagccaaacctgagcattggtgctatttatttgggaatctttaagttgtaataatgacatgtttattcatggctcaacttttttctagatcagatatttcaaagaatgcacacacacatgcacacacagacagtcacacacatatgttttcctgcttttcctgtataggatacctgaaataaagcataaagaagagcatttcagagttaaggggtaagagaggagccaaggaaagagataagcagaaaagacagaatgaaataaatatcaatgcaagggttactgtagtctggatttacctaggacattctcattttatgcctgctatagaccaattaataactgttaataactatataaactcaaaatttattctgatttagaaggaaattatatggtcattctataaagtccattattttaaagagaaatactttccatttttatagctt

SEQ ID NO: 69325 - DNA, 595 bp, Homo sapiens
aacctaatacataaagaaaagtttcactgaggaagtagcacttcactgaaatctagaggatgagcaggaattagccagatggggagggagggggaaaggctatccagacacgtgaacagtatttacaaaaagcactaggggttagtccatgttgaagctcatttcacagagaataattgctgaaatccccaaagtgctctctgtattttgcatggagaaatgattggaacaataagcatkaaaatgttaaatgtcagtgctttgtattttcttttatgattctgtttttatccttaattttttgtggtgaagacataatattttaaaagttaaattattattgaaatccctgtgagtcaaaaaagacttttttttattggatatttttatagaaacccttttatgagtctccgttgttttaataaaactcctgataggttgagaaattatttcaacttctacaaaattacctggatggaaagatatatggtctgccagtttctgggtcttcagtcatcagggattactggcagccatagctcctgaatgagtaagagccaaggccatggactttgggggctcttgggggtagttt

SEQ ID NO: 69326 - DNA, 560 bp, Homo sapiens
taagacataaatttagaaggacccatacttcactgcggttgtcaataagataaaggcaaatagaatgctctctgagacagtgacagtgataaaaaagcaaaaaaaaaaamcaaaaaaaaaaaaaaaaaccacaaaaaccagaaaaactggtaagaaataaataataaaaaagaaagaattgaaaaaaaataccaaataatagagtggcaagatttaacatatatcgtatgatttgggcaccacttttagcaagtgaattctctatttcgtcattttagatctgacaataaaataaaaactagctaagggaattttcagataatgcacaattaaatatatattaaatattatatatacataaaatcaaatgtacaatttgttttccatttacaaaagaaaattcataccatttacagttacagataaagaaagagtctcagagaaactaaaatatttgccatagtcagtaagtcctagaattgagagtagacaggtttttttctgactgcaagttcaactttttttctgttaatctgtggtcaaagattggtttttccaat

SEQ ID NO: 69327 - DNA, 560 bp, Homo sapiens
taagacataaatttagaaggacccatacttcactgcggttgtcaataagataaaggcaaatagaatgctctctgagacagtgacagtgataaaaaagcaaaaaaaaaaaccmaaaaaaaaaaaaaaaaccacaaaaaccagaaaaactggtaagaaataaataataaaaaagaaagaattgaaaaaaaataccaaataatagagtggcaagatttaacatatatcgtatgatttgggcaccacttttagcaagtgaattctctatttcgtcattttagatctgacaataaaataaaaactagctaagggaattttcagataatgcacaattaaatatatattaaatattatatatacataaaatcaaatgtacaatttgttttccatttacaaaagaaaattcataccatttacagttacagataaagaaagagtctcagagaaactaaaatatttgccatagtcagtaagtcctagaattgagagtagacaggtttttttctgactgcaagttcaactttttttctgttaatctgtggtcaaagattggtttttccaat

SEQ ID NO: 69328 - DNA, 560 bp, Homo sapiens
taagacataaatttagaaggacccatacttcactgcggttgtcaataagataaaggcaaatagaatgctctctgagacagtgacagtgataaaaaagcaaaaaaaaaaaccaaaaaaaaaaamaaaaaccacaaaaaccagaaaaactggtaagaaataaataataaaaaagaaagaattgaaaaaaaataccaaataatagagtggcaagatttaacatatatcgtatgatttgggcaccacttttagcaagtgaattctctatttcgtcattttagatctgacaataaaataaaaactagctaagggaattttcagataatgcacaattaaatatatattaaatattatatatacataaaatcaaatgtacaatttgttttccatttacaaaagaaaattcataccatttacagttacagataaagaaagagtctcagagaaactaaaatatttgccatagtcagtaagtcctagaattgagagtagacaggtttttttctgactgcaagttcaactttttttctgttaatctgtggtcaaagattggtttttccaat

SEQ ID NO: 69329 - DNA, 927 bp, Homo sapiens
ccagccctctgctggcctcataggctgagtgactgatttagagtgcttggggtcagtatgagttagagagattcaactcatctattttgctgaggcagctcatctattggctctatagtgatgtggatattactgacttttctcagttttacatgaggccaattgaaggcctgtcctgaagttctgccttcaacagtgctagtgtcataaccrccatggaggagttgaaagaagcatagaggtgagtcttctctgtattaattttcttccctatccccactttgaacagcaggttgaattagtgaaatgttgtgtgtgtgaagcaagtgccccaccttaactcctggctttaattgcattgttaccattaatttatcctactttattatagtagatagcttcaaaattgtgttcctagcacaatcactttatctggtaaatcccttcttgattggcttttgtgggagtggccattttgtataacatgatcctgctccttggctatatttaattggttcatggataagcacttgactacatgggcaggtacataatccaaactggatgagtcatagtctctttttttctggctttgactgagactacaggtgttaatatttgcatcagagattggtgactgactgactcaagctaggacagttagagcctttcctagaagaggcagatagaaacccagagacttgagctgaagcaatgcgatataaaaacctggttgctgtgaatagctgtgtttcctgccacgtggaaagaatcagtctgggtgaacaagaatgaaactgacaagcagagcaaaacagagactgcagcaagatgcaggggttacttaaagccctggttacagttgtccttaaggctgatgtgaatctctgccctttccaatgtgtcatgtgattgctccaaattaaa

SEQ ID NO: 69330 - DNA, 1831 bp, Homo sapiens
cctctgtcctcaaaggatctgtgtccttcctcgcagcctcccccccacccccatcctttgagacgtggaaagccacgggttctgccgacctcgggggctagagagagtcttgagaagcggatgggtaaaagtgctctgcagggctgtgatgggtggggataggtgcagatggctccagtgaacctttatttttgcagcttctgccaccaaaacaaaagaatggagcgctcccctgtattcttattcttctccgtatgtatgagctgtttttctgtacgtagctgtttgagtcgcaggaaattgaaactagagctgtaataaagcatctcctgaggagattttgagaattagtctcccaagctctattcacacggaatggcatatcgaacaatcttgtattggaatgaccatttcagaagagctttactggtagatctgacagataaatgtaaagataagagtctgctgtttcaaatagtgtattttagatacctttaaattttagtgttctaattttcatctagttcttaatttgtgaagtatgtgggtatgtgtaaggtgtaaaaatctgtgtattggaaggttttgctttgttacaagcttttgctttgttgcttttgagacagacgtttaaagatcatattagattgtatttgataattattttcaatcattaattccagagaaatctttttttgtatcagccactcacagatgttacacaccttggtgcctatgaccctcctgctgcttaaactgtgaatgtcttcaaagtatattttcagatttttgaactaggcgttttttctcattagaatttgatttgcttttcaaactgctcctgcagaactttccagaaattagatttaaaaataattttaatgctgtcagtgattggacaatagctcttatatgactttatgcatttgctacttttcagagcaccataggaagcaaacgataatttaagaataattttactgtgtactgcaggttgtcattctgcaaactactgtgtagtgtagactggtagctttggtgttttgtgttgctgaaaaacattgtcatttcattaagaaagatggatgtgtttaatgacttttccccccaacctcctttcagcagttgattttgggctattatctgatttgtaacttctcactgttcacagattttaatttgaagtaggctcaggagatgtagctccaactctgtctctggaaatgtacttagcacagaagccaagcactgtgcagagttgagtgtattattaagggtgtggcttttgctttctgtaaaattgttcagtttctgaataagagtagggtgctatagtgaggtgatgggcgctatcttggagaagtcttagaaaaaatgttgttgattctcttttccttggggtaggatggggaagatagaactatattttcctatttcactgttcccttgaccactacaccgagaattttgagttttcaatatgtaaggagtctgaaactgtgccaactgtgctgtaaacaagggctctaacaggtaggtgactcctgaaacatgggagggaagttttgttagccactcttttgtactcctgtggcactgcccacttctcaaagagtgggttttctttcctctttcttttctggggtatgcactcaaacttgtgaaagtgaaatatgtgtatttacaacttgcttgtagataaaagtgcgagctcattttcatatataagtagatggaagaactatgaattaagttaatctgaatgtccttgaaatgaagttggaaaagattcctcagtgctttgggtaatttttcccccmttgaggatgca

SEQ ID NO: 69331 - DNA, 637 bp, Homo sapiens
gtaaactaaccaaatttctcaattctcctatatttcttggaatctctctgattgcattatttgagatatcaagttctttaagttgagtcatattagatagctctcctggaagtcttgttagctgtaacaaagattacacaattatacatttataaatacatacatatttgcatgactaaaacttcttctaaaatcaaatgaaagagttttgtctgtttttgtttttgtcttaaaaaggagattttttattatgtcacaaattctttgtgactgactctcccttctgactaaaacccacaagatattgtgcgacatccaagtacctccccaatctgaccaatgcttctaattcaaccctgtggcttgcaacccactttgctcacattcccatcactcagtgttcattacctccttatcccattctcttctccctaaatctgaccctgttttggcttctttcccgcccccctcccagaagtcttttccaactactccatcccacatttgatctccttattactagtcctatcaacattgcttttttttttttttttttgagacggagatctcggtctgtcacccaggctggagggcaatggcrtgatctcagctcactgcaacctctgcctaccgggtt

SEQ ID NO: 69332 - DNA, 3043 bp, Homo sapiens
tatgcatatatatgtgtatatgtacataaataatgtgtacctatatgtacatatatgatgtgtacatacatatagacatacatatgagattaagagaaagaaaatgctaattaacatttgttgagtcactattctgtctgagacacgaggccagacactttatatccattatcttacttagggaaatatgatccaaaacaaagcaaaagcattaaccagctttatgttaaccttcatatgttccctgagcatggagataaaaggagttacatagtctccccagtagttttttatgtgacctaggaaagaatcactttctccaatctttctttagctttacttacacaggaggttgttgcagattcatagaaattgtcactaggcacccagaagaaaatgtctgagacacacatggctatctacaaacccagtattttggcaaggatcatggttgctgcaaataaagcacacctaacatactgagatctgtccgaacaccacactttaaaagagatataaacaaatggatacacattcacactggtagaggacctggagagggagacttgaaaccatgccctgcatggaatgttcgcatgaagtggggagattttgcctggccagcaaagtcttcaactccatatgagagtgttgtatggaaaaggaatgtgttccatatagtcatccttgctggggtgtgaaaagcacaggaatgctaattccagtgcaacagaataaagaattttctgaccaagctgtcctataattgaatgtattgcctcaggaggtgttaagtttcccaccactaggaaatgttcaaactttggccaggacattagtacaggtatggtgaaagggattcaaacacttgatgggaacttggagtaaaaagggtggctttaaagttaattccgaccctgacagtttgcaaaaatgaaagggataagactggtaattgaaccaaaccttcatgcctctgaattcatatatgtagaaatataacaaatctgaataaacttttctcacatgaaccatgcaataagaagtcagacttactgttttgatcttcctaattcaaagttagaatatactttgtactgaggtttctttcattaactgagacacaagccagcaacttgacctattaacaccaacactgagatcaagcattgctagtttatcctctataaatatcaagtacaattcaattggttgagcacctactatatgccaatcatcgtactaaagtttgggggatataatggtgaacaacaacaaaaaaacgtgatctccatcttcatggcatttatagtctagtataattgctgtctcctacagatgatatgaagtctactgtttttaggttttcagtaatttactttccgattaaaaataatcagtttttcaaaataatttttaaaagaaaaaagcattttccttctattaaacactcagcagaaaattcatgattatccacccagacgtgtccaatttacataatttgagaaactctacttctaccaaaaataccttactgcttatactcatggagttagtacaaatatgcataatatgtaagaatctgttttgctatgactcatttatatagactacatcatttgcctaaaatatgatttcattaagagaatacaattacttgtataatcaaaagtcactgatgaaagttaatcagctggctttttgcagtcttcayataggtaatacatgactaggtcaggatttgaaacatttgaggttattttatctagttcttacatatactgatagtttaatttgctacaaaactaaatttgcagttgagcaagaaatctgcaagtaggattaggttaggagctaggaaaaaaaactttcaaggttaaattagataatctagttgactaacattatcaataataatatactgaagagtccatagggatagtccatgaagccttaagtttctgccatatacacagttacattctaaggagatgaattcctgtattcttgccagggcttatccagaatcatttgcaggtaaaatgattccttctacctaacagtagttgattagaccagttataatttaatcggtcacaggcaatcatacagtctaacacatgctaggtactcaatgaaaaaaaatatgtatatatatgtgtatatatatatatatatatatatatatatatatatatatatatatatatatactctagagacagggacttgctctgccacccagaggctagagtgcagtggcacaatcatggcagccttgacttcctatattcaagcaatcctcccacctcagcctcctgagtacctgggactacaggcatgctccaccacacccactaatttattttttcttttgtagggacaggtctcattatgttgcccagactgaacaagcagtcctcccgccttggcctcccaaagtgctgggattacaggtgtgagccactgtgcccagcctcaatgaacatttttgaatgaaggcacaaatggacagaagtggaagtaaactcagaaatggcataacagggactaaggagaaaaataactcactcattcactcatttaataaatattgactgatttctatacatagattaggcactatgtgtcagatactgttctagggtatgtatgggtaaacaaaaccagacatgattacactggccctcaaggagtttacagtctaattgaagagacagatattaatccaaaatcaccaaatataatatgcatactatgatcgtggtgtggtaagagatatggtgctagaagagggtataacagagagatttgaccctgccagggaggtaagggaagccttgcttaaggaaataaggaattgcccaattaaagtgtagtagaaagaatgttttaggcagagggtctggcaagttcaaaagtcttcatgaaagaatgagagctagtgtgactgctgcacggtgggcatggtaagggatgagatcaagaagacccttataggccatgtacaggggtgatttatcttaacagcaaagtaaaaaca

SEQ ID NO: 69333 - DNA, 3043 bp, Homo sapiens
tatgcatatatatgtgtatatgtacataaataatgtgtacctatatgtacatatatgatgtgtacatacatatagacatacatatgagattaagagaaagaaaatgctaattaacatttgttgagtcactattctgtctgagacacgaggccagacactttatatccattatcttacttagggaaatatgatccaaaacaaagcaaaagcattaaccagctttatgttaaccttcatatgttccctgagcatggagataaaaggagttacatagtctccccagtagttttttatgtgacctaggaaagaatcactttctccaatctttctttagctttacttacacaggaggttgttgcagattcatagaaattgtcactaggcacccagaagaaaatgtctgagacacacatggctatctacaaacccagtattttggcaaggatcatggttgctgcaaataaagcacacctaacatactgagatctgtccgaacaccacactttaaaagagatataaacaaatggatacacattcacactggtagaggacctggagagggagacttgaaaccatgccctgcatggaatgttcgcatgaagtggggagattttgcctggccagcaaagtcttcaactccatatgagagtgttgtatggaaaaggaatgtgttccatatagtcatccttgctggggtgtgaaaagcacaggaatgctaattccagtgcaacagaataaagaattttctgaccaagctgtcctataattgaatgtattgcctcaggaggtgttaagtttcccaccactaggaaatgttcaaactttggccaggacattagtacaggtatggtgaaagggattcaaacacttgatgggaacttggagtaaaaagggtggctttaaagttaattccgaccctgacagtttgcaaaaatgaaagggataagactggtaattgaaccaaaccttcatgcctctgaattcatatatgtagaaatataacaaatctgaataaacttttctcacatgaaccatgcaataagaagtcagacttactgttttgatcttcctaattcaaagttagaatatactttgtactgaggtttctttcattaactgagacacaagccagcaacttgacctattaacaccaacactgagatcaagcattgctagtttatcctctataaatatcaagtacaattcaattggttgagcacctactatatgccaatcatcgtactaaagtttgggggatataatggtgaacaacaacaaaaaaacgtgatctccatcttcatggcatttatagtctagtataattgctgtctcctacagatgatatgaagtctactgtttttaggttttcagtaatttactttccgattaaaaataatcagtttttcaaaataatttttaaaagaaaaaagcattttccttctattaaacactcagcagaaaattcatgattatccacccagacgtgtccaatttacataatttgagaaactctacttctaccaaaaataccttactgcttatactcatggagttagtacaaatatgcataatatgtaagaatctgttttgctatgactcatttatatagactacatcatttgcctaaaatatgatttcattaagagaatacaattacttgtataatcaaaagtcactgatgaaagttaatcagctggctttttgcagtcttcatataggtaatacatgactaggtcaggatttgaaacatttgaggttattttatctagttcttacatatactgatagtttaatttgctacaaaactaaatttgcagttgagcaagaaatctgsaagtaggattaggttaggagctaggaaaaaaaactttcaaggttaaattagataatctagttgactaacattatcaataataatatactgaagagtccatagggatagtccatgaagccttaagtttctgccatatacacagttacattctaaggagatgaattcctgtattcttgccagggcttatccagaatcatttgcaggtaaaatgattccttctacctaacagtagttgattagaccagttataatttaatcggtcacaggcaatcatacagtctaacacatgctaggtactcaatgaaaaaaaatatgtatatatatgtgtatatatatatatatatatatatatatatatatatatatatatatatatatactctagagacagggacttgctctgccacccagaggctagagtgcagtggcacaatcatggcagccttgacttcctatattcaagcaatcctcccacctcagcctcctgagtacctgggactacaggcatgctccaccacacccactaatttattttttcttttgtagggacaggtctcattatgttgcccagactgaacaagcagtcctcccgccttggcctcccaaagtgctgggattacaggtgtgagccactgtgcccagcctcaatgaacatttttgaatgaaggcacaaatggacagaagtggaagtaaactcagaaatggcataacagggactaaggagaaaaataactcactcattcactcatttaataaatattgactgatttctatacatagattaggcactatgtgtcagatactgttctagggtatgtatgggtaaacaaaaccagacatgattacactggccctcaaggagtttacagtctaattgaagagacagatattaatccaaaatcaccaaatataatatgcatactatgatcgtggtgtggtaagagatatggtgctagaagagggtataacagagagatttgaccctgccagggaggtaagggaagccttgcttaaggaaataaggaattgcccaattaaagtgtagtagaaagaatgttttaggcagagggtctggcaagttcaaaagtcttcatgaaagaatgagagctagtgtgactgctgcacggtgggcatggtaagggatgagatcaagaagacccttataggccatgtacaggggtgatttatcttaacagcaaagtaaaaaca

SEQ ID NO: 69334 - DNA, 3043 bp, Homo sapiens
tatgcatatatatgtgtatatgtacataaataatgtgtacctatatgtacatatatgatgtgtacatacatatagacatacatatgagattaagagaaagaaaatgctaattaacatttgttgagtcactattctgtctgagacacgaggccagacactttatatccattatcttacttagggaaatatgatccaaaacaaagcaaaagcattaaccagctttatgttaaccttcatatgttccctgagcatggagataaaaggagttacatagtctccccagtagttttttatgtgacctaggaaagaatcactttctccaatctttctttagctttacttacacaggaggttgttgcagattcatagaaattgtcactaggcacccagaagaaaatgtctgagacacacatggctatctacaaacccagtattttggcaaggatcatggttgctgcaaataaagcacacctaacatactgagatctgtccgaacaccacactttaaaagagatataaacaaatggatacacattcacactggtagaggacctggagagggagacttgaaaccatgccctgcatggaatgttcgcatgaagtggggagattttgcctggccagcaaagtcttcaactccatatgagagtgttgtatggaaaaggaatgtgttccatatagtcatccttgctggggtgtgaaaagcacaggaatgctaattccagtgcaacagaataaagaattttctgaccaagctgtcctataattgaatgtattgcctcaggaggtgttaagtttcccaccactaggaaatgttcaaactttggccaggacattagtacaggtatggtgaaagggattcaaacacttgatgggaacttggagtaaaaagggtggctttaaagttaattccgaccctgacagtttgcaaaaatgaaagggataagactggtaattgaaccaaaccttcatgcctctgaattcatatatgtagaaatataacaaatctgaataaacttttctcacatgaaccatgcaataagaagtcagacttactgttttgatcttcctaattcaaagttagaatatactttgtactgaggtttctttcattaactgagacacaagccagcaacttgacctattaacaccaacactgagatcaagcattgctagtttatcctctataaatatcaagtacaattcaattggttgagcacctactatatgccaatcatcgtactaaagtttgggggatataatggtgaacaacaacaaaaaaacgtgatctccatcttcatggcatttatagtctagtataattgctgtctcctacagatgatatgaagtctactgtttttaggttttcagtaatttactttccgattaaaaataatcagtttttcaaaataatttttaaaagaaaaaagcattttccttctattaaacactcagcagaaaattcatgattatccacccagacgtgtccaatttacataatttgagaaactctacttctaccaaaaataccttactgcttatactcatggagttagtacaaatatgcataatatgtaagaatctgttttgctatgactcatttatatagactacatcatttgcctaaaatatgatttcattaagagaatacaattacttgtataatcaaaagtcactgatgaaagttaatcagctggctttttgcagtcttcatataggtaatacatgactaggtcaggatttgaaacatttgaggttattttatctagttcttacatatactgatagtttaatttgctacaaaactaaatttgcagttgagcaagaaatctgcaagtaggattaggttaggagctaggaaaaaaaactttcaaggttaaattagataatctagttgactaacattatcaataataatatactgaagagtccatagggatagtccatgaagccttaagtttctgccatatacacagttacattctaaggagatgaattcctgtattcttgccagggcttatccagaatcatttgcaggtaaaatgattccttctacctaacagtagttgattagaccagttataatttaatcggtcacaggcaatcatacagtctaacacatgctaggtactcaatgaaaaaaaatatgtatatatatgtgtatatatatatatatatatatatatatatatatatatatatatatatatatactctagagacagggacttgctctgccacccagaggctagagtgcagtggcacaatcatggcagccttgacttcctatattcaagcaatcctcccacctcagcctcctgagtacctgggactacaggcatgctccaccacacccactaatttattttttcttttgtagggacaggtctcattatgttgcccagactgaacaagcagtcctcccgccttggcctcccaaagtgctgggattacaggtgtgagccactgtgcccagcctcaatgaacatttttgaatgaaggcacaaatggacagaagtggaagtaaactcagaaatggcataacagggactaaggagaaaaataactcactcattcactcatttaataaatattgactgatktctatacatagattaggcactatgtgtcagatactgttctagggtatgtatgggtaaacaaaaccagacatgattacactggccctcaaggagtttacagtctaattgaagagacagatattaatccaaaatcaccaaatataatatgcatactatgatcgtggtgtggtaagagatatggtgctagaagagggtataacagagagatttgaccctgccagggaggtaagggaagccttgcttaaggaaataaggaattgcccaattaaagtgtagtagaaagaatgttttaggcagagggtctggcaagttcaaaagtcttcatgaaagaatgagagctagtgtgactgctgcacggtgggcatggtaagggatgagatcaagaagacccttataggccatgtacaggggtgatttatcttaacagcaaagtaaaaaca

SEQ ID NO: 69335 - DNA, 1292 bp, Homo sapiens
ctcagaggcttctgtgacgcagccccagcccagctgcagaatgctgtgggcctctgtccatacccctcctccccacctcagcaagtcctcagaggataggcaggaagtgggcatgccgaaatcttgagctcggaaagggttggatcattcactgggtcattcctgccagccagttccttagactgggaaccggaagcagagaacctcaaggaacagaaggggctgaaagatctttaatccaaaggagtttyttccccccacaaacatttattgagcttttatgactagatgccaggcacctagcactttaaatatattatatcacttaagtctcataataactctacgaaatcagtcctttatgatcccattttgaaatggtagacgaggcttgcagagactggggaacagtgccaaagcgccacagtggggaaggaacacagccaaagtatggtcccagcagcaagaactcagagcctgcactctccacccctcagccaagagcccactctgcggccagcaaggtgcacaagcagattggctccagggcctgcggggcaggacagcagtgaggagaaaggaggtaggcacagaatttttaggtagaagagttcttcagaagtagagggtgcttggccgggcatggtggttcacgcctgtaatcccagcactttgggaggccgaggcggatggatcacttgaggtcaggagttcaagaccagtctggccaacatggtgaaactccatctctactaaaaaaaaaaaaaaaaaaattagccgggtgtgttggcacaaacctgtagtcccagctactcgggagactaaggcaggagaatcacttgaacccgggaggcagaggctgcagtgagccaagatcatgccactgcactccagcctgggagacacagcgagactccatctcaaaaaagaagaagagaagaagggagaagaaggagaagaagaaaaggaagaggaggaggaggaggaaggaggaggaggtgattatcttagaaaaaagacttgggatctggtaggagttccatagcctttactgagaccttaagctgcagaaacctataccttagaaattttattctacttgtatttttaaattccttcctctgtcctttttcaagtttggaagaactgtttaaaaggggtcggggccgggcacagtggcccacgcctgtaatcccagcactttgggaggccgaggcgggtggatcacaaggtcaggagatcgagaccatcctggctaacacggtgaaaccctgtctctactaacaaagaca

SEQ ID NO: 69336 - DNA, 1160 bp, Homo sapiens
cactagggtattttgtgacttaatagtgtgcactgatttgagccttaacaggggaaagagctaaacaaaattctttatgtatgtatttgtactatggagaatacagaatcatgataaatatgcaataacagtataaaacaaaaagagctttaggacagacagatgaaggaggtgatgtggagaacagagacacagacattgtataaaccacggctaaagagataactagggcagatatccaggcaagaaaaaccagttagatcagttgtaaatcaaatatatttaactattaatgtcttggtggggtgaggggaaaatgaccttatattttgattagacatggatacatatgaatgttcaaaccaagacttgtagcaggtattgctagatattatccattgcctcttcagataacactttctaccttgtgtccaatctgccccagcagtctggcctttatggtctacattaagggatcccttcactctgrcgtcccaggaaggccaagtggcaggagagcagaaggcaggaagagagtgaagcaagagtatttatcttttgaactccctcccttctgtgctgtggtggatgatggctgggttccttccccaagttcctagcagatagcctctcccagctgccttctgctcttgcaccacccctcattagcttttcttgaccttgcccacatctttgaaactgttccttagtttatttctcttcatctgttacctacctaaactcttactgataaaagcataaaacgtgtacaaagagaatatgaaatgtattaatttgctgatgagagcttttcagttgtaatgcaagagatcttatgggaaaaatagtgtaaataggatgcacctgctctgtggagcctactctgaaccccagaagttggttatgccttctttgttctccttgccctttacacatagcacatcattattgtgggactgtggtggacatgaaagaacttagtcaaagggacctcatgtgggaagtgtttcatgaggtgagggatctgagaaataaaggaatccctaaagttctggcagttggagttatatgaactcagtcacctgaggttggcttccacagttgtgaacaaccaagagacagcaagtgctgcacaattcagtgaggcccctcttaccttc

SEQ ID NO: 69337 - DNA, 661 bp, Homo sapiens
atcccctccctgcactcaggctctctctttgctcttcttactttctgctgcttcacctgctcatgcccgttgggcatgtggtactgtttcctctgctttgattctctgctcactctccagaacagcttaattcctactcatccctcaggtctcagattatacatgccttccctagggaaaccttccctgactcatttatgttccaaattgccttgttcacaagtgagagctcaaactggttcaggtaactgtaaagtccagagttagcttctggcttgatccaggcctcaagaagtgttaycaggactactcatctctccatctcttggccccatttcctccatgttggctccatcctcagagaagctcaccctccatagtggtaagatgacttccatgtctccagctttctccttcacattcaaatctaacatgaagaatggatttatttctccaaaagtgttccaaaaaaagcgccatagcttattcttactagcttgggtgacttgactctgggcatagtcctgttttagaaccaaccattggtgctgtggaaaagcaatgatctgattgaccaaacaggactgggtcttccctgacgctgacagatagattatgtgtggggtgaggttgccaaaccccaactggaattacaggaagt

SEQ ID NO: 69338 - DNA, 561 bp, Homo sapiens
caaatgatgggtcatttcaacccatgacgaatcttgaagaatgatggattgtcatatgagctaaacagccaaggctataccagaaacctagacatatcaacctgaagccaaaatacagttttatgactaccaatttaattggaaagtatttttgaatggcccataggcttactttctctcaatgcacaatatttctaaacagtgagaaagaatttcattttgctttagtttccattgtttctggagccaaagcaaaacatttgtgctttttgttgaygttgctttttgttgatgttgcttttttagtctgtacatgataagctctggtgcagaaaggagagaaaaatgaaggcatatacatcagaaaaggtcacctctgaaactggctttggctttataggacataaatgctatacaatgactaacagggaatttaatataagatttttttatacttgataccatttcagtcttaagactatatttttagtaaattattgtaaatatatagttttgcaagtctattgactgtttattgatataatcagagtgccacaaaaa

SEQ ID NO: 69339 - DNA, 561 bp, Homo sapiens
caaatgatgggtcatttcaacccatgacgaatcttgaagaatgatggattgtcatatgagctaaacagccaaggctataccagaaacctagacatatcaacctgaagccaaaatacagttttatgactaccaatttaattggaaagtatttttgaatggcccataggcttactttctctcaatgcacaatatttctaaacagtgagaaagaatttcattttgctttagtttccattgtttctggagccaaagcaaaacatttgtgctttttgttgatgttgctttttrttgatgttgcttttttagtctgtacatgataagctctggtgcagaaaggagagaaaaatgaaggcatatacatcagaaaaggtcacctctgaaactggctttggctttataggacataaatgctatacaatgactaacagggaatttaatataagatttttttatacttgataccatttcagtcttaagactatatttttagtaaattattgtaaatatatagttttgcaagtctattgactgtttattgatataatcagagtgccacaaaaa

SEQ ID NO: 69340 - DNA, 1961 bp, Homo sapiens
tgctgtaccataaatgcagtctctctacctctcaactattcaagtgagcctactgagcccttgaaatgtggctgctctggattaacatatgttctgagtttaacatacacattgattgcagaaacgtagaatgaaaaaaagaatgcataatatctaaatatttttaatattgataacattttgaaatgataatattttggatgtattggctaaaccagatatgtaactgaagttaatttcacctttatttacttaatgtggcaatcataaattttaaaattacatatgtggcccctattatatttatcttagacagggtcacatctagataatggccagggacctagattaaactgcaatactatggataaagagaagaatggattgaagggacaactaatactctgcctcacttctgtatctctagtagtgtttgctcagtgtatcttaatttaacagctagttggattactgcatttggatcccaaattatgtcagactggaatgaggaccaaattaaacagagtgatgtagcatgtcctaaattttacccatacaattacaggattggaaaaacagctacggctatatgtttatttttaaaatagaagcttttcttttgtggtcagcttatgtgtcagttatatgatgtgactatcacaaaatctaattgcaggcttagactgcattaataaaatcttatttcaaagaccatatgacattctttacctactgtctactttgttgtgtttatatgtataagtggcttagtaggtttggtggcataaaataaatcatattttagaaggctcaactttagaatcatagtagagttggttgggggatctgttccatttgtaattcctgtaggctatcccttagagatgtttggaatacagttgtgtatatgggatgaagactaggagacagaaatgtgttgaaggcattgatgtgggaattgtctgcatctggatagcaagtaaaaccagatatgtagatgcattaatctaggaagaatgtgtagtcagagataagcactctcaacgttcagaggtagtttatcataaaaggagccaggaaaggggactgaggaaagcactaagagataggagtctataattccagatactttgaggctgaggcaggaagatcacttgagccgcaggagtctgaggctgtagtgtgctatgaccatgcctgtgaatagacactgcactccagcctgggcaacatagtgagatcccatctctaaagtaagggagagaatgaaggagggaaagaaagaaagagagagacaaggaagggaagggaaggaaggagagaaggagaaagacagaggaaaagaaagaaaaataaaagaggaaggaaggaaaggaaggaaggaagggcctgagtgcaggtaagcactcataaaataaaaaatcagtggtaaatcatgcaaatgtgttgtggcagctaaatgcaygtgtaaagaagatagtcctcagcagtgtcaaaaatactatgtggtctaggagtaaaggcttgagaagtttcttttaaagaaactttaaatgacaagagagttcttggtgtccttaaccagaacagtttcaatggactgatggagactgaggccagtgaacagtagattgagaagcaagaggaaatgaaatggagtcagtgagaggatataattcttacaaaacactttcctgtgacatactgctatcatgatctcttgatatgatgccttgagaaggacacagtgtcagctctgtggcattcttactaaaaaatgtaagttttcaaaatttaataatgaataaatatcagacaaacccccaatgaagaagagtctaccaaataactgattagttattttcaaaggtgttgagatcatgactgggaaagagaaaggaattgctatggattataggagactaaggagaaatcacagttgcaatgtgggattctggact

SEQ ID NO: 69341 - DNA, 541 bp, Homo sapiens
ctcgtgactgtggtcgtagaagtttttccctctgtcctttgcatcttttgcgtttccagataagggatgcctgccaggagggcagattgctgcttgggtctgtccagagctgggggtggtacctgcggccagcggggccctcctggcttctgtgggcgggccggctgccaggcggggggtgcgcacctcccgtgctcaggaagggtccttcaggtccgatgcctggcgtggttttacggtgaccatgtggattctggtcaggggtctttcctgcttctgtgaggtgctcctgtcagtgaggggccccccttgccttcctggaataaacccccttggtcctggcgtgtgagtttcatgtcctatcacattgtactctcatgctttgttcagacttttgcactgccctgtgaagtggggtgtgtgtgtcatcttgtggtgccatcttggttggggtgaggccrtccttcccccacagggcgatgtccaatacccttggcagcatgggcctcatgttttatggggtccccaaggtacctgccca

SEQ ID NO: 69342 - DNA, 557 bp, Homo sapiens
ttgcatcttatttcccattatgtcagcatgttttagaaaaaaccctcaactttcctgaatatacaagagaatttgacgttgtagaacattgtgccttttaaaaaaattgtgttatttaaaaattttccccacccccccttctgccccccaagactgccaaatcctttttgaacaaatattaggaaatgcttattatgtgccagatatgattcatggtcttggggatatagcagaaaacaaatacctgggtatgaaataatctgtacaacaaacccccatgatgtgagtttaccaatataacaaatctgcacctgtgtccctgaacgtaaaagtaaaaaaaaaaaaaaaaaaagcagtggtttggggtctggcccacactctaatcccccggagacctttaagccacaatgttgcccaggccccactccagtgattctcattttactggtcggtggcagcttgggtttgggaaattctaaatgccatccccccaggtgattttacatgtagcaggggtgagaacaattgattcagggtaaagaatgcattcacygtag

SEQ ID NO: 69343 - DNA, 684 bp, Homo sapiens
atgccaccaacagccatgagcatagccaccaatttctccctcttcaatgccaccagcggccgtgagcatagccaccaatttctccctcttcaatgccaccagcggccgtgagcatagccacaaatttctccctcttcaatgtcaccagcggccgtgagcatagccaccaatttctccctcttcaatgccaccaacagccatgagcatagccacmaatttctccctcttcaatgccaccagcggccgtgagcatagccaccaatttctccctcttcaatgccaccagcggccgtgagcatagccacaaatttctccctcttcaatgtcaccagcggccgtgagcatagccaccaatttctccctcttcaatgccaccagcggccgtgagcatagccaccaatttctccctcttcaatgccaccagcggccgtgagcatagccaccaatttccacctcttcaatgccaccagcggccgtgagcatagccacaaatttctccctcttcaatgccaccaacggccatgagcatagccacaaatttccacctctttttggtaccatgaagatgaatcttgacaatgagagcttttttcagaatgggaattggcagaatggctacagagacctctttctgcacatcagaagacccacacagaggcccctctggaagctgccatctcttcc

SEQ ID NO: 69344 - DNA, 615 bp, Homo sapiens
cctgacctcagccttccaagtggctgagactacaggtgcacaccaccayccccaactaattttttttttttttttttgtacagattaggtctcactctgttgaccaggctggtctcctgacctcaagtgatcctcttgccttggcctcccaaagcactgagattacaggcgttatcccgtgcctggccctctttctacacctcaatcattgtatcattagcctgagctgcccatattccttattctgcccttccctgaccaacctcctcctttaacataacttccatctcgatatgatggggcctgctgggcactgcaaacagcctaagaaaagtggaaactttacttgaccttcaattctattacaaagtccacattgaatgtaatttatatttgaactataaaattttctgtaagttgaaacatgacctataaaggtctctacaccctgaagcaacgttttagaaagaaatcaataggtccttttctgcagaaaccattaaccataggagagataaaggaaaaacttcaatgtactgattgaacttccatgcccatagcttaacttctaaaaggcaaccattccataccgttaaactgccttaggttgttatt

SEQ ID NO: 69345 - DNA, 615 bp, Homo sapiens
cctgacctcagccttccaagtggctgagactacaggtgcacaccaccacccccaactaattttttttttttttttttgtacagattaggtctcactctgttgaccaggctggtctcctgacctcaagtgatcctcttgccttggcctcccaaagcactgagattacaggcgttatcccgtgcctggccctctttctacacctcaatcattgtatcattagcctgagctgcccatattccttattctgcccttccctgaccaayctcctcctttaacataacttccatctcgatatgatggggcctgctgggcactgcaaacagcctaagaaaagtggaaactttacttgaccttcaattctattacaaagtccacattgaatgtaatttatatttgaactataaaattttctgtaagttgaaacatgacctataaaggtctctacaccctgaagcaacgttttagaaagaaatcaataggtccttttctgcagaaaccattaaccataggagagataaaggaaaaacttcaatgtactgattgaacttccatgcccatagcttaacttctaaaaggcaaccattccataccgttaaactgccttaggttgttatt

SEQ ID NO: 69346 - DNA, 625 bp, Homo sapiens
tgaggcaggagaatcacttgaacccgggagatggaggtggcagtgagccgagatcgcaccactttactccagcctgggtgacagagtgagactgttacaaacaaacaaacaaacaaatgaacaaggaatgaaattctggaagatgatcgcgcactgaataaaattagcaggttaaggatcagcctagagagactggagcagaaggatatcctttagatgggtggtcagggcagggtttttcagggaggggacatccaagcagagccctgcaccgcgacaacaaaccagcgtgccaggtctgggygaagaactgccccattgaggggtgaaggccttgagctcacacaagcttgctcttcccaaagagctgcaggaaggtcagggtggcgggcccagtggtagaggtaggcaggctggcacatgccatacagggctttggggccatcgtgagctgcagggggccagaggaggcttgtgagtagggaaggggcatggtgggatctaggggagtgggtggaggcctgggctggggtggggagggggagcagacagaccttgctgatgggttggtgggtgggggagacaaacggctgggacgtgtgggtgaccaccagccctctaatgc

SEQ ID NO: 69347 - DNA, 1030 bp, Homo sapiens
tttcttgctggttcctcacagtggcccgcggcatcacagatgagggactggggcttggtagggttcaggggtaagtacagggcctgggactagaaccggggcctctgactgggaagctcgtggacccctggaactgggcttcccctgaggttgctgagcccatagcctgggtcagagcccttcaaagccttggaccaggtggcagctccaggcttctgccccagggtcccttccgtgcggctgccactcaaggctgcagagagcatgtgcttgtcaggtctgaggcgctggtatcactctccagggcttggcaccacgtgggtgctgagtggttacataagggtcttggccaactgtaccacagctgagcacctcaggctgacgtgggtggcggctcccagcactgtgacgattgggattagggtcagcagtacttctggacagcccaccctgcagcctcaacacctgctgggatcccagagggacagaagtgggggggcgtctcctagcaatgggggcctcaccctgctgtgccaagccagggtgttcacagtcagttctatttactgagagcctgctctgtgccaggcacattgggatagggggatgctgttggcacggagctcctgggggtggatgcattgggggtgggtacaaccaatgtgagagacaccctggcaggagactgtgggatcttggacaacgagtacctgcccaagacctagggagtcagggagggctycctggaggaggtgacagctgagccaagagctgaaggatgacaaagggttaagtggtgacaggggaaggggtgagaatgcgaaggggcacaagagggctaggcctggaggtgggcacggtgcccaggaggtgagggcttcctgggagaccatgggtgttggctccagtgaggtctccggtacttgcgcaagtgtgagagtagatgtggtgctgggtaccacggagcagggaaagtggggagcgaatccccaccctcgcagagcttaaaagcaggggtggacccagcaag

SEQ ID NO: 69348 - DNA, 1030 bp, Homo sapiens
tttcttgctggttcctcacagtggcccgcggcatcacagatgagggactggggcttggtagggttcaggggtaagtacagggcctgggactagaaccggggcctctgactgggaagctcgtggacccctggaactgggcttcccctgaggttgctgagcccatagcctgggtcagagcccttcaaagccttggaccaggtggcagctccaggcttctgccccagggtcccttccgtgcggctgccactcaaggctgcagagagcatgtgcttgtcaggtctgaggcgctggtatcactctccagggcttggcaccacgtgggtgctgagtggttacataagggtcttggccaactgtaccacagctgagcacctcaggctgacgtgggtggcggctcccagcactgtgacgattgggattagggtcagcagtacttctggacagcccaccctgcagcctcaacacctgctgggatcccagagggacagaagtgggggggcgtctcctagcaatgggggcctcaccctgctgtgccaagccagggtgttcacagtcagttctatttactgagagcctgctctgtgccaggcacattgggatagggggatgctgttggcacggagctcctgggggtggatgcattgggggtgggtacaaccaatgtgagagacaccctggcaggagactgtgggatcttggacaacgagtacctgcccaagacctagggagtcagggagggctccctggrggaggtgacagctgagccaagagctgaaggatgacaaagggttaagtggtgacaggggaaggggtgagaatgcgaaggggcacaagagggctaggcctggaggtgggcacggtgcccaggaggtgagggcttcctgggagaccatgggtgttggctccagtgaggtctccggtacttgcgcaagtgtgagagtagatgtggtgctgggtaccacggagcagggaaagtggggagcgaatccccaccctcgcagagcttaaaagcaggggtggacccagcaag

SEQ ID NO: 69349 - DNA, 1046 bp, Homo sapiens
cactatgatttcactaatgcaaaagcttgaaaaaggcaaacgactaaactttttagaggtgcatactttggtgataaacctctgaagaaagtaaggaaatgatccatcagcatgtcacrataatggctacttctgtggggatcaggactgggaagtctgaagatgggcagtattctctttctttagctcagtaatgggaacatcagtgtttatcattattcattaaactggcatttaagttttatgaacttttctatatatggaatattaaaaataaaataaagagtatatagatttctttctctttttttttttctttcgagatagggtgtcactctgctgcttagactggagtgcagtggtgtgatcatgactcactgcagcctcaattttcccaggctcaggtgatcctcccacctcagtttctgtatttttagtagagatggggtctcaccatgtctcccatgctggtctcgaacttataggctcaagcaatccacccacctcggcctcccaaagtgctaggattacaggcacaagccactgcacccggccaagtacatatttctttggccccattcattgtcaactaaggggacttgactggatagacaagtcaaaagagaaaaagcaatcagcaaagcaatagattgtaattatttgtgtacatatttagctccgccactgaacctcaccagacactaacctggagattagttcagaattcatgtattcaaacccagtgcctatccctgaatttcataataaccacactcaaaaatgtgtgttgaaagtacaggtgggtgaataaatgagttatgcagaatccacagtcagctactatggtccttagaatgtgtgtgtgtgtgtgtgtgtgtgtgtgtgtgtgcgcgtgcgtatatgtttgtgtgtgtgtgatgaggtaaaggcttgttgtctctgtgatgggccagtgagatctagtttcatgtataataatagccagcaaagtaaaagactgcaatattgtcagcagaccctacataacatgtatcagaagtgtttac

SEQ ID NO: 69350 - DNA, 1341 bp, Homo sapiens
tttcttgcttcttcatgggtcccatgtacaaaaaatggcagtgttagcatgatcccagggtggagttttcagccctctgacattaaaaggtgaagcagaggacatgaaaactcgctctgtgcatcctctgtacgctggccagaacctctccatcgtgggtggtctcttatcaggcaagaaaggagaggttgatatcagtggtggaggctttgaaagggctggtttctgttaaatccttagggaagaaagcctcatcatggttagcaaaggagggggtataacgatgtgtatcttaaccccatcatcccatcctagcaaagctgagaactcagttttgaaagttactctggggtcccctcagccaagagtgggtctgttcagtcagttgggagcttagaatttaattttcatttatcaatgctaatgggaaagagtacgctgtcttcatggcagctgaatttgcaagaaactccttggatggggttaatggcagctgtatttttctgggagctgtgctttaattggataaagtaagttctggtaagatttcttcatcttcagtatctcaaatgttttcatttaaataatctttataacaacttttgatgtctgagtggattcccacacagtcatctattgtaagactttctgattccttttttttcctttggtcattatgaatagggcttctgtaaataactgcatggtagcttttgatgggaaataacatcaaagtagttgtcaaaatacctaggaatgttatttttggattgtaaggtgagacttgtttagctttggaaaaaaatgaccaacttgtaataggggaggaaaaataattttctgtttttggaattcttagatggaacgctctgtaaaaactgacagattaaaatgagaaaaagagaaaagtttaaaaacatgtatatcttatggttasatgggagatactcagggaaaaatgagtaaatctccaacaggtggctttcaattcaagcataaatactatcttcaacttaaagaaagaagatttgaggtgcagtagtggggagttaaccagcaaaagcacattagacaagggtaaggttcgttatacagacttaagtccatgcattctccattgataagactcttcagtgatttagttatccttctcttcttggtgtcgagagaggtagcttttaaatggtgatttcctttatagatgtaaattttccttacacaagtaacttctactctattttcacaacttcctttgttagcatttttttttttcaaaataattagcttggaataattcttaagccaaagggacatattttggggttgcatattctggtttcc

SEQ ID NO: 69351 - DNA, 518 bp, Homo sapiens
tacagaagggatttgaacttgctttgtaaaataagcagataattaatgttgttttgtttttgtttctgtttgaaaaagtcttgatcatcatgagtgttagatttaaagattttgcaattcttatattttgggagatgctgcagtatatactcagaagaactccaggctgggatataggaaacttggattcccttgtgtgaatctagcaacctttttcacccttagataatgctcatgattaccattaactttcgaatgaagtgagcatggatttcattacttctggtttttttaaccactcctgattcccagcatagctagtgacatctccaaatggatattgacaggtttttttcctaccctggtacctctgactcctgcctgcctttctgggtgcatggaccacaccaagggagtggtctatcttgaaaggtgtgaaatgaaacatgtaattgatttaaaaatagtaaatgttcttctttcccaggatcggktgctcctaggtaactctgaggagc

SEQ ID NO: 69352 - DNA, 1038 bp, Homo sapiens
attcttacaatatctcctttgaaggggaatattctgattaatttatgatgtggtagtaataaatacttaaaataacacatgaacacgctaatataagcactgatttcattattttatttatttatttatttamagacagtctcactctgtcacccagactggagtgcattggcatcatcatggcttactgcagcctcaacctcctgggctcaggtgatcttcccaccacagcctcacaggcagcttagactacaagtgtgtgccatcatgcccagctaatttgttgtgttttttgtagagacagggttttgccatgtcaccaggctggtctcaaactcctggactcaagagaccaacctgccttggcctcccaaagtgctgggattacagctgtgagccactatgcctggcctcttatttttgtttcttattcatattatctaagaattttaatttactgtcagtggttattgctttatgaaatctcagtaacaagaagcaaagaaaatgagatcagtaagtgagaatcctgaatacattacgaacttttctgctcataagtcctcttgtttgaacaaacaggaagcattatcatgaaagtctcttctgataattccactgccattcttacatctatcaatgattgaaataaagtataaaaaatgagactaaccgatgactaataggatagtagaagacccttaaaatagttttattcctctagtacaggtggtcttaaatgggggtcttaaaaaaatgattctaattctcaagatttctagaaatgcttcctaaaaagtaacctttacattatatccttcaaattaaaagcaaagtgccttaacagcgaagtaaaatcatgttccataggaataaatttcctccactcattatgaatacaggtatcagaaagattaaaatttacttctttctgtcattgacacaactactctgcttattcttgcttagttatttcagtacccatgacagtgttccagcacatagctgagtatgtgggacaaattcagaacacagaaa

SEQ ID NO: 69353 - DNA, 823 bp, Homo sapiens
ctggkgtctctacacttcttgcaaggacaccagtcatattatattagggtcacacccaatgacctaattttaatttagtcacctctttaaaaaccttaccttcaaacacggttacattctgaggtactgggggctgggacttcaacatatgaattttaagggaacaccattcagcccataacacacacacacactctttctctttctttctttctctctctctctctctctctatatatatatatatatacacacacacatacatacacatatatatgtatatgtatatgaaggacaaagatatttcaaaaattaatatagaaagaaacggaggagaagaagggaggagagggtgtaagtttttttttttaggaatttaacttggttccacgtaatttaaactatgattacaatgatgagctctttaggcattacattcacttaggaccacctatttctttcttcaagaaatttgtaagatacaaaccatgtgttgagttaaatcaagtaaaatttaatggaaaattacattcaaagtcgcctgactagtcctgtgtgggttatgttctcatgcatttttcatcaccaggaaacagcttgtgaatgtcacactttaccatcaccctcctgagcccaagttttaaatagaaatttaaaaacctatattaaacttcagtataaaatgatcttcaatggggaaaatattgtgttcacagttccactctaaattatttaaaatcagaatgagaggtctgtgtgtttgcttttgtgctcctttaagaatgaatgcaatctaagttaaagaaaaacacagcagcggaaa

SEQ ID NO: 69354 - DNA, 823 bp, Homo sapiens
ctggtgtctctacacttcttgcaaggacaccagtcatattatattagggtcacacccaatgacctaattttaatttagtcacctstttaaaaaccttaccttcaaacacggttacattctgaggtactgggggctgggacttcaacatatgaattttaagggaacaccattcagcccataacacacacacacactctttctctttctttctttctctctctctctctctctctatatatatatatatatacacacacacatacatacacatatatatgtatatgtatatgaaggacaaagatatttcaaaaattaatatagaaagaaacggaggagaagaagggaggagagggtgtaagtttttttttttaggaatttaacttggttccacgtaatttaaactatgattacaatgatgagctctttaggcattacattcacttaggaccacctatttctttcttcaagaaatttgtaagatacaaaccatgtgttgagttaaatcaagtaaaatttaatggaaaattacattcaaagtcgcctgactagtcctgtgtgggttatgttctcatgcatttttcatcaccaggaaacagcttgtgaatgtcacactttaccatcaccctcctgagcccaagttttaaatagaaatttaaaaacctatattaaacttcagtataaaatgatcttcaatggggaaaatattgtgttcacagttccactctaaattatttaaaatcagaatgagaggtctgtgtgtttgcttttgtgctcctttaagaatgaatgcaatctaagttaaagaaaaacacagcagcggaaa

SEQ ID NO: 69355 - DNA, 823 bp, Homo sapiens
ctggtgtctctacacttcttgcaaggacaccagtcatattatattagggtcacacccaatgacctaattttaatttagtcacctctttaaaaaccttaccttcaaacacggttacattctgaggtactgggggctgggacttcaacatatgaattttaagggaacaccattcagcccataacacacacacacactctttctctttctttctttctctctctctctctctctctmtatatatatatatatacacacacacatacatacacatatatatgtatatgtatatgaaggacaaagatatttcaaaaattaatatagaaagaaacggaggagaagaagggaggagagggtgtaagtttttttttttaggaatttaacttggttccacgtaatttaaactatgattacaatgatgagctctttaggcattacattcacttaggaccacctatttctttcttcaagaaatttgtaagatacaaaccatgtgttgagttaaatcaagtaaaatttaatggaaaattacattcaaagtcgcctgactagtcctgtgtgggttatgttctcatgcatttttcatcaccaggaaacagcttgtgaatgtcacactttaccatcaccctcctgagcccaagttttaaatagaaatttaaaaacctatattaaacttcagtataaaatgatcttcaatggggaaaatattgtgttcacagttccactctaaattatttaaaatcagaatgagaggtctgtgtgtttgcttttgtgctcctttaagaatgaatgcaatctaagttaaagaaaaacacagcagcggaaa

SEQ ID NO: 69356 - DNA, 553 bp, Homo sapiens
ggtcataagacaagaactcagaactcaccaaactgtgagagtaaaatagctgtaacactccctcctgctcgccaaactctgggagaaaagaagctgtaacatttcaacaggtactgaagaataagttcatatatatgaggaactaaaagagataccaagcaaggcagtaactgaatcatgcaagaagtgttaaagaaaaaattattccratccttgtttaaatagtaaaaaagactattgtgataggtgtcaagacaattgcatggggaaagaaagattagggtcaactcaggatacaaagaacaagtgaggacttatagacagaagcaggctgggggattggtggatggaaaattactaacaggagacatcaaggctagaaggaattcttgctaagcggacataacatgattcttactgaggcaggcagggtgatcagacatcagggtgaggggattctctctagactgactaagcaagactcttgctaaaactggtctgtgcagcgctgtcaaggatgggggccaagggtgacgcctacttaagaagaggg

SEQ ID NO: 69357 - DNA, 755 bp, Homo sapiens
caacaattagttggctatttaaattatatagcactatagggacacaccaaacttagctctcaagtcctgctatatgacatgtagctgttattcttcagcctgacttagccaccttaaagcaagcaaagccagggagcctgtcatctcttaaagcaggtaactaggcaatggctttcctctccacctggaggaaaggaagtactacatgtgaccaggaggcttgaaactgctcaagaaatgctaacaagataaattaatacctactagagtgaaaactattaaccgtccagaacaatctttctcaaagattataggtacttttaaagtctttcttttattcaggcataataaatgaaaaattcttcaactatctccaagattttgaaataaatcttcaagataaaaatttaatagagttattaacacatctggagatcagctgagcacatcttcaatggrtaggaacttccaagtggttcgttttcttataaagaaatagtgtttgcttctatttgagtcataattaaaacaagtcagagtatatgtgagaactatttggaatattcagagaggatcacatctttccaaggtcttgcactatggaagcagtaatggtgtactgattaggaaaatgatagcttcaagccaccagatgggaatgagctaaacaaactttgccactaactacctgtgtgaacataggcaagatgctaaacctctctaagccctaagattcctgactgttaaatgaagat

SEQ ID NO: 69358 - DNA, 589 bp, Homo sapiens
ttagatcccatctttactgttcagggacttagaaaacaggcaagttagaatcctgtggaatctgccatggaattaaaagagaaaaggtcttgagctcaggaagcaaaagacagaagaggccagaaggaagtggctggctttcttgacaggagtatgtcttctatccctgtaaaatccataagccaaggccacaaggcagatctgattcttgaaaaagaagagattgacttttcatctttgagctcctctgaccacaccctgttgacaagcccatctacttctcctctggatttctcggcrcccccccgcccctcccaggacagctgcctctcattgggcaatgcctggttttcttttagaagcagatctgattccagatgtaatgcccccacaagctttgttccatgatgatgatgagatggaaggcaatggagccatagacgcagggatggagtatgtctacaacattgacacgttgcttaggtgagcagtaaaaaaaaaagaggatgttcttttaaagccactgaaacttggaggtaatttgttagcacagcataacttaccctatttaactgatacaggtaggcaa

SEQ ID NO: 69359 - DNA, 582 bp, Homo sapiens
ttgctttattgttttcaaagtctttctacacaatttattcaatcctatctgtgcccctactccaggctctgagctccatgctttctccataggccatgttgcccttcagggtttagcatcactgcctcctgtccagcttaggagttcagtggacagagactgactctcaggtttctaaggaaacctggcagacagctgggtccgcacaggctctggctgtaaactgtgatccccacaggggcagctgggtcagcacaatcctcatagtctgtccctggccagctggttcctttcctaackctgcaggcttctgaaagccagctcagcttcatccgagagacagacataggacagaacagagccagggtgggaggtggcaccttagggaacgtctcctcagtgtcccctccagattctccttggtgtccagggtgctgagggcgtgggggtgtccggcattctgcatgtgaggagcgagccgggcctccagccgcagctggtccaggcgttgggagacggggtcatgttcaatcaacagctgaagtgtctggctcgtctggctaattgcatcctccacctgtg

SEQ ID NO: 69360 - DNA, 762 bp, Homo sapiens
tccccaggtaaagccttgaagtgrctagagccctaggcaacactttgattgctatactgtgagagactctgaaccagaggaaccagagaagccaccttcagatttatgactcacagaaactgagattagaaatgtttattgttttaaacctccaaattttgggacaagtttttacacagcaatagataactgcaaagcaatgagaatctccaaagaaaacatttaggaatgtagcatccaaggatgtataagcttcttgtattgatttgccttgaaggaatattgaggaaaaaatctctttccctaatcttccttaccactgcctcctacatacatataaaccttcaattaaaatgggccaccaaactgttcctgcacttgtcagaattttttgttggttcataaccatattcatgctgttaaaagatcaatgtttgcatcagtttaagaatcttttgcaaagcaaacaaagcaacagggtaaagatacaagccacctcatgggagaaaatatttgcaaattatatatttgaaaatgggttaatatccagaatatataatgaacttaaataactcaacagcaaaaaaattaaaatggacaaaagactttattagacatttctcaaaagaagacatacaaattaccaacaggtacctgaaaaaagtatcaacatcattaaccatcaggaaaatgcaaatccaaaccaaatgagttattacctcactcaaattagaatggctattatcaaaaataagaaagaaa

SEQ ID NO: 69361 - DNA, 640 bp, Homo sapiens
aggtttcaccaccttgaaacaaaaaagccctaccccaaagtatggcaaccacaacttcctgctttcctaaatggacaggaagtccttgtttctccaaggttccactaacccaggtgtgtataaaagtcccagaagtaagggtcaggtgcccttggcgctggctcctagaaatccacacaagctgtgtatgctaaaagctagtgcagctgaagatcagcacgacaggaccaggcctttatgtagagatccacagctcagggcttaatgggcagagactcaaagagcatctttcttagaggtgcagttaaaaatgagcagtgatcacgatgtactacgcaaaggtcacagccctagagagatatctcttttgctctcaccctcctatcttgattcttctcttttcctcccaacctttatctaatctaattctgtgggcttcactttcagagtttatcctcaaggcagcacttctcaccatctccactgtgaccacctatgtccacgygaatggttcctttttctttccttgcttaaactaatgcaagttctccacccctgccaccatcagttatagtgtcaatgattattcagaaagataaatctcacctggtgatggtttccagatttgcatggctcttca

SEQ ID NO: 69362 - DNA, 603 bp, Homo sapiens
cccttctttttatgatatatgcttcactctggatagtctgatgatccttacttacatcagcaaatttccacttacaaaataagatatttataggtttcagagattaggatatgggcatatttggggaccattattcagcctaccacaggtattttgagccccaatgaattcacgaatacactcccagcttatatttctgggtggcacattctatgccaccaccatatatttcttcactcctcagtccactcttgggcctcgattatatatgcaaaaatcaatcacccacttaaaagtggttattcttgttaatgtttcccaaygtgaacatatggcaacttttttccccattaaaaaaaatgttcatgaacattttttttaaatgcaattgggtaattctggcttattgacatttaacttatctaaaaattttacttgggaaagtgctcaggcttacaaaaaactgaagatgtttctccctcatttcatggtcttaaaaagaaacatacagttcccagtgttttgtttctgtgagactggcttttgttctaattttacatttagctagtcctcagtgaggaattttttttctgaatcaaaatt

SEQ ID NO: 69363 - DNA, 527 bp, Homo sapiens
tcaacatttataaatagatcaatgtaatttatcatctcaatggactgaaaaataaacactatattattatatcaataaacaaaagaaattattcgataagcttcaaaactcattcatgattaaaaaaaacttgragtgaagtgcaattttaccttacctacatacctaacaaagagtatatatggaaaaccaatagctactatcatacttaaggccaagagactgaatgctttatctttaaaatcagaccacaaggcatgaatgtcctttctcactgctcatattcagcattatagtggaagtcccacctagctcaataatgtaaaaataatattagttatacatattgcaaacagataaactctaattgttggcagatgacatgataatctatgttggtttcactaaaaagcagagactgggttattcgttcaaatttcataaacaaatagtattacgttacagtctttgtgtttctgaataaaccagaagtcagacatatgctactggtaaaagaaagatgtttg

SEQ ID NO: 69364 - DNA, 527 bp, Homo sapiens
tcaacatttataaatagatcaatgtaatttatcatctcaatggactgaaaaataaacactatattattatatcaataaacaaaagaaattattcgataagcttcaaaactcattcatgattaaaaaaaacttggagtgaagtgcaattttaccttacctacatacctaacaaagagtatatatggaaaaccaatagctactatcatacttaaggccaagagactgaatgctttatctttaaaatcagaccacaaggcatgaatgtcctttctcactgctcatattcagcattatagtggaagtcccacctagctcaataatgtaaaaataatattagttatacatattgcaaacagataaactctaattgttggcagatgacatgataatctatgttggtttcactaaaaagcagagactgggttattsgttcaaatttcataaacaaatagtattacgttacagtctttgtgtttctgaataaaccagaagtcagacatatgctactggtaaaagaaagatgtttg

SEQ ID NO: 69365 - DNA, 527 bp, Homo sapiens
tcaacatttataaatagatcaatgtaatttatcatctcaatggactgaaaaataaacactatattattatatcaataaacaaaagaaattattcgataagcttcaaaactcattcatgattaaaaaaaacttggagtgaagtgcaattttaccttacctacatacctaacaaagagtatatatggaaaaccaatagctactatcatacttaaggccaagagactgaatgctttatctttaaaatcagaccacaaggcatgaatgtcctttctcactgctcatattcagcattatagtggaagtcccacctagctcaataatgtaaaaataatattagttatacatattgcaaacagataaactctaattgttggcagatgacatgataatctatgttggtttcactaaaaagcagagactgggttattcgttcaaatttcataaacaaatagtattacgttacagtcttwgtgtttctgaataaaccagaagtcagacatatgctactggtaaaagaaagatgtttg

SEQ ID NO: 69366 - DNA, 567 bp, Homo sapiens
acatggaaccaaatgcatagatcatagaagacttcctagaggaaatgatctctattatgaataatgaaatatatgtaggagttactgaatgagagaataatgcgcaaaggttcaatgcttagaaagagcatgaaaacattgggatacctgtgggggtttcagcagagcgcaagcgttgggtacacagtagagaaaagaatatggaataagactgaaaaagaacgttaaaaaaaaataggaaactggggaggtaagggtgtcctgacattaacagtcttgtgtgccatgacatggagtttagacatgatataaagatcatgagragccactgaaggattttaagcatggatatttgcatcttggaaagatcacagtatcaaaaacattgaaaacaacagaattagaaacacagaggcctttaaaatctcttacttggtaaactggtttagaatttataaggaattcaaataggaaatggcagaagtagggtcacattaaggactcaactattgcaaagattatgatgtatactactgtaccccatgtgtatttcaaataaaaactata

SEQ ID NO: 69367 - DNA, 2516 bp, Homo sapiens
gctgagaaggaggtataattctcacaagctgatgtattcaacagatcagggtaaggttcaggcaaagttcccattttcctatctaggtcgtagatgcggcagggcgggcttctacccctgtgccttcccggagaaccactggcaggtttccagcagaagctatagaagaggcccttgacctactttcacatgctgctgggctcgcatttgacatgacttccagcatcttgctaattgtctttactcccagcttctgactgttttctcactttttcttggctgcctcctgggattaccttctgttcacccttggtttgtgttttactctctggctttggaatatcatccattttacttgcttgcctggttctcatcccagatcatctctgactagattcaatatatcttgtcccctcacccgttttctgagagaggctgtgttattttttcctctcatttgcctctttcttctatgccacactctctttcccagcctctcctttattatttacacatttagaaactagaaactgccagacatgtcatttaaattctgcgtaatgcctatctatgttactgggaattattaatttctcattgaatatttgtcatagtgaatatgaatcaaactaattttcaagctactcaattaattgtgatcataaaagtagtttggtgagtcaggattttttacaaaatgaagtagaatgtgatagaatggaaaatgccagagtacatagtaaaacagagtattgtagagtatttgtgaaacttgtgtttcacaaaagttggggatcatagagttattttttaatactgtaggtcatggttaaaaaatttgaaagccatgaattagactgaagggtgggttagataaatacagtttaccccacccacccaggccttgtcattgggcagctctatgctctggtcatagtgattggccgaggaagacacacgtgacataagccaatccggagtcctctctgagactgtttttttttttttttttcttgagtatcaggaacaaccttttcttttcactggagtgactaaattgataaaacatgagtttaaggttactgatggacatattggagaaactgggaggcagagacagtgccccttgtcccagtgtatccctggacttttcattacgtaaggcaatgcattcccgttttggcttaagatagtttaagttggatttttgccctttgcaacaaaaaaatcctgggcaacttaaaagaacatgatgaggagtgagaatagctggatttaggcttgccagtgtcacatactaaatatatgactcttggaaaatctcaaaggctctatagctctcaatttgcttctcaactgaaataagaggagtgcatcaaattggtgactcacagtgcttgttggtcatcagaattccctgtggagctttaaaaaatacagatatcttagctccatattaggttttctgaatcaaaacctggtggagtgtggtccaggcaggtacttgcaattttttaaatgaccttagatgattccgacgtacaaccaaggtaggtaagtgctgaactaggtcatctctctaagatgtttatacccctaatactcagtgccttgtgattcctcagaggtcacacagtctgattgaattttcagctgttggtatagtgacaaatacagaatttggactcactctatttttgttcagtggcctaggatgaatgatgtaatgtaaatgggaataatgactaataaataaatgctatcacaattcctaattagccttatagacaagcagcaatcaccactgcatcaattaagtgttcttagtgcagacactcacaggacggtctagcatcataacaaactcttttagtcttttgagaagtagggggttcaaggggaggagtgttaaagaaaaaaaaagtgcaagaaagtgggatgattaaatttgctttgtgtcattacaaatatttctagtatccagaagtgtcacatttcagttctttcctgtgtcacagcacgaatgtaaattagaaatgttagacaagcgataatacaatggcctcagtgatctttcttaagtaattttctcttgcccaaagctttcattctgtatagaaatggcatatttctgtcattaataaaaaacacatggagataagtctcactacccctccagattcgtgtctattttcctctttaacatgcttcaagataatttattcatctattcattgtttttcacaggcacactaacaagacgagcagacttgaaatgctttgtctaggagagtggtgtcttggtacattttcgttatgctcctctcactcctactctttggaggaaaatacagtgagttatgggatagctgcagggatgtatacacatccttcragtgcacatattcatcattttcacattctgggggctccagggcagtggccacagaggagagaaggatgtgtagtgtgtgttcttgaatgattgctgaagacctttggggaggggaaggaag

SEQ ID NO: 69368 - DNA, 2344 bp, Homo sapiens
tgcatacagtaatttctagcctttgcaacctggggttagcaaagatatcctaacatatgaccacagcagaaaaaaataataaattgtattctttcaaattttaaacttctgcttatcaaaggacactattaagaaaacaaaaaaggcaaaaaccacaaattgggaagaagtgttacacacacatggagacgtgtgtatgtgtatgtgcacatactatatatttattatataaatatatacacataagaacccatgcccagaatgtacaggaactccttcagcttaataatcaaatgaccaaaaaaaagtagagaatgggcaaaacaatttgacttcacaaaagttaataaacacatgaacaataaacacatgaaacatgtttgacattattatccagcagggaaatgcaaattaaaacaaagggataccatttctcacacacacacacacacacacacacacacacgtgtgcatacactggaaagcctagggctagaacaaaacaagacttaacaatacaaatgttggtaaacatgtagaataactagaactaaaatatactactggtgggagtctacaatgatataaccattttgaaaagctcagactttttagaaagttcaacatacatctcctatatgacacaactaattaaagagaaataaaaagtatgcaaaagtggacggagttttgctcttgttgcccagactggagtgcaatggtgcgatctcagctcaccgcaacctctgcctccagggttcaagtgatcctcctgcctcagcctccagagtacctgggattacgggcacctgccaccacgccaggctaatttttgtatttttagtagagatggggtttctccatgttggtcaggctggtcttgaactcccaacctcaggtgatccgcctgcctcgacctcccaaagtgctgggattacaggcatgagccaccgccgcactggcccagactcaaatttacactgagaaaattacactagaaaacactacattgaaaaacttccgcttactcgatttcttttatgcataaactattccaggcagaaaaagaagccttgtcagtatctcctgcccaccaaaacaaagatctgaggtcccacaacatcctactagtaccttcctctaaggaactcttttacttaaaacacacactctctcaaggaaataatcctattatcgagagattaaaataaagaaattggcatcatttggcaaaaagacagctagagtgaaaggaaggaagaaaggaagggagggagggaatgaatatgcctttcaacacagctaaataattccccagcatccttagcttatggtaaaaatgtggggttcctgagaggctactcttgtcagggggtagccagagccctaaagttgaattctcctaagcaaatccatatgaaaggaaatgttacataattaatacaagggaacaggaagggatatagctcaaagacaaacattttgttttgtttttttcaaaacagtttaacatttctccagctttgtcatatgcaaagctaataatcccctataaaagaggtaggaattaagcaaaggcgctttccaccttaggtacttaacccactctcttttataggagataatcaagtgtctaaatgaaggttatgaattcttcctgtcagaggaaaataaaaaaacctgaaagtatctgttaaaaatcagaaaaaggttagtagaaacaccagtggcttaaatgtagttataaatatgagaaaattaatttgcttctctaacagctttattgcatttttgcatacagtgtctattatatcctgagggcaatgattttaacctcatgaaaactcattgcaatgaccgtccaaaaaacatgattctttgcaattagcttatctatcaccacaaacagtaccaagattatcctcatcttctttctggaaaagagcaactactttcttctcaaatattcagttaagagccaaaggctgctttggattcttacttgttacagccgtctggcctgctgtcagaagggcccaccacagtgtccatgaatgttgcgatgttagaaaatcctgccggcaattcatcccattcatcaaatttgatgccactgcccaaggaataggtgccttcaccacacttactgcatacctggttcttcatttctagatactctccagaagcacaggagaaagctggaaggcagaagaatggacaacccattacttaccctcccatcaatttcctccccttcatgctgtcaccagaattatttttataaaactctgattgtgccacactcwaacgaaagcctttcaaattcctcttatcactacatgca

SEQ ID NO: 69369 - DNA, 656 bp, Homo sapiens
gtgatagactggattaagaaaatgtggcacatatacaccacggagtactatgcagtcataaaaaatgatgagttcatgtcctttgtagggacatggatgaagctggaaatcatcgttctcagcaaactaccccaagaacaaaaaaccaaacaccgcatgttctcactcacaggtgggaattgaacagtgagaacacatggacacaggaaggggaacatcacacactggggcctgttgtggggtgagggaagtggggagggaaagcattaagagatataccgacaagttaatgggtacagcacaccaacatggcacatgtatacacatgtaacaaacctgcacgttgtgcacatgtaccctagaacttaaagtataataagaaaaaaggaaaaaaaagaaatgctatttacattaaaaaaagaaatataacaaatatatttgattaagcaatattcacacatattttacatgataaattatgctcacattttcctgttttatttctctccatcctatacgttaggtatttcakaaattttgatgtgtattaattttgtttttgaggagggtggtggaaagggtctccctctgtcactcaggctggaactcggtggtgtcatcttggctcactgcaacatctgcctcctaggatcgag

SEQ ID NO: 69370 - DNA, 1054 bp, Homo sapiens
tttttcttcctttgaaattgctaaatgctttatgcattctgatttaaatgccttttggaattgggatttctgaagtttatagatgcatttacctttatgactaaaaatctctcagaaacttatataaaatacatattttgtatttttaaattatgagaacagcataggagaatagtgtatataatatgtaaagttattccctggggtccagagaggcttggtttctaggcctcccatggataccaaaatccaaggacactcaagttcccratataaaatggcatataacctatgtacatcctcctgtatattttaaattaactctaaattacttatacctaatacaaggtaaatattatgtaaatagctgttccactgtattgtataggtaataatgacaataaaaaagtctgtacatgttcaatacaaatgcaattttttaaaaaatattttccatccatggttttttgaatctacagatgcagaatccatggataccaacgatacaaaagaagattctgcaacccccttttatctgaaggaaaaacaaaatcagagaccatacttctagtttttttttctgtcatctgaaagcttgtaggaattcatctaagtctgtaggttatctcattagttaatttgttcttataccctaactaaattcaaacacaaaataggaatttttataaaaataacaaaagcacagtaattgaaagtgcctttaataaactggatgccttgtgacattttatctttcaataatatacaacttatttatatttatttaggttcttttttcattttatttaacttttgttgcatggatttctaaagttcttcatcatctcaatagcaatgatgttattaaaatagctacgccacatttaaggataatttgtaatgttaccttataagaacaaatgatcaaattatctcattggagaggaggaaaaaaataacactttattggcccattgtcaagttcattgattgtatatcaacaaaagaaaactattatctgagggccaatatccaattaaatatgctagcatgc

SEQ ID NO: 69371 - DNA, 760 bp, Homo sapiens
acttgcaattctctttttttccatgtgacccacagaaaggaccaaaagcctgttaggccacctgcctgcttgattgcctccttccttctttcactccccaacctttttttttttttatgagaaaaactctgagaagtacaggttattacacgaggagggttgtgtggaagattgtgcagttgcaggggcagttaaaaaccatttcttacgtaacattttaagaagcagttggttggagcattttaaaactccagtagttgtgcttaggcataagcaatgagatcatatttttatgtttttttttaagaaagacagatagataaaaaaatcaataagaccatgaattgactcattaaatattaagtatggtatttgtggcagagtgtaactttgacactaagaagtcatttatgattctttattttcttcatttttttaacctttgaatttcttcagccctggatttttggagaaaataaatgaaaccacatccctttatttagagacaatggatgaaatattttcagaaaatgggatatttcagtggaaattcttgcctggtatgtcaccactttgaaaatgattaaagaaaatggagttttccccagtggaggcaggtactytgacttgtcaaatttaagttggacattttctcttagtttggaactgccacaaaatgagccctttcatgtccacaataataccaaaccaatgcaacccatctgttctgctaaattatttctagttccctaaccaaagg

SEQ ID NO: 69372 - DNA, 2133 bp, Homo sapiens
cccaagtcctttagaaaagacaccgagaaaaagaaacagaccttaaattcttattgtgtacagaggaaagggagaaagcatttcatcctactttctgttcttcagtattgtagagattgacacttatgtggaaccccaaaaaaaaaaaaaatcacctggatacttcagaaattggagatgtcattcatgtggcgaattgcatataaaatttaagctgagaggttatgtatcacaataagaatgtataataattgacctttcatgctttactatcttcactaattaaagtctaccatatggctggtagaacaatgtagccttaggctgatcaattaactagggaccagttagggacagaagtaagacagcggtcatgattctctgtgagtgtcttcctaataagaggtggaatggtattccactcctctcacgttcctttccccattagttcaataaatatttgatccctcaaagggtttacgatctaataatggggactgactacattcagaaggaagcctaaaacaggagaataatatgccactgtttactgatgtttcctgggtgctgccactgagccacatgctttacatacgttttctcacttaccctgtataaccccatgagatgagcattgctcccattttttatatgaggaaactgagccctggagaggctgtgtaagccagaggtgcccacagctgggaagtgcagagttaggactccaactcgagtctgactccttggtttgtgtcttgcgcactctgcccaaagagagatgcagactcggggccacaggcattcagcgggagaggccagagaggggcaagatggaacaaagaccttgtaaggggaagagatgcctcctccccttgctcccctacactaagcagagactccatatcaatacgcaaggcaggtggacaaggtctgtgcccagatataggaaacagagaaaacttggagaaagagaagtcacagagaactaaaaatatgcattttatcaaatattttaccagatcaactaataaaatggggaatttgactaatttggccatatatatattatgcttagaaaagcatacatagtaaaggttgtgagtatgagtgtgtgtgtatatgtgtatgcatgaacaagtgttgatcattttctcttttaataaaaataaggaaagcaactgcctgactgatgtgatacttgcaaagaacacatagttgcctcttatttttctatatgcaagtatacctactttccaaaacatctagcatattttcccaggatccctgagaggtgttgttctatccttgtctttctaacaatggggaagagagaagattgctagtattctctaagagtaccttcmtaagacgtggtcagcaacagaacttttaccaccccaatcctactcatttttggagattcctttaaaatataccactatttcattaatcatgtgtacaatttggacagtagaatttttaaaagaaaagctagtgtcatataaaacttagcaagctttaggctgggcacagtggctcatgcctgtaatctcagcactttgggaggccaagacaggaagatcgcttgaacctaggagttcaagaccagcctgggcaacatagtgagacagtgtctctacaaattttttttttttttaattagctgggtatggtagtgcacacctgtagtctcagctacttgggaggctgaggcgggaggatcacctgagtgcgggaggtcaaggctgcagtgagcagtggtcatgccactgcactccagtgtgggcaacagagtgagaccctgtctcaaaaaaaaaaaagcaagatttggccaggcgcggtggctcacacctgtagtcccagcactttgggaggccaaggcgggtggatcacttgaggtcgggaggtcaagaccagcctggccaacatagtgaaaccccgtctctactaaaaatacaaaaattagccaggtgtggtggcacacgcctatagtcccagctactagggaggctgaggcaggagaattgcttgagcctgggaggcggaggttgcagtgagcagagactatgccattgcaatccagcctgggtgacagagcgagactccatctcaaaaaaaaaagcaagatttaag

SEQ ID NO: 69373 - DNA, 1066 bp, Homo sapiens
actaaaagtaatgtgcagatgagggtcttggactcctgatatcttcagggtttttaagacagaaattcattgatatggggccagatgcagtggctcacccctgtaatcccagcactttgggaggctgaggtgggaggatcacctgaggtcagaagttcgagaccagcctgaccaacataatgaaaccctgtctctactaaaaatacaaaaattagctgggtgttgtggcaggggcctgtaatcccagttactcaggaggctgaggcagaattgcttgaacctgggaggcagasgttgcagcaagccaagactgtgccactgcactccagcctgagtgacagagtgagaccctgtctcaaattaaaaaaaaattataaattcattggtatggatttccattgtatcttataaatcccgtcaagaagggggctagtgccttccagaacttccttttcaattaatttccatttcctattgggttaagtccagcttcttttagtgtagaatactgaatccttcacaatatggctgatgtcagcatctcaagcttctgctcccatcactccacacaaatgctcacctcactcaggtggctgacaatttttctgtttgcagagcacttgatgtttccctggttatccccatggcggttttgcctggaattttatttccagttcttctgcctgagaaactcatacacatctttcccaaaggggctctctattctgtgaattaggtagagggatggaagcgacttggagggactgtttagaatgtgcagcacaggggagtgactggggcaaactgtgtgatgggggcagacagacaggggttgggaagtaatctgagatgaggaggaagaccaggagaaacaggcaattggaagggacaggggaaacaggaaggtctgaaagagacttggggaggcttagacttagacttggagaatgctatagaaaatgtgaggagatgaagaaatggatgagactaggggtgaccggaaggcagtagagattagggttagagtcaactatgcctccctctattctgtatagcaccccatggg

SEQ ID NO: 69374 - DNA, 930 bp, Homo sapiens
ttccttgtgggctcatctccctttttgatgatttgcttctaaatagcagtaaaggtgagcaccgaaggcaatgctgtgccagggaatcctgagtgtcttgcctccagcctctagggctgccacaaatgcctgtggggtatgtgtgctgccaactccagggatgtcattgtcaatcacacagactacacacatgatgaaggatgcttcttggagttgtatagggcacagtctgcacaaccacacagggctgccctgccagcctccttcttcctgcagaaggtacagaactgttttgagtgcctcagctccagctgcagctcaaggcagagaaaggttgagtgtaaatgccaatcaagaggcaaacggcccaggtttgctgcccaaggcttgttctggagaagattgtgtctgggcattgtggtgactggtgatggtggtggattattgattgtccttaatatagattatcaggaggcaatatagcaaagtggttatgagagcagactctggagcaaacagacacggtttcaattttgctctgctacttactctcactgtgtgatttgggcaaatcacctgacctctctgtgcttccatctcctcgtctaaaaaacaggtgtatactaatatgcggccaggcacagtggctcatgcctgtaatcctagcactttgggaggccgaggctgatggatcacytgaggtcaggagtttgagaccagcctggccaacatagtgaaaccccatctctactaaaactacaaaaattagccggacgtggtggcggacgcctgtaatcccagctactcaggaggctgagacaggagaattgcttgaacccgggaggcagaagttgcagtgagccgagattgcgccaaggcactccagccagggcaatagactgagacttcgtctaaagaaaaacataaaat

SEQ ID NO: 69375 - DNA, 930 bp, Homo sapiens
ttccttgtgggctcatctccctttttgatgatttgcttctaaatagcagtaaaggtgagcaccgaaggcaatgctgtgccagggaatcctgagtgtcttgcctccagcctctagggctgccacaaatgcctgtggggtatgtgtgctgccaactccagggatgtcattgtcaatcacacagactacacacatgatgaaggatgcttcttggagttgtatagggcacagtctgcacaaccacacagggctgccctgccagcctccttcttcctgcagaaggtacagaactgttttgagtgcctcagctccagctgcagctcaaggcagagaaaggttgagtgtaaatgccaatcaagaggcaaacggcccaggtttgctgcccaaggcttgttctggagaagattgtgtctgggcattgtggtgactggtgatggtggtggattattgattgtccttaatatagattatcaggaggcaatatagcaaagtggttatgagagcagactctggagcaaacagacacggtttcaattttgctctgctacttactctcactgtgtgatttgggcaaatcacctgacctctctgtgcttccatctcctcgtctaaaaaacaggtgtatactaatatgcggccaggcacagtggctcatgcctgtaatcctagcactttgggaggccgaggctgatggatcacttgaggtcaggagtttgagaccagcctggccaacatagtgaaaccccatctctactaaaactacaaaaattagccggacgtggtggcggacgcctgtaatcccagctactcaggaggctgagacaggagaattgcttgaacccgggaggcagaagttgcagtgagccgagattgcgccaaggcactccagccagggcaatagactgagacttcgtctaaagaaaaamataaaat

SEQ ID NO: 69376 - DNA, 997 bp, Homo sapiens
gcacctcattgaatcttcccaacgattctctgggttacttatttttatccccctgttttgtagatgagagaacagagcctcagggaggttaagttgcccaagatattaagtggcatgccaggattcaaacctggagcccatacagtgacccatcaagcttcccagaagctgtgaacatctaggctgtaataacaccaccacctgcacagacgccacccttccccatcctcctgttcctgtgtacacagatttaatggtcagggaactggcatcgaaggccaacgttagctctggctgctgtacacctttgtaccaggaccttggcctctgtccagcatttaatgctcctgcaggaagttctccagccagagttggcatttgtggcctcaattaccccactttgaggcagggtcttgggtaaattggacatgaagtgactggggtgcagggcccggccccgcagagatacttcttgatagatccatctctcactggccaccatgtccaacatgggagcgccacagggctgagggaagacattggagccagcctcacagtcccattcattttctctctcttgaaactggctcctgttcccaaagttgctcccccctgggagggagatctcagaacccccataaacatacccactggagcccaccaaacccagattctaaactcacctctgccctttatcagtggagtgagcttgcaaaatcacaccaactcctggagcctcagtttcctgagctatatatggggacggtaacagacytgtggcaaacaagacctggaaagcacctagcacctggcacatggtaagctatcaataaccatgagccattacaattcttcctcactcgaatgtgaatttcataaggaaagagaccaggtccctcttgtttgctactgtatcgtctgtgccttgcacagtgcctggcacatagtaggtgctcattaaaagttggtgaatgaatgagtgcatgggtggtggaaa

SEQ ID NO: 69377 - DNA, 909 bp, Homo sapiens
tgcatcatcgtacacaggttcagaagtgtaatcctatgagtgcttttttagagcacgctttttttttttcttactttcttggctccttctccctgtctcattcctcctcttcccatgggtccctcccaggtaacttataaaaatcaagtgcatgaccttctatatttttcttttctttctttctttttttttttttaagacaggatctcactctatcacccaggctggggtgcagtggcaggatcttggctcactgcaacctccatctcccaggttcaagcgattctgctgcctcagcctcccaagttactaggaccacaggagtgcaccaccccacctggctaatttctgtattttttagtagagatgggatttcgccatgttggccaggctggtctcgaattcctggcctcaagtgatccacctgcctcagcctcccaaagtgctgggattacaggtgtgagccacaatgccagtgcccagcctatttttctttttctttttcyttttttttttttttttttttgagacagagtctcactctgtcagccaggctggagtgcagtggcacgatctcagctcactgcaacctctgcttcctgggttcaagcaatcctcctgcctcagcctcccaagtagctgggattacaggcatgcaccaccacacctggctaattttgtattttcagtagagacggggtttcaccatgttggccaggctagtctccaactcctgacctcaggtgatccacctgccttggcctcccaaagcactgggattacaggtgtgagccactactcccagccatttttcttaattcttatataatcctattctcttctcatccccccaacacctcgccctctctctgtttctctctagcacacacacacacatgcctacacaca

SEQ ID NO: 69378 - DNA, 1667 bp, Homo sapiens
tgcccacctcagcctcccaagctactgggattacaggtgtgaaccaccacgcccagccgtggtctgaaaccttaaagatcagggttgccatttactgagatggagaaaacttacacaaggaggagggtgagggagaagcttctggtgttcagtgctggataattcttaatttggagatgtctaatgaacatccaagtgagattgtcaaggacacagatagatgtgcttggatttcagggaaaatgctgaagaaatttgggagtcctccgcatatagcttatctttgggctcagaactggctgatatttaattttctgcttcttttttgaagaggacagaaatacaaattacttcgttacagaaaagtaaacacttttatgtgttgcacgtccaagattgtggagtgaaattcgtaccttctacgttcagatgggttgcagctctttaaacccagccaggcatgactgatctggagccaggcagggccgggcttgctgggagggtggaggaagcctgcagagctccgagctctctccagtgtttctgcagagcccctggagaacaacagctgactttgtgtattcagtaaagatgcatctgtcatgcctactagcactgttttcatcctgctgagacttgtcggttgaaaagccagaaggaatgcacctggtttgctagcaccaccgaaattttgccaaactaagggatgcagattttagaacaacaatcttccattgttggtggtcatgcgcagttaacaaccatcaccaacagttagtagtaacaatgggttcagtcctttccgtgtgcccagcactccgccaggggctttgcgttcatcctcttgtttcgctcttacatgaagcttgagagggaagtatcatttttatttttatttttttaattttaatttttttttttgagacagagtctcactctgtcacccaggctggagtgcagtggaacgatcacagttcactgcagcctcaacttcccaggctccagtgatcctcccacctcagcctcttgagtagctgggcccacaggcaygcatcactatgccggctaatttttgtatttttggtagagatgggatttccccatgttgcccaggctggaactcctgggatcaagcaatccacctgccttggcctcccgaagtgctgggattataggcgtgagccaccatgcctggctggtaggtattattattatgagctctagttttccacgtattaaacaagcacagagaggttaagcaattttcccaagggcacacagcaagtaaatgaataatcaggaggcgaactcaaatatgtctgactttctagtcttgtgctttggaagaataacaccaggaaatgtcagaagcttcctctttcaccactatgcagtcagtggctagagaaggtgtggtctgggttccccaagtgaccatgtgcctcctcaccagcccctagcacaggatcggcacataattggtgttcagagcttcctgaatgaataaacggatgaatgactgaataaattaacaagcacacaaacgatctgcaaatatcacattgcattgtgcttagtaattaatgagccagctcaggctgtgggctacttgaggagagagacacttccttacatcctgtaacaatgatgtccaacatgccagaaaa

SEQ ID NO: 69379 - DNA, 1667 bp, Homo sapiens
tgcccacctcagcctcccaagctactgggattacaggtgtgaaccaccacgcccagccgtggtctgaaaccttaaagatcagggttgccatttactgagatggagaaaacttacacaaggaggagggtgagggagaagcttctggtgttcagtgctggataattcttaatttggagatgtctaatgaacatccaagtgagattgtcaaggacacagatagatgtgcttggatttcagggaaaatgctgaagaaatttgggagtcctccgcatatagcttatctttgggctcagaactggctgatatttaattttctgcttcttttttgaagaggacagaaatacaaattacttcgttacagaaaagtaaacacttttatgtgttgcacgtccaagattgtggagtgaaattcgtaccttctacgttcagatgggttgcagctctttaaacccagccaggcatgactgatctggagccaggcagggccgggcttgctgggagggtggaggaagcctgcagagctccgagctctctccagtgtttctgcagagcccctggagaacaacagctgactttgtgtattcagtaaagatgcatctgtcatgcctactagcactgttttcatcctgctgagacttgtcggttgaaaagccagaaggaatgcacctggtttgctagcaccaccgaaattttgccaaactaagggatgcagattttagaacaacaatcttccattgttggtggtcatgcgcagttaacaaccatcaccaacagttagtagtaacaatgggttcagtcctttccgtgtgcccagcactccgccaggggctttgcgttcatcctcttgtttcgctcttacatgaagcttgagagggaagtatcatttttatttttatttttttaattttaatttttttttttgagacagagtctcactctgtcacccaggctggagtgcagtggaacgatcacagttcactgcagcctcaacttcccaggctccagtgatcctcccacctcagcctcttgagtagctgggcccacaggcatgcatcactatgccggctaatttttgtatttttggtagagatgggatttccccatgttgcccaggctggaactcctgggatcaagcaatccacctgccttggcctcccgaagtgctgggattataggcgtgagccaccatgcctggctggtaggtattattattatgagctctagttttccacgtattaaacaagcacagagaggttaagcaattttcccaagggcacacagcaagtaaatgaataatcaggaggcgaactcaaatatgtctgactttctagtcttgtgctttggaagaataacaccaggaaatgtcagaagcttcctctttcaccactatgcagtcagtggctagagaaggtgtggtctgggttccccaagtgaccatgtgcctcctcaccagcccctagcacaggatcggcacataattggtgttcagagcttcctgaatgaataaacggatgaatgactgaataaattmacaagcacacaaacgatctgcaaatatcacattgcattgtgcttagtaattaatgagccagctcaggctgtgggctacttgaggagagagacacttccttacatcctgtaacaatgatgtccaacatgccagaaaa

SEQ ID NO: 69380 - DNA, 748 bp, Homo sapiens
cctagggtttccttctgaatattttttcctgccatattttcttcgctaaaacatttttttttcttatttcagaagcaatacatcttcattatagaacattacaacaagatgcagagaaagaaaataatcttatcaagcagaaatgttaataccttgctatctacccwtgtctctctgtctctgtctcctcaaacacacacaaatggggtcaagatgacataagagactatctgcttttcaattcacattttacgatctttttttttgtatggttctgtagtctccactgcttggcttgacgatctttaacaggtgccctccggatggtcatgggggtattttccatttctcactgttacaagcagtgctctgatgaaacaccttttgctggcattcctaattatgtcctgagagcagacttctagaagttttcagcagtgaggttaaagggaatgtttgcctctcctcttcactctgtgatgctcctgggggcccaggcccatgagtctctgtgtccatcttcccaagatgaaagacaaagaatgggcagagcattgacagggccctgtgttgactccttttctctcttttcccagtttttttttttttttttgagacagagtctcgctctgttgcccaggctgaagtgcggtggcgcggtcttggttcactgctacatttgcctcccaggttcaagcaattctcccgcctcagcctcccaagtagttgggattacaggcactcacca

SEQ ID NO: 69381 - DNA, 1786 bp, Homo sapiens
gtttttaaggttttaacaaactctctctggcagtttctgtttttcctcacttttcaagcccatggactatctcccagtgctgttcattttaatattctgcagagtacttaagcattacagaatatagaagctggaagatacttggcagtcatttagtccctcatgttctagatgagaaaactgaagcccagataccttattatttgtgcagtcccccaatctgagtgtcaaatccacctctcccagttgttttctgttcaaataaccctgtgaacttcagtgaacctcactgaccacatcattattcaccaatagttccccaatagatccactctacattagctcatttcaaatgttctttttcctttcacgcacataccatacagtacttaaaattctgttgacaacaatcaatatgaattcaaattaagttcttgccccaaggatgtgacttctactacacagtttcttttggcctgagggcaattcctagggcatgaacttagtcatatgccctcaacagacagcactctaaggaagctggggaatgagggtctccattctgcagggaggcctggactacgcaccacagaagacactactctgtccatccctcatgtcatttggatccatgacttcatataacttctytccatctaggaatagctcctccaggattttggttggtttcttttgctggggaaacgtgaaagtaacattcatggagggaaaaatagctccttggctcttcaactggtctttcaccctaaactgatcatctgcctttcctactatacaggtactatcaggtttacattcttaccctcagctagcacctccactggtctaggtcacttacctggtgataggagaggggggtgtagtagtcatggctactagacttgtccttttaaattgagcaatcaaaatttagtaagggactacttaaacatcccttggctgccaaacacattcctgtctacttccgttgtgtaacagcattgaattgcagagataagaagcagaaatttcccaagtgaatccctgggggtgacggtaaatagtgctactctttctttaatccatggtcctctttctattagcgacatgggaccatataatggttactgatctaggatatatgcttgtatcccatccctgcagcttcaaagggctactggagtctgttccatcactccatcagtttgacagcttctagttgttgtgatttcgtgatttgtattaggatcactgaaatgcattttcatgtgtccaccactgcaactgcagtgctacaaagtacattccctttatacagtgctataaagtacaatgcaaggatgtgtaggattccatattggaggattaaacattctgtcaatccttggatagtggtgctggttgaggccatgtaagtaggaaagataaatccatactcagaataagtatcagttccagccaagatgaatcattacccttcctgtgatggaaagaatccagtgcattcagcttgccaccatgtggctacttagtgtccttgagggatgatgctatcttgaggcctcagtgttgctctgtcttgatgacaactttgacattcagaagcagcagtagctagataagacttagtcagtggagacttctgctgtttgggcctctgcatagcctccatccttgtcactatatttattcaccaattgtgccagtactgagctggccaatggaagaggttggctaacatcatctggctgagtcacttttctccttggttgttgatagatacctc

SEQ ID NO: 69382 - DNA, 1786 bp, Homo sapiens
gtttttaaggttttaacaaactctctctggcagtttctgtttttcctcacttttcaagcccatggactatctcccagtgctgttcattttaatattctgcagagtacttaagcattacagaatatagaagctggaagatacttggcagtcatttagtccctcatgttctagatgagaaaactgaagcccagataccttattatttgtgcagtcccccaatctgagtgtcaaatccacctctcccagttgttttctgttcaaataaccctgtgaacttcagtgaacctcactgaccacatcattattcaccaatagttccccaatagatccactctacattagctcatttcaaatgttctttttcctttcacgcacataccatacagtacttaaaattctgttgacaacaatcaatatgaattcaaattaagttcttgccccaaggatgtgacttctactacacagtttcttttggcctgagggcaattcctagggcatgaacttagtcatatgccctcaacagacagcactctaaggaagctggggaatgagggtctccattctgcagggaggcctggactacgcaccacagaagacactactctgtccatccctcatgtcatttggatccatgacttcatataacttctctccatctaggaatagctcctccaggattttggttggtttcttttgctggggaaacgtgaaagtaacattcatggagggaaaaatagctccttggctcttcaactggtctttcaccctaaactgatcatctgcctttcctactatacaggtactatcaggtttacattcttaccctcagctagcacctccactggtctaggtcacttacctggtgataggagaggggggtgtagtagycatggctactagacttgtccttttaaattgagcaatcaaaatttagtaagggactacttaaacatcccttggctgccaaacacattcctgtctacttccgttgtgtaacagcattgaattgcagagataagaagcagaaatttcccaagtgaatccctgggggtgacggtaaatagtgctactctttctttaatccatggtcctctttctattagcgacatgggaccatataatggttactgatctaggatatatgcttgtatcccatccctgcagcttcaaagggctactggagtctgttccatcactccatcagtttgacagcttctagttgttgtgatttcgtgatttgtattaggatcactgaaatgcattttcatgtgtccaccactgcaactgcagtgctacaaagtacattccctttatacagtgctataaagtacaatgcaaggatgtgtaggattccatattggaggattaaacattctgtcaatccttggatagtggtgctggttgaggccatgtaagtaggaaagataaatccatactcagaataagtatcagttccagccaagatgaatcattacccttcctgtgatggaaagaatccagtgcattcagcttgccaccatgtggctacttagtgtccttgagggatgatgctatcttgaggcctcagtgttgctctgtcttgatgacaactttgacattcagaagcagcagtagctagataagacttagtcagtggagacttctgctgtttgggcctctgcatagcctccatccttgtcactatatttattcaccaattgtgccagtactgagctggccaatggaagaggttggctaacatcatctggctgagtcacttttctccttggttgttgatagatacctc

SEQ ID NO: 69383 - DNA, 1786 bp, Homo sapiens
gtttttaaggttttaacaaactctctctggcagtttctgtttttcctcacttttcaagcccatggactatctcccagtgctgttcattttaatattctgcagagtacttaagcattacagaatatagaagctggaagatacttggcagtcatttagtccctcatgttctagatgagaaaactgaagcccagataccttattatttgtgcagtcccccaatctgagtgtcaaatccacctctcccagttgttttctgttcaaataaccctgtgaacttcagtgaacctcactgaccacatcattattcaccaatagttccccaatagatccactctacattagctcatttcaaatgttctttttcctttcacgcacataccatacagtacttaaaattctgttgacaacaatcaatatgaattcaaattaagttcttgccccaaggatgtgacttctactacacagtttcttttggcctgagggcaattcctagggcatgaacttagtcatatgccctcaacagacagcactctaaggaagctggggaatgagggtctccattctgcagggaggcctggactacgcaccacagaagacactactctgtccatccctcatgtcatttggatccatgacttcatataacttctctccatctaggaatagctcctccaggattttggttggtttcttttgctggggaaacgtgaaagtaacattcatggagggaaaaatagctccttggctcttcaactggtctttcaccctaaactgatcatctgcctttcctactatacaggtactatcaggtttacattcttaccctcagctagcacctccactggtctaggtcacttacctggtgataggagaggggggtgtagtagtcatggctactagacttgtcyttttaaattgagcaatcaaaatttagtaagggactacttaaacatcccttggctgccaaacacattcctgtctacttccgttgtgtaacagcattgaattgcagagataagaagcagaaatttcccaagtgaatccctgggggtgacggtaaatagtgctactctttctttaatccatggtcctctttctattagcgacatgggaccatataatggttactgatctaggatatatgcttgtatcccatccctgcagcttcaaagggctactggagtctgttccatcactccatcagtttgacagcttctagttgttgtgatttcgtgatttgtattaggatcactgaaatgcattttcatgtgtccaccactgcaactgcagtgctacaaagtacattccctttatacagtgctataaagtacaatgcaaggatgtgtaggattccatattggaggattaaacattctgtcaatccttggatagtggtgctggttgaggccatgtaagtaggaaagataaatccatactcagaataagtatcagttccagccaagatgaatcattacccttcctgtgatggaaagaatccagtgcattcagcttgccaccatgtggctacttagtgtccttgagggatgatgctatcttgaggcctcagtgttgctctgtcttgatgacaactttgacattcagaagcagcagtagctagataagacttagtcagtggagacttctgctgtttgggcctctgcatagcctccatccttgtcactatatttattcaccaattgtgccagtactgagctggccaatggaagaggttggctaacatcatctggctgagtcacttttctccttggttgttgatagatacctc

SEQ ID NO: 69384 - DNA, 1786 bp, Homo sapiens
gtttttaaggttttaacaaactctctctggcagtttctgtttttcctcacttttcaagcccatggactatctcccagtgctgttcattttaatattctgcagagtacttaagcattacagaatatagaagctggaagatacttggcagtcatttagtccctcatgttctagatgagaaaactgaagcccagataccttattatttgtgcagtcccccaatctgagtgtcaaatccacctctcccagttgttttctgttcaaataaccctgtgaacttcagtgaacctcactgaccacatcattattcaccaatagttccccaatagatccactctacattagctcatttcaaatgttctttttcctttcacgcacataccatacagtacttaaaattctgttgacaacaatcaatatgaattcaaattaagttcttgccccaaggatgtgacttctactacacagtttcttttggcctgagggcaattcctagggcatgaacttagtcatatgccctcaacagacagcactctaaggaagctggggaatgagggtctccattctgcagggaggcctggactacgcaccacagaagacactactctgtccatccctcatgtcatttggatccatgacttcatataacttctctccatctaggaatagctcctccaggattttggttggtttcttttgctggggaaacgtgaaagtaacattcatggagggaaaaatagctccttggctcttcaactggtctttcaccctaaactgatcatctgcctttcctactatacaggtactatcaggtttacattcttaccctcagctagcacctccactggtctaggtcacttacctggtgataggagaggggggtgtagtagtcatggctactagacttgtccttttaaattgagcaatcaaaatttagtaagggactacttaaacatcccttggctgccaaacacattcctgtctacttccgttgtgtaacagcattgaattgcagagataagaagcagaaatttcccaagtgaatycctgggggtgacggtaaatagtgctactctttctttaatccatggtcctctttctattagcgacatgggaccatataatggttactgatctaggatatatgcttgtatcccatccctgcagcttcaaagggctactggagtctgttccatcactccatcagtttgacagcttctagttgttgtgatttcgtgatttgtattaggatcactgaaatgcattttcatgtgtccaccactgcaactgcagtgctacaaagtacattccctttatacagtgctataaagtacaatgcaaggatgtgtaggattccatattggaggattaaacattctgtcaatccttggatagtggtgctggttgaggccatgtaagtaggaaagataaatccatactcagaataagtatcagttccagccaagatgaatcattacccttcctgtgatggaaagaatccagtgcattcagcttgccaccatgtggctacttagtgtccttgagggatgatgctatcttgaggcctcagtgttgctctgtcttgatgacaactttgacattcagaagcagcagtagctagataagacttagtcagtggagacttctgctgtttgggcctctgcatagcctccatccttgtcactatatttattcaccaattgtgccagtactgagctggccaatggaagaggttggctaacatcatctggctgagtcacttttctccttggttgttgatagatacctc

SEQ ID NO: 69385 - DNA, 519 bp, Homo sapiens
ggtrcttgtaggatggcctgccactcagtccacgggcaggagcaacggggagatcccacaggcaaagtgaactgggggatgggctgaacgggctccaggcaactgagccctactggcaggtcctcggcctgggcccgaacaggaaggaggggcacagagtgcccaggtaaccgctcctgggagcagtggggaaccgtcggttgcttgaactctcgagagctgggctctgagcgtcctcgtccagccgccaactcggccaaaggctaagccagcagtttcttctgttgccgggcaacgcgccttttaaacctgagggagcgggcgcgtgagcacatcagggcgcccgtgacagagcgagcttaacggattaataagcgcagccaggtacccgcgcgaggcacttgctggcaatggcgggaggcggacgtggggggtcatgcaataggtactggaaggagagaggcgggcacaaaggtcgcgggaggaacaggtgcccacaatggcggcagatctgcccgt

SEQ ID NO: 69386 - DNA, 519 bp, Homo sapiens
ggtgcttgtaggatggcctgccactcagtccacgggcaggagcaacggggagatcccacaggcaaagtgaactgggggatgggctgaacgggctccaggcaactgagccctactggcaggtcctcggcctgggcccgaacaggaaggaggggcacagagtgcccaggtaaccgctcctgggagcagtggggaaccgtcggttgcttgaactctcgagagctgggctctgagcgtcctcgtccagccgccaactcsgccaaaggctaagccagcagtttcttctgttgccgggcaacgcgccttttaaacctgagggagcgggcgcgtgagcacatcagggcgcccgtgacagagcgagcttaacggattaataagcgcagccaggtacccgcgcgaggcacttgctggcaatggcgggaggcggacgtggggggtcatgcaataggtactggaaggagagaggcgggcacaaaggtcgcgggaggaacaggtgcccacaatggcggcagatctgcccgt

SEQ ID NO: 69387 - DNA, 519 bp, Homo sapiens
ggtgcttgtaggatggcctgccactcagtccacgggcaggagcaacggggagatcccacaggcaaagtgaactgggggatgggctgaacgggctccaggcaactgagccctactggcaggtcctcggcctgggcccgaacaggaaggaggggcacagagtgcccaggtaaccgctcctgggagcagtggggaaccgtcggttgcttgaactctcgagagctgggctctgagcgtcctcgtccagccgccaactcggccaaaggctaagccagcagtttcttctgttgccgggcaacgcgccttttaaacctgagggagcgggcgcgtgagcacatcasggcgcccgtgacagagcgagcttaacggattaataagcgcagccaggtacccgcgcgaggcacttgctggcaatggcgggaggcggacgtggggggtcatgcaataggtactggaaggagagaggcgggcacaaaggtcgcgggaggaacaggtgcccacaatggcggcagatctgcccgt

SEQ ID NO: 69388 - DNA, 1573 bp, Homo sapiens
caggccataagcctggatttggggcggcagctgccctgggagcargaggagagctctgaccttggaactgggggatgagagacttgatctggaaacagattgtgatattaactccttctttcatcttgttactggttgaataggagcactccacttcatgcactgggatctcagctggagagaaggacatcagggtgaccatatccaccacgggccgggagctgcagggcagaaggcaaccaactctctccctccaacccaactgcacgtcccccctcagatgtggggctcccgccagcaaagccagagaactctccttccctaaagcagacctcaacatgtcactgtctcctcttaaggaaaataataatgatactttttatttatttattttgagagagggtctcaccctgttgcccaggctggagtgcagtggcatgataacagctcactacagcctcggcctcccaggctctagtaatcctcccacctcagcctcccaaggatctgggaccacaggcatgtgccaccacacctggctaactttaaataaatttttgtagagaagggaccttcctatgttgtccagggtggtcttgaactcctgagctcaagcaatcctcccggcttgggctcccaaagtgctgggattataggcatgagccaccatgcctggccaataatggtgataactaattagggctcccagttcattctagcagcctctgacccattttccatgaagaagagaaagctcttaggaagagaaatcatactgagttactttcatgcttatgtttaagccttcagtgatgcttgcatgaattttattatgcttcataataaagttgcagcttttgttgttgttagagcctcgctttgttgctcaggctggagtgcagtggtgcagtcatagctcactgcatcctcacactcctggcctccagcgatcctcttgtctcagactcctgtgtagctgggattacgggagtgagccccagtgcctggctcctatttttttttttttttttgagatcctcctcttgggctcaagcaattctcctgcctcagcctcccgagtagctgggattacaggcgcatgccaccatgcccagctaatttttgtatttttagtagagatggggtttcaacaggttggccaggctggtcttgaactcctgactaagccccccgtgcctcccattgaagatgtatacagccccctgctcctccagaggggcccccacaaccacgtccacctgacctcaaatgatccacccacctcggcctcccaaagtgctggattacaggcatgagtcattgcatccggcctatttattatttttttgtggtaggatctcactctgtagctcaggctggagtacagtggcatgatcacagctcactgcaacctcgacctcccaggctcaagtcatcctcctgccttagcctcccaagtagctgggcctacagtcatgcaccaccatacctggccaattaaaaaaaaaaaagaaaagggctgggcacggtggctcactctgtaatcctagcactttgggaggccgagacgggc

SEQ ID NO: 69389 - DNA, 691 bp, Homo sapiens
tccttctgtgtgtgaaatttctgacgaacaggaagaggtgttattttgcatagaggccgcccaggagtcagtacagagaatcaggagcggatgaggctgagggctgggtggcctacagcacagtccctctccaacccaaggtcccccggcccccgcctcactgattaccaaacctccccagctgctgctactcctgaagccacttcyacctcttccagagtttctgaggctgagtggaaaagccgggagggaagctgtctttccataatattagcaacattgcttagcaacatctttcaaagcgagaaccagcagactctccaaaaccctattctgtttggctctacagagaacagagtggtttcttatacatgtattatttatatactattttatatatccagtaacgccttctgtgcctggcttctctgggagatgacgaattacaactatgtgagatttccaggcgactagggctttgggtagcaagactttttgtttgcttccttgcttgctgttagttactgtaatgaccctagctagagatttctctcaaacgcctccaaatgctgttgtcctttaaagacaggtttgatgccgggcgcggtggctcacacctgcaatcccagcactttgggaggctgaggcgggtggatcacgaggtcaggagttcgagaccagtctggccaac

SEQ ID NO: 69390 - DNA, 691 bp, Homo sapiens
tccttctgtgtgtgaaatttctgacgaacaggaagaggtgttattttgcatagaggccgcccaggagtcagtacagagaatcaggagcggatgaggctgagggctgggtggcctacagcacagtccctctccaacccaaggtcccccggcccccgcctcactgattaccaaacctccccagctgctgctactcctgaagccacttccwcctcttccagagtttctgaggctgagtggaaaagccgggagggaagctgtctttccataatattagcaacattgcttagcaacatctttcaaagcgagaaccagcagactctccaaaaccctattctgtttggctctacagagaacagagtggtttcttatacatgtattatttatatactattttatatatccagtaacgccttctgtgcctggcttctctgggagatgacgaattacaactatgtgagatttccaggcgactagggctttgggtagcaagactttttgtttgcttccttgcttgctgttagttactgtaatgaccctagctagagatttctctcaaacgcctccaaatgctgttgtcctttaaagacaggtttgatgccgggcgcggtggctcacacctgcaatcccagcactttgggaggctgaggcgggtggatcacgaggtcaggagttcgagaccagtctggccaac

SEQ ID NO: 69391 - DNA, 691 bp, Homo sapiens
tccttctgtgtgtgaaatttctgacgaacaggaagaggtgttattttgcatagaggccgcccaggagtcagtacagagaatcaggagcggatgaggctgagggctgggtggcctacagcacagtccctctccaacccaaggtcccccggcccccgcctcactgattaccaaacctccccagctgctgctactcctgaagccacttccaccwcttccagagtttctgaggctgagtggaaaagccgggagggaagctgtctttccataatattagcaacattgcttagcaacatctttcaaagcgagaaccagcagactctccaaaaccctattctgtttggctctacagagaacagagtggtttcttatacatgtattatttatatactattttatatatccagtaacgccttctgtgcctggcttctctgggagatgacgaattacaactatgtgagatttccaggcgactagggctttgggtagcaagactttttgtttgcttccttgcttgctgttagttactgtaatgaccctagctagagatttctctcaaacgcctccaaatgctgttgtcctttaaagacaggtttgatgccgggcgcggtggctcacacctgcaatcccagcactttgggaggctgaggcgggtggatcacgaggtcaggagttcgagaccagtctggccaac

SEQ ID NO: 69392 - DNA, 691 bp, Homo sapiens
tccttctgtgtgtgaaatttctgacgaacaggaagaggtgttattttgcatagaggccgcccaggagtcagtacagagaatcaggagcggatgaggctgagggctgggtggcctacagcacagtccctctccaacccaaggtcccccggcccccgcctcactgattaccaaacctccccagctgctgctactcctgaagccacttccacctcytccagagtttctgaggctgagtggaaaagccgggagggaagctgtctttccataatattagcaacattgcttagcaacatctttcaaagcgagaaccagcagactctccaaaaccctattctgtttggctctacagagaacagagtggtttcttatacatgtattatttatatactattttatatatccagtaacgccttctgtgcctggcttctctgggagatgacgaattacaactatgtgagatttccaggcgactagggctttgggtagcaagactttttgtttgcttccttgcttgctgttagttactgtaatgaccctagctagagatttctctcaaacgcctccaaatgctgttgtcctttaaagacaggtttgatgccgggcgcggtggctcacacctgcaatcccagcactttgggaggctgaggcgggtggatcacgaggtcaggagttcgagaccagtctggccaac

SEQ ID NO: 69393 - DNA, 691 bp, Homo sapiens
tccttctgtgtgtgaaatttctgacgaacaggaagaggtgttattttgcatagaggccgcccaggagtcagtacagagaatcaggagcggatgaggctgagggctgggtggcctacagcacagtccctctccaacccaaggtcccccggcccccgcctcactgattaccaaacctccccagctgctgctactcctgaagccacttccacctcttcyagagtttctgaggctgagtggaaaagccgggagggaagctgtctttccataatattagcaacattgcttagcaacatctttcaaagcgagaaccagcagactctccaaaaccctattctgtttggctctacagagaacagagtggtttcttatacatgtattatttatatactattttatatatccagtaacgccttctgtgcctggcttctctgggagatgacgaattacaactatgtgagatttccaggcgactagggctttgggtagcaagactttttgtttgcttccttgcttgctgttagttactgtaatgaccctagctagagatttctctcaaacgcctccaaatgctgttgtcctttaaagacaggtttgatgccgggcgcggtggctcacacctgcaatcccagcactttgggaggctgaggcgggtggatcacgaggtcaggagttcgagaccagtctggccaac

SEQ ID NO: 69394 - DNA, 642 bp, Homo sapiens
caccatcgaatgggggcttaaaacaacagaaatttcttctctccagttctcccagttctggaggccagaagcctgagatccaggtgctgcagagctgtgctccctctggaggcactgggggagggtccttcctgcctcttccagctcaggtgggctccatgtgtttcctggcttatggctacatcattctaacctctgcctccctcttcacacgatcctctcctcttctccctgtgtctctcctctgcgtggttcttataaggacacttgtcattggatttagggcccaaccaggtaattcaggatgatctcatctagaggaccctactttaattacatttgcaaagactcctttatccaatacagtcccattcacaagttcggagggatacagcttttggggaacaccattcaccccatacacccccttcyctcaggcttgtctgggatctagatggaaagccaggggacccggatgcatggtcctcaggccttactttgagaaccacctcttgcggctgtgcctcactggttgggtccctcaccaccagctctgcccatcaggcccacatgggcctccatttgtagatgagggaacaagctcagggctaaggaacctggtgagggtcacaccaggagcaa

SEQ ID NO: 69395 - DNA, 642 bp, Homo sapiens
caccatcgaatgggggcttaaaacaacagaaatttcttctctccagttctcccagttctggaggccagaagcctgagatccaggtgctgcagagctgtgctccctctggaggcactgggggagggtccttcctgcctcttccagctcaggtgggctccatgtgtttcctggcttatggctacatcattctaacctctgcctccctcttcacacgatcctctcctcttctccctgtgtctctcctctgcgtggttcttataaggacacttgtcattggatttagggcccaaccaggtaattcaggatgatctcatctagaggaccctactttaattacatttgcaaagactcctttatccaatacagtcccattcacaagttcggagggatacagcttttggggaacaccattcaccccatacacccccttctcycaggcttgtctgggatctagatggaaagccaggggacccggatgcatggtcctcaggccttactttgagaaccacctcttgcggctgtgcctcactggttgggtccctcaccaccagctctgcccatcaggcccacatgggcctccatttgtagatgagggaacaagctcagggctaaggaacctggtgagggtcacaccaggagcaa

SEQ ID NO: 69396 - DNA, 1295 bp, Homo sapiens
taaaagtgttaaatgggtctttgaatacaggcctgttcttgtgtctcttgaaagcagtataacttcggttgctgtcttttcccaggtcggaagactgggagatcatgtaagatttaaacgttttcaaatttgttgaaactgatttatggtccagcatgtgatcagttttgctaaacgtcctgtgtaggtacttgtgaagaaagtgcgaggcaggcggatcacaaggtcaggagttcgagaccagcctggccaatatggtgaaaccctgtctctactaaaaatacaaaaattagctgggcgtggttgccggcgcctgtagtcccagctactcaggaggctgaggcaggagaatcgcttgaacctggggggcggaggttgcagtgagctgagatcgtgccaccacactccaccctgggtgacagagtgagattccctttcaaaaaaaaaagaatgtgcgttccacagctgtgggcttagtgctcacactaagcatcttccttggatgtctgttatgcttattttctttttttttagagatggggttttgctgtttcgtcccagctgaagtgcagtggcatgattatggctcactgcagcctcgaactcctggctcaagggatcctcctgcctcagcctcccaagtaggtgggactcagaggtgagccaccacaccaggttccattatgctagttttcttaattggcattggagaaaaccataaaattaggggaaaagggtagatactaaaagagtgctattggagtatgattggaggtggagtgagaaaaggaaatagaccttgctttcatggggctgttgaggagtccaaatgagcagtatagaggcctggcttggttggatgagatggagaaattcaagacctatttttgagatagtaagcccggacatttaattaattaaaaataattgtatcaattactgagagtaagaatactaataaaagcagtaacagcagtggcaaaagtaaccacacaagcagaaatacgaaaaccaagatgataagaccatacagtccgccagtgtcttactaacagggttgtgggcgtcccactccttctcttcmtcctcctccagctcctcctccacgtcttcctccagctcctgctcctctttcttttccagtacctcctcagccccttctcctctgccagcccctcctcccacctccgctcccagcccctcctcctttcccagcccctcaccatccagcccctcctcctccatctcctcctcctctctcagctcctcctcctcccccagctcctcctcctgct

SEQ ID NO: 69397 - DNA, 821 bp, Homo sapiens
aatgtattgggtgggggttggaggtggcgacccacatcatgtgagctatggcacttcactccagtgaggccaacaggctttggtggatacacatcaggagacaaccatagcatttggaaaagctccttctgtgtatgtcaggaccaacgtgggggccattaaacaactgcttaagaggaaggaaagaagaaaaggggaactggaaggaaggagggaaggaaggaaggaaggaaagaaggaaggaaaaatgggatggagggacggaggaatgaagatggggagggagggaagggagaagaagggaagaattcagacacagagacaaactttcaccccacaaatattatttaaatgcctcctatggaccaagtactgtgttaggcatcagggacagagatgcttacactgaaggcagagaaagagaacaataaaatccacaacttttcaggttgtgaaaagttcttggaagtaaaaaaaaaaaaaaaraaaaaagaaaaaaaaaagcaaggtgctgtgcttttgtgctttcatcggatggttaggaaggacatttctcagtgggtgacattgcaggctggatgtgaacaaagggagcgagccagctaagcaaagatcccgggatggagatttccaggagatgagtggcttgttccaggaacagcccaggaacagcaaaagagttggtggctggggaagaagtacaagaagcagcaggaagcaagattataagatttcctgtggcctgagcatgaggaggaggcggtggaaggttcagaacagaggagggacgtgatttgatggtacattttcaacaggatccc

SEQ ID NO: 69398 - DNA, 821 bp, Homo sapiens
aatgtattgggtgggggttggaggtggcgacccacatcatgtgagctatggcacttcactccagtgaggccaacaggctttggtggatacacatcaggagacaaccatagcatttggaaaagctccttctgtgtatgtcaggaccaacgtgggggccattaaacaactgcttaagaggaaggaaagaagaaaaggggaactggaaggaaggagggaaggaaggaaggaaggaaagaaggaaggaaaaatgggatggagggacggaggaatgaagatggggagggagggaagggagaagaagggaagaattcagacacagagacaaactttcaccccacaaatattatttaaatgcctcctatggaccaagtactgtgttaggcatcagggacagagatgcttacactgaaggcagagaaagagaacaataaaatccacaacttttcaggttgtgaaaagttcttggaagtaaaaaaaaaaaaaaaaraaaaagaaaaaaaaaagcaaggtgctgtgcttttgtgctttcatcggatggttaggaaggacatttctcagtgggtgacattgcaggctggatgtgaacaaagggagcgagccagctaagcaaagatcccgggatggagatttccaggagatgagtggcttgttccaggaacagcccaggaacagcaaaagagttggtggctggggaagaagtacaagaagcagcaggaagcaagattataagatttcctgtggcctgagcatgaggaggaggcggtggaaggttcagaacagaggagggacgtgatttgatggtacattttcaacaggatccc

SEQ ID NO: 69399 - DNA, 821 bp, Homo sapiens
aatgtattgggtgggggttggaggtggcgacccacatcatgtgagctatggcacttcactccagtgaggccaacaggctttggtggatacacatcaggagacaaccatagcatttggaaaagctccttctgtgtatgtcaggaccaacgtgggggccattaaacaactgcttaagaggaaggaaagaagaaaaggggaactggaaggaaggagggaaggaaggaaggaaggaaagaaggaaggaaaaatgggatggagggacggaggaatgaagatggggagggagggaagggagaagaagggaagaattcagacacagagacaaactttcaccccacaaatattatttaaatgcctcctatggaccaagtactgtgttaggcatcagggacagagatgcttacactgaaggcagagaaagagaacaataaaatccacaacttttcaggttgtgaaaagttcttggaagtaaaaaaaaaaaaaaaaaaaaargaaaaaaaaaagcaaggtgctgtgcttttgtgctttcatcggatggttaggaaggacatttctcagtgggtgacattgcaggctggatgtgaacaaagggagcgagccagctaagcaaagatcccgggatggagatttccaggagatgagtggcttgttccaggaacagcccaggaacagcaaaagagttggtggctggggaagaagtacaagaagcagcaggaagcaagattataagatttcctgtggcctgagcatgaggaggaggcggtggaaggttcagaacagaggagggacgtgatttgatggtacattttcaacaggatccc

SEQ ID NO: 69400 - DNA, 821 bp, Homo sapiens
aatgtattgggtgggggttggaggtggcgacccacatcatgtgagctatggcacttcactccagtgaggccaacaggctttggtggatacacatcaggagacaaccatagcatttggaaaagctccttctgtgtatgtcaggaccaacgtgggggccattaaacaactgcttaagaggaaggaaagaagaaaaggggaactggaaggaaggagggaaggaaggaaggaaggaaagaaggaaggaaaaatgggatggagggacggaggaatgaagatggggagggagggaagggagaagaagggaagaattcagacacagagacaaactttcaccccacaaatattatttaaatgcctcctatggaccaagtactgtgttaggcatcagggacagagatgcttacactgaaggcagagaaagagaacaataaaatccacaacttttcaggttgtgaaaagttcttggaagtaaaaaaaaaaaaaaaaaaaaaaraaaaaaaaaagcaaggtgctgtgcttttgtgctttcatcggatggttaggaaggacatttctcagtgggtgacattgcaggctggatgtgaacaaagggagcgagccagctaagcaaagatcccgggatggagatttccaggagatgagtggcttgttccaggaacagcccaggaacagcaaaagagttggtggctggggaagaagtacaagaagcagcaggaagcaagattataagatttcctgtggcctgagcatgaggaggaggcggtggaaggttcagaacagaggagggacgtgatttgatggtacattttcaacaggatccc

SEQ ID NO: 69401 - DNA, 821 bp, Homo sapiens
aatgtattgggtgggggttggaggtggcgacccacatcatgtgagctatggcacttcactccagtgaggccaacaggctttggtggatacacatcaggagacaaccatagcatttggaaaagctccttctgtgtatgtcaggaccaacgtgggggccattaaacaactgcttaagaggaaggaaagaagaaaaggggaactggaaggaaggagggaaggaaggaaggaaggaaagaaggaaggaaaaatgggatggagggacggaggaatgaagatggggagggagggaagggagaagaagggaagaattcagacacagagacaaactttcaccccacaaatattatttaaatgcctcctatggaccaagtactgtgttaggcatcagggacagagatgcttacactgaaggcagagaaagagaacaataaaatccacaacttttcaggttgtgaaaagttcttggaagtaaaaaaaaaaaaaaaaaaaaaagaaaaaaaaaagcaaggtgctgtgcttttgtgctttcatcggatggttaggaaggacatttctcagtgggtgacattgcaggctggatgtgaacaaagggagsgagccagctaagcaaagatcccgggatggagatttccaggagatgagtggcttgttccaggaacagcccaggaacagcaaaagagttggtggctggggaagaagtacaagaagcagcaggaagcaagattataagatttcctgtggcctgagcatgaggaggaggcggtggaaggttcagaacagaggagggacgtgatttgatggtacattttcaacaggatccc

SEQ ID NO: 69402 - DNA, 558 bp, Homo sapiens
ggtatagttkgacttctccttagcttttaactcacttgcaggatttaaacaaccctttcgtctactttattggcattatcgtaacatcctaaagtgcgatttgtcatatttgcacagaacttaaagcaaataattcaaatctttagtctagttaacattaaaataacccaaagttatagtactatagaaacatatctgcagaaaacaaacttattttaacctaattaaaagctcattttaagaaaaaatattttacataaaaattcatttttttttgtaaggacttcatagggcattaagtttgagttggattttttctgattaaaatttgattatctaaagtaaataatcttaaaaatactgagtttacttaagtttgagttggaatttttctgattaaaatttgattatctaaagtaaacaatcttaaaattgttgcttaagcaaatttgctttttctaaatttggaaacattgcatatgttgcctgttgtgttcctatagtctgatgaaagaactaaagattaaaattgaatgctgaaactttaatattacattt

SEQ ID NO: 69403 - DNA, 1747 bp, Homo sapiens
tgcatgaatacaaaaagaaattactaatatgtcaacctttccagaaaatttggaaaatgcacacctcaaaaggctaatttacctttctatttcccaaattcagcatgtcccaaattaccatacaacaaggagacaagcccttctttctactttgccagtgagttgggttttttatactaatttttaattgtacagtaaaacactttttaaaggatacatgttaagggagtagacttgttgaacaatattttccttgtgccagtcaaattattgaaagtacttatatatataaataattcagtttttaaaatggaaatacccaatttaagaaggctggagttaatgaaaaatggagttgtttcagaaatcaatttttgcataccaagcaaatgtgactgggaaatgcctaatattttccttgttagagaaacttcctaaacagctttatacacacacacacacacacacacacacacacacacaaacacacacacccaagccacaagcttggtataaatttaaaatgtttatttatacacacacacacacacacacacacacacacacacaccccaagccacaagcttggtataaacttaaaatgtttatttatattctgataagatgaaatttatgcctaccaggatttttaattgaataggattgatgaaatactaagggaaaaacttttcagtcctgtgcatggctaaaggtttaaaatactcaggaagggccaggcacggtggctcacacctgtaatcccagtgctttgggaggctgaggcgggtggatcatctgaggtcagcagttcaagaccagcctagccaacatggtaaaactccatctctactaaaaaatacaaaaatcagccatgcatgctggcatgcgcctataatctcagctactagggaggctgagacaggagaattgcttgaacttgggaggcagaggttgcagtgagccgaagtcgtgccactccactccagcctgggtggcagagcgaaattctgtctcaaaaaataaaatattcaggaagcagacccctcaggatatcttgagcttaagcaagagatcatgacctctcaggtcattatcttggacagcacaggtcccctctccccacctggcaaaaagtacagaaatagttgctccttcatggagaaagtctgggcagagctttcttctggaaatgaacttttaaggtacatttttcctatttgtagggcaatttgtaaaaataagggccggacgtggtggctcacgcctgtaatcccagtactttgggaggccgaggtgggtggattgcttgaggccaggagttcgagaacagcctggccaacatggtgaaaccctatctctaccaaagcatggtggcacgcacctgtagtcccagctacttgggaggcggaggcacaagakttccatgaaccctggaggtggaggttgcagtgagctgagattgtaccactgcactcaggcctgggcaacagagagagactctgtctcaaaataaaaaataaaaataaggctagtcttggactttggtatttaaataggaaggagtactaatatttgtagaaatcctttagaaatttgtgccattaatattgtcaccttgtatgaaatgttgtgttctagaggatattaaggattcaaattttatgttaggcacattttgagttattttggggtgactcaatgtctgactctactaaatgccatattagcatttaaaatgcatttgacc

SEQ ID NO: 69404 - DNA, 607 bp, Homo sapiens
cctgggtgacagagctagactctgtcttcggggaaaaaaaaatgacatataattcacatgatatgaaatttaccatatcaaagtgtacaattcagtggttttcaatatatttactgtgttgygcaaccgtcaccactaattccagaacatttccatcacccctaaaagaaactcttccttattagcagttgttttccattctaccctctcctaccacctggcaactactgatctctttctgcctccatggatttgcctcttctggacgtttcatatgaatgagatcatataatatatggccttctgtgactggcttccttcacttaccataagcgcatctgtgggctatcatgcttcattcctttttatagccaaataatattcatcatatggttataccacattttgtttattcatcactagtgaatgagcattttagttactctggtttttggctgtccaataaaactctatgaacatttacatgccagagtttaagttaacatgttttcagttctcctaggggagtccctcttaaaccctggggcattccaagataccacattaaagagacttgtttagcattagatcaggaagggatcccccc

SEQ ID NO: 69405 - DNA, 624 bp, Homo sapiens
atctgcctctgcaggtgaccgtaacaacatgcaaatggtgagttctgctggggggtcatggaagctccctggaggaggtgtatctggacaacagggaaagaaaggagctggagaagaraggcagaaaaattgggtcctggttcaggtgaagttttcccagctggaacaatgacaatgtcaatatcccacaaaggcggcttctgtttatttagcgcttgctgtgttcccacaagtcttcctctacctgccctctccccagccctcatctcactctcccagagccccagagcacaccaatggacaccatcacctctcgggcagatcagcacagagacgtgaagcacacaggcagctgctggaaaaataacaaggaattgcaatggtgtgcccctccgttgaatgcaagctctcttctgccttctcaccttgggcaagttaccttccgttccaggcctcggtttctccatgtgtgaaatgaaagggctggagagaaatctctcactattccccaatctacattcattgtatcccaaaccttctaatatctgttcaacgaagtgtaccaaatctcagctattggactgagactcaggggtctatctgacttgaattgaaaatgcaaat

SEQ ID NO: 69406 - DNA, 606 bp, Homo sapiens
aaaaaatctagaactcctccatgtggaactctagcaaatttcatgtataagaattatggatatagaacctgtgtttttctagagaaatgggtgaactcagagtaacttagagttacagtgggcacagtgggaaaactccttacaaaaggcaaacagttgggtgtytttacagctacaacatctacgaggaccaagaggaccttgcggtataaattttaaaccaaaaacaaggggtcccaaactaaagtaccctgtgctctgagatgtctgactttatcgtaaacagccagagaattggaaaataaactgtcagtttttatacaagacatctgatgaactcactcactttgtcctgcactatttcctcactagaagaagcccccaaaggcttcactccttagatgataattaaccaatctctcagagagaaataaagaatatttccatggtggaggtttcaaattatgtctaaaagattcctgtgtccaaacctgtctaataccacttggaccattttcagaaaaatatttgtaagaattagttctctctgttttctgtacttattcttgcttctcccataagaacctctcagttgactgaaacctc

SEQ ID NO: 69407 - DNA, 363 bp, Homo sapiens
agaagaggggaggggaggggagaggagaggagagggaaaactctagaggtaaaatcattatgcagaacccactggtgtgctrtttttgacacgaggactgcctattaggtgctcaggaaataaataagaatcttagatgagacatcccagcagattaggatccaaaagatctgtctggaattctgagatgccataacacgtagtaacatgcacacagcattaaaaggctgttgtggcagaggcatttattgtattgctcaccaaatatccataggcttccccatctgtcccagtccatctgtagtttgttctgtccaaccactgagacagaggtgatatgtgtcccttccaggctgaagtata

SEQ ID NO: 69408 - DNA, 830 bp, Homo sapiens
tggactgtaaacatcagggcagcccttgtatttccagcttgggaatcagatgttctatggttaacttgtaacctatgtcgtcaacatctttcttactctcctatttccagactagagaattgttatgtygttgtactcaaacttctgtgtattaagacagaactaagtttaaccattacctagcattaatgttgggtcagatcaaatgagctatttatggctttggggtatagatcgtcagatgttaagcagatggaacagggagaaaaactggcttgttgatgactatggctaaaaatagtggatttggaaatatcagcatagggggtatattttccaacttggaaattctggatctattcacataatattagaaaaaaaatgtgtgcagtattttggttggtttgcttttgtttttggctgcccaggcaaataaaaaattgagttgtaatgacttgcagataaaagtcactgttgcttaggaattgttgagactttagggggaaggagggcctcagtaatttttgttttaattttgtctaaagacacagggagcaaattacatctctgtaatggttcatttcctagaagtagttatttccccaaggcttactttccccttgtccttttgaactttaagcctttaaagcctttagcccagcacttagaaacttgtcattgcaattctttggctatcatttcttgcctgtaaacccagctttcctctcattaggaattcagtgttcttgctaggatgtttatccatagagagaagtattgagtgaagctgtcagctcattagcagtggggcatgtgatttagacttgata

SEQ ID NO: 69409 - DNA, 641 bp, Homo sapiens
ctgggcatggtggtgcacacctgtaatcccaactactcaggaggctgaggcaagagaatcacttaaacctgggaggcagaggttgcagtgagccgagaccatgccactgcactccagcctgggtaacacagtgagactctgtctcaaaaaaagaaaaaaaatcatatattcatacaaagaatatattattcagtaataaaaaggaatgaagtactgctgtgtgctacaacatgaatgaatattgaaaatattgtgctgagtgaaagaagctagtcacaaaagaccacatatggtatgattccatgtgtatgaaatttgtacaaaatggatccctagagacagaagataaattaatgattgctaggagtttgagggtaggaggagtgggaaatgactattaatgggatggatttcttgggaggctgatgagaaggttctaaaattatatagtagcaatggctawacaactctctgaatatactaaaaaatgttaatttgtacactttaaaagaatgaattgcttagtatgtgaattatgttttaatacaactgttctttaaaactctacttcaacattttggcaagactgaaagactacctagcgtagtggttcttgactttactgtacatcagatcacttg

SEQ ID NO: 69410 - DNA, 832 bp, Homo sapiens
gaggctaaggcaggagaattgcctgaacccaggaggcagaggttgcagtgagctgagattgcgccattgcactccagcctgggcgacaagagtgaaactctgtctcagggaataaaaaaagagagaacctttttggtgtcactggaatgtgacctgtgacttgaaagatagttaaagatctcaacattgaagttggcagaaacatgatgggtagagatcagccaagtccttcatgctttgtctccaacttggaatgaaataactttatttaaattattagactttctttcatgacaaccatctagaaagttcaagtaaaagctgaacaattagtaagtggcatagtctggatttgaacccatgaattacaattccaaatccagtgatttttacttcaacatagtggctgtcatctaatttcaccctctttgactttagaactgcaattagactgcctctggatcttcttttgaaccctcccctcagatggtaggactaggaaacccagaaagaaattccctgcttcacactatttattggactatctgcttggccccattaacccagatacatatgagtgggctttttcttactcttattttattatccagcacagtctgcaatgactaaggcaatatttgggatctttgactcttcttttctggctttaacagtatttctaatctatagaagggctgttcatttgaaatacattgtttctcatttctgttatttcagaatccctttgttattcarttttaaccaatagcaagggttaattgttgagctccatgtttcttgtggcaacatttttttttttctagattggatc

SEQ ID NO: 69411 - DNA, 1710 bp, Homo sapiens
ttcttctacagatgtgagtgtttactcatagaaatacawtctcacattgttcttagtattttaaggccatttaaaaaaaataaccgtactctattcccataaggcgaagcttcttatagctggaatcacctggtattatttttgtttgtttgtttttgccaggaactctttttagattttccattcgacccactggccagattaatttattttcagcaaaaaaggtgatttaatatataagaatctcttattcattagaaaaggcagggtttttaaaagtataatattacagtacagagtgaatatttaatgttaatccctttatcccttgtaaatgtggtactgtattcctcattatttcagtgaaaaaaaaaaactatcgcacagaagctttttttttctttcgtttgaaacccattcattggcatttagtatgaatagtagatggagaatcagagtcatgctgaaaatgattaaccatcagtcaaagtgactttcatgtcttatccatgtaagaaatgtgctcttaattagaatttcccttcggctttttaacaaacatacagagtttcaggaatgagaagaggaaattgcagctgatgagattttcaggatccctagcagagcaatttctttgtggattttggaaagcattctgtagaaggacaacatcgttaggctcttcatagagtttcttagaagcctcagtattctgagcaacacgtgattgcgcccagatctgaggatggggaactctgaaatgaaacacagctgtcctgatatttttaagaaaattgtaagggagacactttgtgcaatcaattagattgttcttttcttttttcctatttcagaagacagaaaaaaattgtaaatgcagagttgctgttgagaatgtaaattgactagagtatctgtttatgctgttaaatttatgcataaactttagatggtacaaacaaggccttattgaccttcgcagctaagcggtgatccaaaacaggctctttgcattcaatttcgtgctgccaaccagcagccttaacatttcagttttgaaggttgaattctcttactgactgaaaaagaactttgacaaatacagattatgttgccatctaaaaattttagtcaccattccaaatgagtgtgcttccaatatttaataatgggattgctgaggatgtgtttggatttaatggtagttagcattcattcatgggtcagcctgagaagaaaacaaattgcgcatatagttacatttcgggtaaatgttaactctgattagcatataattgagatcatgctgaaaaacaaggacaatagaaattgatttaagaggataactttttaattatcaacttaggttggtctgagcagaaccaagaaattggaaatagaaaagtgggaaaacgattcttaatcctatatcaaggacacctacctactcaagcaattattaataattgaaacattcaataacagatgtttgttgaacatactctgtaatgccaacaacagaatagtgaaggcacagtttctgacttgagagcttggttaaatggatgtcactcttaattatactgtgaatgatgcctactgtttttgatacgttttcttaatatcaaaaagtgttacatgaatcccctttccccaatactgatttttaatttcctattatgaaaacaataaattatagtattgaattgg

SEQ ID NO: 69412 - DNA, 1710 bp, Homo sapiens
ttcttctacagatgtgagtgtttactcatagaaatacaatctcacattgttcttagtattttaaggccatttaaaaaaaataaccgtactctattcccataaggcgaagcttcttatagctggaatcacctggtattatttttgtttgtttgtttttgccaggaactctttttagattttccattcgacccactggccagattaatttattttcagcaaaaaaggtgatttaatatataagaatctcttattcattagaaaaggcagggtttttaaaagtataatattacagtacagagtgaatatttaatgttaatccctttatcccttgtaaatgtggtactgtattcctcattatttcagtgaaaaaaaaaaactatcgcacagaagctttttttttctttcgtttgaaacccattcattggcatttagtatgaatagtagatgragaatcagagtcatgctgaaaatgattaaccatcagtcaaagtgactttcatgtcttatccatgtaagaaatgtgctcttaattagaatttcccttcggctttttaacaaacatacagagtttcaggaatgagaagaggaaattgcagctgatgagattttcaggatccctagcagagcaatttctttgtggattttggaaagcattctgtagaaggacaacatcgttaggctcttcatagagtttcttagaagcctcagtattctgagcaacacgtgattgcgcccagatctgaggatggggaactctgaaatgaaacacagctgtcctgatatttttaagaaaattgtaagggagacactttgtgcaatcaattagattgttcttttcttttttcctatttcagaagacagaaaaaaattgtaaatgcagagttgctgttgagaatgtaaattgactagagtatctgtttatgctgttaaatttatgcataaactttagatggtacaaacaaggccttattgaccttcgcagctaagcggtgatccaaaacaggctctttgcattcaatttcgtgctgccaaccagcagccttaacatttcagttttgaaggttgaattctcttactgactgaaaaagaactttgacaaatacagattatgttgccatctaaaaattttagtcaccattccaaatgagtgtgcttccaatatttaataatgggattgctgaggatgtgtttggatttaatggtagttagcattcattcatgggtcagcctgagaagaaaacaaattgcgcatatagttacatttcgggtaaatgttaactctgattagcatataattgagatcatgctgaaaaacaaggacaatagaaattgatttaagaggataactttttaattatcaacttaggttggtctgagcagaaccaagaaattggaaatagaaaagtgggaaaacgattcttaatcctatatcaaggacacctacctactcaagcaattattaataattgaaacattcaataacagatgtttgttgaacatactctgtaatgccaacaacagaatagtgaaggcacagtttctgacttgagagcttggttaaatggatgtcactcttaattatactgtgaatgatgcctactgtttttgatacgttttcttaatatcaaaaagtgttacatgaatcccctttccccaatactgatttttaatttcctattatgaaaacaataaattatagtattgaattgg

SEQ ID NO: 69413 - DNA, 1710 bp, Homo sapiens
ttcttctacagatgtgagtgtttactcatagaaatacaatctcacattgttcttagtattttaaggccatttaaaaaaaataaccgtactctattcccataaggcgaagcttcttatagctggaatcacctggtattatttttgtttgtttgtttttgccaggaactctttttagattttccattcgacccactggccagattaatttattttcagcaaaaaaggtgatttaatatataagaatctcttattcattagaaaaggcagggtttttaaaagtataatattacagtacagagtgaatatttaatgttaatccctttatcccttgtaaatgtggtactgtattcctcattatttcagtgaaaaaaaaaaactatcgcacagaagctttttttttctttcgtttgaaacccattcattggcatttagtatgaatagtagatggagaatcagagtcatgctgaaaatgattaaccatcagtcaaagtgactttcatgtcttatccatgtaagaaatgtgctcttaattagaatttcccttcggctttttaacaaacatacagagtttcaggaatgagaagaggaaattgcagctgatgagattttcaggatccctagcagagcaatttctttgtggattttggaaagcattctgtagaaggacaacatcgttaggctcttcatagagtttcttagaagcctcagtattctgagcaacacgtgattgcgcccagatctgaggatggggaactctgaaatgaaacacagctgtcctgatatttttaagaaaattgtaagggagacactttgtgcaatcaattagattgttcttttcttttttcctatttcagaagacagaaaaaaattgtaaatgcagagttgctgttgagaatgtaaattgactagagtatctgtttatgctgttwaatttatgcataaactttagatggtacaaacaaggccttattgaccttcgcagctaagcggtgatccaaaacaggctctttgcattcaatttcgtgctgccaaccagcagccttaacatttcagttttgaaggttgaattctcttactgactgaaaaagaactttgacaaatacagattatgttgccatctaaaaattttagtcaccattccaaatgagtgtgcttccaatatttaataatgggattgctgaggatgtgtttggatttaatggtagttagcattcattcatgggtcagcctgagaagaaaacaaattgcgcatatagttacatttcgggtaaatgttaactctgattagcatataattgagatcatgctgaaaaacaaggacaatagaaattgatttaagaggataactttttaattatcaacttaggttggtctgagcagaaccaagaaattggaaatagaaaagtgggaaaacgattcttaatcctatatcaaggacacctacctactcaagcaattattaataattgaaacattcaataacagatgtttgttgaacatactctgtaatgccaacaacagaatagtgaaggcacagtttctgacttgagagcttggttaaatggatgtcactcttaattatactgtgaatgatgcctactgtttttgatacgttttcttaatatcaaaaagtgttacatgaatcccctttccccaatactgatttttaatttcctattatgaaaacaataaattatagtattgaattgg

SEQ ID NO: 69414 - DNA, 1710 bp, Homo sapiens
ttcttctacagatgtgagtgtttactcatagaaatacaatctcacattgttcttagtattttaaggccatttaaaaaaaataaccgtactctattcccataaggcgaagcttcttatagctggaatcacctggtattatttttgtttgtttgtttttgccaggaactctttttagattttccattcgacccactggccagattaatttattttcagcaaaaaaggtgatttaatatataagaatctcttattcattagaaaaggcagggtttttaaaagtataatattacagtacagagtgaatatttaatgttaatccctttatcccttgtaaatgtggtactgtattcctcattatttcagtgaaaaaaaaaaactatcgcacagaagctttttttttctttcgtttgaaacccattcattggcatttagtatgaatagtagatggagaatcagagtcatgctgaaaatgattaaccatcagtcaaagtgactttcatgtcttatccatgtaagaaatgtgctcttaattagaatttcccttcggctttttaacaaacatacagagtttcaggaatgagaagaggaaattgcagctgatgagattttcaggatccctagcagagcaatttctttgtggattttggaaagcattctgtagaaggacaacatcgttaggctcttcatagagtttcttagaagcctcagtattctgagcaacacgtgattgcgcccagatctgaggatggggaactctgaaatgaaacacagctgtcctgatatttttaagaaaattgtaagggagacactttgtgcaatcaattagattgttcttttcttttttcctatttcagaagacagaaaaaaattgtaaatgcagagttgctgttgagaatgtaaattgactagagtatctgtttatgctgttaaatttatgcataaactttagatggtacaaacaaggccttattgaccttcgcagctaagcggtgatccaaaacaggctctttgcattcaatttcgtgctgccaaccagcagccttaacatttcagttttgaaggttgaattctcttactgactgaaaaagaactttgacaaatacagattatgttgccatctaaaaattttagtcaccattccaaatgagtgtgcttccaatatttaataatgggattgctgaggatgtgtttggatttaatggtagttagcattcattcatgggtcagcctgagaagaaaacaaattgcgcatatagttacatttcgggtaaatgttaactctgattagcatataattgagatcatgctgaaaaacaaggacaatagaaattgatttaagaggataactttttaattatcaacttaggttggtctgagcagaaccaagaaattggaaatagaaaagtgggaaaacgattcttaatcctatatcaaggacacctacctactcaagcaattattaataattgaaacattcaataacagatgtttgttgaacatactctgtaatgccaacaacagaatagtgaagrcacagtttctgacttgagagcttggttaaatggatgtcactcttaattatactgtgaatgatgcctactgtttttgatacgttttcttaatatcaaaaagtgttacatgaatcccctttccccaatactgatttttaatttcctattatgaaaacaataaattatagtattgaattgg

SEQ ID NO: 69415 - DNA, 3125 bp, Homo sapiens
tcatagaatagaataaagctgctgcagaaaggcagctcaggaaacatctgaggtcctttttccttcaccataattttagagatgagaaaatggatccctaagatccttgggctttcgtagttagacaaagatggtgctaggtccggatcccaagcctcttgtcctctaaggctttcacgctctcccatactgtctcagattagtttgggatcaaaatatttagctctttaccttacccaggatctttttgcagtgttacaaggcccccattcttcttttgttgctttctcttgtatagtcctaacattcattgagacacagtttgcaaaaagtgagggtgtgggtctcaacactgaccctttgcagcagtcacagaaaaacatcttaacagtgaagtttgagatttgtgtgttcagtgtttctaattcaatgctgtcgatgacactggcttctagttatttagcacatatgaatcatgttatagtatcaaaatacttttctatcaatagcaacttcttagcatgaatcaggccagttttattatttcctcctccccaaagcagctttcctggtcacatcagatttaatgaggtgcaataagttgcccagatgcttagctgtcacaactcctaaagtgtacagggtgcaagccaaaagttttagattaagggtagaaattgtcttacctctgggattcctggttactaaggacaaagttggggggtgggtgacaaaggggtttgggaaagggtagaagaatatcttgcgttcatttatagcaagccaggagttcacaggtattttagctcatccctagttgctagagtctttaaagattctgcttcatcctgaaaatctgctgtagtacagggaagggtaaaggtagagagaagggccactgacagagtccagttcatccccaactgaccctaacttcaagaggcaacaactcaaattctcagagggaatgggagcactttagatcagcaatacaccaacactggtctgatcctagttgctgttgacaagagtggacactttgagtgtgccccttggcatggtgattctgaacatgaacccagaggtgattccaaacctggaatgagaataaggctttccttgggcatgactcaagtagaaaagctctttgaatcacatttgaatctgagtcacccaccagtcttttctttgtcccataaaggcaattcaagcattgaggtataaaccaggctttttgattctcagccttcccttctcagccacctcacatctcaaccaccccatggaaacagtaagatttctttcaggcatttattttaaagagagactacttcatacaaccaggtttgggggatttgagggcttaagagagttactagaaattactgtcagttcttgctgtaaagctatctctgcccctgggacgcatggcctgccaaatggcctcataaatctgattattctcctttcctttttctctttccatgttaaaattcttctgatttaccagcaacttcaggagagttaaaacaaatgaaacctaacagaaattctgaccctccactgccaccaatgcactcaagatgcatcatcatgaactgtatttttagagacttgcaagtgttatattgggctaactcatattttggtcatctttgtcacctcctccaaatccctctgatatttattttgaagaccttctgagagtctacaaccacacttgctagaaattcttactcacttaatcttacatgtctcatgctactgtttaattctgttctcttgattttcaaagctctgtctgatggaccttgtattacaatggaccttgtataagatggaccttgtctgatggacatgtattacaatacatgaattacatgcctatagaaaaaactgaatggaagattctgaaaactcatgcttttagatgctttccccagtttcagcagcagccccttcattatcttatgtgtctcacacccctattccactttctccccctccctcttcatagaatctcaaatcttcagactatcaaatgaaaagcataattttcatcacttaggttatgacccttctaccatagaatagccgttgatatagccaattaggtaagacttagggtccaattctatcaraattctctctgatagaaatgctcagaaaattctgtgatcatatggttcaaaacgatttgttaccaaaatccactcctacaattaagcattctggtttcatggctgggggtgggaggcagttacatgtttctttatatcagaatcagaaggaaacaaacaaaaaaaccaacggaaatagggaaatgcagtttgaaaagtagaaactgttaaaagagcaacagaaagactgttaaaagggaaaacataagctaaggaaacagcacgaagggcaggtgtacaacagcaatgccatgtgaaaatgtaaggaattctatagtggtaattccgggataaattagcctgaaaacagctctctggttagctttgggttgtagggggagatggaagttcctggacaattaaccatctgctatgtctttttgtacccttaccacccagctcagcgtctgggcacagagtagctgtcaatatttgtatagtaagtgtaacactggccgaactaccctgttttcaaacaaactataaaattctgtgacacagtcccttccaagcacacacaggcccaatctatggaaggaattatcggggaaacgacctaaaggaaagtatggggcatccattggctacagttcagctggctgcttgggggaaaaacgcaaagaggacgcaagctcagctgtgcttgatgtgagaccacccttgagatttgtcttttacattattgtctgccaggctcctgcgcaacttctatctccacctgtggacctgaaggcaaccgaggagttagccaggggcagttctgtggtaacaagaaagactcttgggggctgtatgcctccactgccttggcgcctcttgcctgcaattgccgcgctgcccctcgtgcctctgcaaagatgcagaggtcgaagcacgtttctgtgcggtgatgaaatgctcgctgaatcagcctctcgagcccggcctctcacacccaccaggatc

SEQ ID NO: 69416 - DNA, 3125 bp, Homo sapiens
tcatagaatagaataaagctgctgcagaaaggcagctcaggaaacatctgaggtcctttttccttcaccataattttagagatgagaaaatggatccctaagatccttgggctttcgtagttagacaaagatggtgctaggtccggatcccaagcctcttgtcctctaaggctttcacgctctcccatactgtctcagattagtttgggatcaaaatatttagctctttaccttacccaggatctttttgcagtgttacaaggcccccattcttcttttgttgctttctcttgtatagtcctaacattcattgagacacagtttgcaaaaagtgagggtgtgggtctcaacactgaccctttgcagcagtcacagaaaaacatcttaacagtgaagtttgagatttgtgtgttcagtgtttctaattcaatgctgtcgatgacactggcttctagttatttagcacatatgaatcatgttatagtatcaaaatacttttctatcaatagcaacttcttagcatgaatcaggccagttttattatttcctcctccccaaagcagctttcctggtcacatcagatttaatgaggtgcaataagttgcccagatgcttagctgtcacaactcctaaagtgtacagggtgcaagccaaaagttttagattaagggtagaaattgtcttacctctgggattcctggttactaaggacaaagttggggggtgggtgacaaaggggtttgggaaagggtagaagaatatcttgcgttcatttatagcaagccaggagttcacaggtattttagctcatccctagttgctagagtctttaaagattctgcttcatcctgaaaatctgctgtagtacagggaagggtaaaggtagagagaagggccactgacagagtccagttcatccccaactgaccctaacttcaagaggcaacaactcaaattctcagagggaatgggagcactttagatcagcaatacaccaacactggtctgatcctagttgctgttgacaagagtggacactttgagtgtgccccttggcatggtgattctgaacatgaacccagaggtgattccaaacctggaatgagaataaggctttccttgggcatgactcaagtagaaaagctctttgaatcacatttgaatctgagtcacccaccagtcttttctttgtcccataaaggcaattcaagcattgaggtataaaccaggctttttgattctcagccttcccttctcagccacctcacatctcaaccaccccatggaaacagtaagatttctttcaggcatttattttaaagagagactacttcatacaaccaggtttgggggatttgagggcttaagagagttactagaaattactgtcagttcttgctgtaaagctatctctgcccctgggacgcatggcctgccaaatggcctcataaatctgattattctcctttcctttttctctttccatgttaaaattcttctgatttaccagcaacttcaggagagttaaaacaaatgaaacctaacagaaattctgaccctccactgccaccaatgcactcaagatgcatcatcatgaactgtatttttagagacttgcaagtgttatattgggctaactcatattttggtcatctttgtcacctcctccaaatccctctgatatttattttgaagaccttctgagagtctacaaccacacttgctagaaattcttactcacttaatcttacatgtctcatgctactgtttaattctgttctcttgattttcaaagctctgtctgatggaccttgtattacaatggaccttgtataagatggaccttgtctgatggacatgtattacaatacatgaattacatgcctatagaaaaaactgaatggaagattctgaaaactcatgcttttagatgctttccccagtttcagcagcagccccttcattatcttatgtgtctcacacccctattccactttctccccctccctcttcatagaatctcaaatcttcagactatcaaatgaaaagcataattttcatcacttaggttatgacccttctaccatagaatagccgttgatatagccaattaggtaagacttagggtccaattctatcagaattctctctgatagaaatgctcagaaaattctgtgatcatatggttcaaaacgatttgttaccaaaatccactcctacaattaagcattctggtttcatggctgggggtgggaggcarttacatgtttctttatatcagaatcagaaggaaacaaacaaaaaaaccaacggaaatagggaaatgcagtttgaaaagtagaaactgttaaaagagcaacagaaagactgttaaaagggaaaacataagctaaggaaacagcacgaagggcaggtgtacaacagcaatgccatgtgaaaatgtaaggaattctatagtggtaattccgggataaattagcctgaaaacagctctctggttagctttgggttgtagggggagatggaagttcctggacaattaaccatctgctatgtctttttgtacccttaccacccagctcagcgtctgggcacagagtagctgtcaatatttgtatagtaagtgtaacactggccgaactaccctgttttcaaacaaactataaaattctgtgacacagtcccttccaagcacacacaggcccaatctatggaaggaattatcggggaaacgacctaaaggaaagtatggggcatccattggctacagttcagctggctgcttgggggaaaaacgcaaagaggacgcaagctcagctgtgcttgatgtgagaccacccttgagatttgtcttttacattattgtctgccaggctcctgcgcaacttctatctccacctgtggacctgaaggcaaccgaggagttagccaggggcagttctgtggtaacaagaaagactcttgggggctgtatgcctccactgccttggcgcctcttgcctgcaattgccgcgctgcccctcgtgcctctgcaaagatgcagaggtcgaagcacgtttctgtgcggtgatgaaatgctcgctgaatcagcctctcgagcccggcctctcacacccaccaggatc

SEQ ID NO: 69417 - DNA, 937 bp, Homo sapiens
ttcatacattgttgaggaaagagtcttgaactcattggattcaccaatgtttaaaatctttattgcaccaatttttttaaatctttattggttttcattgatctgatgtggttcatgattttccatgacattcactcttttaaaatgaatcataaaatccagcattttgctctgcttgtcccattacttatccataaaaactagatttaatttctactgtaattatttttttaaaatacacatttagtgctttaagaatggaataattacaggtcgggcayggtggttcacttccgtaatcccagcaatttgggggggtgtggcaggaggatcacttgaacccaagttcaagtggagtttgagaccaggctgggcaacaaagcaagatccagtctctacgtaaatagaaataaaaataaaaaaaataagccaggcatggtggcacatgggaggctgaggtggaaggattggggaggttgaggctgtagtgaaccatgatcatgccactcctgttctgcctgggcaacagagtgagatcctgtcttaaaacaaaacaaaaaagaatggaacaattataaaataatgtatgttctatctgaaaacaatgtcgttaacactttatggaagctgtccccagagttgagggacacttgctgatgtgaagttagccaacacatgactgcttcagaatagaaacaatgttcaatggtgttgaacaaaaaaaaaatgcacccttgctaaagctacttctaatgctgtgtagctctaacaaatgatttatactggttttccatttaatgagctggcagggaggatttttagctactgcaaaatcttctagaaaaaaaagaaacttgttgagaagtctctgaaagggtgtgaagtttcttattttacattcattaactttttattttattcaaagttcagaaatagg

SEQ ID NO: 69418 - DNA, 1153 bp, Homo sapiens
gggaggaacagaagaagcagaatagataatcagagtaacatttgtatatcgccaaatccagaatttttagttcatatgtcgcattgccagtgttgtgaacaaccatttcccaggtaaaaataacgtaggaataaaatggctctgggcagcattgctgatataaccaagttgtggcctctgtaattatgtatattaactgaagttgttaaacatgctttcaatttttatagcacctttttcagtggaaaacttaactaaataattggcatataccaatttgtgttgagagtttttccatgcctgtgtgtgtgtgtgtgtatgtgtgtgtgtgaaaacctattattttgaactctactgctttgagaagggccatatggttgtatatgcacaaaattgcgcattcttaaagttttttcatacgtaaggcttgcaagttgtttacttaaaacattaaaatggttggcatcttgcttaaggcagctgataaagtagcaacgaaagagtccggtttttgaacatatgaaaattctgtttgttatactatgaatagcagcatctaaagtgaagaagtaagaaatactctgtggtaactagattatccttagtactctgaatgaactctttaacgacccttgaattaaaaaatatttgttacagaaattgaaagctaaacgtgaatgttcatgttcatgctcaaataaatgtaattattatgaacacctacatgatttgggattttggttttattttgaaatgagagctctttcatttacaagttcactaaaaactcaaatgtttcttgaaaatcacaggagcttatgaacattaaaaagaaggaataactattgaacaaataagacagacactgtcaagaacgggcaggactttgcaaggtgataattaagactagttaatatttatgtggaaaagttctgrctgggcatttggaacataataatatgaacaatataatataataaatatagcatacatttgcatttatttgcaacctcagacaagcaagatgagtccaaataaagctagcttcatcgtagtcctttcttacatgtgtcacaaggtcttgagatcagtttaaaaaacatgttttatttacaactaatgtgaatactaatatttgctgtcatcagattcc

SEQ ID NO: 69419 - DNA, 604 bp, Homo sapiens
ctattttattaacattattttaatattatgtaatatggtaatggtttattatattacataatattgaagtgtgagagtaggcctgtgtgtgccaacactcagttatcctagattgcaatgctaagagaggtctaaaatctgctaattttagcttttcttctttctcctttattttataaattccactctgtcttttttttttttttttttctggaagattgcctgtttctagcagaaccttttcctcctttctatttttttttccctagtctgctgccaacgaactttttagaatttttttctgagataaaagtaaatttattttgagtatgaggtttacaacatactaattaattagctactagttgttgattaaatactgtgcaccagtgtttgtattaracattctaggttttcccagcaacactactattagggatagatggtaatcaccagtacatagataaaaccgaggataacatgccccagattatgaaattagagtgctgtgtggtcaagattgagtccgaatctatgttttttctcctagcaccaccctgcctctaacacataacaatattttaacactgaagtgtaatcagag

SEQ ID NO: 69420 - DNA, 979 bp, Homo sapiens
ttctatctgttcaagaatttagaaccagaactttagacaaagggattttaattgcatgctgataaaatgtcaaaactattgtgcataaagtaactgtgcttttttatttttttgtacaatgcctcaaggattatgagagagatttgcccctgtgagtgaaatccattttgtaactcatcagaaaatctttaacctatgagctaattcttataatctcctctataagccattacactgtgtctttccaccttctagatcgcacagttatacaataagttaaaatgagtggtctgcaaatttggttaacccattgctaacttcaagtagtgatttttatctccctctgaaaatctgaatgatgaataaggactgttgcttgtttggagaagttgcttatttcacaggacacagctgttacgcctcatgttaaactgtgaagagctgcatcagaaggtcaccttcccgaactgtccttcctactttaaaaagaaaatacccagagaagacaacaaggatgtggcttgactttcaaggccatccagtgagataaaagagtttctccaggtgatggtgggagttttcaaccaaggcataggtgttaccattggtacccagaatagttgggggggttggggggcaacgctgctgggtttacagaacaattgctaaggcaccagcaggatacctagaaatacacactcatcttcccaaagacaagtttttatttctatcacagacacaatctctgaggcagcgattagtgagaagtaaaattcaaaaaaactaaggcatttttcattgtctttagtatttaagaaaaagggtccccaaatatttccatttgagatgacaaagtgctcttcagtcatttagcttactcttcagttcagatgactyatcatcttgatttcagagagttcatatatgtctgttttaaaaaactggttcaaaaagtctgaagttacgaaactaaaccaaa

SEQ ID NO: 69421 - DNA, 2288 bp, Homo sapiens
ctgaggcaggagaattgcttgaacctgggaggcggagattgcagtgagccgagatcacgccactgcactccagcctgggtgacagggtgagactctgtctcaaaaaaaaaaaaaaaaaaaaaaaaaagaatgattttattataattctaaataaaaaaaactttatgtttactataagttcttttaacatacttgctaattcagctatgttctgtgcatctctgttttacaatcaatctagtatattttttagctgaaataactattttatcatctctaaatgtccactgataatatgttgaaggatatagaactgtatacagtcagctaacaaaggatttggggtttcattcattttttgtccatgattgttgctacattgaatatggtatattataccttcccttcttttctgaagaatttcatcaggaggtacgaatatatttaatgtattagacagaaggagactttttggttgttggtgatggtgggtggtttttaaacaatatcagaaatatagcttggaaattttaaaatatgcatcttggatcacaaatgttgaaaactagctgatgacaccctctgttttttttctattctgctacactgaaattctgtgaggtcagagttatttctagtttgtttacctctgtatctttagcattctgcacagcatctagcctttgatcaatatttaccgaatatgtttattattgaataaaggaagaagtgaatgctaaaattctagactgcaaggagcaacgaagcagatattcattttaagaaattttcctggtgtgtcatctaccttccaaaattaaacatcaaataaaattatgtgttgctgttgttggaaaatgatgatgattgtgtaaagcatttcactcacccttggctttatttggaaatcacctggggagttttaaaaaatactgttgtctgagtcccatccccagtaatttcattataattggcttggggtgtggcctgggattgggatttttccactagaatctctaagagtttctagtgtgcaactaagattgagaaccactgttataatatgatgacataaagatgactatgaagaagggacatttcagaacacctagcttacaatcttaatttatgaaaatacaaagaagctttatttttaaagccaattttagataacacaataaatcgattccatttctgggtgacataccagcacacacatacagaaataaatccttaaacaccttcttttgttcttttccttttttatagttcaaagagaaacaaagtataaaaacacactcatcaaaagagctaaatttggcccacttcttgaataataacaacatatttatatgtaaaggtaaaaagcttgggaaggggagaaacgagtggagaggggatactgtttcctaaatctacagttggaaatgacctatttcccacagtatcaaagaatcagaaaatgtaaacacactcgtgcttttctgctcagctatctgcttgctggcctgactcttctaactgttggctttgattacttaactcctcctacctgttcatccaacaactctggaaccaatctcgtcacaaatctagaatttaagaagcctaatcctataactcagaagctcaaccctttgctattccaatctgatttggggctctggttcctgtaagtggattcctatcttgtatcctcatgtgtaagtgtaagtccctgctgtcaaagacttttacctgattatgcaccagtcctttcagcagggttcttttcttacttggtttctcccacttctggggaaccggaaccagaatactgctctttgtactctccagaaggtccaaggttttttgtttgtttgtttgtttgtttgtttgtttttcttagaaacagtataactttggggccaagattaccaagcagcagaattgatagccacctacacagcrtaacgtatggaactacaaatagcccccacaaaacataccccaaaatatctgctgaagtacctctgctaaaaatggatgcacttctgttcaacaaattcattgagtatgctagggctattattatggaagctatgttttccaaatggaaaattgggatgcatcttgagagtaactagcactaggagagggtatctcatgccaagctcagtaaatccagaagtaactaaccatttttcctaaagtattctttttggtcattcatacactagtccttgaggtttttctcgctccaaatcctggaagtcttactgcatttcagtacagggaagagtgatcta

SEQ ID NO: 69422 - DNA, 2288 bp, Homo sapiens
ctgaggcaggagaattgcttgaacctgggaggcggagattgcagtgagccgagatcacgccactgcactccagcctgggtgacagggtgagactctgtctcaaaaaaaaaaaaaaaaaaaaaaaaaagaatgattttattataattctaaataaaaaaaactttatgtttactataagttcttttaacatacttgctaattcagctatgttctgtgcatctctgttttacaatcaatctagtatattttttagctgaaataactattttatcatctctaaatgtccactgataatatgttgaaggatatagaactgtatacagtcagctaacaaaggatttggggtttcattcattttttgtccatgattgttgctacattgaatatggtatattataccttcccttcttttctgaagaatttcatcaggaggtacgaatatatttaatgtattagacagaaggagactttttggttgttggtgatggtgggtggtttttaaacaatatcagaaatatagcttggaaattttaaaatatgcatcttggatcacaaatgttgaaaactagctgatgacaccctctgttttttttctattctgctacactgaaattctgtgaggtcagagttatttctagtttgtttacctctgtatctttagcattctgcacagcatctagcctttgatcaatatttaccgaatatgtttattattgaataaaggaagaagtgaatgctaaaattctagactgcaaggagcaacgaagcagatattcattttaagaaattttcctggtgtgtcatctaccttccaaaattaaacatcaaataaaattatgtgttgctgttgttggaaaatgatgatgattgtgtaaagcatttcactcacccttggctttatttggaaatcacctggggagttttaaaaaatactgttgtctgagtcccatccccagtaatttcattataattggcttggggtgtggcctgggattgggatttttccactagaatctctaagagtttctagtgtgcaactaagattgagaaccactgttataatatgatgacataaagatgactatgaagaagggacatttcagaacacctagcttacaatcttaatttatgaaaatacaaagaagctttatttttaaagccaattttagataacacaataaatcgattccatttctgggtgacataccagcacacacatacagaaataaatccttaaacaccttcttttgttcttttccttttttatagttcaaagagaaacaaagtataaaaacacactcatcaaaagagctaaatttggcccacttcttgaataataacaacatatttatatgtaaaggtaaaaagcttgggaaggggagaaacgagtggagaggggatactgtttcctaaatctacagttggaaatgacctatttcccacagtatcaaagaatcagaaaatgtaaacacactcgtgcttttctgctcagctatctgcttgctggcctgactcttctaactgttggctttgattacttaactcctcctacctgttcatccaacaactctggaaccaatctcgtcacaaatctagaatttaagaagcctaatcctataactcagaagctcaaccctttgctattccaatctgatttggggctctggttcctgtaagtggattcctatcttgtatcctcatgtgtaagtgtaagtccctgctgtcaaagacttttacctgattatgcaccagtcctttcagcagggttcttttcttacttggtttctcccacttctggggaaccggaaccagaatactgctctttgtactctccagaaggtccaaggttttttgtttgtttgtttgtttgtttgtttgtttttcttagaaacagtataactttggggccaagattaccaagcagcagaattgatagccacctacacagcataacgtatggarctacaaatagcccccacaaaacataccccaaaatatctgctgaagtacctctgctaaaaatggatgcacttctgttcaacaaattcattgagtatgctagggctattattatggaagctatgttttccaaatggaaaattgggatgcatcttgagagtaactagcactaggagagggtatctcatgccaagctcagtaaatccagaagtaactaaccatttttcctaaagtattctttttggtcattcatacactagtccttgaggtttttctcgctccaaatcctggaagtcttactgcatttcagtacagggaagagtgatcta

SEQ ID NO: 69423 - DNA, 939 bp, Homo sapiens
aaaaacattatttggagaaagagtccgtggcccttatctgatagccagaggtccagggcacaaagaagatttgctttcttccctgactcatcacggccacatcctccagtaccctgcattgttttcaatatactactttaaggagccctggatacctcctgtgtgccctgtgtcgtagggggctattcctgtttggcctctacagatgagatattctgagcagaaggtctgtccaggtgaccttatctttttttttttttttaacttttgcaaatcttgtttattatagaaagattatagtggttaaaaagcttccagttttataagttgacctcaaaacagtgtaattgtgtgtgtgtgtgttttcttttctttaaattttttttataatttttatttttaattcaggggatgtatgtacaggtttgttacaggagtatatggcttgatgctgagacttgtggtgccactgatgctgagcatagcacccaataaatttttaaaccttgacctcctcctccccycccacctctagtcgttcccagtggctattgttcccatctttatgtccatgagtcaggtgagctcatcttgatagtcaccccttgtgactttttttccacaccttacaggggaaatggcatggttctccaacggcctcccagtcgttagcaggaatgaatgagggcccttggagaacatttcatctgcctcctagttacagtcaagtcaatagaattccagagagcaacacaatggcctgcctcagattcccacagatagtgaattgccctgactagttaattagaaagttcttttctatatattacacatggacaaatacaatgactagcatttcggtgtattttttatttttttaattgacacataatagttgtattatgtattatgggatacagtgtatgatgtttcaatgca

SEQ ID NO: 69424 - DNA, 939 bp, Homo sapiens
aaaaacattatttggagaaagagtccgtggcccttatctgatagccagaggtccagggcacaaagaagatttgctttcttccctgactcatcacggccacatcctccagtaccctgcattgttttcaatatactactttaaggagccctggatacctcctgtgtgccctgtgtcgtagggggctattcctgtttggcctctacagatgagatattctgagcagaaggtctgtccaggtgaccttatctttttttttttttttaacttttgcaaatcttgtttattatagaaagattatagtggttaaaaagcttccagttttataagttgacctcaaaacagtgtaattgtgtgtgtgtgtgttttcttttctttaaattttttttataatttttatttttaattcaggggatgtatgtacaggtttgttacaggagtatatggcttgatgctgagacttgtggtgccactgatgctgagcatagcacccaataaatttttaaaccttgacctcctcctcccctccsacctctagtcgttcccagtggctattgttcccatctttatgtccatgagtcaggtgagctcatcttgatagtcaccccttgtgactttttttccacaccttacaggggaaatggcatggttctccaacggcctcccagtcgttagcaggaatgaatgagggcccttggagaacatttcatctgcctcctagttacagtcaagtcaatagaattccagagagcaacacaatggcctgcctcagattcccacagatagtgaattgccctgactagttaattagaaagttcttttctatatattacacatggacaaatacaatgactagcatttcggtgtattttttatttttttaattgacacataatagttgtattatgtattatgggatacagtgtatgatgtttcaatgca

SEQ ID NO: 69425 - DNA, 939 bp, Homo sapiens
aaaaacattatttggagaaagagtccgtggcccttatctgatagccagaggtccagggcacaaagaagatttgctttcttccctgactcatcacggccacatcctccagtaccctgcattgttttcaatatactactttaaggagccctggatacctcctgtgtgccctgtgtcgtagggggctattcctgtttggcctctacagatgagatattctgagcagaaggtctgtccaggtgaccttatctttttttttttttttaacttttgcaaatcttgtttattatagaaagattatagtggttaaaaagcttccagttttataagttgacctcaaaacagtgtaattgtgtgtgtgtgtgttttcttttctttaaattttttttataatttttatttttaattcaggggatgtatgtacaggtttgttacaggagtatatggcttgatgctgagacttgtggtgccactgatgctgagcatagcacccaataaatttttaaaccttgacctcctcctcccctcccmcctctagtcgttcccagtggctattgttcccatctttatgtccatgagtcaggtgagctcatcttgatagtcaccccttgtgactttttttccacaccttacaggggaaatggcatggttctccaacggcctcccagtcgttagcaggaatgaatgagggcccttggagaacatttcatctgcctcctagttacagtcaagtcaatagaattccagagagcaacacaatggcctgcctcagattcccacagatagtgaattgccctgactagttaattagaaagttcttttctatatattacacatggacaaatacaatgactagcatttcggtgtattttttatttttttaattgacacataatagttgtattatgtattatgggatacagtgtatgatgtttcaatgca

SEQ ID NO: 69426 - DNA, 939 bp, Homo sapiens
aaaaacattatttggagaaagagtccgtggcccttatctgatagccagaggtccagggcacaaagaagatttgctttcttccctgactcatcacggccacatcctccagtaccctgcattgttttcaatatactactttaaggagccctggatacctcctgtgtgccctgtgtcgtagggggctattcctgtttggcctctacagatgagatattctgagcagaaggtctgtccaggtgaccttatctttttttttttttttaacttttgcaaatcttgtttattatagaaagattatagtggttaaaaagcttccagttttataagttgacctcaaaacagtgtaattgtgtgtgtgtgtgttttcttttctttaaattttttttataatttttatttttaattcaggggatgtatgtacaggtttgttacaggagtatatggcttgatgctgagacttgtggtgccactgatgctgagcatagcacccaataaatttttaaaccttgacctcctcctcccctcccaccyctagtcgttcccagtggctattgttcccatctttatgtccatgagtcaggtgagctcatcttgatagtcaccccttgtgactttttttccacaccttacaggggaaatggcatggttctccaacggcctcccagtcgttagcaggaatgaatgagggcccttggagaacatttcatctgcctcctagttacagtcaagtcaatagaattccagagagcaacacaatggcctgcctcagattcccacagatagtgaattgccctgactagttaattagaaagttcttttctatatattacacatggacaaatacaatgactagcatttcggtgtattttttatttttttaattgacacataatagttgtattatgtattatgggatacagtgtatgatgtttcaatgca

SEQ ID NO: 69427 - DNA, 692 bp, Homo sapiens
catcaagtaagccctctgtgctagttcctaatgttatgatttttattattgttgttatcgtcatcatcactgtgattattatttgggtatgggatatgaggggaaagtcggggatgactttaagtctcttgtcctgagcaaactggaaatatgaaattgtgctttttttttgagacagagtcttgctctgtcagccaggctggagtgcagtggcatgatctcggctcactgcaacctccacatcctgggttcaaacgattmtcctgcctcagcctcctgtgtagctgggattattacaggcgtgtaccaccacccctagctaattttttgtatttttagtagagatggggtttcaccatattggccaggctggtctcgaactcctgacctcaagtgatctacccgccttggccttccaaagtgctaggattacaggggtgagctaccgcgaccaggccaaactgtgctttattgagatgaggaagactggaggaaaagcaaattttcatagagatgggaattcaacacgatttaatgtttttcttttcgtatatctgtattctgctttgctttataatgaataattataaattagttaccaagtaataactatgcaagtagttacccaaacaagtaattctcacccatttgatcatgtaattcatactcaccaaatgaaatcattagaaagt

SEQ ID NO: 69428 - DNA, 986 bp, Homo sapiens
tgcatatttttccacaattttaaaaacaaaacacaactagccttttttggaaaaccacactcacactgtcttcttgggaaagaaattcaaaccatactccaaatcgaagctctcatgtgggttaaaaccacttttgttcctgtaagttgtttatttttatactattgtataaataactagtagaattctcttttataaatttaggtcactgttacttagcaggacattccaaggttttaaagaatatactaaaaggtcttctaagacataataaaatatttttccatgatatggataagcatcttggtgatttttrtaaattaaaattattcctaagcctttccttcctcccaaaataaggaaaatgcctatagaagatactgattttcctaagtgctatcaaataagtgatctcaatgtattatttaccaagaataaaaataggtaagctattatgcccttatggaaaaaaataaactaattattgcagcattttctcttcttacccaccatttactcttcttacccaccatttacttcatcatttattttttattgtaaatttctccacaaatacttaaatgattagcttgttaataaagttaagtaaagctgggagtggtggctcacactgtaatcccagctacttgggaggctacagtgggagaatcacgtgagaccaggagctcaataccagctgggcaacatagcaagaccttgtctgtaaataaaataataaaatgattttttaaaagttcaatgaagagaaaaggtattaaatgatgataaataattttatgttatctctaattcttaaccttcatgttaacttatttagaagtgacaatgaagagattccaggccataaaaagaaaacattttaccattattatgttattatttcacgttcctaattaggtagtacacgtgggttcattttagcagagtttacattttgaaagtgtttcttttctaaagggtcttaa

SEQ ID NO: 69429 - DNA, 986 bp, Homo sapiens
tgcatatttttccacaattttaaaaacaaaacacaactagccttttttggaaaaccacactcacactgtcttcttgggaaagaaattcaaaccatactccaaatcgaagctctcatgtgggttaaaaccacttttgttcctgtaagttgtttatttttatactattgtataaataactagtagaattctcttttataaatttaggtcactgttacttagcaggacattccaaggttttaaagaatatactaaaaggtcttctaagacataataaaatatttttccatgatatggataagcatcttggtgatttttgtaaattaaaattattcctaagcctttccttcctcccaaaataaggaaaatgcctatagaagatactgattttcctaagtgctatcaaataagtgatctcaatgtattatttaycaagaataaaaataggtaagctattatgcccttatggaaaaaaataaactaattattgcagcattttctcttcttacccaccatttactcttcttacccaccatttacttcatcatttattttttattgtaaatttctccacaaatacttaaatgattagcttgttaataaagttaagtaaagctgggagtggtggctcacactgtaatcccagctacttgggaggctacagtgggagaatcacgtgagaccaggagctcaataccagctgggcaacatagcaagaccttgtctgtaaataaaataataaaatgattttttaaaagttcaatgaagagaaaaggtattaaatgatgataaataattttatgttatctctaattcttaaccttcatgttaacttatttagaagtgacaatgaagagattccaggccataaaaagaaaacattttaccattattatgttattatttcacgttcctaattaggtagtacacgtgggttcattttagcagagtttacattttgaaagtgtttcttttctaaagggtcttaa

SEQ ID NO: 69430 - DNA, 986 bp, Homo sapiens
tgcatatttttccacaattttaaaaacaaaacacaactagccttttttggaaaaccacactcacactgtcttcttgggaaagaaattcaaaccatactccaaatcgaagctctcatgtgggttaaaaccacttttgttcctgtaagttgtttatttttatactattgtataaataactagtagaattctcttttataaatttaggtcactgttacttagcaggacattccaaggttttaaagaatatactaaaaggtcttctaagacataataaaatatttttccatgatatggataagcatcttggtgatttttgtaaattaaaattattcctaagcctttccttcctcccaaaataaggaaaatgcctatagaagatactgattttcctaagtgctatcaaataagtgatctcaatgtattatttaccaagaataaaaataggtaagstattatgcccttatggaaaaaaataaactaattattgcagcattttctcttcttacccaccatttactcttcttacccaccatttacttcatcatttattttttattgtaaatttctccacaaatacttaaatgattagcttgttaataaagttaagtaaagctgggagtggtggctcacactgtaatcccagctacttgggaggctacagtgggagaatcacgtgagaccaggagctcaataccagctgggcaacatagcaagaccttgtctgtaaataaaataataaaatgattttttaaaagttcaatgaagagaaaaggtattaaatgatgataaataattttatgttatctctaattcttaaccttcatgttaacttatttagaagtgacaatgaagagattccaggccataaaaagaaaacattttaccattattatgttattatttcacgttcctaattaggtagtacacgtgggttcattttagcagagtttacattttgaaagtgtttcttttctaaagggtcttaa

SEQ ID NO: 69431 - DNA, 1378 bp, Homo sapiens
cccaaggagtaaggacaatgactccttgaagagttgtaaaaaaaatatgtatttccatgatgcctaatgtctttccctctgcccaacttaattgttaataaataggactggttagtgtcttgaaatctgtgcattcaaagtgatcttcagcgggtctgatgatgggaaccactgggttagggaatggtgcctagaagggcagagctacctaaaaaaagtaccctactgctgggcctggtggctcacgcctgtaatcccagcactttgggaggccgaggtgggtggatcacgaggtcaggagatcgagaccatcctggctaacatggtgaaaccccgtctctactaaaaatacaaaaaaacaaaaaaaagcaacaaaaaaattaaccttagcctgacgtggtggcgggcgcttgtagtcccagctactcaggaggctgaggcaggagaactgcttgaacctgggaggcagaggaggttgtagtcagccaagatcgtgccactgcactccagcctggcgacagcgagactgtgtctcaaaacaaacaaacaaacaaacaaaaaacaaaccaaaaaaaccctactatggcgatgattttttaagaaaatgtttggtgggtcttaaagctctctgaaaatcttatgtggaagctatggatcctttaagaatgcagtgcgtacctattcataaaaatttscttacatttcaaagtgttctcttaacgttgaaagcttggccacactaggctaaagaaaaccctctgtaagtgattatttatgcaaatagaactgtttgtggcactgataacaactagccaagtaaagggattcttcctactggctcctagtgagttgtaacacagagagctagctcttcatcaaaaacttatgcctttcttattatagcatagaactcttgctgggaaataactattttcccagcctcccttacgtttaggcgtggctatgctaatagctttgtcagtaaaatgtgagcagtggttatttatgtgtcacttgcaggaagagagggtcaagaatgagacacaccttctccatcctctctttttctcactggctgtctggatgaacatccccggggtaaccttggaaaccacacattgaaaacagaaaaacagtaaattgaatggaggctggatcttgaattaatgctcagaggagaactggcagcagatcaggaacactcatttttctttatatgcatgagaggtacatttattatatggtaagccactgagatttcaggatttctcacgagcagctgatgttatcttaaataaccactgtacattttgataactatggtagagggtttagccacagaccactacttgagaaataagcagtaagtgtatagttt

SEQ ID NO: 69432 - DNA, 549 bp, Homo sapiens
ggctgaagaaatgccccggaagcattgtgaagatctgaggagagagtaccactgtagaaaatgtgtcatgataggccaagcacggtggctcacgcctgtaatcccagcagtttgggaggccgaggcgggtggatcacgaggccaggagatcgagaccatcctggctaacacggtgaaaccccgtctctactaaaaatacaaaaaaattagccggacgtggtggtggcaggcacctgtagtcccagctactcgggaggctgaggcaggagaatggcgtgaacccaggaggcagagcttgcagtgagccgggatcgtgccactgcactccagcctgggcaacagagcgaaactccatctcaaaaaaaaaaaaagaaaatgtgtcataataaaatgccatttaggcccggcacggtggctcacacctataatcccagcactttgggaggccgagrcaggtggatcacctgaggtcaggagttcgagatcagcctggccaacatagtgaaaccccgtccctactaaaaacaaaatacaaaaatttgctgggca

SEQ ID NO: 69433 - DNA, 898 bp, Homo sapiens
accaaatatgcttcaacaaagatgtgcattcacmaaatatttttttaaaaatttacaataatttccttaacataaattctagaaggtagacattgatcaaaatatctaaagattttttatggttcttaataaaatatggtcatattacatctcaaaaaaacaaggaagttatacctatttttaatgagtgcaaataaccattttgcttcataagctttaagtgttataattaatttgactttgctaatttattcaaaaaatattatttcatattacatacctttaacttcaagcactgtacaggatcaaaatcttatgttcattttttagcaggactgactttacctggagaataagtgaacccattaaacatcagaattgtttgagtagatagatggtaatgactgatatttattgagtgctttttatgaaaaaagtggtgttttaattctcacagtgacctgtgaagaaggttatcatttcatcactccagaaggagggtttattccctacagaggagaaaagagaggctctgatataatgggacaggattaaattcaggagaattgagccccaaacctcagtcttccaactttgatgtgatttaaatcatatctgaatgcaaccaatattgctatctgtattagtcagctgttgctacaataatgccatataacaaacaccccctaaactcacacttaaaacaatagttttgtattctcattgagctgcagtttggcagtagaagttttgctttaaaactcccctcttagtcatttattgaagaaaaacataatgaatacctcttattttccaagcactcttctgggctctggagaaacaacaatgaataaaatacacataaatgctgcccttaggaaacttactttcttgaggg

SEQ ID NO: 69434 - DNA, 531 bp, Homo sapiens
tgaccagttctactggatccatctgggtggaaagtgcctcttgcatcccccatcctatccccatgtggaaatctacaatcctgttttgtgtttatcatcccctttctttgctttgttagctttaccacaaagctttatcagttttgcttgcttttgagctttataaagatggtctcataccttaaataattttttttttttttgagacagagtcttgttctgttgcccaggctggagtgcagtggcatgatcttggctcacygcaacctccacctcccaggtccaagtgattctcctgcctcagcctcctgagtagctgggattataggcatgtgccaccatgcctggctgatttttgtatttttagtagagacgaggtttcaccatgttggtcaggctggtctcgaactcctgaccttgtgatctgcctgccttggccacccaaagtgctgggattataggtgcgagtcactgtgcctggccttaaataatattttaagacttgctttgttcacactatatggtttctaa

SEQ ID NO: 69435 - DNA, 780 bp, Homo sapiens
tggctgcataatcacacatgcacggaaggcaaaatcatttggacgggagccttgagtggtggagaaagcaagggctctgagccagatatttcagagttcacatcagtgtgtctttataatttagttgtttaagtcactrctttctcatctgcaaaatgggaattgcaatgcatatttcatgtacttgttccaggaactaaatgagataatctatttaaaggtcctggcacagggtctggtaaaaattaggtgttaagtgaaagtaagttcccttccaatgtctgggcttttgatcattgcaccaagctgcctctgcaaggcacacaagactctaggtgatctgattcctccctttttcaccccttcagcttcatctggggccacttttcccttgcccatgactctctgactcctaagcccatgactagtttcccttcagtaccaaagccattctaaattctctcctgcctctggatcttcatacttccttttccttctgcttgcaaccctttctcatgatcacatttcagagaagccctcctgaggaccacgctatctaaagtagtttcttgtccactgtgttcagcagaataatgacaccccgcaaagatgtggtttttatgaagacagaaacatctgtcttatttaccagctcacctgctacagtatggattatgtagcacatactcaatatttattgaatgcatatatgaatgaaaaattgaatgggaactttgaaattcatcctcatccctggaacccaagagtatgttaagtgac

SEQ ID NO: 69436 - DNA, 847 bp, Homo sapiens
tattgtgactagttaataaaagtgttctaaccacaaaaatgatccatatacaaggtagcatatatgttaattagctttatttagccattccacactgtatgcgtatatcaaaaatcatgtacaccataaatataattattattattttttgagacagagtttcgctcttgttgcccaggctggagtgcaatggcacgatctcagcycactgcaacctccgcctcctgggttcaagcgattctcctgcttcagcctccctagtagctgggattacaggcatgcaccaccatgcccagctaattttgtatttttagtagagatggggtttatccatgctggtcaggctggtctcgaactcctgacctcaggtgatccgcccacctcggcctcccaaagtgctgggattataggcgtgagccactgtgcccggctcataatttttatttataacaaaaagtaaagcgaatctcttgtagacagagtatagttggatcttgttttttcaacctattcacctactctatgtcttctaattggggaatttaattcatttatacttaaagtaattattgatagataatttacttagtagaagtataactttgagcctgttatttaccttttctaaatgagttttcatctctgtgaaatgggcacaattaaagagtccgcctcctgggactggggtcaggattagttgagatagtctgtgtaaggctaggatggtgcttgacagtcagtgttattattttttgatcctgtgggatagggcaacccagatactcaggtgggaaacacttgcaaccagagaaccttgactcaaaatcttggtcctacttggtttgaa

SEQ ID NO: 69437 - DNA, 847 bp, Homo sapiens
tattgtgactagttaataaaagtgttctaaccacaaaaatgatccatatacaaggtagcatatatgttaattagctttatttagccattccacactgtatgcgtatatcaaaaatcatgtacaccataaatataattattattattttttgagacagagtttcgctcttgttgcccaggctggagtgcaatggcacgatctcagcccactgcaacctccgcctcctgggttcaagcgattctcctgcttcagcctccctagtagctgggattacaggcatgcaccaccatgcccagctaattttgtatttttagtagagatggggtttatccatgctggtcaggctggtctcgaactcctgacctcaggtgatccgcccacctcggcctcccaaagtgctgggattataggcgtgagccactgtgcccggctyataatttttatttataacaaaaagtaaagcgaatctcttgtagacagagtatagttggatcttgttttttcaacctattcacctactctatgtcttctaattggggaatttaattcatttatacttaaagtaattattgatagataatttacttagtagaagtataactttgagcctgttatttaccttttctaaatgagttttcatctctgtgaaatgggcacaattaaagagtccgcctcctgggactggggtcaggattagttgagatagtctgtgtaaggctaggatggtgcttgacagtcagtgttattattttttgatcctgtgggatagggcaacccagatactcaggtgggaaacacttgcaaccagagaaccttgactcaaaatcttggtcctacttggtttgaa

SEQ ID NO: 69438 - DNA, 847 bp, Homo sapiens
tattgtgactagttaataaaagtgttctaaccacaaaaatgatccatatacaaggtagcatatatgttaattagctttatttagccattccacactgtatgcgtatatcaaaaatcatgtacaccataaatataattattattattttttgagacagagtttcgctcttgttgcccaggctggagtgcaatggcacgatctcagcccactgcaacctccgcctcctgggttcaagcgattctcctgcttcagcctccctagtagctgggattacaggcatgcaccaccatgcccagctaattttgtatttttagtagagatggggtttatccatgctggtcaggctggtctcgaactcctgacctcaggtgatccgcccacctcggcctcccaaagtgctgggattataggcgtgagccactgtgcccggctcataatttttatttataacaaaaagtaaagcgaatctcttgtagacagagtatagttggatcttgttttttcaacctattcacctactctatgtcttctaattggggaatttaattcatttatacttaaagtaattattgatagataatttacttagtagaagtataactttgagcctgttatttaccttttctaaatgagttttcatctctgtgaaatgggcacaattaaagagtccgcctcctgggactggggtcaggattagttgagatagtctgtgtaaggctaggatggtgcttgacagtcagtgttattattttttgatcctgtgggatagggcaacccagatactcmggtgggaaacacttgcaaccagagaaccttgactcaaaatcttggtcctacttggtttgaa

SEQ ID NO: 69439 - DNA, 1190 bp, Homo sapiens
ctgtaaagtgtgaatgtatgaaattaaatgaggcttgcaatgtaatcagtgtggttggctgctttaatatattccatttcaatttcaaatcaccgtaagccaagagtgacgaatctaatttgatcagttgttcacaaaaacacagaaaagcaaatgtggatctagcaacacagccagatttttaaaggaattaatattttccaccaccaccagaagcccttaacatattttttaaaaaatactaattaaaaacaaatccaaacaaaattcttttytcactaaaaattcaaccctcacactcaaaagttcaaaagagacaatacttaaaagcataaaaagcatatttaattttaaaagccagtgacatatttcaaatgtaccaagagaaaactaaaaccaacaggtctttacagtgcacttcctggaactaatgtggaaggttctccagcactggttattagtatctagcaagaatttgtatacaaacatatttctttatccccatccctactataatttggggcaacacaactcacaaatgtactcactgtcatactagaggtctttaggactctagcagctgcttagcagagcacacaagaaacaacatgctgatatgggaataagactgcattatcccagtcacctttgaaagttgtgatgctcttcagaatctccctaattaatatgtaatttttaaggctttagcattttcctctagacctccgtacataatttctagagaaaatacacagagtgcttccagcaggtgcacatttggtggagggggaccttccaaaagctcccacagtggaaataccacactccttaccaaagcccttctttcaagatctagcccctgcctatttgtccaacttgatcttctgttactttcccttcgttgcctgtcctccagccacacctgcctcctaactgtcctaagatgctccagcttcagactttttcctctggttgttcccctggtgtagaacgttctgcttccagaatttcctccctcttgtcattcaggtctcagcttaaacaccagcttcttagaaagaacttcctatccacttctatcaaaccaccccattttattgtctctgtaggggttgttactatctgaaatgatcttgctctttactcttctgtagaatgtgccatgagaacagataccttgtttatgcctg

SEQ ID NO: 69440 - DNA, 1190 bp, Homo sapiens
ctgtaaagtgtgaatgtatgaaattaaatgaggcttgcaatgtaatcagtgtggttggctgctttaatatattccatttcaatttcaaatcaccgtaagccaagagtgacgaatctaatttgatcagttgttcacaaaaacacagaaaagcaaatgtggatctagcaacacagccagatttttaaaggaattaatattttccaccaccaccagaagcccttaacatattttttaaaaaatactaattaaaaacaaatccaaacaaaattcttttctyactaaaaattcaaccctcacactcaaaagttcaaaagagacaatacttaaaagcataaaaagcatatttaattttaaaagccagtgacatatttcaaatgtaccaagagaaaactaaaaccaacaggtctttacagtgcacttcctggaactaatgtggaaggttctccagcactggttattagtatctagcaagaatttgtatacaaacatatttctttatccccatccctactataatttggggcaacacaactcacaaatgtactcactgtcatactagaggtctttaggactctagcagctgcttagcagagcacacaagaaacaacatgctgatatgggaataagactgcattatcccagtcacctttgaaagttgtgatgctcttcagaatctccctaattaatatgtaatttttaaggctttagcattttcctctagacctccgtacataatttctagagaaaatacacagagtgcttccagcaggtgcacatttggtggagggggaccttccaaaagctcccacagtggaaataccacactccttaccaaagcccttctttcaagatctagcccctgcctatttgtccaacttgatcttctgttactttcccttcgttgcctgtcctccagccacacctgcctcctaactgtcctaagatgctccagcttcagactttttcctctggttgttcccctggtgtagaacgttctgcttccagaatttcctccctcttgtcattcaggtctcagcttaaacaccagcttcttagaaagaacttcctatccacttctatcaaaccaccccattttattgtctctgtaggggttgttactatctgaaatgatcttgctctttactcttctgtagaatgtgccatgagaacagataccttgtttatgcctg

SEQ ID NO: 69441 - DNA, 540 bp, Homo sapiens
ttgaatatcttgtatgagtgagtaggtattacttttataaaagtaaacataagtaagactgggtaaataatcggtgggccagatccttctgatcccattaggaccaggacagaggtgccttgaatggaaatggcctcttgaaaggccagtcctcccactgtgttcaggcattcctagcctgttattcaggctattggacattttagccagagtgagtcagtttctccatcctcatgcaaaggtggaaaccagaccctgggctttggtggccccatgagcttgctgcctctctgagwgtggtaggtagaataatggctctccactatgtcctaatccctggaacctgtgaataatatgttacactacatagcaagggggattaggctgcagatggaattaagtttgctaatccagtgaccttaaattaaggagattatctgggattatctgagtgtccaatgtagtcacaagggtctttaaatggggatgagaaggttgaagagtgagaaccaaagagatggcatggtgagaaagaactta

SEQ ID NO: 69442 - DNA, 719 bp, Homo sapiens
aaaaaaatgctttgtgtagctataccattaaaatctctccctcacctttctgtcccattatctgctttacttagacttgtttcaaaataacttttacctgctgctgagaatgtgttatttgctcgcctagggagaggagacccagatgaatggactatgggmtcacacctcctctgggtacaaacagaagatgggagtgcaggttatcctctgccctgcaactccacatatgcttgacaatgacctagccgggctctgaatccaggaatgctgggaccagacactgcaaccaggctcggaataaattagcagtgacccagagtttgtggcgtccgaaaggacatttctctgtggatcttgccaagatgttcatttcaaagaaagccctggcttcttcaggctgcctttcccgtcggccacatgcttcccctcgtaggacaatgttgcacaattggtttcccaaacaggggtcaggtcctgtccctttcctgtcaccgccttgcccagcagaggggaaattgttctaagggtctagatgcggagagcaggtggcatgtgtctgctggacggagcagaggctgctgggaaatggccaggggctcttcgaggccaccagaggagtggccctgggcaggggcagtatgccagggagggctggggaaggggaccttcatatcacagcctttagatcctcctgggtagagttcagagctggatcc

SEQ ID NO: 69443 - DNA, 719 bp, Homo sapiens
aaaaaaatgctttgtgtagctataccattaaaatctctccctcacctttctgtcccattatctgctttacttagacttgtttcaaaataacttttacctgctgctgagaatgtgttatttgctcgcctagggagaggagacccagatgaatggactatgggctcacacctcctctgggtacaaacagaagatgggagtgcaggttatcctctgccctgcaactccacatatgcttgacaatgacctagccgggctctgaatccaggaatgctgggaccagacactgcaaccaggctcrgaataaattagcagtgacccagagtttgtggcgtccgaaaggacatttctctgtggatcttgccaagatgttcatttcaaagaaagccctggcttcttcaggctgcctttcccgtcggccacatgcttcccctcgtaggacaatgttgcacaattggtttcccaaacaggggtcaggtcctgtccctttcctgtcaccgccttgcccagcagaggggaaattgttctaagggtctagatgcggagagcaggtggcatgtgtctgctggacggagcagaggctgctgggaaatggccaggggctcttcgaggccaccagaggagtggccctgggcaggggcagtatgccagggagggctggggaaggggaccttcatatcacagcctttagatcctcctgggtagagttcagagctggatcc

SEQ ID NO: 69444 - DNA, 719 bp, Homo sapiens
aaaaaaatgctttgtgtagctataccattaaaatctctccctcacctttctgtcccattatctgctttacttagacttgtttcaaaataacttttacctgctgctgagaatgtgttatttgctcgcctagggagaggagacccagatgaatggactatgggctcacacctcctctgggtacaaacagaagatgggagtgcaggttatcctctgccctgcaactccacatatgcttgacaatgacctagccgggctctgaatccaggaatgctgggaccagacactgcaaccaggctcggaataaattagcagtgacccagagtttgtggcgtccgaaaggacatttctctgtggatcttgccaagatgttcatttcaaagaaagccctggcttcttcaggctgcctttcccgtyggccacatgcttcccctcgtaggacaatgttgcacaattggtttcccaaacaggggtcaggtcctgtccctttcctgtcaccgccttgcccagcagaggggaaattgttctaagggtctagatgcggagagcaggtggcatgtgtctgctggacggagcagaggctgctgggaaatggccaggggctcttcgaggccaccagaggagtggccctgggcaggggcagtatgccagggagggctggggaaggggaccttcatatcacagcctttagatcctcctgggtagagttcagagctggatcc

SEQ ID NO: 69445 - DNA, 719 bp, Homo sapiens
aaaaaaatgctttgtgtagctataccattaaaatctctccctcacctttctgtcccattatctgctttacttagacttgtttcaaaataacttttacctgctgctgagaatgtgttatttgctcgcctagggagaggagacccagatgaatggactatgggctcacacctcctctgggtacaaacagaagatgggagtgcaggttatcctctgccctgcaactccacatatgcttgacaatgacctagccgggctctgaatccaggaatgctgggaccagacactgcaaccaggctcggaataaattagcagtgacccagagtttgtggcgtccgaaaggacatttctctgtggatcttgccaagatgttcatttcaaagaaagccctggcttcttcaggctgcctttcccgtcggccacatgcttcccctcgtaggacaatgttgcacaattggtttcccaaacaggggtcaggtcctgtccctttcctgtcacmgccttgcccagcagaggggaaattgttctaagggtctagatgcggagagcaggtggcatgtgtctgctggacggagcagaggctgctgggaaatggccaggggctcttcgaggccaccagaggagtggccctgggcaggggcagtatgccagggagggctggggaaggggaccttcatatcacagcctttagatcctcctgggtagagttcagagctggatcc

SEQ ID NO: 69446 - DNA, 1880 bp, Homo sapiens
aacctccagtttaaagcttaatttttctgagaattttgaacatattgatacaatatgtgtactggaattgcattaaatctacagatctaatagacggacatgttaataacattgtatcttccattccatgaatatcatgtatcttgcattwattcatattatttttctttctcagagcaaggttttaaagttttcagtttagacatttgcacatctttcattaaatttattcctaagttagtttgggatgctactataaatgatgtatgtattaatgtaactttccaaatttttgtggccagtatatagaaacacagttgatttatgtttgatgacgttgtatcctgagacctgaattcattttttagctctggtatttttgttttgtaatttttaaaataattttctacataagcaattattttaggtgaacaatgcttatttgtcctcttccttttcaatccattggcattttatttcatttttctgtcatatttcaacaagctaggctcttcaccaaacatagaggagagagaataatcttagtttgtttccagtcttttggggaaagtactcagtcttcaaccattaactatgatgtaagatgtagttttttaataagtttcttttgctaaattgagaacattctctcctgtcctatttttctgaaaattttattgtaagtggctctttccatggctgagagtaataaaggtggagacacatgttcataaggagcagaatggggtcttcttgtctataggtgaagaaatctgtctaagaaaaagccacatagaaccaagcacatcagaaaaattgaaaaagaggcacaatccctgtgaccccttggatccagacaaatctgaagcaaaatgtgtccctaggaggcaggactcgactccatctactattttagggagctgcccttcatataaattgaagactggctgaagcaggaaagaggcatggaaggcgcctccccataagacatgttcaccagtgccatgaaaatttaccattaccatggcaatactcaatgtcaccaccccttttctagaaatttctgaataacttgtctcttaatttgcatgcaattagaagtaggtataaataggactgcagaacaacctctgagctgctgcacagtgcacactgcccctgagaggagcagtacctctgctgctgccatacattgccacttcaataaaagctgctgtctattaccactggctcatctcggaattcttttctgagagaagccaagaattctcccaggttaagccccaatgtaggggctcgcctgccctgcattacttggactttcccattaaatgaacttttttgtttaaactgatttggctcaggtttgttaaatctgaattaccgaaagtaattactgaaaagcaatcacttcgaatgaaaaggctcttaatatatggcactattgtaccttgtacaaatttctgtggcagcgcttactttcatttttatgtatagcactgtaacagagataaattttacattaagaaagatctgtgtttgaatcctggctctgccactagtttttgcaacttgggcaaaagcatttaagctaagccttggttgatacctgtgtaaaacagagatacttgtgtagagattttaaaaggtaagttaataaaagagcttagcattgttaacaccagttacccattagttgtgcaattctcagtttcttctgttgcttcttcaattaggccaaagggcaaatctgtatcttatctctttttgtgttcagagaatcttcatacttaaatcctctacagatgtttatttgatgaaatgaataagtaaaccttccaaaataatcagataacttacttgtggagtttagatctcaa

SEQ ID NO: 69447 - DNA, 1880 bp, Homo sapiens
aacctccagtttaaagcttaatttttctgagaattttgaacatattgatacaatatgtgtactggaattgcattaaatctacagatctaatagacggacatgttaataacattgtatcttccattccatgaatatcatgtatcttgcatttwttcatattatttttctttctcagagcaaggttttaaagttttcagtttagacatttgcacatctttcattaaatttattcctaagttagtttgggatgctactataaatgatgtatgtattaatgtaactttccaaatttttgtggccagtatatagaaacacagttgatttatgtttgatgacgttgtatcctgagacctgaattcattttttagctctggtatttttgttttgtaatttttaaaataattttctacataagcaattattttaggtgaacaatgcttatttgtcctcttccttttcaatccattggcattttatttcatttttctgtcatatttcaacaagctaggctcttcaccaaacatagaggagagagaataatcttagtttgtttccagtcttttggggaaagtactcagtcttcaaccattaactatgatgtaagatgtagttttttaataagtttcttttgctaaattgagaacattctctcctgtcctatttttctgaaaattttattgtaagtggctctttccatggctgagagtaataaaggtggagacacatgttcataaggagcagaatggggtcttcttgtctataggtgaagaaatctgtctaagaaaaagccacatagaaccaagcacatcagaaaaattgaaaaagaggcacaatccctgtgaccccttggatccagacaaatctgaagcaaaatgtgtccctaggaggcaggactcgactccatctactattttagggagctgcccttcatataaattgaagactggctgaagcaggaaagaggcatggaaggcgcctccccataagacatgttcaccagtgccatgaaaatttaccattaccatggcaatactcaatgtcaccaccccttttctagaaatttctgaataacttgtctcttaatttgcatgcaattagaagtaggtataaataggactgcagaacaacctctgagctgctgcacagtgcacactgcccctgagaggagcagtacctctgctgctgccatacattgccacttcaataaaagctgctgtctattaccactggctcatctcggaattcttttctgagagaagccaagaattctcccaggttaagccccaatgtaggggctcgcctgccctgcattacttggactttcccattaaatgaacttttttgtttaaactgatttggctcaggtttgttaaatctgaattaccgaaagtaattactgaaaagcaatcacttcgaatgaaaaggctcttaatatatggcactattgtaccttgtacaaatttctgtggcagcgcttactttcatttttatgtatagcactgtaacagagataaattttacattaagaaagatctgtgtttgaatcctggctctgccactagtttttgcaacttgggcaaaagcatttaagctaagccttggttgatacctgtgtaaaacagagatacttgtgtagagattttaaaaggtaagttaataaaagagcttagcattgttaacaccagttacccattagttgtgcaattctcagtttcttctgttgcttcttcaattaggccaaagggcaaatctgtatcttatctctttttgtgttcagagaatcttcatacttaaatcctctacagatgtttatttgatgaaatgaataagtaaaccttccaaaataatcagataacttacttgtggagtttagatctcaa

SEQ ID NO: 69448 - DNA, 1781 bp, Homo sapiens
ggggaaacatgataaggatgcggtcgaggctgggaataggctgagggagctggagagggtgggaccacgcaggaggcagatccaataaacaggaagatttttctcgtgacgtcgtcggcgcgcgccggaagcgcggatcacacgggcccctacaaggggcccctacaagcggccacaaggatggcaggcttcgcggagctcgggctgtcatcgtggctcgtggaacaatgtcggcagctgggtttgaagcagcccacgcccgtgcagctcggctgcatccccgccatcctggagggtgagtatggcccagggccttccccaagaggcctctccgctcctctcgactcctttcccttctcgcaacctttgcttattccggtcccacgaggcgaggggcaacctcgggcgttacaggagatccggggttccggaggacgactggacagtgttggcatttaggttgcatgactgactcgctttgtgttcgtacgcaagtgatgtaatctctgaaattttcatagtctcagcacagggagggtttgatggatgactagtccgatagtatcgcaaaatcctgcagacctggtactgctatctttattttacaaatagaagttgaggctgtcaaaattgctggtagatccaggactccttggtcctgtgattgctcctctaggagaaggtcttctctctgctcctctagcccaacccagtttcgccattaaagagaggcccacaggaagcctaagatgtgataagtcagggattaaataaacaaatgaaggggtcaacagggagcacaagatgcatatgagggaagggaattctggattccccaaattcacgtgctcctggacggagttagaacgaggtggtaggaagctgtgggcatctcgggtcaaatggatatgggttccagtccagcctgccactcactggcagtgtgtcctgggcaaggtctctgaaacccagctgtccacacatggagggtgttgatgctgctttgtccccaacccaggtcgagactgcttgggctgtgctaagacaggcagtgggaagacagcagcgtttgtccttcccatcttgcagaagctgtctgaggatccctatggcatcttctgcctcgtcctgacacccaccaggtaagcccccagcaggcctcctgggtatgggttaaccagctgtgctctcttgggcaagcacctttccctctctgagcgcccttttcccacgtgtgagatgagcatgaaaatcttgctacccgcttcttaggggtcctgcagaattaaacaagatggccccggtgcagtggctcacacctgtaatcccagcactttgggagctccaggtgagcggatcacttgaggccaggagtttgagaccagcctgaccaacatggagaaaccccgtctctactaaaaatacaaaaaattagctgggcatggtagcgcatgccgtaatcccagctactcgggaggccgaggcaggagaatcgcttgaacccaggaggcggaggttgcggtgagccaagatcgtgccattgcactccagcctgggcaacaagagcaaaactctgtctcaaaaaaaaaaaaaagaaagaaagaaagaggcaggcagcagaaagggtactgggacctgggcatattggagccagtttgagaaargccttgaatgccaggcggagggttagaattgattctgggggtgtgtgagcaggaaaggtcatgagccagggagaggccaggacagagttggttgggggcagaaaggaggctgatgct

SEQ ID NO: 69449 - DNA, 870 bp, Homo sapiens
atcagggaatcttgggaaatgatctcttagatcgctgcttgtccaactttagtgcrcacgggatttacctggcgatcttattcaaatggagattctaattcagcaggtctggggagggactttatttatttttatttttaaattttattcatttattttttttgagatggagtttcgctctcgttacccaggctggagtgcaatggcgcgatctcagctcactgcaacctccgacccctgggttcaagcaattctcctgcctcagcctcctgagtagctgggattactggcgccccccaccatgcctggctaatttttgtatttttagtagagatggggtttcaccatgttggccaggctggtctagaatacctgacctcaagtgatccgcccacctcagcctcccaaagtgctgggattacaggcatgagtcaccatgcccggcctggggcaggactttagattctgcatattccttcaactgtcctcttaggggatgctgatgctgtgtccatgaccacacttagggtacctcagctactaaactactggatgaatacactagttggcataagttggtttattgggggttagaaacttaagatactggcttgcataggttgtttattggggggttaggtaattaagaatcaccataaggaatattgttttgaaaatgacatctattcagtttatatttaggggagcttcactgtttagagcagtggacttctaagtagagacattctttaggatgtggggagaaaaattagacttttctttctctttatttgttatttcatccttaaaaaaatccgctcccgtgcatgttttataattatccaatatataaacacagttggacatgca

SEQ ID NO: 69450 - DNA, 1015 bp, Homo sapiens
cattgctccacctcccaggggaggaagaaaaagctttttcacctatcaatggcactagkcagtattttatgagccagcctggcttctgggtgagggagactctggtttcgcctttcgttagggaatgatcatcataataataccaaatatttatggagtttttacttgtgccaactcctttaaaggaattatctagtttagttatcgagagtcaaatgtatttgtatatttctggttatcacagcaaccctttgggagggagaataaaattagctgcagtttacaaatgagcatggtggtaccatgtcaccttttcgacaatccaaggccacacagctagtaaatgtcatgctgacattcaaattcaagtctatctgctctcaaattctgtgttttttatatactagttttctctaaaggtggtccatggacttcctgatcaagaatcatctgggatgtgttttaaaaaatgcagatttccagcatggctgactctcacacccaaatgctgacaggaggtctcaggaggggcacagcgatgtgtactttaaataaggaccctggctgtgtgaatcaaacacacaccaaagttcgtgagtgattgcactggaaggataggtgtccaaatcagcttttactaatatatctatgggacaagtaaacggacatttatttgcaaacagaatttttatttactgatttttgctaatgtattgaatctgacaagttttttgggagccaggcaagccaggcctcaggtaagctgggtctcaggtatctgaactcctgcaaagatctggatgtcacctctggtacaacttttctcacaattttcaatctagagactttgactttttgcccagtgatgactcctacaccaagagaagccaagaccaggggaaactgccttctgaaaaagctgatcctcctttttgcttttcaggacatggtcatttacatagattagcatgaccacttacatacatttgcatatatctgcatagatttgcatgca

SEQ ID NO: 69451 - DNA, 1015 bp, Homo sapiens
cattgctccacctcccaggggaggaagaaaaagctttttcacctatcaatggcactaggcagtattttatgagccagcctggcttctgggtgagggagactctggtttcscctttcgttagggaatgatcatcataataataccaaatatttatggagtttttacttgtgccaactcctttaaaggaattatctagtttagttatcgagagtcaaatgtatttgtatatttctggttatcacagcaaccctttgggagggagaataaaattagctgcagtttacaaatgagcatggtggtaccatgtcaccttttcgacaatccaaggccacacagctagtaaatgtcatgctgacattcaaattcaagtctatctgctctcaaattctgtgttttttatatactagttttctctaaaggtggtccatggacttcctgatcaagaatcatctgggatgtgttttaaaaaatgcagatttccagcatggctgactctcacacccaaatgctgacaggaggtctcaggaggggcacagcgatgtgtactttaaataaggaccctggctgtgtgaatcaaacacacaccaaagttcgtgagtgattgcactggaaggataggtgtccaaatcagcttttactaatatatctatgggacaagtaaacggacatttatttgcaaacagaatttttatttactgatttttgctaatgtattgaatctgacaagttttttgggagccaggcaagccaggcctcaggtaagctgggtctcaggtatctgaactcctgcaaagatctggatgtcacctctggtacaacttttctcacaattttcaatctagagactttgactttttgcccagtgatgactcctacaccaagagaagccaagaccaggggaaactgccttctgaaaaagctgatcctcctttttgcttttcaggacatggtcatttacatagattagcatgaccacttacatacatttgcatatatctgcatagatttgcatgca

SEQ ID NO: 69452 - DNA, 1015 bp, Homo sapiens
cattgctccacctcccaggggaggaagaaaaagctttttcacctatcaatggcactaggcagtattttatgagccagcctggcttctgggtgagggagactctggtttcgcctttcrttagggaatgatcatcataataataccaaatatttatggagtttttacttgtgccaactcctttaaaggaattatctagtttagttatcgagagtcaaatgtatttgtatatttctggttatcacagcaaccctttgggagggagaataaaattagctgcagtttacaaatgagcatggtggtaccatgtcaccttttcgacaatccaaggccacacagctagtaaatgtcatgctgacattcaaattcaagtctatctgctctcaaattctgtgttttttatatactagttttctctaaaggtggtccatggacttcctgatcaagaatcatctgggatgtgttttaaaaaatgcagatttccagcatggctgactctcacacccaaatgctgacaggaggtctcaggaggggcacagcgatgtgtactttaaataaggaccctggctgtgtgaatcaaacacacaccaaagttcgtgagtgattgcactggaaggataggtgtccaaatcagcttttactaatatatctatgggacaagtaaacggacatttatttgcaaacagaatttttatttactgatttttgctaatgtattgaatctgacaagttttttgggagccaggcaagccaggcctcaggtaagctgggtctcaggtatctgaactcctgcaaagatctggatgtcacctctggtacaacttttctcacaattttcaatctagagactttgactttttgcccagtgatgactcctacaccaagagaagccaagaccaggggaaactgccttctgaaaaagctgatcctcctttttgcttttcaggacatggtcatttacatagattagcatgaccacttacatacatttgcatatatctgcatagatttgcatgca

SEQ ID NO: 69453 - DNA, 882 bp, Homo sapiens
atgaaaaagcctaggatttggagcaatctaaaatgtcaatgaaagtaaggtttaaaaacaggtggcttggttgcaaattagtataagaaacaattagcctcctccctcacccaggtttacttctggaaaggttgaacaacagagwctctgtattcttcaacaccaggcacagctgaggacgtattaaagatggaggttaatattatatacggggattttacatactgaatgtgagaactccaccccccttttcttttcagctctgagtaggctgacaatcagtcttacatctaccaagcgtgtagaattcctttttagggaaactgaccaccccatgagaaaatatctacaaattggcccagttcctgccaaattaccctatagcaaacttcccagcctataagctctacccatacattcagagctgccaatcagtgttttagtgccttactcttaagtaagtgcagagtcttcaccagattgtcaaagaaagtctgtaacatgaaaaacagaccaaaacaacaacaacaaaacaagtccaacaaagcaaacaaaaacacagcagaagaactctgagaaaatagaaacaacacaacagactagaacaaggattggccagtgttttctataaagggccagacagtacagtagtctctccttatccacagaagatagattccacaacctccactaaatgcctgaaaccatggatagtaccaaactctacgtatactatgttttttctatctgataaccaagatggctactaagtgactaatgggcaaaaagagtatacagcatggacatggtggacaaagggatgattaacatcctgagtgggacagcatgagatttttatcatgcaactcagaagggcatgca

SEQ ID NO: 69454 - DNA, 2332 bp, Homo sapiens
aaatggaataaaagctcagattttatttacttgctggttaatataaccacattcagaagacattacagtttggcatggaatacaaaatgtggaccaaaggcatgaatggaacttcacacagaagggtgttcaaatggccaataaatgtgtgaacagacgttcaacctcagtagtcatcagtaaagtgcaaattaaaaccatagtacaacaccactatacacccaccagaatggctaaagtgaaaacagaaaatgttaaagatgtagaacagccagaattctcattacactgttaatggaaatatgggttggtataaccattttggaatactgtttcatagtagctactaaaattgaacatacatatgtcctatgccagagcaatattcctgggtatatacccaacagaaatgcatacatatgttcaccagaagacatacaaattgtttgtagcagcacaattcatagtagctataaaatagaaacagtcatagaaaggataaataatcccaaatctaccactagcagtgattgagttttgagtagatagacttagatggttacctttcatatttcctgaccagtgagttttagggaaggatatttatgattttatatttttccaaggtactggatcctctcaaattcatacatttaatgttatactattgatgagctattgtcaagcattttataaatacttattataggttgtaaaaactatttctataatatgaatatttatatagacagagataataaatgtttgtcaagtaaatgatacatcctccacagccatgaatgaaaatgaactccaactacactcaaaaatattgaagaatctcacaaacatgttgaaagaaaaaagtgaggcacaagttcaaaaactagcaaaaggctggacacggtggctcaagcctgtaatcccagcactttgggaggccgaggcaggtggatcacgaggtcaggagttcgagaccagtctgaccaacatggtgaaaccccgtctctactaaaaatacaaaaaattagccaggcgtggtggcacgagcctataatcccagctacacgggaggctgaggcaggagaattgtttgaacccaggagacggaggttgcagtgagccaagatcacgccactgcactccagcctgggcgacagagcaagactccgtaaaaaaacaaacaaacaaaaaacaaaaaaactagcaaaattaacgtttggtctttatagtcaagttagtgagctggtagggagggatctagtgactgcacttccaggatgctatttcttgatgttcagtttttttcaatctggctacaggttaactggtatgttcatttagtgaaaatctattgcgattttaacttactatttgtgtacttctctttatgtttgctatacttcaataaaatgtcttaaatatacaatatgtgggctcggcgtggtggctcatgcctgtaatcccggcactttgggaagccgaccagggcgatcacttgaggtcacgagttcaagaccagcctggccaacatggtgaaacaccatctctacttaaaaatacaaaaattagccaggcatggtgccgggtgtctgtaatcccagctactaaggaggctgaggcaggagaatcgcttgaatctgggaggcagagtttgcagtgagctgagatcgtgcctctgcactccagcctgggcaacagagcaagactctgtctcaaataaaataaaataaaataaaatatgatatgatatgtgatatccttgtctaactgcttccatactttattaagtaatgcttatttatataagtaacaattcttgaattccattggatccaaggcattttaggaacatgagtaaaacagattcctttcgagttgctcacattggatcattggaagaaaaattgaagcaacggaactgaactcctaagtctcctgtggcccaattttatcatattcccagtgtttggagatcaragcaaattaatttaaaaccattctaaaaatttaaacacatgcaacccatgaaaaagtttagtctattttttcataactgatcagacaagtcagctgttgcaaaggtagcctttgtataatagggattttgtgggttttttagggggattcatgttaacacatttgataaacttttatcttaatgcgcctttctggaataccagtctgacctcaatctgaacaaagccttagttgatgatgtttgcaggaggtagcttggtcattttctcagcctgtatgtttattattgaatgttaatcagattcatcattaaagatttcatctgccacacaaatgcataattggctatgtc

SEQ ID NO: 69455 - DNA, 1018 bp, Homo sapiens
acacaactgagccgagatagacaggcccaacaaacacacttcatgttggattgcaactgggtaaaacaattgcatgtctgaggcctaatttagatcagagattagatgaaatgcaggtttggttctggcgtgacttaagaatcttctgatgtcatggttcactggttttagaaaatgcatgcttgcttctggtgcacctggtatcttataaaaagagagagagaaaaaatcccttttggtttttggctcagttacagaaaaaaaaaaaaaggttagaaaaaacccacatagtatttaagttctatgtacttcacacttcagcaaaccaaggcaaagcattctgattttcttttcaagtcgtatattttgcacttgtcagttgggatcttcaaagactcctttaagccaggtgcctracccagtattgtccttagaagtaagtggaaaaaagaatggagaatggagagcatttccaggattagatcttgcaagagcacccatcctacgcaagagtgccaaccctttaggggcagaaggaattcctcagtgattatagccagtggagatattgcattgtgattttccaggacaatcgcagcctccacagcaaatcagttttatttctttaacctcttaatgcagtgggttttgggactttagagacctaagacctatcctttggagtacatcattgtgagcctaggttaatcagaggacctgtttgagttccaagtgatctggaatgctgccacctgctgattccatgctatgatccctgggctgtaaaatggagccctaatttaattcaataaaatatctatatccttcagtaggtgaatcaataaactgtggtacatccagacaatgaaatgttttcttttttaaatgtatatatttaagatgtacagcataatattttgatacacatgtacatagtgaactgctttccacttttaccatgaacaatagattactatctagaactaaaaagaaatgagttatcaagccataaagagac

SEQ ID NO: 69456 - DNA, 565 bp, Homo sapiens
caaactcaccctacatcccccaacatgaggctcacaggatcacctgtcatgttgctcatgattgattactctttatttaatgcatgcggttctgctcattatgatgcagttrgcacaaagacggagagccccatcagtggacaccgagaagcggcagcagtttagtcttggctgcatcctctgcttctcttgcttgaacaaggtgtttacagctcaccttacttctggggtcccaagaaagtaaactttctgcagccttcccacacttataaacctaactttccaggatatgttctgctcaatccaccaatttagcacatatcattgattggattattataaaatgttatgaacagacaaaagaatatagattcatttaataaaccagcaagcaaccacactcctatctcctagactgaacacatgttaatgttttgttcagaacttcctttgtagtgttcctaatctcgtagccctaatgttctcccaggtgttgacaactactctgaaattagcaagcactcatcttatccacaatgttatatcctttctatatacggaaata

SEQ ID NO: 69457 - DNA, 1654 bp, Homo sapiens
caggcccatactgcccttcaggaatgtgtgtcctcatgcagagagatccaggtgtcactgatgtcccagtgaagaagcagtggcatttaaagacagggagaaatcccatgccatttagggctttgtgtctgaaaggcatacgcctccgttctgtggccatttgcacttacacagaagccctcactttcctctaatgaactctactcattatccaagtggataaagccatcgttcgatcagcagatgtttcccgagcacctactggatgtcagcttgctgcaggcattgcagccacaactttaaagtcaaacatcatggggcttttttttgtaagagtcagggtcttgccctgttgcccaggctggagtgcaacagcacratcatagctcactgcagccccaaactcctgggctcaagtgatcctcccacgtcagcctcccaagtaactggcattacagcatgcaccaccatgcctggctgattttttttttttttttttttttttagagcgagagacagggtctcgctgtgttgcccaggccggtcacaaaaagaggggctttatctaatgtcctctgtttgtatgtatttgaagtgggcgataaagctacatgggaaacggatgttaaaaagcgctaggatgtaatttctccagtgccttagagcatcgctaactcacagtggatccacaccttgaacccaatcctctggctcccagtcagcgctcctgacacccactgacgctagtggacgccttccacaagagaatgcttgtatttggagcctttgggcacattacttcccagctcaccagtgctcactgagagcctccccttcctcaggggagatgggatcctctctgtctagcccacccgtggacggacggagctggcagagaggcgagcccgttagcagcaggcatatctggcttgtaaagaagagatgtcttggccagccgctgcggctcacgcctgtaatcccagcacttcgggaggctaaggcgagcagatcacctgaggtcaggagtttgagaccagcctgaccaacgtagagaaaccccatctctactgaaaatacaaaaattagccaggcatggtggcgcatgcctgtaatcccagctacttgggaggctgaggcaggagaatcacttgaacctgggaagcggaggttgcggtgagctgagattatcccattgcactccagcctgggcaacaagagcgaaactccatctcaaaaaaaaaaaagaagagatgtccatggggtcaggagaaatgaggtccagtccaactgtgtgctgaatagattgatgttagccacatcatggccccaaatggagaagggacacaaagctgttgctggccaagcacgatgtccaacgcctgtaatcccagcacctttgaagcccaagacaggagaatcactcaagcctaggaactcgagaccagtctgggcggcgtagccagaccccatctctacaaaaaataaaaaaaattagccagacgtggtggttcgcaccagtagtcccggctactcaggaggctgaggtgggaggatcacttcagcccaggaggtcaaggctgcagtgagctctgattgtactgctgcactccagcctggacaacacagtgagactgtgtctcaaaaaaaaggaaaa

SEQ ID NO: 69458 - DNA, 1417 bp, Homo sapiens
cagtctacatcaaaatcatagcattcacaaaaccacagaactacgaaaaagaaatgttggagctctcaaagacataggaagtaggcctgccccctctcagcatgagcagaactacagttcccataagccctgtggacacctcctgtgggagatcagctgtgcccagtgcctgagctcatccacacctgttcttcttgctgcaactttgcacctgatgggcaacaccttggagctgatgggcaatgaagcccacaataacagaaagtgctgtaatattgtaataatatatatatatatagtattgtaataaaatatatatataaaaatataacgtatatgtaataaaatatatattgtagatgtataattacatgttatatattaaagtatacatatacattatatgtgtgtgtgtgtgtgtgtgtatatatatatatatatatatataycttgtcccagacacgtgttccatttgttagtaattaaatatttatgattgggattatttataagtatattttcttagaaacacaattttatccatctcatagatgaaacaccatctacctaatgatcacattttttatagagctacatagagttatcagtggctaaacaagtcttagaaaatattttctgcataaatgctgtcccaagtgatagtctcaaaacatatgtaagtcttatgaatattttcatgggctgcattaaattaaaaaatgttatcttatcaagttgtgtagttatctaacccctttaccttcagcaccaaattttgagatttgtacctctgtatcaaaggctcaaatgccaccctcttatgcctctggcctttacaaagacagctggtaagaggctgcccagctcatctgaagtacaggataagattgtctgacttggagataccattttccacttagcagccatgtaatctttcatattcattttttctaagtggcacttttctcagatgtaaaatggggataatgagtttattcatctttgagttgctcccaagcagaagtcaacttgagactataaacttgtgctcactgcagtgcttgaaaccgagtttgtacttaataaatagctgcatacatctttttctatacatgtcagatgcttaattgtgtttcccgaagatgttgccaagccgggtcctcacataactcctgatcccttgggtcacagggtgtgaaaaccacactctgctgaactttgtagagtgactatgagaggaggaagacagttatatcagtgaactacagcacatgctggctcctctccattctccagtccctggtgactcacacactctctgcctctctaccaccagtcaaagcagaaggacctggcttgacttttgccgactttgctaggatgacctaagaataaaataaatgctataggagttgtg

SEQ ID NO: 69459 - DNA, 705 bp, Homo sapiens
ttagataggtctctgagagagatccaactgccgttttcctcaaaacaacaccccatgtcagcatgaagcagttaagagtggtcatcatccctatccttacagcagttagatgtacgtcttcagaggggggattgatggcagtggtgggccatctggagtggccactgccactttgccagccatagtggggaggtgcaagcggtggtggcagaagcaactgtgagagcagcagtggcagtggggagacccctgtgccctgcatccccaaggcagccaactgcaccaaccccagctttgtgtggccaggcaagacctgcccccaggaccagagcctccaccactccagaccytgaccccgcatcaccactcttgctccctgccactgcaagaagggcatggacaagaggtagacaggccctgagcctgcccctgggagccctgggagccctggaagccctgaaagctgctgcgatgggtccaggatgagttgcccactggtggaggagcagtgaggtctggcagaagggggccccaaggtggaactgggcccagggtggtgcagtgcttgcacatggaacatgggtgccaggcctggggcatggagctttggcagcacttcaggagcccagagcaagaggttggagcagcatccacttcggggccctggccagcagtatggccaccatacccacttgttgagggcac

SEQ ID NO: 69460 - DNA, 754 bp, Homo sapiens
tgtctgggcccagggtggtctctactgtctccacgaccttggtccaaagggctggtactgggctgatggtctacttcaggtgcacaggaataggcctgttgcccagtttgtgaatgggtatgactcctccaggtccccaggaaggctcttgctggaccactgggtgagactttggacaggcagtactgctccagtctgcagctgagagggrcagaaaccaagttgcagggctgcttcaaggtctacaactgagatcgaaatattcaggcctacctctggtgtcactgatgggcatgtctcacagtgggtccctgggcaggcagccatgctctcgatctgtagctaagtgaagttggagttgagatgcagggccttttcaggatctgctatggggactgaggttggcaagtatgaccctgggggctcacatggacttgtctcccagctattccctggctgggcagaactgctcttagacctcagctgagggagccttgggctgaaattcagggtcatttcaggatttgcaatgcgactgaagttggcaaggctgtcctagtggcacagatgggcaagtctctcagcagctccatgtacaggcaaaattgctcttgggctgctgctgagagggtttggaggcaagattgagggccctttctggtctccttggggactaaaatccaaaaatcctgccctagggactcatatgggcatgtctctctctgggtccttatgcaagcaggactgattgctt

SEQ ID NO: 69461 - DNA, 754 bp, Homo sapiens
tgtctgggcccagggtggtctctactgtctccacgaccttggtccaaagggctggtactgggctgatggtctacttcaggtgcacaggaataggcctgttgcccagtttgtgaatgggtatgactcctccaggtccccaggaaggctcttgctggaccactgggtgagactttggacaggcagtactgctccagtctgcagctgagaggggcagaaaccaagttgcagggctgcttcaaggtctacaactgagatcgaaatattcaggcctacctctggtgtcactgatgggcatgtctcacagtgggtccctgggcaggcagccatgctctcgatctgtagctaagtgaagttggagttgagatgcagggccttttcaggatctgctatggggactgaggttggcaagtatgaccctgggggctcacatggacttgtctcccagctattccctggctgggcagaactgctcttagacctcagctgagggagccttgggctgaaattcagggtcayttcaggatttgcaatgcgactgaagttggcaaggctgtcctagtggcacagatgggcaagtctctcagcagctccatgtacaggcaaaattgctcttgggctgctgctgagagggtttggaggcaagattgagggccctttctggtctccttggggactaaaatccaaaaatcctgccctagggactcatatgggcatgtctctctctgggtccttatgcaagcaggactgattgctt

SEQ ID NO: 69462 - DNA, 754 bp, Homo sapiens
tgtctgggcccagggtggtctctactgtctccacgaccttggtccaaagggctggtactgggctgatggtctacttcaggtgcacaggaataggcctgttgcccagtttgtgaatgggtatgactcctccaggtccccaggaaggctcttgctggaccactgggtgagactttggacaggcagtactgctccagtctgcagctgagaggggcagaaaccaagttgcagggctgcttcaaggtctacaactgagatcgaaatattcaggcctacctctggtgtcactgatgggcatgtctcacagtgggtccctgggcaggcagccatgctctcgatctgtagctaagtgaagttggagttgagatgcagggccttttcaggatctgctatggggactgaggttggcaagtatgaccctgggggctcacatggacttgtctcccagctattccctggctgggcagaactgctcttagacctcagctgagggagccttgggctgaaattcagggtcatttcaggatttgcaatgygactgaagttggcaaggctgtcctagtggcacagatgggcaagtctctcagcagctccatgtacaggcaaaattgctcttgggctgctgctgagagggtttggaggcaagattgagggccctttctggtctccttggggactaaaatccaaaaatcctgccctagggactcatatgggcatgtctctctctgggtccttatgcaagcaggactgattgctt

SEQ ID NO: 69463 - DNA, 955 bp, Homo sapiens
gcatggaaaagattcacacacatacaccccaacttcagaatagtggttagttctgagtagggagaggttgagacaccactcaaagggggtttttctatctgtctaatgtttaatttmtttagaacagaaaagcaatggtaataacccagctttgatggaggcccctaagtttatcaaactctattctaacaaagtagtttatctttcacttcatttctagggttaaatgttacaggaaatgtttactttatcaaacacttaaatagagcttactataagcctcaccctcttctaattgctttacaaatactaatttctttagcaatctatctatgacaaacctatgaggtagctattacaggtacaaaacctgttttccaaaacccttagatcatgtatgtttcagaatgtaggcatttttgtacttttgaaaagtaaaacagcatattctagaacttggcccagtgggctagggtagcctgccaccaagatagctggactataaaatggaagaatattctaagtatgataaatacagaccataaatatcctcagttccatccaggtcaggttttgtcatcaaatcattaaggtcaagtcaggttgtgctgccaaacaaattttaaaacaagaaaaacccttccagttttcagacctttgggaatttcagaaatgtgttgaaggaatattattgtcattttgcagatgaggagactgaagcacagagaaattaaccaacatcaccacattcacttcaagtgatggatgtgagcttcaaacacagatattctgactcctaacttccctgccgttagctgctccagcatgctgaaatctggttctaacaaccacattcacaggaagtggaaggtacatgtcttcaaagcacaggagctgagctgaatctggagctgagcatgaggttacggtctagtccctgctgggcttgagaacg

SEQ ID NO: 69464 - DNA, 955 bp, Homo sapiens
gcatggaaaagattcacacacatacaccccaacttcagaatagtggttagttctgagtagggagaggttgagacaccactcaaagggggtttttctatctgtctaatgtttaatttctttagaacagaaaagcaatggtaataacccagctttgatggaggcccctaagtttatcaaactctattctaacaaagtagtttatctttcacttcatttctagggttaaatgttacaggaaatgtttactttatcaaacacttaaatagagcttactataagcctcaccctcttctaattgctttacaaatactaatttctttagcaatctatctatgacaaacctatgaggtagctattacaggtacaaaacctgttttccaaaacccttagatcatgtatgtttcagaatgtaggcatttttrtacttttgaaaagtaaaacagcatattctagaacttggcccagtgggctagggtagcctgccaccaagatagctggactataaaatggaagaatattctaagtatgataaatacagaccataaatatcctcagttccatccaggtcaggttttgtcatcaaatcattaaggtcaagtcaggttgtgctgccaaacaaattttaaaacaagaaaaacccttccagttttcagacctttgggaatttcagaaatgtgttgaaggaatattattgtcattttgcagatgaggagactgaagcacagagaaattaaccaacatcaccacattcacttcaagtgatggatgtgagcttcaaacacagatattctgactcctaacttccctgccgttagctgctccagcatgctgaaatctggttctaacaaccacattcacaggaagtggaaggtacatgtcttcaaagcacaggagctgagctgaatctggagctgagcatgaggttacggtctagtccctgctgggcttgagaacg

SEQ ID NO: 69465 - DNA, 955 bp, Homo sapiens
gcatggaaaagattcacacacatacaccccaacttcagaatagtggttagttctgagtagggagaggttgagacaccactcaaagggggtttttctatctgtctaatgtttaatttctttagaacagaaaagcaatggtaataacccagctttgatggaggcccctaagtttatcaaactctattctaacaaagtagtttatctttcacttcatttctagggttaaatgttacaggaaatgtttactttatcaaacacttaaatagagcttactataagcctcaccctcttctaattgctttacaaatactaatttctttagcaatctatctatgacaaacctatgaggtagctattacaggtacaaaacctgttttccaaaacccttagatcatgtatgtttcagaatgtaggcatttttgtacttttgaaaagtaaaacagcatattctagaacttggcccagtgggctagggtagcctgccaccaagatagctggactataaaatggaagaatattctaagtatgataaatacagaccataaatatcctcagttccatccaggtcaggttttgtcatcaaatcattaaggtcaagtcaggttgtgctgccaaacaaattttaaaacaagaaaaacccttccagttttcagacctttgggaatttcagaaatgtgttgaaggaatattattstcattttgcagatgaggagactgaagcacagagaaattaaccaacatcaccacattcacttcaagtgatggatgtgagcttcaaacacagatattctgactcctaacttccctgccgttagctgctccagcatgctgaaatctggttctaacaaccacattcacaggaagtggaaggtacatgtcttcaaagcacaggagctgagctgaatctggagctgagcatgaggttacggtctagtccctgctgggcttgagaacg

SEQ ID NO: 69466 - DNA, 548 bp, Homo sapiens
catgcatgatatgctgagaaaggaactagagtaagcaggaggtaaagagatttgtaagaatcaaacatcaagccaggtttctgcccatacagggattgtgctggagagacaagatccctgagtgcttattaaacaggaaggagtgaggcacacaagtgagtaaatgtcccccaaaagactatagttaatatcactgtattgtatacctgaaaattgctaagagagtaggttgttgtttgtttttggacagggtctcactctgtcacccaggctggtgcaatctcagcttactgcaacctccacctcccagctaaagtgattctcatgcctcagcctcctgaggtgctaggattataggcgcacaccaccatgcctggctaattttttttttttttttttttttgkagagacagggttttgccatgttgcccaggctggtcttgaactcttggactcaggtgatccacccccgcttggcttcccaaagtgctgggattactggcgtgagccactgcgcctggcctaagagagtaggtcttaaatgtttt

SEQ ID NO: 69467 - DNA, 1323 bp, Homo sapiens
tgttgcttgctttctttcatacacttctctccatttacccacaatcagatatacaatactttcagtamgaaaatattccccgcaaagtaaaaaatttcccattagttttacggttatatttatttacttggagtcaatggtctgaaatggtaaatataatcaaagaattatttcttcgttactagagttccaatgccgagcagtgacgcctccatttaaatatggaataaactagtggcataagatgcggccaggaaaacagcatttcaggcaggggcaatgtccatgacaggggactgtgtgggaaaagcacggctcccaattgcatgtgtatctttctacacgttgtatagtttctactctgaacatggactactcatatttattaaaacgtaaagaaaacctgggaatgtcggctgggcgtggtcgctcacttgagtccaggagtttgagaccagcctgggcaacacagtgaaacccatctctacaaaaaatacaaaaattagctaggtgtggaggcatgcccctgtattcccagctatttgggagtctgaggcacgacaatcgcttgaccctgggaggtggaggctgcagtgagccgacatcgtgccactgtactccagcctgggtaacagagcaagaccttgtctcaaaacaaacaaaaacgacctggcaatgtcttcagagataatcagtatgaaaacaactatataggaaatgaggctacagggttgggagggcagagcagaggagaggttttgtgttagaaaaggaatgccgcttttcacagaataaaatcatccctgacgggacatggtggctcacgcctgttaatcccagcactttgggaggctgaggcgggctgattacttgaggccaggagtttgagaccagactggccaacatagcaaaaccccatgtctactaaaaatacaaaaaaattaactgggcgttgtggcgcacgcctgtaatcccagctactcaggaggctgaagcaggagaatcacttgaacctgggaaatggaggttgcagcgacccaagattgtgccactgcactgcagccaggatgacagagcgagcctccatctaaaaaaaaaaaaaaagaaaagaaaagaaaaaatccccatgatgaggcattcagaaaaggtcctttctgtgccctgccacccttctgggttaattagtggctggctggggctttcatccaaagcccacatgcacgtcaacggcagatgctatggtgacaggaaggaagccctcttgaaaatgctccacctagcaagagcaagccactaccagggaaacccacatcacatgagccg

SEQ ID NO: 69468 - DNA, 1323 bp, Homo sapiens
tgttgcttgctttctttcatacacttctctccatttacccacaatcagatatacaatactttcagtacgaaaatattccccgcaaagtaaaaaatttcccattagttttacggttatatttatttacttggagtcaatggtctgaaatggtaaatataatcaaagaattatttcttcgttactagagttccaatgccgagcagtgacgcctccatttaaatatggaataaactagtggcrtaagatgcggccaggaaaacagcatttcaggcaggggcaatgtccatgacaggggactgtgtgggaaaagcacggctcccaattgcatgtgtatctttctacacgttgtatagtttctactctgaacatggactactcatatttattaaaacgtaaagaaaacctgggaatgtcggctgggcgtggtcgctcacttgagtccaggagtttgagaccagcctgggcaacacagtgaaacccatctctacaaaaaatacaaaaattagctaggtgtggaggcatgcccctgtattcccagctatttgggagtctgaggcacgacaatcgcttgaccctgggaggtggaggctgcagtgagccgacatcgtgccactgtactccagcctgggtaacagagcaagaccttgtctcaaaacaaacaaaaacgacctggcaatgtcttcagagataatcagtatgaaaacaactatataggaaatgaggctacagggttgggagggcagagcagaggagaggttttgtgttagaaaaggaatgccgcttttcacagaataaaatcatccctgacgggacatggtggctcacgcctgttaatcccagcactttgggaggctgaggcgggctgattacttgaggccaggagtttgagaccagactggccaacatagcaaaaccccatgtctactaaaaatacaaaaaaattaactgggcgttgtggcgcacgcctgtaatcccagctactcaggaggctgaagcaggagaatcacttgaacctgggaaatggaggttgcagcgacccaagattgtgccactgcactgcagccaggatgacagagcgagcctccatctaaaaaaaaaaaaaaagaaaagaaaagaaaaaatccccatgatgaggcattcagaaaaggtcctttctgtgccctgccacccttctgggttaattagtggctggctggggctttcatccaaagcccacatgcacgtcaacggcagatgctatggtgacaggaaggaagccctcttgaaaatgctccacctagcaagagcaagccactaccagggaaacccacatcacatgagccg

SEQ ID NO: 69469 - DNA, 620 bp, Homo sapiens
tttcaaaaattgtactttgtataaaaaacaaatttctgtatttgatagattgccgtatatatggattacagtgaatgattcagagttgacatatatttggaattataattaatgtttgtgtagtgtctstaattgactcacaaaatcctcaaccaactctttgaattaaatgataattttcttattcttgctcaaccaagaaataatttgtacaaagtcaccaagcaataaatgacatagttaagattttaacacattttgttgaccccaggtcttctgactgcctgtttaccatgctggtgtgcctggcctattttagttttctaaatattaagagcccacaaattctttaattaaattggagggatatttaggataggatacttaatatattttttttttgacatttttgttgcagtatcatccaaaaggtgctaggatagatgtttctatcaatgagtgttatgatggctcctatgcaggaaatcctcaggatattcatcgccaacctggatttgcttttagtcgcaacggaccagttaagagaacacctatcacacatattcttgtgtgcaggtaggtaaaaagggcatataacaaaagtttaagctctgattttt

SEQ ID NO: 69470 - DNA, 620 bp, Homo sapiens
tttcaaaaattgtactttgtataaaaaacaaatttctgtatttgatagattgccgtatatatggattacagtgaatgattcagagttgacatatatttggaattataattaatgtttgtgtagtgtctgtaattgactcacaaaatcctcaaccaactctttgaattaaatgataattttcttattcttgctcaaccaagaaataatttgtacaaagtcaccaagcaataaatgacatagttaagattttaacacattttgttgaccccaggtcttctgactgcctgtttaccatgctggtgtgcctggcctattttagttttctaaatattaagagcccacaaattctttaattaaattggagggatatttaggataggatacttaatatattttttttttkacatttttgttgcagtatcatccaaaaggtgctaggatagatgtttctatcaatgagtgttatgatggctcctatgcaggaaatcctcaggatattcatcgccaacctggatttgcttttagtcgcaacggaccagttaagagaacacctatcacacatattcttgtgtgcaggtaggtaaaaagggcatataacaaaagtttaagctctgattttt

SEQ ID NO: 69471 - DNA, 572 bp, Homo sapiens
ctgggattacaggcgtgagccacagcgcctggctggtattaataaagacttcttttactccaagttcaggtcacttaaattttaataataaatttctttccgaaattcctcttatttctgagttctcaacatgtaaattttttwaaaaatctaaattgcgtctgccttaaaagacttattactacgaaggacttacgggagaagattcagagtccttagctaaggaatgaacatatgacaaatatatattaggagaatttaatgcaagatgtgcaagacaggtgtctttagtaatggtaacattaaccttaactgagcactttctaagcgtccacactgctttgttttgtgtttcattaacgaatgcttactttgaagctctgagtcacattactacattcagacgttgcaaaacaaagcaacagtcacagaaaccattaaaaactattaaacataattttaacacgctactgaatgtctaccatgtgccaggcgctgtagttaggctctggagtagcatatgaaactgatttcaatggtccccaccttcaagtctagttaggaatttatcc

SEQ ID NO: 69472 - DNA, 599 bp, Homo sapiens
catcactcttatagaaacctcttcctttccttcatcacacttgaatctccttcagtgcaataatctgattaatggatttctgaataagctccaggagaacagggactatttctattttggctcgccagtgtctcctcaccctaagcatcatgccaggcccatggtggccacaccataaatatttattgactgactgactgactgrctggatggatggatggatggatggatggatggatagatggatggatgaatgcaatcaacagtttctgaatattacatctatgtaatgcagaatacaaatttcatagctatattctataccatttcggaaatgcctaggggaaattgtagaacccaatcaataataatgagtcttggaaattctttctttttttttttttgagatgaagtcttgctctgtcacccaggctggagtgcagtggcacaacctcggctcactgcaacctccatctcctgggttcaagcaattcttgtgcctcagccttctgagtagctgggactacaggcatgagccaccacgtccggctaattttttgtatgtttagggatttcaccgaggccaggctggtctcgaa

SEQ ID NO: 69473 - DNA, 599 bp, Homo sapiens
catcactcttatagaaacctcttcctttccttcatcacacttgaatctccttcagtgcaataatctgattaatggatttctgaataagctccaggagaacagggactatttctattttggctcgccagtgtctcctcaccctaagcatcatgccaggcccatggtggccacaccataaatatttattgactgactgactgactgamtggatggatggatggatggatggatggatggatagatggatggatgaatgcaatcaacagtttctgaatattacatctatgtaatgcagaatacaaatttcatagctatattctataccatttcggaaatgcctaggggaaattgtagaacccaatcaataataatgagtcttggaaattctttctttttttttttttgagatgaagtcttgctctgtcacccaggctggagtgcagtggcacaacctcggctcactgcaacctccatctcctgggttcaagcaattcttgtgcctcagccttctgagtagctgggactacaggcatgagccaccacgtccggctaattttttgtatgtttagggatttcaccgaggccaggctggtctcgaa

SEQ ID NO: 69474 - DNA, 613 bp, Homo sapiens
tgagagcaaaccctaggctttaattatttacatatcaaccctggggaatcttcttgagttaaatatccggtttgggtcatttctctctctttttctctcgcttgtctcagccagtggcatayaacatgcaatacacattgtctttcgggatttctgcctctggtttctgtgtcaaggaattaacaatatgtaaatgaattcctaagtacatcaaggaagatcctgctcaaaagaacccaaagcaatcccttttataaagcgtcaaagacactagttgcacaaataactcctcttcaggctgttgaacttttcataatctgttgtttgataggattcgtttattataatctggtcatggccacacatcacttgactgcattcagctgatccacagagacttaagaaaagtcctccaagattccaaaatttctgtcacaagtcaatgccctcccttaaagactgtttactcctgtgttatgcagagctgtaacaaatataagtgatcttggaggagggacttctggaaacaggcatcagggtagtggacaaaaatgagagtggatagccagtaacagagaagaaaagcagaaaatgcattaggacaaacagaaga

SEQ ID NO: 69475 - DNA, 788 bp, Homo sapiens
aggtgtgagccactgtacctggcctactttcattctttatatatatgcacactcctgaggaagactgatgtcatgaagcaaactccaggactgaaaatctcaggggtagagtgctgtttctatgatgtggcatttttacaggctctctttcatccctttcttcttgctcgccctccctccccacctcccatcctgacccccgctgaaacacacagtcacgggacaggtcctcaagcaggtacaactcaaaatgcyagagcaatggagcagcaggattgtgagggagaaacacagcttataaactgtctcccaacccaggcaggtgccagtgaaatgtttgacagctcaggagatggatcggcaatacgggttgggcaacacttccagggcagaactgaagccatccttcctgggaacggcctcatagatagcctgcaaacgcttgtcagcccagcctccaaacgctgtcccttgccatctcggtttcctcatggctccactccaggcctccaggcctctgggggctctgtattgagctggagtcagcctagggaggctcagacccctgaacactagacccaaaggaagacctcaggcagaggaaatgccatgaaagaaatcgcagcgggagagatgacttagcaagggtttccaacacatgcttctctggttccttgaggtgcacttaaactactattttaataaaatacttaatacaattttacaaagaccacacgcattgtgttttccatatgccagagactgtgcccaatctacaaacaagtcaa

SEQ ID NO: 69476 - DNA, 788 bp, Homo sapiens
aggtgtgagccactgtacctggcctactttcattctttatatatatgcacactcctgaggaagactgatgtcatgaagcaaactccaggactgaaaatctcaggggtagagtgctgtttctatgatgtggcatttttacaggctctctttcatccctttcttcttgctcgccctccctccccacctcccatcctgacccccgctgaaacacacagtcacgggacaggtcctcaagcaggtacaactcaaaatgctagagcaatggagcagcaggattgtgagggagaaacacagcttataaactgtctcccaacccaggcaggtgccagtgaaatgtttgacagctcaggagatggatcggcaatacgggttgggcaacacttccagggcagaactgaagccatccttcctgggaacggcctcatagatagcctgcaaacgcttgtcagcccagcctccaaacgctgtcccttgccatctcggtttcctcatggctccactccaggcctccaggcctctgggggctctgtattgagctggagtcagcctagggaggctcagacccctgaacactagacccaaaggaagacctcaggcagaggaaatgccatgaaagaaatcgcagcrggagagatgacttagcaagggtttccaacacatgcttctctggttccttgaggtgcacttaaactactattttaataaaatacttaatacaattttacaaagaccacacgcattgtgttttccatatgccagagactgtgcccaatctacaaacaagtcaa

SEQ ID NO: 69477 - DNA, 624 bp, Homo sapiens
ctctttgaaaaccactatgatagcactcatttactttttcttgataggcttctttttaaaacaataaaaattttattccaaaactgcttttaattgactatgatataatgatagcagaaggtagactccttctgaatgtgcttgcattaaataaaaatgcctcaaaaaatgaaaagctttcagggaccaccagaatcaaacaactgatggaatgaagggatatgatagaaacttaggaacaggggagtcctgtctatgagctcttcaaatcacactcaaataacatcagttaagataggttctgttaggaaattatctttagcaagctagaagtatgtgatcgagttgccaaatgcccagatcatttagagaataaataaaccaccttatttacattgtatgagaaaaaaactttataaatacttgatgtataaagtatgcccacatttgtttttacctcaaaaaattaaaatgatgtgatccttgacatctgagcttcaaagatgggagcagatctgatatcaatctgctccagtggagagcttgacctaaggcaaaggagacacgtgctgcckcttcagagcttttggcaaaactgcatgagatcttctgtggtcttcagaa

SEQ ID NO: 69478 - DNA, 533 bp, Homo sapiens
ttggatttaggaaacacaaataatatttgtgtgcagaaagatattaatttaaaaaagaaaaagaatactttatataaaatatacatcctagagtgttataggtagaaaaaaatgtgaggcacttagatgaaacagtgaaggaggaaagcactgagattatctttttataaaaagcaccaaaccatttattttaacatctgagataaaagcagaggttaacatgataggaaaaactagtttagttctytaactttgtatttggggaactaataagaatccagtagctcaaaactcaaagtattttatttttactgtgacagaaataattcaaatagagaatattttctaatttaaaagaatcttagtttccctgataaagttttgtatattttgtggtgcccagaataatgtgaaatgtagacggtacctcaccactccgtggcagcaccctttctatcttgactgtagtatatgtaattttgataccatttttaaactcccttttctaaaagcaaaaattaaaatttggtttg

SEQ ID NO: 69479 - DNA, 565 bp, Homo sapiens
gattatctttgcccacttccctaataagaatctcttttccaggatcccatgacacacttccctttgtcgtttttctatctctccagaatgtcttgttttgcatgtttttatcctcagatctttaaaactagccacatctaaggctcaatatttggtcgcacacattaattctttctgtttggtgttttgttacatgagaaataatttgatacacacccatggtattttacagataattgtcttataaccaacttattctattgcttataattttgcattggataagtgttttgcctttgtccttaagtgagttcatgtgtgaatggtcgatctatactgactrtatctaagtgtttcaagaacagtgactgtcaaccaaaggacattgctcaatgctttatatacagtaagttttaacataactagtattgactgtatatatactatatgattgataaatacaaaggggaagagagcatgatcctgttctcaagaaaccttcagttcagcagagggaacagacccaaccaggcagaggctaagtgctataatagagtataaaaag

SEQ ID NO: 69480 - DNA, 486 bp, Homo sapiens
agccaattttctgacccatgagaagaacctggcttatgtcaatatgtgccttaggagaatttctakaaaggccaaggtaattttttttcctgttttgaaaaaatgtaaaaacaacagcccacaactctcaagatgacagtcttacaccttgaactttggtcagttcttggtttctcttttttctttttcttttcttttttttttttttttttgagacagagtcttgctttgtcacccaggctggtgtgcagtggcttggctcaccgcaacctctgccgccctcctgggttcaagcagattcttctgcctcagcctcccaagcagctgggattcaagtatgcaccaccacgcccagctaatttttgtatttttagtagaggcccggtttcaccatgttggtcaggctggtcttgaactcctgacctcaaatgatctgtccaccttggcctcccaaagtgctgggattacaggcatgagccactgtgc

SEQ ID NO: 69481 - DNA, 528 bp, Homo sapiens
ccctttagcgtgggaggtagaggttgcaatgagccgagatcacaccattgcattccggcctgggcaagagagcgacagagtgagatactttcaaaaaaaaagaataaatataaacctagggctygggagaccagtagtgggagccctcatggacataaaggataaaggaagaggtagcattccagcctcagcctttggacttgttagggtagatggtctttctcattaaaataagaccaggcacggtggctcatgcctgtaatcccagcactttgggaggccagggtgggtggatcacttgaggtcaggtgttcgtgaccagcctggccaacatggtgaaagcctgtctctactaaaaaaaaatacaaaaattagccgggtatggtggcggtcgcctgtagtcccagctacttgggaggctgaagcatgagaattgcttgaacctgggaaatggaggttgcagtgagctgagatcgcacctctgcactccagtctgggcgacagagcgaaactgttaaaaaaaaaaaa

SEQ ID NO: 69482 - DNA, 528 bp, Homo sapiens
ccctttagcgtgggaggtagaggttgcaatgagccgagatcacaccattgcattccggcctgggcaagagagcgacagagtgagatactttcaaaaaaaaagaataaatataaacctagggcttgggagaycagtagtgggagccctcatggacataaaggataaaggaagaggtagcattccagcctcagcctttggacttgttagggtagatggtctttctcattaaaataagaccaggcacggtggctcatgcctgtaatcccagcactttgggaggccagggtgggtggatcacttgaggtcaggtgttcgtgaccagcctggccaacatggtgaaagcctgtctctactaaaaaaaaatacaaaaattagccgggtatggtggcggtcgcctgtagtcccagctacttgggaggctgaagcatgagaattgcttgaacctgggaaatggaggttgcagtgagctgagatcgcacctctgcactccagtctgggcgacagagcgaaactgttaaaaaaaaaaaa

SEQ ID NO: 69483 - DNA, 679 bp, Homo sapiens
tgatttccttctgatgaaatagatgactgtgggctgaagggcacagtcatcttttgggctaggagttgagagttctgagttttagtcctggttcactatgaactcctcatgggccctgagaaccactacctgtctccagactcagtttcccctttataaaatacagttgcctaggtgatgccagcctttccagttctgagatgcttcatcagtcaaagcgaattagtgccttgtcctgggtggaaagagaccctgggagggggctggggtccccatacctcccctgctttggataatgctctagggccctttgcatgactccacccactgcccagagcccctgccccagtgagtccctccacccctcagctgggaggactctgtgggcagcatgaagcctaccactccaccctaaaccacccctaccrtgacagacccctaacacctctgcctgtctctttcatctccagtctcccaccggcagagcaggaataaactctccaggcttagatggatgggccctgttagcctggcgggctgcccccagcctgcctccccatcaactctccttgtcaagggaggtgcctgtgtgtgggggaggcaggggggcaagagcattcaggtgggggttgggggttccttgctgagagagcaagaatggtgcccccagggaagaaac

SEQ ID NO: 69484 - DNA, 254 bp, Homo sapiens
cctgtagcactgaaagagtgcttccctgttagcacacgtggttctttttcttggggcagggataggagattcgtaagtcggctcagctggctcctcccctcagtttcagtttccatttctgatttctgctctctgcgctgagcacagcggcaccaggctgagctaagcagggccgccttgggcaggcmtacgtggtggtgcaggcgagacccaggctgggcaaggcgcaggtgtagcctgtgttactcccaccc

SEQ ID NO: 69485 - DNA, 1967 bp, Homo sapiens
atcctgccccaaatctttgaccattgtccccacagaccctccctttccagtaaagtcctctgttgcccccagctctgtgccaacttggacacgtggtgcatcatgtcaccccagaactgctgcccccagctgcaggagcacagccaacagccttgcaaacagtacaacctctgccacaggcgcagccaggtaygcgggggcagggacacggcgagagcgggagccggtgtgaagttaggacacctaggcttgggccctgactctgccctcactagctctgtgacttcaggtcacttgctatgtatccaagcctcaatttctcctttctgtgaaatggggcagatacagcccatgcccacagcccgctctttggattgactcagaaggcaccactggtgtctgtcacatcactgtcatgctggggagtgcactacaaaccagagagcagggatactttgtgctgaggctctactgagccctctctagtgtggacacggcctcgtgtctgccatgactggactggacaaggactaggtgtcaggtccataactataccaaatgttacacttggggtcaggtttgagcccatgctgtggtctggagggagggagtgagtgagcagatagctgaaagaacccttggggggccataggcaggtgaaatgtagttttattcagcagcggctctctcacactgtccacctttatctgggctgtctgctccggccctgtggctcctgctgcccccacgcctgcagctgctctccctggccggcaaggccagctctgtcagggtcagcagcttaactctttccctctgggcacaagcgggttcctggctccccactgcccaccttcaaggcgaccggctgtcccttgcaggggttagtagcattattctctctctgggcgagcaagcgtgccctgccgtgccgagctgaaccaagctccgtgaacagcgtcagcagggcagttttaccttctactgacagtagagtccagtatgaacttacacaaacaggttatatagcaagtggagtacgtgcctgccccccaaactcgctgagtcactctggcccggatgtccgcctcggcctattccttgaccaaagcacgtccatgtgccttacactaggcatcaccgtgcccaggccaaagggtaagagcacatcgcgggtgagacagggcaggactcccccacaccctagccggcctccctctggagctcacaccacagctaagacagatgggtgaggcagtcgcggtgtgctacacgccggggtcagcacccccactgggtgcccatcctccaacgtgtatgggaatcccctccaactctcctcttgctcaggatccgtttggggacttgctgaagaagctcatggaccaaatccatgaccacctggagatgcctgagttgagccggaaatttgggacgcaaatgtatgagcagcaggtggtgaagctgagtgaggctggtgagaggggcagcccttctggcggaggcgaggatgtgggagtggtcaggggcggggcctgccggggcggaggcctttggggcggggcctatccaccccaggggtggagtcgagtgggacggccctatggggcagggcagggggcggggctgtgggctgctcagaccctgcgccctcttcccgcagcggctttggctgggcttcaggagcaacgggtgtatgcgcttcacctgaggcgctacaatgacgcgctgctcatccatgacaccgtccgcgccgtggatgccttggctgcgctgcaggatttctatcacagggagcacgtcactaaaacccagatcctgtgtgccgagcgccggctgctggccctgttcgatggtgaggggcgggagggggcttcggggccggggatgatgggacctggatgcgaggtcagaggccagggcacaggcgccaaggtcggatgggaaggtgcccgtgaggatactgg

SEQ ID NO: 69486 - DNA, 1967 bp, Homo sapiens
atcctgccccaaatctttgaccattgtccccacagaccctccctttccagtaaagtcctctgttgcccccagctctgtgccaacttggacacgtggtgcatcatgtcaccccagaactgctgcccccagctgcaggagcacagccaacagccttgcaaacagtacaacctctgccacaggcgcagccaggtatgcgggggcagggacacggcgagagcgggagccggtgtgaagttaggacacctaggcttgggccctgactctgccctcactagctctgtgacttcaggtcacttgctatgtatccaagcctcaatttctcctttctgtgaaatggggcagatacagcccatgcccacagcccgctctttggattgactcagaaggcaccactggtgtctgtcacatcactgtcatgctggggagtgcactacaaaccagagagcagggatactttgtgctgaggctctactgagccctctctagtgtggacacggcctcgtgtctgccatgactggactggacaaggactaggtgtcaggtccataactataccaaatgttacacttggggtcaggtttgagcccatgctgtggtctggagggagggagtgagtgagcagatagctgaaagaacccttggggggccataggcaggtgaaatgtagttttattcagcagcggctctctcacactgtccacctttatctgggctgtctgctccggccctgtggctcctgctgcccccacgcctgcagctgctctccctggccggcaaggccagctctgtcagggtcagcagcttaactctttccctctgggcacaagcgggttcctggctccccactgcccaccttcaaggcgaccggctgtcccttgcaggggttagtagcattattctctctctgggcgmgcaagcgtgccctgccgtgccgagctgaaccaagctccgtgaacagcgtcagcagggcagttttaccttctactgacagtagagtccagtatgaacttacacaaacaggttatatagcaagtggagtacgtgcctgccccccaaactcgctgagtcactctggcccggatgtccgcctcggcctattccttgaccaaagcacgtccatgtgccttacactaggcatcaccgtgcccaggccaaagggtaagagcacatcgcgggtgagacagggcaggactcccccacaccctagccggcctccctctggagctcacaccacagctaagacagatgggtgaggcagtcgcggtgtgctacacgccggggtcagcacccccactgggtgcccatcctccaacgtgtatgggaatcccctccaactctcctcttgctcaggatccgtttggggacttgctgaagaagctcatggaccaaatccatgaccacctggagatgcctgagttgagccggaaatttgggacgcaaatgtatgagcagcaggtggtgaagctgagtgaggctggtgagaggggcagcccttctggcggaggcgaggatgtgggagtggtcaggggcggggcctgccggggcggaggcctttggggcggggcctatccaccccaggggtggagtcgagtgggacggccctatggggcagggcagggggcggggctgtgggctgctcagaccctgcgccctcttcccgcagcggctttggctgggcttcaggagcaacgggtgtatgcgcttcacctgaggcgctacaatgacgcgctgctcatccatgacaccgtccgcgccgtggatgccttggctgcgctgcaggatttctatcacagggagcacgtcactaaaacccagatcctgtgtgccgagcgccggctgctggccctgttcgatggtgaggggcgggagggggcttcggggccggggatgatgggacctggatgcgaggtcagaggccagggcacaggcgccaaggtcggatgggaaggtgcccgtgaggatactgg

SEQ ID NO: 69487 - DNA, 1967 bp, Homo sapiens
atcctgccccaaatctttgaccattgtccccacagaccctccctttccagtaaagtcctctgttgcccccagctctgtgccaacttggacacgtggtgcatcatgtcaccccagaactgctgcccccagctgcaggagcacagccaacagccttgcaaacagtacaacctctgccacaggcgcagccaggtatgcgggggcagggacacggcgagagcgggagccggtgtgaagttaggacacctaggcttgggccctgactctgccctcactagctctgtgacttcaggtcacttgctatgtatccaagcctcaatttctcctttctgtgaaatggggcagatacagcccatgcccacagcccgctctttggattgactcagaaggcaccactggtgtctgtcacatcactgtcatgctggggagtgcactacaaaccagagagcagggatactttgtgctgaggctctactgagccctctctagtgtggacacggcctcgtgtctgccatgactggactggacaaggactaggtgtcaggtccataactataccaaatgttacacttggggtcaggtttgagcccatgctgtggtctggagggagggagtgagtgagcagatagctgaaagaacccttggggggccataggcaggtgaaatgtagttttattcagcagcggctctctcacactgtccacctttatctgggctgtctgctccggccctgtggctcctgctgcccccacgcctgcagctgctctccctggccggcaaggccagctctgtcagggtcagcagcttaactctttccctctgggcacaagcgggttcctggctccccactgcccaccttcaaggcgaccggctgtcccttgcaggggttagtagcattattctctctctgggcgagcmagcgtgccctgccgtgccgagctgaaccaagctccgtgaacagcgtcagcagggcagttttaccttctactgacagtagagtccagtatgaacttacacaaacaggttatatagcaagtggagtacgtgcctgccccccaaactcgctgagtcactctggcccggatgtccgcctcggcctattccttgaccaaagcacgtccatgtgccttacactaggcatcaccgtgcccaggccaaagggtaagagcacatcgcgggtgagacagggcaggactcccccacaccctagccggcctccctctggagctcacaccacagctaagacagatgggtgaggcagtcgcggtgtgctacacgccggggtcagcacccccactgggtgcccatcctccaacgtgtatgggaatcccctccaactctcctcttgctcaggatccgtttggggacttgctgaagaagctcatggaccaaatccatgaccacctggagatgcctgagttgagccggaaatttgggacgcaaatgtatgagcagcaggtggtgaagctgagtgaggctggtgagaggggcagcccttctggcggaggcgaggatgtgggagtggtcaggggcggggcctgccggggcggaggcctttggggcggggcctatccaccccaggggtggagtcgagtgggacggccctatggggcagggcagggggcggggctgtgggctgctcagaccctgcgccctcttcccgcagcggctttggctgggcttcaggagcaacgggtgtatgcgcttcacctgaggcgctacaatgacgcgctgctcatccatgacaccgtccgcgccgtggatgccttggctgcgctgcaggatttctatcacagggagcacgtcactaaaacccagatcctgtgtgccgagcgccggctgctggccctgttcgatggtgaggggcgggagggggcttcggggccggggatgatgggacctggatgcgaggtcagaggccagggcacaggcgccaaggtcggatgggaaggtgcccgtgaggatactgg

SEQ ID NO: 69488 - DNA, 1765 bp, Homo sapiens
tacatgcatgtttatagtggcacaattcacaacagcaaaatcatgaaaccagcccaaatacctgtcagtcaacgagtggataaagaaactgtgctatatatatatatratggaatactatgcagcaataaaaaggaataaattaacagcatttgcagtgacctggatgagattggagactattaaactaagtgaagtaactaaggaatggaaaaccaaacatctcactgatatgtgggagttaagctataaggatgcaaaagcataaggatgataatggactttggggacttaggggtaagagacagagggggcgagggataaaagactacaaatatggtccagtgtatactgctcgcatgatgggtgcaccaaaatttcacaaatcaccactaaagaacttactcacgtaaccaaataccacctgtaccccaataaattatggaaaaattaaattaattttttttaaaaataaaaaataaaaatttcaacagaattgatgaagacctagttagaactaatcaagaaaaaagagggagaatacaaagtaacagaatcaggaaggaaagagaggttattttcagagattctagagacattaaaaggataataaaggaatattagtaaagaaattaaattttctattaaaaattttttcacaaacaagatgaaaagccaaggtgattttattggtgagttctataaaacactcacagaagaaatcatactaacggtaagctctttcagaaaatagagaagagggatatatacctcccatgttttatgaggccagcataatgccactatttaaactaaacaaagacattctgaaatcaaaattacacaccaaatgtactcatgaacatacatccaaatattcttaaaatattactacatcgaactcatacatttgataatatattataatcacaaaaaattaaaagaaaattgtaaaatattgataagaaaggagaaaaatgtttacatagaaagaaatcagaaccatattgaccttagacttaattactaaaacaataaagcaaagtctgaagctctaatagaatatagtgttgaacttttatttctatatccaggcaaaattgtctatgcagtgcaatctcaattacattaaaatatgcatagaaaagatctaaaaagaaaaacaaccaatattaatataaataacctcattatgtaagagaaacaatgtagagtgaacacctaactcatcagttaccacacttgatcttcacagtagccctgtgaggtctttattacccaatctcacgtagctggtagacggtagagctgcactcaaatgtcttctgaatagaaggaggtttgacctcataccttgtcatcagtgaggaatttagacttgatagtgagtgacaggtctcctggatcaaataaccatggccccaactcacagtggacccaatcattagcgctctgggccacacttccaatggatcttgggaatttgtgcttgacgaaaggacaattgattgaattctcagcactggctgaggtgtttctgctgcagggaattagtgagtcctgcccgaaacacgttagatttcactggatttcctccaaaggatggctatcattgctaagtggcttttccagcttcgaggcaacatgaatgactttttcaagcactctgattccacccagagttggcatgtcatggaatttgggccacttgacataatcaggagctttctcttccctccttctttcagggtcagccagcagtaatt

SEQ ID NO: 69489 - DNA, 1765 bp, Homo sapiens
tacatgcatgtttatagtggcacaattcacaacagcaaaatcatgaaaccagcccaaatacctgtcagtcaacgagtggataaagaaactgtgctatatatatatatgatggaataytatgcagcaataaaaaggaataaattaacagcatttgcagtgacctggatgagattggagactattaaactaagtgaagtaactaaggaatggaaaaccaaacatctcactgatatgtgggagttaagctataaggatgcaaaagcataaggatgataatggactttggggacttaggggtaagagacagagggggcgagggataaaagactacaaatatggtccagtgtatactgctcgcatgatgggtgcaccaaaatttcacaaatcaccactaaagaacttactcacgtaaccaaataccacctgtaccccaataaattatggaaaaattaaattaattttttttaaaaataaaaaataaaaatttcaacagaattgatgaagacctagttagaactaatcaagaaaaaagagggagaatacaaagtaacagaatcaggaaggaaagagaggttattttcagagattctagagacattaaaaggataataaaggaatattagtaaagaaattaaattttctattaaaaattttttcacaaacaagatgaaaagccaaggtgattttattggtgagttctataaaacactcacagaagaaatcatactaacggtaagctctttcagaaaatagagaagagggatatatacctcccatgttttatgaggccagcataatgccactatttaaactaaacaaagacattctgaaatcaaaattacacaccaaatgtactcatgaacatacatccaaatattcttaaaatattactacatcgaactcatacatttgataatatattataatcacaaaaaattaaaagaaaattgtaaaatattgataagaaaggagaaaaatgtttacatagaaagaaatcagaaccatattgaccttagacttaattactaaaacaataaagcaaagtctgaagctctaatagaatatagtgttgaacttttatttctatatccaggcaaaattgtctatgcagtgcaatctcaattacattaaaatatgcatagaaaagatctaaaaagaaaaacaaccaatattaatataaataacctcattatgtaagagaaacaatgtagagtgaacacctaactcatcagttaccacacttgatcttcacagtagccctgtgaggtctttattacccaatctcacgtagctggtagacggtagagctgcactcaaatgtcttctgaatagaaggaggtttgacctcataccttgtcatcagtgaggaatttagacttgatagtgagtgacaggtctcctggatcaaataaccatggccccaactcacagtggacccaatcattagcgctctgggccacacttccaatggatcttgggaatttgtgcttgacgaaaggacaattgattgaattctcagcactggctgaggtgtttctgctgcagggaattagtgagtcctgcccgaaacacgttagatttcactggatttcctccaaaggatggctatcattgctaagtggcttttccagcttcgaggcaacatgaatgactttttcaagcactctgattccacccagagttggcatgtcatggaatttgggccacttgacataatcaggagctttctcttccctccttctttcagggtcagccagcagtaatt

SEQ ID NO: 69490 - DNA, 1719 bp, Homo sapiens
tgttactgttttttgtgtgttataatcaagtttgacagacttttcctttatgttttctgcatttggtgtcatgcttagaaaacccttctccatccctagtttctaaaattgttcacccatgttttcagtgtccttatggtttatttttacataaaattaaaaaaaaactagaattaattttggggtatggtatgggctaagattctaacaaatttttcccagatgggtatcatgttgtctcaacataatgatgattgattaaaaatgccatatactacattgacttttatagatctatgtcaatttctggaaattttattctgttccatcaatgtgtatgcctttgctacacatcactacagtgttttattacgtctttataatatagtttcctatctattttaatgaatctctcttcttcttaaaactttggtcaaacttgtgttttcctttttctaaatgagattcttaaccaagggtgagcataaaaacaatctgtggaggactttaattaacctgcccagggctcacatcccagaaaattctgattcattgggtctggtgtgggagctgggcatctttcaaaaataaataaataacacatgcatatatacataatatatgcattatacataaaagactccctagttgatggggaggcccctagattaagaaccacagctcccacgtgagaacacatggacacatagaggggagcagcacacactggggcctattggagggtggaaggtgggagaaggaaaaggattaggaaaaataattaatgagtactaggcttaatacctggtgatgagacaagtttacctatgtaacaaaccygcacatgtaccctgaacttaaaataaaagttaaaataaataaataagaagacaaaaccaaataaaaagaaccacagccccagcttcaaaagatttttataatttcagaatcctgtgtcagagttcccctcttctcccacttctatcctgtttccaagtgcaagatgctccctgggggccacctggggtgctcttatgtaattggtcttgaggatttagctcaggctttggggtttttgaaaacttcctcagtgattctaacgtgcagtcagggttggtgatgactggtttagaaactccttctcagtcctgaccactaaatccttgctctactgtacagatagaattctatctgtgaattagtatggatttcaatcctggttatacatcagaatcatctgtggttcttaaaaaacagactgagctgaatgtatacattaaatattgaccatcagcattaaaaaaatacaactgggtgtggtggctgacacctgtaatcccagaactttgggaagctgaggtgggaggatagctttaggccaggagtttcagaccagcctgcacaacatagcgagacccctgtctctacaaaaaaaatttaaaaattagctgggcatggcggcatatacctatggtcccagctactcgggaggctgaggtgggaggacggcttgagcccaggaggttgaggctgcagcgagcctatgattgagccactgcacaccagtctgggcaatagagtgaggccctgtctccaaaaaaaaagaagaagaaagaaaataagtccaatttcatagttgattctgatgcacagcaagactaaatagccattctccaggtaactgtcctttttaaatgactaactctatttttcaggtga

SEQ ID NO: 69491 - DNA, 550 bp, Homo sapiens
tcatacttaaagagtctgttctatcagtctttgcttttttgggtgggggagtgcggagtctcagtctgtcacccaggctagagtgcagtgacaccatcttggctcactgcagtctctgcctcccaggttccagtgattctcctgccttagcctcccgagtaactgggattacaggcatgtgccacctgtctggctaatttttgtatttttagtacagatgcggtttcaccatgttggccaggctggtcttgaamttctgacctcaggtgaaccacccacctcggcctcccaaagtgttaggattacagacatgagccaccgcacccagcctgttctatcagtcttaaggtctctgttgatgttaatggtaatgaggcatgtctgactccctgttcccatcatggcctaaactagttttttaggttaactttagaatgcccttggccaagaagaggagtccattaagaatggctggggagcttagatttttatttttggtttacagtttcatccatgctgtagcatatatcagtactttcttccttttatg

SEQ ID NO: 69492 - DNA, 550 bp, Homo sapiens
tcatacttaaagagtctgttctatcagtctttgcttttttgggtgggggagtgcggagtctcagtctgtcacccaggctagagtgcagtgacaccatcttggctcactgcagtctctgcctcccaggttccagtgattctcctgccttagcctcccgagtaactgggattacaggcatgtgccacctgtctggctaatttttgtatttttagtacagatgcggtttcaccatgttggccaggctggtcttgaacttctgacctcaggtgaaccacccacctcggcctcccaaagtgttaggattacagacatgagccaccgcacccagcctgttctatcagtcttaaggtctctgttgatgttaatggtaatgaggcatgtctgactccctgttcccatcatggcctaaactagttttttaggttaactttagaatgcccttggccaagaagaggagtccattaagaatggctggggagcttagatttttatttttggtttayagtttcatccatgctgtagcatatatcagtactttcttccttttatg

SEQ ID NO: 69493 - DNA, 555 bp, Homo sapiens
cactgctcaacagtgaggtacaatattttttctttcaaagtacctgaacccatgattgtgttcaatcatctgtccatcctaaattgagatccttcctttcttattctagttgggtaaagtattgacaaagctaacattagaattttaacaaaccaagctaattgcctatgtatcagcccctgctctgaagagtgatgatcacagaagtgacttttttttttttttagatgaagtctcrctcttgttccccaggctggagtgcaatgcatgatctcgggtcactggaacctccccctcccgggttcaagcaattctccttcctcagcttctggattagctggaattacaggcgcctgctaccacgcccagctaatttttgtatttttagtagagatggggtttcaccatgttggccaggctggtcttgaactcctgacctcaggtaatctgcctgccttggcctcccaaagtgctggaattacaggcgtgagccagaaagtgacccttcagttagggctgaggaatcttttggattcttgaaactgagggatgagg

SEQ ID NO: 69494 - DNA, 2235 bp, Homo sapiens
taagtataagcgtttaacctcatttttctttcaaatatttgttcagtatatatgatgtactgaggatcaaaatactaaataataaattggcattttactagcaacaaaatttataaaaacatccaagagttaacttagtaagaagtgctaatgaaagcactaccaaattgacacaattaacattcataaaatataccatcccgaaatagcagaatacacatttctctctagctcacatggaacagtcactaaaatagactgaattccaggacataaaacacacttttataaatttaaaatatagaaatcatacaacatatgttcttacaccacaatggacttgaactagaaattattaacagaaagaaaagaacattctcagatttttggagatttgacaacatrtttctaagtaatatgtggatcaaaaaagaagtctcaatatacacttagaaaatattttgaactagggtcaggtgcggtggctcacgcctgtaatcccagcacttgggaggtcgaggccaggatcacctgaggtcagcagttcaagactagcctgaccaacatggcgaaaccccgtctctactaaaaatacaaaaattacctgggcatggtggagcctgcctgtaatcccagctactcaggaggccgaggcaatagaatcacttgaacccgggaggcagaggttgcagtgagcagagattgggccattgcactccagcgtgggggacagggcgagactctgtctcaaaaaaaaaaaaaaaaaaaaaaaaagcaaaaaagaaactattttgaactaaacaaaaatggaaatacaacttaccaaaacttgtggcatgcggtaaaaatggtgcttagcgggaaatgtatagtattaaatgcatatgtcagaaaaagaagatccaagtccaatctcataccttctgaatctagagaaagaagagtaatttaagcctaaaatgaacacgaagaaagaaaaagtatttaagtgagggtaggaagtggtgagagagttgagagattgcccatgggtacgatgttcactctttggatgatgggcacactagaagcccaatcttcaccagcacgcaatatacccacgtaacaaacatgcacaggtaccccctgaatctaaaataaaataaaatttaaaatttagattaaaaaatcaacaaaatttaaaacaaaagctcaatagagaaaaccagtgaaaccaaaagctggttctttgaaaagattcataaaattcatagacttctagccaggtgtatcaaggttaaaagaggcaactaaagaggggtaaccattacggatctcatcggcaaaaggaattaaatattctaccagatttaaggaatggcttgaccttttaagagaagaaagagctgatgctgctaacaaaatgatcattttattaacagatggatggtgttggatgggaggatgaaatcatttttagaagaatgtgtcacgtctcaggaagagccagtagatactgtgggaccatcagcaaatggacacatgagaaatgaaggagctggacatgccaaggtcagaattggtggaaacaatccaaccacagggctatgccactcccctaaaagagaaatggtcagtagtacaaatgtcaattccaaaatgaaagtagctggtgcttcgcagcggcttggaagtaggttttcctgagcaccttccagtcccctcaaataaacaaggaatgtgtgtaaaaataatgaacttgccattcgtgtgcagttttaaggaaggctcctagacaaatccttccccccatacaaaaggctgaccctaggaccctcctacgtagaaattctgaagtggtcattgcagccagtgaaatcaggaataacaaggaacttatttcagtatccaaaggagttccctatgaggatgggtcacagctgcaggaacgtctcaaaaatcacagccacccacatagatgacacagcacctcatcatggttccagctgagcggatgaataatcacctccctagggataaggcatacagaccagacccccagcaggagttctcagtgttagggagcttgctagtgctctgtcacactcacggcaaggctgcttgggggaacagggagaacagaaaaggaagacagaaaatctcagtggcatggacagggcgaacaagaataccaattcctgccacaaacaaaaagtgtacttcagatcctaacttcaagtaatttaattattatta

SEQ ID NO: 69495 - DNA, 1092 bp, Homo sapiens
agctgtagaacgagcagatcaaaagaaaaaccattttgagggctttgatatgtatttggtatgtatcactaaggtgtcctctggagaaactgcaccatttgcccatgcctcagagtccctggcactgaaactrccattggaaacaataccccagtgtgacagaaaaataaattattggccgtgtgcggtggctcatgcctgtaatcctagcactttgggaggctgaggcaggtggatcaccagagttcaagatcagcctggccaacatggtgaaaccccgtctgtactaaaatacaaaaattacccaggcatgatggcgggtgcctgtaatcccagctactcaggaggcagagacagaagaatcgcttgaacctgggagacggtggttgcggtgagctgagatcataccactgcactccaacctgggtgacagagccagactctgtctcaaaaaaagaaaaaaaaaagaaaaaaaaaggaatattcaaatgtttttaatgtcttttaccaagactttatccttttcatgagaattgatggctgacattctttcttatttccttttagatgtttactcattttaaaagcaggtttattgaggtataattgacatatgacaaactgcacatatttaaagtgaaaaatttgataaattttgctgtatatatacaccgatagaaccatcaacatcaagaaaatgaatatatccatcagcttctaaacttttctcttgcccctttataattctcccttccacctctgtgcacctgcccatactatcatcaggcaaccactgatccactgtgtgtcactctagatagctttgcattttctgggaacttatatcaaattgaatcatataggctattccctctacctctgtctcactctcattttttgttctggcttatttcactcatcatgattattttgagatttatccgtgtctttttttgttcatttagttttattcctgagtagtattctattatatagatggaccacgtcatccatctaccttttgatggacacttgggctggttccagtttttggctagcacaaataaaactgctatgaacgtttgtgtgcaa

SEQ ID NO: 69496 - DNA, 1092 bp, Homo sapiens
agctgtagaacgagcagatcaaaagaaaaaccattttgagggctttgatatgtatttggtatgtatcactaaggtgtcctctggagaaactgcaccatttgcccatgcctcagagtccctggcactgaaactgccattggaaacaataccccagtgtgacagaaaaataaattattggccgtgtgcggtggctcatgcctgtaatcctagcactttgggaggctgaggcaggtggatcaccagagttcaagatcagcctggccaacatggtgaaaccccgtctstactaaaatacaaaaattacccaggcatgatggcgggtgcctgtaatcccagctactcaggaggcagagacagaagaatcgcttgaacctgggagacggtggttgcggtgagctgagatcataccactgcactccaacctgggtgacagagccagactctgtctcaaaaaaagaaaaaaaaaagaaaaaaaaaggaatattcaaatgtttttaatgtcttttaccaagactttatccttttcatgagaattgatggctgacattctttcttatttccttttagatgtttactcattttaaaagcaggtttattgaggtataattgacatatgacaaactgcacatatttaaagtgaaaaatttgataaattttgctgtatatatacaccgatagaaccatcaacatcaagaaaatgaatatatccatcagcttctaaacttttctcttgcccctttataattctcccttccacctctgtgcacctgcccatactatcatcaggcaaccactgatccactgtgtgtcactctagatagctttgcattttctgggaacttatatcaaattgaatcatataggctattccctctacctctgtctcactctcattttttgttctggcttatttcactcatcatgattattttgagatttatccgtgtctttttttgttcatttagttttattcctgagtagtattctattatatagatggaccacgtcatccatctaccttttgatggacacttgggctggttccagtttttggctagcacaaataaaactgctatgaacgtttgtgtgcaa

SEQ ID NO: 69497 - DNA, 1092 bp, Homo sapiens
agctgtagaacgagcagatcaaaagaaaaaccattttgagggctttgatatgtatttggtatgtatcactaaggtgtcctctggagaaactgcaccatttgcccatgcctcagagtccctggcactgaaactgccattggaaacaataccccagtgtgacagaaaaataaattattggccgtgtgcggtggctcatgcctgtaatcctagcactttgggaggctgaggcaggtggatcaccagagttcaagatcagcctggccaacatggtgaaaccccgtctgtactaaaatacaaaaattacccaggcatgatggcgggtgcctgtaatcccagctactcaggaggcagagacagaagaatcgcttgaacctgggagacggtggttgcggtgagctgagatcataccactgcactccaacctgggtgacagagccagactctgtctcaaaaaaaraaaaaaaaaagaaaaaaaaaggaatattcaaatgtttttaatgtcttttaccaagactttatccttttcatgagaattgatggctgacattctttcttatttccttttagatgtttactcattttaaaagcaggtttattgaggtataattgacatatgacaaactgcacatatttaaagtgaaaaatttgataaattttgctgtatatatacaccgatagaaccatcaacatcaagaaaatgaatatatccatcagcttctaaacttttctcttgcccctttataattctcccttccacctctgtgcacctgcccatactatcatcaggcaaccactgatccactgtgtgtcactctagatagctttgcattttctgggaacttatatcaaattgaatcatataggctattccctctacctctgtctcactctcattttttgttctggcttatttcactcatcatgattattttgagatttatccgtgtctttttttgttcatttagttttattcctgagtagtattctattatatagatggaccacgtcatccatctaccttttgatggacacttgggctggttccagtttttggctagcacaaataaaactgctatgaacgtttgtgtgcaa

SEQ ID NO: 69498 - DNA, 552 bp, Homo sapiens
ccagtgactccttttgcataatacagacattagtttcttattgggggtttactcacactggttctttcacactgtccacctktttctcggctgtctgctctggctctgcggctcctgccacccccacgcctgcagctgcactccctggcctgctaggccagcttttagtcacaaagctaacctttaaaaggccttgcccactggttcttccagatttaatccaaaatattttctcatctgatctctgagcctctgcaggaatgcagagggagtttcctctttttcttgttgaatctcaaatgcctttacgacattttatgccctaggagtggactctttgatctcttctaattattcattcctccatttgggcccagtccctgggatctttattatccaatttgggaatgacatttgggaatttttgtttggctggcaagaacccttgcccaggagagtgttgcctgtcccagatggtcatgactgctctcctaatcattcccctttcttctcctgtgaacagtatatttataatagaataattttagccca

SEQ ID NO: 69499 - DNA, 954 bp, Homo sapiens
catgggctgagtggaggggagggaactgacccaaggccatgtggccaatggtgatggagctccttgaacctgctaatggcgtggcatgaaatgtgttgagaattccccctgcccgccctacatcacgccctaaaataaaagcaaccgtgtaacaagttgcaagcctgcaaaaggcttttcttcccatgccgtggcataattgatcacrcccatttctcatcagggtcaataaataggacatcttaccccagtttttatatctgagtgatggtttatgagccaagtgactgaagtctaaataacgaagctgtgtttacttgataaatgaagtgctggaacgcccgagacgccacatttgctaaacctgcaccataagcttttctctaatgataaattctctctggtgtcaggcaaagctgagagccacatgcacccccaaggacagtcttctgaagaattgtggctcacacacaggaaaaactctgagtattgatttccctcacatgactgcacaatgttagtggtaaaatcatagaatcctgggatgctgaaaccggaaaagcccttagaggcaggccatcaaggactatcacttgctaagcaagctcccaattttacctatggggaaactgaggcccagggagggaaagctaccttggtaactggtttggcagcgacagagtccagaagtctagtcatttgagccccagatttgggccagccctgggaaagagtaatcagtcacctacctacctccccaaaaagcttaaaggctggcaggagatgggcatgtcaggcaataaatacaatgtggtgttgcaggtgctgggataaaactcaggctgaacaccaagatccaaaagcagagggaatgggtggagaaggcatcttggcagaagggcacaaactgagccttgaaagctgggtagatggttgcaggctgacaagcagaaa

SEQ ID NO: 69500 - DNA, 855 bp, Homo sapiens
gcatcttaaaatgatgaaacatagaaattctcaaacagtgagatatgagctgttattcccagcttatagacagggaaactgggccaataaatgagacagccagccccaaactgtctacctttggcacacagctaagtcttttarccacaccatgctactcccaaatattgacaaagaagtcactgtgttccattgtgccgacactctcctaggacattccattcagtctgaacagcaaatctgtggggccgtactgctgtctcccttctacagacaaagggacagctgagaattagaatccagacctgcctaataccaaagtccacgctcttttcacaacatggtacaccatctgccccttcctgcctctgtgatccccaaatgatctcttctggaagcccacatggcatcctgtgtggacactgatgtcacttggttgagcccctgatgaaaaggtaagagtgcatgtccttcttggggaccagcaaggaggtcagggaaacctggaagaaaataatacgtaggaccagaccctctctatcaggtgaaattgacagggaatccactctctgcagccacaccccaaagtccaggcagacagggagacccccgtaccagggacaaagatccaaacccaacctggaactccaggccctgggatgggcccacaggacccagggagaactcccatccagggagtgctagggaaactagtcaggtttttaaggcccagggctccagacctggagcagatttcaaggactcaactgcaccacctgtgtaatctgtagcagatgacgtggtctctcttgactgaatttcctcttctggaaaatgagagtaataaccataaca

SEQ ID NO: 69501 - DNA, 855 bp, Homo sapiens
gcatcttaaaatgatgaaacatagaaattctcaaacagtgagatatgagctgttattcccagcttatagacagggaaactgggccaataaatgagacagccagccccaaactgtctacctttggcacacagctaagtcttttagccacaccatgctactcccaaatattgacaaagaagtcactgtgttccattgtgccgacactctcctaggacattccattcagtctgaacagyaaatctgtggggccgtactgctgtctcccttctacagacaaagggacagctgagaattagaatccagacctgcctaataccaaagtccacgctcttttcacaacatggtacaccatctgccccttcctgcctctgtgatccccaaatgatctcttctggaagcccacatggcatcctgtgtggacactgatgtcacttggttgagcccctgatgaaaaggtaagagtgcatgtccttcttggggaccagcaaggaggtcagggaaacctggaagaaaataatacgtaggaccagaccctctctatcaggtgaaattgacagggaatccactctctgcagccacaccccaaagtccaggcagacagggagacccccgtaccagggacaaagatccaaacccaacctggaactccaggccctgggatgggcccacaggacccagggagaactcccatccagggagtgctagggaaactagtcaggtttttaaggcccagggctccagacctggagcagatttcaaggactcaactgcaccacctgtgtaatctgtagcagatgacgtggtctctcttgactgaatttcctcttctggaaaatgagagtaataaccataaca

SEQ ID NO: 69502 - DNA, 855 bp, Homo sapiens
gcatcttaaaatgatgaaacatagaaattctcaaacagtgagatatgagctgttattcccagcttatagacagggaaactgggccaataaatgagacagccagccccaaactgtctacctttggcacacagctaagtcttttagccacaccatgctactcccaaatattgacaaagaagtcactgtgttccattgtgccgacactctcctaggacattccattcagtctgaacagcaaatctgtggggccgtactgctgtctcccttctacagacaaagggacagctgagaattagaatccagacctgcctaataccaaagtccacgctcttttcacaacatggtacaccatctgccccttcctgcctctgtgatccccaaatgatctcttctggaagcccacatggcatcctgtgtggacactgatgtcacttggttgagcccctgatgaaaaggtaagagtgcatgtccttcttggggaccagcaaggaggtcagggaaacctgraagaaaataatacgtaggaccagaccctctctatcaggtgaaattgacagggaatccactctctgcagccacaccccaaagtccaggcagacagggagacccccgtaccagggacaaagatccaaacccaacctggaactccaggccctgggatgggcccacaggacccagggagaactcccatccagggagtgctagggaaactagtcaggtttttaaggcccagggctccagacctggagcagatttcaaggactcaactgcaccacctgtgtaatctgtagcagatgacgtggtctctcttgactgaatttcctcttctggaaaatgagagtaataaccataaca

SEQ ID NO: 69503 - DNA, 855 bp, Homo sapiens
gcatcttaaaatgatgaaacatagaaattctcaaacagtgagatatgagctgttattcccagcttatagacagggaaactgggccaataaatgagacagccagccccaaactgtctacctttggcacacagctaagtcttttagccacaccatgctactcccaaatattgacaaagaagtcactgtgttccattgtgccgacactctcctaggacattccattcagtctgaacagcaaatctgtggggccgtactgctgtctcccttctacagacaaagggacagctgagaattagaatccagacctgcctaataccaaagtccacgctcttttcacaacatggtacaccatctgccccttcctgcctctgtgatccccaaatgatctcttctggaagcccacatggcatcctgtgtggacactgatgtcacttggttgagcccctgatgaaaaggtaagagtgcatgtccttcttggggaccagcaaggaggtcagggaaacctggaagaaaataatacgtaggaccagaccctctctatcaggtgaaattgacagggaatccactctctgcagccacaccccaaagtccaggcagacagggagacccccgtaccagggacaaagatccaaacccaacctggaactccaggccctgggatgggcccacaggacccagggagaactcccatccagggagtrctagggaaactagtcaggtttttaaggcccagggctccagacctggagcagatttcaaggactcaactgcaccacctgtgtaatctgtagcagatgacgtggtctctcttgactgaatttcctcttctggaaaatgagagtaataaccataaca

SEQ ID NO: 69504 - DNA, 855 bp, Homo sapiens
gcatcttaaaatgatgaaacatagaaattctcaaacagtgagatatgagctgttattcccagcttatagacagggaaactgggccaataaatgagacagccagccccaaactgtctacctttggcacacagctaagtcttttagccacaccatgctactcccaaatattgacaaagaagtcactgtgttccattgtgccgacactctcctaggacattccattcagtctgaacagcaaatctgtggggccgtactgctgtctcccttctacagacaaagggacagctgagaattagaatccagacctgcctaataccaaagtccacgctcttttcacaacatggtacaccatctgccccttcctgcctctgtgatccccaaatgatctcttctggaagcccacatggcatcctgtgtggacactgatgtcacttggttgagcccctgatgaaaaggtaagagtgcatgtccttcttggggaccagcaaggaggtcagggaaacctggaagaaaataatacgtaggaccagaccctctctatcaggtgaaattgacagggaatccactctctgcagccacaccccaaagtccaggcagacagggagacccccgtaccagggacaaagatccaaacccaacctggaactccaggccctgggatgggcccacaggacccagggagaactcccatccagggagtgctrgggaaactagtcaggtttttaaggcccagggctccagacctggagcagatttcaaggactcaactgcaccacctgtgtaatctgtagcagatgacgtggtctctcttgactgaatttcctcttctggaaaatgagagtaataaccataaca

SEQ ID NO: 69505 - DNA, 855 bp, Homo sapiens
gcatcttaaaatgatgaaacatagaaattctcaaacagtgagatatgagctgttattcccagcttatagacagggaaactgggccaataaatgagacagccagccccaaactgtctacctttggcacacagctaagtcttttagccacaccatgctactcccaaatattgacaaagaagtcactgtgttccattgtgccgacactctcctaggacattccattcagtctgaacagcaaatctgtggggccgtactgctgtctcccttctacagacaaagggacagctgagaattagaatccagacctgcctaataccaaagtccacgctcttttcacaacatggtacaccatctgccccttcctgcctctgtgatccccaaatgatctcttctggaagcccacatggcatcctgtgtggacactgatgtcacttggttgagcccctgatgaaaaggtaagagtgcatgtccttcttggggaccagcaaggaggtcagggaaacctggaagaaaataatacgtaggaccagaccctctctatcaggtgaaattgacagggaatccactctctgcagccacaccccaaagtccaggcagacagggagacccccgtaccagggacaaagatccaaacccaacctggaactccaggccctgggatgggcccacaggacccagggagaactcccatccagggagtgctagggaaactagtcaggtttttaaggcccagggctccagacctggagcagatttcaagkactcaactgcaccacctgtgtaatctgtagcagatgacgtggtctctcttgactgaatttcctcttctggaaaatgagagtaataaccataaca

SEQ ID NO: 69506 - DNA, 655 bp, Homo sapiens
tcagataaagccccttgggctttgatgagtgggatgggctgctacccgggactcccacgccttagagtcctaccctgcaagggtgcctccattaaactcggtttggaaaatgctggaggaagagcaagttggrggctggtgaaggacttgtactcctcgaataaatgcttctcagattgttgcctttgattaatttccagagttctgaaaaacttgacttttaaccattttgccagaaatctcattgttcttaaggaggagcagatttatgaaggtcctcgctccatccctctgcaagtcagctgcccgggcaagtgcatttgagacgccctcttttaattacctgtggggcatccaggggatgtcttggtgtgaattggaaactcacgggagaagccagtgctggcaagagatctggcaatctgcccagggtgtaggggagaggggtggaatgctggatgcaggaggctagagcttccaccctgttctcactataggcattggtgtcagtactgcccctctggtctctggggcatcaccatggaggctgggttttagggttactgctataccttgtacaacttcaggtatgccacttgtagacatcaacatctgtcagacgataactaatgtcagttctaagataaaatgagag

SEQ ID NO: 69507 - DNA, 655 bp, Homo sapiens
tcagataaagccccttgggctttgatgagtgggatgggctgctacccgggactcccacgccttagagtcctaccctgcaagggtgcctccattaaactcggtttggaaaatgctggaggaagagcaagttgggggctggtgaaggacttgtactcctcgaataaatgcttctcagattgttgcctttgattaatttccagagttctgaaaaacttgacttttaaccattttgccagaaatctcattgttcttaaggaggagcagatttatgaaggtcctcgctccatccctctgcaagtcagctgccygggcaagtgcatttgagacgccctcttttaattacctgtggggcatccaggggatgtcttggtgtgaattggaaactcacgggagaagccagtgctggcaagagatctggcaatctgcccagggtgtaggggagaggggtggaatgctggatgcaggaggctagagcttccaccctgttctcactataggcattggtgtcagtactgcccctctggtctctggggcatcaccatggaggctgggttttagggttactgctataccttgtacaacttcaggtatgccacttgtagacatcaacatctgtcagacgataactaatgtcagttctaagataaaatgagag

SEQ ID NO: 69508 - DNA, 1510 bp, Homo sapiens
tgagccagtatgtggttcgcttgtcttctccctctgcaccagcgtcagctacatgccaggtagatacccatccacccacctgggtcccagtgtgaagataacgtggaacagggctgcagccagctctcaatgggtgtgtggtttgtgaaacatctcacatgagcctctgaggtttggggcttgtgtgttccccatggcctgtcattctagggtcccacacctttcctccaagggctcagagctctggccatagaagctgccagggtaccatgttcttatgcctgactggggacaagctcctcgccctctcttctcataaccccmtctgtaaacagtgggggtgaattaggtgagtgctgacatgcttgccaggtttgacttttgactgatctgtgaataagagccttcctgaagattcctcttaatgaggctgacttgtatttttacaaagcaaatcatctaagagagatcttggctgtttcttgttagaaataggcccaactgacatctggtggggacagacggtatttgagaagccctgatgctctgggcaaggaaggcggatacctcctacctggagctgggatggatttcttgtctttccccagcctccctggcttggtgacaggcaggagctctgactgctcccactgatttctttctctccattgagcacctgctgtatgccaagcatcctgctgggggcttcaaagatgaaacaaacattgagcctttagggagcttctctgttttgggagtggggtttgatgatctcggtgcagatggtgctttcctgagtgggtgccttctcccactttgtaatgggatcctggcaattgctggtgaggtaggaaggaaactgaggcttcaaatcagcagagccagacttgaaccgggtcttctgcattccagactctgtctttgcttgcatgtgatgcctctgcttctctttatgatggcccgagcaccaaagggacatgttgacaagaaggatgaatgaggcgacaggtgggagggctcctctccagagctggcctcgtccaggctttgaaggaagaggaagccgaacagagtggcatggcaggtgagggagaagctgcatggccagggtcattgccatgatgggaggcacttcctgctgagactggggctggtcctgtgatctggctcatggacacttggaaaaggagatggtaaaagagcaggggctgggcacgatggctcacacttacaatcccagcactttgggaggtcggggtggaaggatcacttgagcccaggagttggagaccagcctgggcaacatagtgaaaccccatctctactaaaaatacaaaaattagccaggtgtggtggtgcacgcctgtagtcccagctacttgggagactgaggcaagaggtggaggctatagttgagccatgattgcaccactgcactccggcctggacaataaagtgggaccctgtctctaaaaaataaaaataaagtgagaggatgacatcatcacag

SEQ ID NO: 69509 - DNA, 1510 bp, Homo sapiens
tgagccagtatgtggttcgcttgtcttctccctctgcaccagcgtcagctacatgccaggtagatacccatccacccacctgggtcccagtgtgaagataacgtggaacagggctgcagccagctctcaatgggtgtgtggtttgtgaaacatctcacatgagcctctgaggtttggggcttgtgtgttccccatggcctgtcattctagggtcccacacctttcctccaagggctcagagctctggccatagaagctgccagggtaccatgttcttatgcctgactggggacaagctcctcgccctctcttctcataaccccctctgtaaacagtgggggtgaattaggtgagtgctgacatgcttgccaggtttgacttttgactgatctgtgaataagagccttcctgaagattcctcttaatgaggctgacttgtatttttacaaagcaaatcatctaagagagatcttggctgtttcttgttagaaataggcccaactgacatctggtggggacagacggtatttgagaagccctgatgctctgggcaaggaaggcggatacctcctacctggagctgggatggatttcttgtctttcmccagcctccctggcttggtgacaggcaggagctctgactgctcccactgatttctttctctccattgagcacctgctgtatgccaagcatcctgctgggggcttcaaagatgaaacaaacattgagcctttagggagcttctctgttttgggagtggggtttgatgatctcggtgcagatggtgctttcctgagtgggtgccttctcccactttgtaatgggatcctggcaattgctggtgaggtaggaaggaaactgaggcttcaaatcagcagagccagacttgaaccgggtcttctgcattccagactctgtctttgcttgcatgtgatgcctctgcttctctttatgatggcccgagcaccaaagggacatgttgacaagaaggatgaatgaggcgacaggtgggagggctcctctccagagctggcctcgtccaggctttgaaggaagaggaagccgaacagagtggcatggcaggtgagggagaagctgcatggccagggtcattgccatgatgggaggcacttcctgctgagactggggctggtcctgtgatctggctcatggacacttggaaaaggagatggtaaaagagcaggggctgggcacgatggctcacacttacaatcccagcactttgggaggtcggggtggaaggatcacttgagcccaggagttggagaccagcctgggcaacatagtgaaaccccatctctactaaaaatacaaaaattagccaggtgtggtggtgcacgcctgtagtcccagctacttgggagactgaggcaagaggtggaggctatagttgagccatgattgcaccactgcactccggcctggacaataaagtgggaccctgtctctaaaaaataaaaataaagtgagaggatgacatcatcacag

SEQ ID NO: 69510 - DNA, 916 bp, Homo sapiens
atctatgggatttagatattctcatactggaaggagaatggggtcttgcaggtggaattgttccttgtaccattttgtgatgaaacagatatcaaagactgcaaatgagaagaaaggtccttggtaggtgggggaagtaaatctctctcttcatctgcatttgaaaaaaatggtcagaatgtttaagagcacaaaaggagagtgaatattaaaaatggcacctcttggaagtcagctgagaaccaaaaacaagggagcctctttccctggaatctcatggagaattagagtggcttgtaattccagagaggaagttgtgaaatctraacactccagttggatgcacagattgtatttaaaatccgtgtgcttcccatttatttcctgcttgatatcttttagagttctgggaagtggtttcgaaggaatgcaaagaaggttctgtgcttcaaaaggtatcaaaggaagattttgtgggtctagtcttgaacaagattgtgaacatggaggacagcacccctgctacccaaagttggttcccacgttgtggaaccctcaccagagagagggaaaccaaaaaaattcaggtgacaaaattggctcactgggtcaatcattcctcagggactgtcttcctctagggataatcttgacagccttagacttttattaaagaaagttatgtgtgtgtgtgtgtgtgtttgtgccatatagattatgagtgtatttgtgtgatatgagcatttgtatgtacacataaattatatgtagatatactatttgtatacatacatatacacacataatttgtctatgtggcatacagatgataaataatgtgtgtatatgtatctatgtagtatgtgtacacatgtgtataaacacatgtatttatatatacatgtaatccatctgt

SEQ ID NO: 69511 - DNA, 951 bp, Homo sapiens
tgcatagggttacttgctaataggctgaatgtttatggactcccaaaatccatatgttgcagtcttaactcccaaggcaatggtattaggaggtggggtccttggcagacaattaggtcatgagggcagggattagtgcccttataaaagagactccaaaaagctgccctacctttttccccacggaggttataatggcaagacagctgtctacgaggaagtgggccctaactagacacaaagtctgtcagcacctttatcttaaacttttcagcctccagaactcagagaaaaaaatctgttgtttataagtcacccagtttgcggtgttttataatagcagcccaaagggactgtgattctttaagaaaacaaacaacgatcagataggaaggaaagtgggtcaaattggaaagaacaaaaatagcttttaagagtctcccccccaccatttatttgctaactcattcaatatttaacaattccatatgatagttcctaatagcatcttgaagaatgaatagtggttgtttaggagacaatgaaggaaagaagaaattgaaaaggttatgtggtcacttggtaagtagctggaataaagatggattgagtttactgactaacttactccctcaagaaaaggacgaattgcttgagaaagaaattatagataggaaaaaatctatatacagttaagccttgaacaaagtgggttttttaactaaatggttccacttatatggatattttctcctgcctctgccacctctgagacagcaagaccaacccctccttcttatcctcctcagcctacttaatgtggagatgatgaggttaaagacctttaggatgatctactttgacttaatgaatagaagatggttttttaatgattttyttaataacattttccattctctagcttactgtattacaagaatacggtctata

SEQ ID NO: 69512 - DNA, 471 bp, Homo sapiens
attccttctaaatatatatacatatatattccttctaaatatatatacatatatattcctcctaaatatatatacatatatattcctaaatatatatgtatattcctaaatatatacacatatattcctaaagtatatatatgtgtgtatatatatatatatatatatttccaatttcattaaattacatccatcaaatcctaaaggttttctgcaagaacaattaagtgcatagaagcaaaaactctacaycagaggttaataagcgggtacctgatttttaagatatcagaacatactttatacaaagcataatgttcaattgatttagatgagacatgggtgcaaaggtcagttctgtcatttactagtgatatgactgaacaatttgtgtaactctctgaactcagtatctttatctggtaaatagagataataatatgtctggcacataatatgcccatcacatat

SEQ ID NO: 69513 - DNA, 669 bp, Homo sapiens
gcccacctcggcctcccaatgtgctggggaactattttctgttatctgttctggactcacacattctggatgactggaattctttggacccatatgagcctctgcaaagacattggtatgtgctggtcatattcaaatgtgagattcataagaatagaataatttgtgtatggaattacctgtcctgggttacctaatccagagatccagcaatttttcttaattcctgaatttccaggcattgtaaagcatacttmactgtgcttggcacagattaattagtctatatattatatataggtacaaaaagtataagcttattctctcctattctaatagaaatgaggcatttttaacttgcttggaaatagcaattcataccattgcatagtggttatttgcaaatcttcctaataaactccaggaataaattttaggtaaatgtatgatgcctacaaatatagtaattgtcatagagaatgctagatttcaagtgacagaaacttttacttcaatacagcttaatcaaaataataaatttattagtccgtttagttaggacactaggatggttcacaggatcaaaagatgaaccacagacatcagggtctcaaagtttggaactgctctcaatgtctgctatgattcacttgtattcatctttcttac

SEQ ID NO: 69514 - DNA, 594 bp, Homo sapiens
cccaccagggcctgacatacagcaggtactcaatatatgtttgctgggtgagctggagaggccacccaccttattccagaaggcagtggggtggggygcaggagggccctggacgccctgggtgcagagctgagcgggggacagtgagtagggttgggggagcccagcagaaatttctgctgcagtgctgctgctgctcagagacactgcccctccttggccactctgcgtggccttttcctgcagttcccccaaaccccctctgagtcctgggacagagaataatgcatcctctggggctccccagggccctgctgtttgacttgtctctcggtggagcagggcatggcctctctgccacgagaaagtgccagtcgtcctgctgccaccctaacccttaacagactgaggaggtgggcagcacagagtccacccccagggcaaaacccgtcctgctcagagccatggagtccctgaagcagccatggtggtctgctaagcccctgacccacgccaccctgactctgcagggagcaagttagggctcaccccaggcagggtgaggcacctcctccaggctcccgaagcctccat

SEQ ID NO: 69515 - DNA, 738 bp, Homo sapiens
ccggtcctggtccagcttccctttcaagcatagtgaagtgcatttgttagcttgcagccaaccctgggaaatcatgagaatttgttcccaagtcaactcattctccagcgtccacagtgacgtattcactcacccagttgagcgcctagtgtatactagaccctgtgacagcaacaggagtgcaaaggtgactaagacgtggcccctgctttttttttttttttttttttttgagacggagtctcgccctgttgcccaggctggagtgcagtggtgcgatctcagctcctcacaagctctgcctcctaggttcaagcgattctcctgcttcagcctcccaagtagctgggactacaggtgtacaccaccatgccggctaattttttgtatttttagtagagacggggtttcactatgttggccagggtaatctcgaactcctgacctcatgatccgcccgcctcagcctcccaaagtgctgggmttacaggcatgagccaccacccctggccggccccgcttttaagagaggggagagaagacctgggccttagaagagctcagaggaaccacaattgactctgcagtcaaggagaggaggctcactgcggatgtggtatttgagccttgaaggatgagtgtggtttcatcaagtagaaaaggcagggatgggaaagggaggtggtccaggcaggggtgatggtgtgggcaaagccttgctgatattaaagaacatag

SEQ ID NO: 69516 - DNA, 804 bp, Homo sapiens
taggaggctggctcttgcgactcagcttggctgccattaaggccaaggagaaaggccagactcactaaggacctgctggcagtaccatccttggagcccaaaccagagtaaccttcctccacccctcagggaccttaagctgctggtgagtgtgaagcccacagaactgagggcttagcgccacctgctggccacagagaagacttacttcggcagagaaaaatcaggaccactggtcctaggttttccaccaactctgagggagacccccagccttaaggcataacccagggaggggctggaaagctccaggcatagagaggcagttcgaccaagcctccctcctccgcgaaggtgttcttgcccactgatggtgctacctccatctgggggcaccctttctctatggcactggcctcaactggacaaagaagttcacctgagcactactcagcccagcaggaacttctgtgataattttgtttgtgatattctgcctccaggattgcatcccttagtcatcatgtgacagcagaggaagcagtctggcccatccacacgctatgtgcagagctgtctcaactccagggcccctgaaaaggagaagggaagtaccatgtrtcactgtggcccagcaggactatgagagaagcactgttcttctttgagtttgtagatgaggacacagggtcagaaagggtggtgtcttagaccattcaggcttctataacaaaataccatagactgggtggcttataaacaatagacatttattactcacagtctggaggctaggaagtccaa

SEQ ID NO: 69517 - DNA, 1433 bp, Homo sapiens
tggagaggactcatgcagcttctccagggcccactttctctccacgggcaggaggctctgtccttcacctgagctcctcccccacatctttttctagggagaactttcccagggagcttgcattcacagcaggagagctgccctgacactccacaagtctctgggctccccagggcctctgaggtctccccaggcccagatatcagacactctgtgttgtaccaagtgtccagataactttagcaagaagacatgaattccgttcatcaaagtcatgttgacctcaggtccgaagaacaacagattgattccagcttgaaagaagctggggaaaggaagaacagtggggttagtcagagctgggccagaagtgcctttcgttgtgctgsattctgggttattggcagcccctctgccagagctacccgtctagggcactaatctatgggaggggaagcaggtgctacccacaccctattctagttccactctgggcaggtccaactctggagtgatgtgaagagcaggctgcctggactggccaaactgggtccaggagtgtgaacttctgcctttcccccgacctcaatttctggcaggcaccaaggccaatgagtgaaacgagtaatacaaaatgcctgtgcagctccacagcttattaccttccgtgggggaagcaacaatgttcaggtatgcagcacaggttggcactgcctagaagctgtctatagcttataggatccagttaacccttttgttagtcatgcacctcccctgcatgaaacaatattgttccttgcagcacaaatatgtcccaacctcctcctccccagatcatcagccccgaactgaagcaaaacagactttgggtagtctttcctctgtttactctttacttcatttgatcaattccaatttttttcataatgccattattattgagggaaggggagtaacttcaaggtaatccagagagaagcaaatgcaatacagttctgactgagatgcagattcctttttgttaaatgctgactgtgtccttggtttcccattcacctgggaagtagaagaataaaaatcattccatagttccatccaaggagggcagctgcaacagtgtgctcttgagcaggctgtctgggtcatcaggaaaagccattccagttactcacgcattctctgagaaaccttgtcatctctgccatctgtctctgtgtaggaactgccaaagtccttcggttccccatctcaaataagcagtgcatgggttacttccctcattctaatccttcagtccctccttgtgtccgtttggatcttccaggaagcagctttcaagatggagttagaagtacgagtaatgaggggtgattaccgtgaaagataaaggggagaggctgtaggggggaaggcctcagaccaccatgcaggct

SEQ ID NO: 69518 - DNA, 1433 bp, Homo sapiens
tggagaggactcatgcagcttctccagggcccactttctctccacgggcaggaggctctgtccttcacctgagctcctcccccacatctttttctagggagaactttcccagggagcttgcattcacagcaggagagctgccctgacactccacaagtctctgggctccccagggcctctgaggtctccccaggcccagatatcagacactctgtgttgtaccaagtgtccagataactttagcaagaagacatgaattccgttcatcaaagtcatgttgacctcaggtccgaagaacaacagattgattccagcttgaaagaagctggggaaaggaagaacagtggggttagtcagagctgggccagaagtgcctttcgttgtgctggattctgggttattggcagcccctctgccagagctacccgtctagggcactratctatgggaggggaagcaggtgctacccacaccctattctagttccactctgggcaggtccaactctggagtgatgtgaagagcaggctgcctggactggccaaactgggtccaggagtgtgaacttctgcctttcccccgacctcaatttctggcaggcaccaaggccaatgagtgaaacgagtaatacaaaatgcctgtgcagctccacagcttattaccttccgtgggggaagcaacaatgttcaggtatgcagcacaggttggcactgcctagaagctgtctatagcttataggatccagttaacccttttgttagtcatgcacctcccctgcatgaaacaatattgttccttgcagcacaaatatgtcccaacctcctcctccccagatcatcagccccgaactgaagcaaaacagactttgggtagtctttcctctgtttactctttacttcatttgatcaattccaatttttttcataatgccattattattgagggaaggggagtaacttcaaggtaatccagagagaagcaaatgcaatacagttctgactgagatgcagattcctttttgttaaatgctgactgtgtccttggtttcccattcacctgggaagtagaagaataaaaatcattccatagttccatccaaggagggcagctgcaacagtgtgctcttgagcaggctgtctgggtcatcaggaaaagccattccagttactcacgcattctctgagaaaccttgtcatctctgccatctgtctctgtgtaggaactgccaaagtccttcggttccccatctcaaataagcagtgcatgggttacttccctcattctaatccttcagtccctccttgtgtccgtttggatcttccaggaagcagctttcaagatggagttagaagtacgagtaatgaggggtgattaccgtgaaagataaaggggagaggctgtaggggggaaggcctcagaccaccatgcaggct

SEQ ID NO: 69519 - DNA, 1672 bp, Homo sapiens
aaaaaaagtcacactacctaggtgcttggcccaggtatatgttaagatcctaactgtatgccaggctcagacaagagagttaaattactcaggtgctgggcaaagctatatatcacaatcacacctgcagaaaggttaagtgatatgatttacaatcccacacatgtcccagctctatgtatcagagtgaactcctcctgtgaactgggtctcagtaagggtgtcacaatgtcaaaggtggactggatttgtgcatgacagccacaatcacaccygcagactgcatctcggtagaggagtcacagcctccaggtgtgctgcctcctggtctgaggtcatcatctcagctgtggaccacatccacctatgagagtcacaactccaacttttgactgcttctggttgtgagattcagaatctcaacagtgggctgtgtccatgtaggaggttgataatccttactctgcctgtgtgcataccagagtcacagtctcacctgtgtgccagaccctgttatgaccctctcaggaccaatgggggactttgtacaatatgtatagtgtcataatcctctgctacctttatgcaagcaggagacctagaaccttatgtgctgccctaagcctagttaacagagtcaacgtctctccatttggctgagtccaggtgaaagagccttcactattttctaagctggatccagaaatgagtcaccatctcacctgtgatcagattgaaatatcacagtcacaatcccaactgtgaactgtgtcagggcatgaaatttaggacctcaccagtgggctctgtttatatgtgagggtgatggtactgtcagcggtgtctgcataacaaagtcacaatctcacctgtgtgctgggccctgttaattaatctctataccaccagagggctttatacaatatgcatgagtgtcataatcttctgtgactttcatacaggtaggagacccaggaccctattaatttccttaagcctagctataagagtcagcatctcttctattgactgggtcaagatatgagagttctcactgtgcctgtgagctaactccataaacaggtcaacatcacacctgtggctggatctacacatgacagtcaaaattccaactgtggactatgtccgtgtacaagattcaggacctcaccagagttctctgtccatgtgcgatgatgacactcataactgttggctggatgaacatccaagagtcacaatttcacctgtgtgctgggtgcagttttatgtaaaattctcacctgtggaaaagaaaccaactaggagggtcgcatattttaagtgctgggctaaagatatgctacaatatctcctatgggcaaggcccaggaaggagagtcaaattacctgtgtgctgtgaccagtgatatgtcacaatgccttctatgggaatggcctaggcaggagttttcaatttcccttgtgctggtccaacgatatgtcacaatccccctcaactggcatggcctgaagagaatagaagagtcacagcacctaaattatggccacagagatatatcaccatacctcctgtgggcagggcctaggatagaagcttacattacctgcaatctcggctcagtaaaatgagtcaatctctcctacggctagggcccaggcagcagaggag

SEQ ID NO: 69520 - DNA, 1672 bp, Homo sapiens
aaaaaaagtcacactacctaggtgcttggcccaggtatatgttaagatcctaactgtatgccaggctcagacaagagagttaaattactcaggtgctgggcaaagctatatatcacaatcacacctgcagaaaggttaagtgatatgatttacaatcccacacatgtcccagctctatgtatcagagtgaactcctcctgtgaactgggtctcagtaagggtgtcacaatgtcaaaggtggactggatttgtgcatgacagccacaatcacacctgcagactgcatctcggtagaggagtcacagcctccaggtgtgctgcctcctggtctgaggtcatcatctcagctgtggaccacatccacctatgagagtcacaactccaacttttgactgcttctggttgtgagattcagaatctcaacagtgggctgtgtccatgtaggaggttgataatccttactctgcctgtgtgcataccagagtcacagtctcacctgtgtgccagaccctgttatgaccctctcaggaccaatgggggactttgtacaatatgtatagtgtcataatcctctgctacctttatgcaagcaggagacctagaaccttatgtgctgccctaagcctagttaacagagtcaacrtctctccatttggctgagtccaggtgaaagagccttcactattttctaagctggatccagaaatgagtcaccatctcacctgtgatcagattgaaatatcacagtcacaatcccaactgtgaactgtgtcagggcatgaaatttaggacctcaccagtgggctctgtttatatgtgagggtgatggtactgtcagcggtgtctgcataacaaagtcacaatctcacctgtgtgctgggccctgttaattaatctctataccaccagagggctttatacaatatgcatgagtgtcataatcttctgtgactttcatacaggtaggagacccaggaccctattaatttccttaagcctagctataagagtcagcatctcttctattgactgggtcaagatatgagagttctcactgtgcctgtgagctaactccataaacaggtcaacatcacacctgtggctggatctacacatgacagtcaaaattccaactgtggactatgtccgtgtacaagattcaggacctcaccagagttctctgtccatgtgcgatgatgacactcataactgttggctggatgaacatccaagagtcacaatttcacctgtgtgctgggtgcagttttatgtaaaattctcacctgtggaaaagaaaccaactaggagggtcgcatattttaagtgctgggctaaagatatgctacaatatctcctatgggcaaggcccaggaaggagagtcaaattacctgtgtgctgtgaccagtgatatgtcacaatgccttctatgggaatggcctaggcaggagttttcaatttcccttgtgctggtccaacgatatgtcacaatccccctcaactggcatggcctgaagagaatagaagagtcacagcacctaaattatggccacagagatatatcaccatacctcctgtgggcagggcctaggatagaagcttacattacctgcaatctcggctcagtaaaatgagtcaatctctcctacggctagggcccaggcagcagaggag

SEQ ID NO: 69521 - DNA, 1084 bp, Homo sapiens
atctgggagtgaccaccaaaatgtctttgaaatcatgatataaaaagactagtaacaggacttggaggaaaaattgaggaaggaagaatagggaaagagggcacaggcaaatccatgaaagagcaccaggaccatgaatcaatgccactgtttcttccactgatggtctaaaaacaaaagaacagaaagcatccctgtaggttaattgaatatttctaatgtttccatgtcatatttatcatttcctgacaaaatcgttttgcaaacttgaccatgaattcttatgattccaactatcccatggtttgccatcatttctaaaacaaaatcaaacatcttcactgcagaaataagagcttgcatgatcataccctaaatttctttattcagcctttaaaaattgttcctagaaacaagccacactggtcacagcaacattagctgatattcagtctctctgtctcaagaccctcacataggttattcattccacttaatcaccctttcagtgacctaccactgctgccttttgtcagtgcccaataaatacaactttaccagtgtaaattgttttcttcttcgattatcaaagcatcaagtagagtcagacactcaaggaaaacttctccaaccctctcagaatgtgttaaccacctccattcccaatattcactagatcctactttgttatgattaacagtatgtttaatgttcattttatcccgctgaaatgtcaactccataaaggcagagatcatgcctgtcatcttaatcagaatatcctaaagtcaaacaggaggtacggaataattagaaggtaataactattagttaattggtgacaatagttaaatacaaaaatcttaaatatactttttaacaataaaagattaaaaaggctactaagaaacgtgttcatttctataatgattcttatcrtaagtacaatcataaggagagtagtattgtttacagttttaaaaaatttatttatttattttaaattaagcatgaaatttatatatactctcagaaaaacattagaggaatgcagccctatagaacttgctgcagtgataaaagc

SEQ ID NO: 69522 - DNA, 845 bp, Homo sapiens
tccatatgctgaacgctggttccccgggtccccttatttctttctctatactttgtctctgtgtctttttcttttccaagtctctcgttccacctcacgagaaacacccacaggtgtggaggggcaacccatcccttcacatacattttcattttttaaaatcacaaatagaatctatagaggtccaaatccacttacatcaggaaggtcattatcaagacagattgtgcatggtacttttaaaccagacagaatagttgttgtatttgtattccatgttgtgcagagatctaaaatggcatgtaaacatcaattaaatcaattaaatctcaaccgagattcaagatgaatctcagcttcgccaccttgttcagagatagctgaacaagatgcaacagccccttctatactgatgatcaagagaaatcacagcaccttcaaaaattagacatctcacagaaatggcccctttgctcttggaatgaaagacgtgagggctggaaaggaagagggtggcctggaggagtagggatcacattcattttacgaaacccacatggctgatggaacgatggttaggaggtcaccccacacccaacctyccatctcccagccatggtcaaagttgaggtcatacattccacaaagtcagcctcacaagatatgaatgctcccatcaacacctgtgcaaaaggaaaaaaaagtccttacataagaggtggctgaaaaatactgtaaagaaccaaaagtaattatgaaatatgaattttcaagtttaaaaatgtccctcctatgagttagtaacatgaattgggtgaggataaccttccaggaagtctggggta

SEQ ID NO: 69523 - DNA, 667 bp, Homo sapiens
aaggaaaagttccacaatgggtctaggctaaagtctgatttctgaagatttcaaggggaatactagagtggctgatttctagaatatttttcctgaatgagcccttgatgtatctttacaaagtctgggtccttcttactattaaatgtgcgtgctgcaattctttttttttttttggagccatagtcttgctctgtygcccagactggagtgcagtggcacgatctcggctcactgaaagctctgcctcccgggttcacgccattctcctgcttcagcctcctgagtagctgggactacaggcacccgccacccagcccggctaattttttttttgtatttttagtacagactggatttcaccatgtcagccaggatagtcttgatcttctgacctcgtgatccgcccgccttggcctcccaaagtgctgcgattacaggcgtgagccactgcgcctggcctgcaattcttaaaaatcagcatcctcccaaccagcaccaattcactgacaatacagagacctggctctggaccagtgcaggtgctgtagacagagaacaagattccaggaaaccacaccttaaagatggaaatctgggattggttatctctgcaggttgtgtttaaaggcagtaacggccacattgctggtggaaagtaggatcc

SEQ ID NO: 69524 - DNA, 667 bp, Homo sapiens
aaggaaaagttccacaatgggtctaggctaaagtctgatttctgaagatttcaaggggaatactagagtggctgatttctagaatatttttcctgaatgagcccttgatgtatctttacaaagtctgggtccttcttactattaaatgtgcgtgctgcaattctttttttttttttggagccatagtcttgctctgttgcccagactggagtgcagtggcacgatctcggctcactgaaagctctgcctcccgggttcacgccattctcctgcttcagcctcctgagtagctgggactacaggcacccgccacccagcccggctaattttttttttgtatttttagtacagactggatttcaccatgtcagccaggatagtcttgatcttctgacctcgtgatccgcccgccttggcctcccaaagtgctgcgattacaggcgtgagccacygcgcctggcctgcaattcttaaaaatcagcatcctcccaaccagcaccaattcactgacaatacagagacctggctctggaccagtgcaggtgctgtagacagagaacaagattccaggaaaccacaccttaaagatggaaatctgggattggttatctctgcaggttgtgtttaaaggcagtaacggccacattgctggtggaaagtaggatcc

SEQ ID NO: 69525 - DNA, 1289 bp, Homo sapiens
atcagacctctcccagtgtgggcataaggatacaagatcatgtcaatattgacattcataatggctgggcgcagtggcacacgcctgtaatgccagcactttgggaggctgaggtgggcagattgcttgaaccccagagttcgaaaccagcctgggcgacttggcaaaaccagtctctactgaaaatacaaacaattggctgggcttggtggcgcacacctgtagtctcagctacttgggaggctgaggtgggaggattgctcaaacccagggaggttgaggcttcagtgagctatgatggcattgctgtactccaacctgggcaacagagtgaggccctgtctcaaaacaaaaacaaagacaaaacaacattcataatagtagcaatagctactatgtgccaagcccaggcacctcttcgagtctttgctgtcaccctatcaggtaagcgtgcttagaagttacacgaagcccacggctcagtgtttggcccatggtaagggcctaaaaagggatagccccagtggtggggatgctgctgctgctgaccattaaccccagtctgctccaccttcttccaggcagtctgtgagatgtttcatgtccgaggcaaacagcacattcagatccccaagctctacacctccagtgtgaccaggcacctgcaccacttcaggctcatgcaggactcacagcctttggacctcagctaaaggacttgcttctcttcagcacacggggcttgtttgtgttggggtctgagccctgagcccatggtcaaggagacccccaggtctttctgaacagagacagctggcctgrgggcctccctctcactgcgtgcaagaggctgttagggtgcaagactcaaggcgctgagggaggctgtttcaggagggagccccaggagggtggtggagacagaagggggcagcatctgccgaggccctactgtgtgcctggcaccgtgtggggtttctggcccatatgggctaagtgaccctgcacactcctcttaggagaaaggctcagatggagaaattgcagttcaggaaggtgaagcaagctgctagcctgtggccatgttgggatctgggcctcagccttccagccacaaaggcagccaagtgtcataaagaaggcatcacagaggcaattccaggctgtagtggtgaactttccactctgcatccccgggtgctgtgccctgtgccctgtgccctgtctaaggtagccctgcgggtttctatatgtttaagttatccccagcatcaatgatgctctcctgt

SEQ ID NO: 69526 - DNA, 1289 bp, Homo sapiens
atcagacctctcccagtgtgggcataaggatacaagatcatgtcaatattgacattcataatggctgggcgcagtggcacacgcctgtaatgccagcactttgggaggctgaggtgggcagattgcttgaaccccagagttcgaaaccagcctgggcgacttggcaaaaccagtctctactgaaaatacaaacaattggctgggcttggtggcgcacacctgtagtctcagctacttgggaggctgaggtgggaggattgctcaaacccagggaggttgaggcttcagtgagctatgatggcattgctgtactccaacctgggcaacagagtgaggccctgtctcaaaacaaaaacaaagacaaaacaacattcataatagtagcaatagctactatgtgccaagcccaggcacctcttcgagtctttgctgtcaccctatcaggtaagcgtgcttagaagttacacgaagcccacggctcagtgtttggcccatggtaagggcctaaaaagggatagccccagtggtggggatgctgctgctgctgaccattaaccccagtctgctccaccttcttccaggcagtctgtgagatgtttcatgtccgaggcaaacagcacattcagatccccaagctctacacctccagtgtgaccaggcacctgcaccacttcaggctcatgcaggactcacagcctttggacctcagctaaaggacttgcttctcttcagcacacggggcttgtttgtgttggggtctgagccctgagcccatggtcaaggagacccccaggtctttctgaacagagacagctggcctgagggcctccctctcactgcgtgcaagaggctgttagggtgcaagactcaaggcrctgagggaggctgtttcaggagggagccccaggagggtggtggagacagaagggggcagcatctgccgaggccctactgtgtgcctggcaccgtgtggggtttctggcccatatgggctaagtgaccctgcacactcctcttaggagaaaggctcagatggagaaattgcagttcaggaaggtgaagcaagctgctagcctgtggccatgttgggatctgggcctcagccttccagccacaaaggcagccaagtgtcataaagaaggcatcacagaggcaattccaggctgtagtggtgaactttccactctgcatccccgggtgctgtgccctgtgccctgtgccctgtctaaggtagccctgcgggtttctatatgtttaagttatccccagcatcaatgatgctctcctgt

SEQ ID NO: 69527 - DNA, 1289 bp, Homo sapiens
atcagacctctcccagtgtgggcataaggatacaagatcatgtcaatattgacattcataatggctgggcgcagtggcacacgcctgtaatgccagcactttgggaggctgaggtgggcagattgcttgaaccccagagttcgaaaccagcctgggcgacttggcaaaaccagtctctactgaaaatacaaacaattggctgggcttggtggcgcacacctgtagtctcagctacttgggaggctgaggtgggaggattgctcaaacccagggaggttgaggcttcagtgagctatgatggcattgctgtactccaacctgggcaacagagtgaggccctgtctcaaaacaaaaacaaagacaaaacaacattcataatagtagcaatagctactatgtgccaagcccaggcacctcttcgagtctttgctgtcaccctatcaggtaagcgtgcttagaagttacacgaagcccacggctcagtgtttggcccatggtaagggcctaaaaagggatagccccagtggtggggatgctgctgctgctgaccattaaccccagtctgctccaccttcttccaggcagtctgtgagatgtttcatgtccgaggcaaacagcacattcagatccccaagctctacacctccagtgtgaccaggcacctgcaccacttcaggctcatgcaggactcacagcctttggacctcagctaaaggacttgcttctcttcagcacacggggcttgtttgtgttggggtctgagccctgagcccatggtcaaggagacccccaggtctttctgaacagagacagctggcctgagggcctccctctcactgcgtgcaagaggctgttagggtgcaagactcaaggcgctgagggaggctgtttcaggagggagccccaggagggtggtggagacagaagggggcagcatctgccgaggscctactgtgtgcctggcaccgtgtggggtttctggcccatatgggctaagtgaccctgcacactcctcttaggagaaaggctcagatggagaaattgcagttcaggaaggtgaagcaagctgctagcctgtggccatgttgggatctgggcctcagccttccagccacaaaggcagccaagtgtcataaagaaggcatcacagaggcaattccaggctgtagtggtgaactttccactctgcatccccgggtgctgtgccctgtgccctgtgccctgtctaaggtagccctgcgggtttctatatgtttaagttatccccagcatcaatgatgctctcctgt

SEQ ID NO: 69528 - DNA, 1289 bp, Homo sapiens
atcagacctctcccagtgtgggcataaggatacaagatcatgtcaatattgacattcataatggctgggcgcagtggcacacgcctgtaatgccagcactttgggaggctgaggtgggcagattgcttgaaccccagagttcgaaaccagcctgggcgacttggcaaaaccagtctctactgaaaatacaaacaattggctgggcttggtggcgcacacctgtagtctcagctacttgggaggctgaggtgggaggattgctcaaacccagggaggttgaggcttcagtgagctatgatggcattgctgtactccaacctgggcaacagagtgaggccctgtctcaaaacaaaaacaaagacaaaacaacattcataatagtagcaatagctactatgtgccaagcccaggcacctcttcgagtctttgctgtcaccctatcaggtaagcgtgcttagaagttacacgaagcccacggctcagtgtttggcccatggtaagggcctaaaaagggatagccccagtggtggggatgctgctgctgctgaccattaaccccagtctgctccaccttcttccaggcagtctgtgagatgtttcatgtccgaggcaaacagcacattcagatccccaagctctacacctccagtgtgaccaggcacctgcaccacttcaggctcatgcaggactcacagcctttggacctcagctaaaggacttgcttctcttcagcacacggggcttgtttgtgttggggtctgagccctgagcccatggtcaaggagacccccaggtctttctgaacagagacagctggcctgagggcctccctctcactgcgtgcaagaggctgttagggtgcaagactcaaggcgctgagggaggctgtttcaggagggagccccaggagggtggtggagacagaagggggcagcatctgccgaggccctactgtgtgcctggcaccgtgtggggtttctggcccatatgggctaagtgaccctgcacactcctcttaggagaraggctcagatggagaaattgcagttcaggaaggtgaagcaagctgctagcctgtggccatgttgggatctgggcctcagccttccagccacaaaggcagccaagtgtcataaagaaggcatcacagaggcaattccaggctgtagtggtgaactttccactctgcatccccgggtgctgtgccctgtgccctgtgccctgtctaaggtagccctgcgggtttctatatgtttaagttatccccagcatcaatgatgctctcctgt

SEQ ID NO: 69529 - DNA, 494 bp, Homo sapiens
ttttgtggccaccccaggtgtccagatatacacaggagactgtggctggggacccagatgaaagtcgagagtgtggtgagyacttccctgtccggatcatgtgagggatgggctcggtgtcacagtgtcctgcccagcccacctggccggacctccctctgggccagaacagcggatcatgaggacagtgtgaggaagctgccctcgggccagtcggggtctgaccccagggctccccaggccccgctgggcacacgtagacttactctgctgaaccttaaaggcgattcttgttatcggcatcaacgcctgttcgccttctaccagatacacgtcccacaggcgcagggtgagcccgagagagatctgtggggacagcaggtgtgaaagaacctggtccttccaggctggggctggtggctcgagctgcgcacactggggcttcagtctccagagtcagtgaccttccccatgagggtcgcctgagccctcca

SEQ ID NO: 69530 - DNA, 494 bp, Homo sapiens
ttttgtggccaccccaggtgtccagatatacacaggagactgtggctggggacccagatgaaagtcgagagtgtggtgagcacttccctgtccggatcatgtgagggatgggctcggtgtcacagtgtcctgcccagcccacctggccggacctccctctgggccagaacagcggatcatgaggacagtgtgaggaagctgccctcgggccagtcggggtctgaccccagggctccccaggccccgctgggcacacgtagacttactctgctgaaccttaaaggcgattcttgttatcggcatcaacgcctgttcgccttctaccagatacacgtcccacaggcgcagggtgagcccgagagagatctgtggggacagcaggtgtgaaagaacctggtccttccaggctggggctggtggctcgagctgcgcacrctggggcttcagtctccagagtcagtgaccttccccatgagggtcgcctgagccctcca

SEQ ID NO: 69531 - DNA, 2344 bp, Homo sapiens
tcctcctcaggaaaatagaggaggaacaaggcggcgatgtggctcaggtccctgcagtagcccacctcctgcaagagccagagtcaccatggaaggacatcacctgggagggctgaggtcacctgggaggactcatgtcattggagagggcagaggtgactggagaggcttcctctgaaggagaggcttcctctgaaaaagaggcttcctcaggatgcacattcatttcatgacaagagccaagtccatcaggcacttcagcaccttgtccaaaatgtctgctgatagcaccatcctgtgtgcgatgctgccaagctcctgggctttggggcagccccaggaggagggcgtcatttcttgttctgagaagtggtggtcaggcccaggtgacaccaggagtccsggccctgactcctttgtgtctcagcttgaccccttgagaccacccccttccttggaggtttatgccagcggtgagctgacatcctacctcctatatcctggtgggtcacaaatactaactttaaaagaagcaacgacacccccaccagacacccactcctgtcaatatggaaatatggcccgggaacctcactgccgggaatactcaccgggttatactcctcatatgccaggaggatgtggagtagttcccgctgcctaggaaacagagaaagggggctttggtttgttttgtgcagatgttgttaatttcactttgtctacaaagcctaacagcaaatcccatttcaggttcagatgtttcaccagataagcagtgagctcttcagggcctgagactcttgaagaaatgtttcagtaaaatccacatctgtgacatgcaaatagcccagttgtacagtgacttgcctgatccttttcactctgaatgatttttttttttttttcagtttgcacacacgccagttcagtctgtgtgtgtacagttcctccacggttccaaaccaatgtgcagagtctcccggccaccgctccagcccctcctggggcgactccttcatcctccaagtctccagggtggcccctatgcacccagcctctccccgatccgtcagcccctggccacccagactgcttctcagtccctgtggtttggccttttccagaatggcctaggaatgggaatcctacggtggtagcttattgggtctggcttctgtccctcagcaaaatgcatctaggatccacccacgttcgtgcgggcatcaccggctcgttcccttttctcactgggtcttccgtttgaagggaggaccagccttgctctccccattcccgtgttgaaggccgtccccgaaggctccgtgtgtgagtgacgaggagtcaagcagtgaacctggcatgctggtttcatgtggatgtcagtttccaaatcagtgggttcaatatctgtgacactttggggatgtgtggttcaagtccatcgagctttgtgagccactgcccaactggctgccaacgtggctgtgccatgtcatgttcccagcggacctggatgagagtttccaggacccctaattctcccagcatttggtgctgtcactgttgcctgggggggctcatgggccctctatcctgccaccctcccgtgggtcctaccatgggtccccatgggtcagggagagcacccttcaccattgtgcatgattttgtttgctgccttccatctcctcaggatcctcctgggttctggccccacatgttccagtctggcccagggcttggaaccagggaggtgctcggttcatggtgccggctgctccctgggccgggagagctcttggcagctgtgtcatccctcctgggtgaccctggcttctgctccggggaagcccccatccctctcattcaccccatctctgctgggaccctgtggctcccgtaggcttacttggttccgtatcgatccctgaagaacatatgcttccttaatgtcccgcttatgtcccggtcgatgcgctggatgtgctcagatgacctcttgcccttctccttcatgatctgtagggcagggccaagcggaggaagcagtctcagaacagatggaagactccctgcccccagtggcagtcagcccacagtcagcacttcgggaaggaaggacagaaggaaggtttccttctgcagaaagctgcattttggcttgttactgaagccagggagggtcaccagagctgagtttgtctgtggtgactgtgtcaccatctgtgcccagggtgttcatctgaccttcacccccagctccccagggtggtcttgacgttccctccagctggagacctgggccccgacacggcctgtcctgtttgttgtgctctggctg

SEQ ID NO: 69532 - DNA, 2344 bp, Homo sapiens
tcctcctcaggaaaatagaggaggaacaaggcggcgatgtggctcaggtccctgcagtagcccacctcctgcaagagccagagtcaccatggaaggacatcacctgggagggctgaggtcacctgggaggactcatgtcattggagagggcagaggtgactggagaggcttcctctgaaggagaggcttcctctgaaaaagaggcttcctcaggatgcacattcatttcatgacaagagccaagtccatcaggcacttcagcaccttgtccaaaatgtctgctgatagcaccatcctgtgtgcgatgctgccaagctcctgggctttggggcagccccaggaggagggcgtcatttcttgttctgagaagtggtggtcaggcccaggtgacaccaggagtccgggccctgactcctttgtgtctcagcttgaccccttgagaccacccccttccttggaggtttatgccagcggtgagctgacatcctacctcctatatcctggtgggtcacaaatactaactttaaaagaagcaacgacacccccaccagacacccactcctgtcaatatggaaatatggcccgggaacctcactgccgggaatactcaccgggttatactcctcatatgccaggaggatgtggagtagttcccgctgcctaggaaacagagaaagggggctttggtttgttttgtgcagatgttgttaatttcactttgtctacaaagcctaacagcaaatcccatttcaggttcagatgtttcaccagataagcagtgagctcttcagggcctgagactcttgaagaaatgtttcagtaaaatccacatctgtgacatgcaaatagcccagttgtacagtgacttgcctgatccttttcactctgaatgatttttttttttttttcagtttgcacacacgccagttcagtctgtgtgtgtacagttcctccacggttccaaaccaatgtgcagagtctcccggccaccgctccagcccctcctggggcgactccttcatcctccaagtctccagggtggcccctatgcacccagcctctccccgatccgtcagcccctggccacccagactgcttctcagtccctgtggtttggccttttccagaatggcctaggaatgggaatcctacggtggtagcttattgggtctggcttctgtccctcagcaaaatgcatctaggatccacccacgttcgtgcgggcatcaccggctcgttcccttttctcactgggtcttccgtttgaagggaggaccagccttgctctccccattcccgtgttgaaggccgtccccgaaggctccgtgtgtgagtgacgaggagtcaagcagtgaacctggcatgctggtttcatgtggatgtcagtttccaaatcagtgggttcaatatctgtgacactttggggatgtgtggttcaagtccatcgagctttgtgagccactgcccaactggctgccaacgtggctgtgccatgtcatgttcccagcggacctggatgagagtttccaggacccctaattctcccagcatttggtgctgtcactgttgcctgggggggctcatgggccctctatcctgccaccctcccgtgggtcctaccatgggtccccatgggtcagggagagcacccttcaccattgtgcatgattttgtttgctgccttccatctcctcaggatcctcctgggttctggccccacatgttccagtctggcccagggcttggaaccagggaggtgctcggttcatggtgccggctgctccctgggccgggagagctcttggcagctgtgtcatccctcctgggtgaccctggcttctgctccggggaagcccccatccctctcattcaccccatctctgctgggaccctgtggctcccktaggcttacttggttccgtatcgatccctgaagaacatatgcttccttaatgtcccgcttatgtcccggtcgatgcgctggatgtgctcagatgacctcttgcccttctccttcatgatctgtagggcagggccaagcggaggaagcagtctcagaacagatggaagactccctgcccccagtggcagtcagcccacagtcagcacttcgggaaggaaggacagaaggaaggtttccttctgcagaaagctgcattttggcttgttactgaagccagggagggtcaccagagctgagtttgtctgtggtgactgtgtcaccatctgtgcccagggtgttcatctgaccttcacccccagctccccagggtggtcttgacgttccctccagctggagacctgggccccgacacggcctgtcctgtttgttgtgctctggctg

SEQ ID NO: 69533 - DNA, 2391 bp, Homo sapiens
cttttggaattttatcaaactgccaaagtgaacagcaacctggggtcaggtccagcagggactgctgcccctcccagtgacagcgtgttgccctcacccgccaccgctcaggccagctgcttcctctgcctcactgaccacccgcccagtccctacgtccctggaccagcccctccacgcatcaggctcttaccttcgcctcccgcgcagtcagaggaggcagctccgtctcactgtaaggcaacccaggcagagctgaggaactgcacggggcctggagcggccccagcctgggtgccgacccccagaaaggactggctctgtccctttccagctcagggctcagcccaggagaaggcacagggaagggaggacaagggccttcctgtggggctgactcccaggaggggcaggacctgggagaagaaggagtgtagggacagcctggccggggttactggggcccctggcgtggggggcggtcaggctgcccartggggctgcccgtcctggactcgaggtggtgctttctgctggagctgagaaaggttagccctgagatgggatgggggccgcccagggtgggcgaccgggccctgacaggagtccctcagggagtgaccacatccccccgccagggtcaagggagcctgccctgagacctgcccggtgtactctggctgcaccaggggcccaccccacttgacagccccaaggcccttgcaggttctgacctcccagcatccacctgcctctccctgcacccgagccacacaccctgcgtttcagaagtggcacggctcgtcagctccctcccgccctacctccccagggatcctctgtctctccatcctgtgatccctgagggatgggctcctggctgggctcctcttacccggccccagatcccttcccagcaccagacccaggtctttagccgcgagccctgctgcctccctggcctcaccgtgagatgcccagaacggggccctgcccatcttctcccccgttctcctagggctacagcccccattgtcaccatgccttttcccctcacgggacagtgagggctgtagctctaggggaatgggggagaacaggggcaggtgggccctcagagacctgctggacaacagccctgaggctgggccaggcgtcccctcaccctgtggccataacccttgcatctcaccggggttgtctccaagtagacagggccagaccctcaggctgccccgctcctcttgtgctcacttgccgacagaactgctgagcgcccaggggcctgacctagcccagtctccattcccaccggctccctagatgggccccacacctctggcctaacaacctcgggctggacctgcaggggagtcagggaggagttctgtccctggaaaggaggttgacccgacctggtgagacatgtcctgcgtcagaaaggcctttctaaaagcaaacccattcctgagctgagacaggtgctttaggggtgaggggagtgcagaggactcactgtacaatccccaaatgatcgacgttgttgttgtagcttcgaaaaggcttaggccccttgtcctctggcagcccagctcggtgtccctgtagcccagagggagccttggtgaggggtccaaggtaaagggttgcaagggcctgggggcattggccacccgtccctgccctgtgctcctagggagcccaggaccctttgaccagggcacactggaagaggcctccctccaagaagcagaccgacttgtaccttttcgtatttcataatgatgtcctctcgctcttgtgcccaccaactacccgcgacctctaccacgtccatcctgtgagacagaattgtctaaaggtcacactgtacgcggcggcttcggagaacacctgaaccgctctcgccgggctcccagatgctggctggctgcgtaacccccattccaccgccgcccccagggaaaaaggggccagacccagtggcccacagctgctccagtctctggagtctcaagtcccaagcaggggtgggcatcttcccaaggacttgagtacagtgggacctagacagagaatcctgttgtcccccaatgccatgaaatggggacacaccggccccagcaggttgaatggtttccacctgccaagggtgaagggcccatgatgggctattccagggatgtggaggcagactggggtcagcgaccagaggtctctgtgcaatcggcctcctgggatgctcagggcctcagcgatgcccagtttcctacagggaacaagatctctcccgactgctcggttctactccgctcatcactttggctaccgtggctcttcagtctgaacagtgaagccactttaggaataacgcctgttgagcaggagggt

SEQ ID NO: 69534 - DNA, 2391 bp, Homo sapiens
cttttggaattttatcaaactgccaaagtgaacagcaacctggggtcaggtccagcagggactgctgcccctcccagtgacagcgtgttgccctcacccgccaccgctcaggccagctgcttcctctgcctcactgaccacccgcccagtccctacgtccctggaccagcccctccacgcatcaggctcttaccttcgcctcccgcgcagtcagaggaggcagctccgtctcactgtaaggcaacccaggcagagctgaggaactgcacggggcctggagcggccccagcctgggtgccgacccccagaaaggactggctctgtccctttccagctcagggctcagcccaggagaaggcacagggaagggaggacaagggccttcctgtggggctgactcccaggaggggcaggacctgggagaagaaggagtgtagggacagcctggccggggttactggggcccctggcgtggggggcggtcaggctgcccagtggggctgcccgtcctggactcgaggtggtgctttctgctggagctgagaaaggttagccctgagatgggatgggggccgcccagggtgggcgaccgggccctgacaggagtccctcagggagtgaccacatccccccgccagggtcaagggagcctgccctgagacctgcccggtgtactctggctgcaccaggggcccaccccacttgacagccccaaggcccttgcaggttctgacctcccagcatccacctgcctctccctgcacccgagccacacaccctgcgtttcagaagtggcacggctcgtcagctccctcccgccctacctccccagggatcctctgtctctccatcctgtgatccctgagggatgggctyctggctgggctcctcttacccggccccagatcccttcccagcaccagacccaggtctttagccgcgagccctgctgcctccctggcctcaccgtgagatgcccagaacggggccctgcccatcttctcccccgttctcctagggctacagcccccattgtcaccatgccttttcccctcacgggacagtgagggctgtagctctaggggaatgggggagaacaggggcaggtgggccctcagagacctgctggacaacagccctgaggctgggccaggcgtcccctcaccctgtggccataacccttgcatctcaccggggttgtctccaagtagacagggccagaccctcaggctgccccgctcctcttgtgctcacttgccgacagaactgctgagcgcccaggggcctgacctagcccagtctccattcccaccggctccctagatgggccccacacctctggcctaacaacctcgggctggacctgcaggggagtcagggaggagttctgtccctggaaaggaggttgacccgacctggtgagacatgtcctgcgtcagaaaggcctttctaaaagcaaacccattcctgagctgagacaggtgctttaggggtgaggggagtgcagaggactcactgtacaatccccaaatgatcgacgttgttgttgtagcttcgaaaaggcttaggccccttgtcctctggcagcccagctcggtgtccctgtagcccagagggagccttggtgaggggtccaaggtaaagggttgcaagggcctgggggcattggccacccgtccctgccctgtgctcctagggagcccaggaccctttgaccagggcacactggaagaggcctccctccaagaagcagaccgacttgtaccttttcgtatttcataatgatgtcctctcgctcttgtgcccaccaactacccgcgacctctaccacgtccatcctgtgagacagaattgtctaaaggtcacactgtacgcggcggcttcggagaacacctgaaccgctctcgccgggctcccagatgctggctggctgcgtaacccccattccaccgccgcccccagggaaaaaggggccagacccagtggcccacagctgctccagtctctggagtctcaagtcccaagcaggggtgggcatcttcccaaggacttgagtacagtgggacctagacagagaatcctgttgtcccccaatgccatgaaatggggacacaccggccccagcaggttgaatggtttccacctgccaagggtgaagggcccatgatgggctattccagggatgtggaggcagactggggtcagcgaccagaggtctctgtgcaatcggcctcctgggatgctcagggcctcagcgatgcccagtttcctacagggaacaagatctctcccgactgctcggttctactccgctcatcactttggctaccgtggctcttcagtctgaacagtgaagccactttaggaataacgcctgttgagcaggagggt

SEQ ID NO: 69535 - DNA, 2391 bp, Homo sapiens
cttttggaattttatcaaactgccaaagtgaacagcaacctggggtcaggtccagcagggactgctgcccctcccagtgacagcgtgttgccctcacccgccaccgctcaggccagctgcttcctctgcctcactgaccacccgcccagtccctacgtccctggaccagcccctccacgcatcaggctcttaccttcgcctcccgcgcagtcagaggaggcagctccgtctcactgtaaggcaacccaggcagagctgaggaactgcacggggcctggagcggccccagcctgggtgccgacccccagaaaggactggctctgtccctttccagctcagggctcagcccaggagaaggcacagggaagggaggacaagggccttcctgtggggctgactcccaggaggggcaggacctgggagaagaaggagtgtagggacagcctggccggggttactggggcccctggcgtggggggcggtcaggctgcccagtggggctgcccgtcctggactcgaggtggtgctttctgctggagctgagaaaggttagccctgagatgggatgggggccgcccagggtgggcgaccgggccctgacaggagtccctcagggagtgaccacatccccccgccagggtcaagggagcctgccctgagacctgcccggtgtactctggctgcaccaggggcccaccccacttgacagccccaaggcccttgcaggttctgacctcccagcatccacctgcctctccctgcacccgagccacacaccctgcgtttcagaagtggcacggctcgtcagctccctcccgccctacctccccagggatcctctgtctctccatcctgtgatccctgagggatgggctcctggctgggctcctcttacccggccccagatcccttcccagcaccagacccaggtctttagcygcgagccctgctgcctccctggcctcaccgtgagatgcccagaacggggccctgcccatcttctcccccgttctcctagggctacagcccccattgtcaccatgccttttcccctcacgggacagtgagggctgtagctctaggggaatgggggagaacaggggcaggtgggccctcagagacctgctggacaacagccctgaggctgggccaggcgtcccctcaccctgtggccataacccttgcatctcaccggggttgtctccaagtagacagggccagaccctcaggctgccccgctcctcttgtgctcacttgccgacagaactgctgagcgcccaggggcctgacctagcccagtctccattcccaccggctccctagatgggccccacacctctggcctaacaacctcgggctggacctgcaggggagtcagggaggagttctgtccctggaaaggaggttgacccgacctggtgagacatgtcctgcgtcagaaaggcctttctaaaagcaaacccattcctgagctgagacaggtgctttaggggtgaggggagtgcagaggactcactgtacaatccccaaatgatcgacgttgttgttgtagcttcgaaaaggcttaggccccttgtcctctggcagcccagctcggtgtccctgtagcccagagggagccttggtgaggggtccaaggtaaagggttgcaagggcctgggggcattggccacccgtccctgccctgtgctcctagggagcccaggaccctttgaccagggcacactggaagaggcctccctccaagaagcagaccgacttgtaccttttcgtatttcataatgatgtcctctcgctcttgtgcccaccaactacccgcgacctctaccacgtccatcctgtgagacagaattgtctaaaggtcacactgtacgcggcggcttcggagaacacctgaaccgctctcgccgggctcccagatgctggctggctgcgtaacccccattccaccgccgcccccagggaaaaaggggccagacccagtggcccacagctgctccagtctctggagtctcaagtcccaagcaggggtgggcatcttcccaaggacttgagtacagtgggacctagacagagaatcctgttgtcccccaatgccatgaaatggggacacaccggccccagcaggttgaatggtttccacctgccaagggtgaagggcccatgatgggctattccagggatgtggaggcagactggggtcagcgaccagaggtctctgtgcaatcggcctcctgggatgctcagggcctcagcgatgcccagtttcctacagggaacaagatctctcccgactgctcggttctactccgctcatcactttggctaccgtggctcttcagtctgaacagtgaagccactttaggaataacgcctgttgagcaggagggt

SEQ ID NO: 69536 - DNA, 629 bp, Homo sapiens
ctcacctgattctgatgaatcagctggcctgggtcatgcctctcagggagaaaacctttgagtccacagagctgctcacagataccactgcctgtgtgtaactgctgtagaccactgasgcaggccagagagcagataggtgctaagcaccagtgacattctgaggtcatggcacgaatcacagtggggccttgcccgggtcagcagcacccagagtcagggtcctccgctgcctgaggcgtcaacatgcctgcctgcaacgtgtttgtgcacgtgcgtgcacacgtgtatgtgggtaaacatgtctgtgcacatgtgtgttgcttctctggccaggcccggctgccccactcatgtgtgcacccagttcctcatcactgtcacccccgaggcccagggccagcatcagagcatccatggctgctccctaacctcagccctccccgcccagggtggtcctgggatacacataggggtggagggaagtgactgctgctgttggatctcagaatacaaaagctaatactattacctaatggtctttttagtgtatctaatggtatcgctttttcatttctgatattttaactgggtatttctctccatgacccttggatattctagctaga

SEQ ID NO: 69537 - DNA, 629 bp, Homo sapiens
ctcacctgattctgatgaatcagctggcctgggtcatgcctctcagggagaaaacctttgagtccacagagctgctcacagataccactgcctgtgtgtaactgctgtagaccactgacgcaggccagagagcagataggtgctaagcascagtgacattctgaggtcatggcacgaatcacagtggggccttgcccgggtcagcagcacccagagtcagggtcctccgctgcctgaggcgtcaacatgcctgcctgcaacgtgtttgtgcacgtgcgtgcacacgtgtatgtgggtaaacatgtctgtgcacatgtgtgttgcttctctggccaggcccggctgccccactcatgtgtgcacccagttcctcatcactgtcacccccgaggcccagggccagcatcagagcatccatggctgctccctaacctcagccctccccgcccagggtggtcctgggatacacataggggtggagggaagtgactgctgctgttggatctcagaatacaaaagctaatactattacctaatggtctttttagtgtatctaatggtatcgctttttcatttctgatattttaactgggtatttctctccatgacccttggatattctagctaga

SEQ ID NO: 69538 - DNA, 629 bp, Homo sapiens
ctcacctgattctgatgaatcagctggcctgggtcatgcctctcagggagaaaacctttgagtccacagagctgctcacagataccactgcctgtgtgtaactgctgtagaccactgacgcaggccagagagcagataggtgctaagcaccagtgacattctgaggtcatggcacgaatcacagtggggccttgcccgggtcagcagcacccagagtcagggtcctccgctgcctgaggcgtcaacatgcctgcctgcaacgtgtttgtgcacgtgcgtgcacacgtgtatgtgggtaaacatgtctgtgcacatgtgtgttgcttctctggccaggcccggctgccccactcatgtgtgcacccagttcctcatcactgtcacccccgaggcccagggccagcatcagagcatccatggctgctccctaacctcagccctccccgcccagggtggtcctgggatacacataggggtggagggaagtgactgctgctgttggatctcagaatacaaaagctaatactattacctaatggtctttttagtgtmtctaatggtatcgctttttcatttctgatattttaactgggtatttctctccatgacccttggatattctagctaga

SEQ ID NO: 69539 - DNA, 764 bp, Homo sapiens
tgtggcgattcctcaagggtctagaaccagaaataccatttgacccagcaattccattactgggtacatgcccaaaggattataaatcattctactataaagacacatgcacacatatgtttgttgcagcactatgtacaatagcaaagacatggaaccaacccaaattgccatcaacgatagaagggataaagaaaatgtggcatataaacaccctggaatactackcagccataaaaaatgagttcatgtcctttacagggacatggatgaagctggaaaccatcatcctcagcaaactaacacaggaacagaaaaccaaacacctcatgttctcacttgtacgtgggagttgaacagtgagaacacatggacacagggaggggaacatcacacaccagggcctgttagtcggtgggaggcaaggggagagagcattaggacaagtatctaatgcatgctaggcttaaaacctagtggatgggttgatagatgcagcaaaccaccatggcacatgtatacttgtgtaacaaacctggacattctgcacatgtatcccagaacttaaagtaaaataataataattaaaaaaaaaaaaagaaaatgactatttaatcatagttcccaatgaaaacaatggcatttggtttgacttgagttggtttcgaagatttacagtaaataggctcttaccacttgtgaatgactggcaagtttgcactaatgactttcttccaatgaggctctctacaggaaaagtggaa

SEQ ID NO: 69540 - DNA, 764 bp, Homo sapiens
tgtggcgattcctcaagggtctagaaccagaaataccatttgacccagcaattccattactgggtacatgcccaaaggattataaatcattctactataaagacacatgcacacatatgtttgttgcagcactatgtacaatagcaaagacatggaaccaacccaaattgccatcaacgatagaagggataaagaaaatgtggcatataaacaccctggaatactacgcagccataaaaaatgagttcatgtcctttacagggacatggatgaagctggaaaccatcatcctcagcaaactaacacaggaacagaaaaccaaacacctcatgttctcacttgtacgtgggagttgaacagtgagaacacatggacacagggaggggaacatcacacaccagggcctgttagtcggtgggaggcaaggggagagagcattaggacaagtatctaatgcatgctrggcttaaaacctagtggatgggttgatagatgcagcaaaccaccatggcacatgtatacttgtgtaacaaacctggacattctgcacatgtatcccagaacttaaagtaaaataataataattaaaaaaaaaaaaagaaaatgactatttaatcatagttcccaatgaaaacaatggcatttggtttgacttgagttggtttcgaagatttacagtaaataggctcttaccacttgtgaatgactggcaagtttgcactaatgactttcttccaatgaggctctctacaggaaaagtggaa

SEQ ID NO: 69541 - DNA, 764 bp, Homo sapiens
tgtggcgattcctcaagggtctagaaccagaaataccatttgacccagcaattccattactgggtacatgcccaaaggattataaatcattctactataaagacacatgcacacatatgtttgttgcagcactatgtacaatagcaaagacatggaaccaacccaaattgccatcaacgatagaagggataaagaaaatgtggcatataaacaccctggaatactacgcagccataaaaaatgagttcatgtcctttacagggacatggatgaagctggaaaccatcatcctcagcaaactaacacaggaacagaaaaccaaacacctcatgttctcacttgtacgtgggagttgaacagtgagaacacatggacacagggaggggaacatcacacaccagggcctgttagtcggtgggaggcaaggggagagagcattaggacaagtatctaatgcatgctaggcttaaaacctagtggatgggttgatagatgcagcaaaccaccatggcacatgtatacttgtgtaacaaacctggacattctgcacatgtatcccagaacttaaagtaaaataataataattwaaaaaaaaaaaagaaaatgactatttaatcatagttcccaatgaaaacaatggcatttggtttgacttgagttggtttcgaagatttacagtaaataggctcttaccacttgtgaatgactggcaagtttgcactaatgactttcttccaatgaggctctctacaggaaaagtggaa

SEQ ID NO: 69542 - DNA, 764 bp, Homo sapiens
tgtggcgattcctcaagggtctagaaccagaaataccatttgacccagcaattccattactgggtacatgcccaaaggattataaatcattctactataaagacacatgcacacatatgtttgttgcagcactatgtacaatagcaaagacatggaaccaacccaaattgccatcaacgatagaagggataaagaaaatgtggcatataaacaccctggaatactacgcagccataaaaaatgagttcatgtcctttacagggacatggatgaagctggaaaccatcatcctcagcaaactaacacaggaacagaaaaccaaacacctcatgttctcacttgtacgtgggagttgaacagtgagaacacatggacacagggaggggaacatcacacaccagggcctgttagtcggtgggaggcaaggggagagagcattaggacaagtatctaatgcatgctaggcttaaaacctagtggatgggttgatagatgcagcaaaccaccatggcacatgtatacttgtgtaacaaacctggacattctgcacatgtatcccagaacttaaagtaaaataataataattaaaaaaaaaaaaagaaaatgactatttaatcatagttcccaatgaaaacaatgrcatttggtttgacttgagttggtttcgaagatttacagtaaataggctcttaccacttgtgaatgactggcaagtttgcactaatgactttcttccaatgaggctctctacaggaaaagtggaa

SEQ ID NO: 69543 - DNA, 534 bp, Homo sapiens
tgtgtccccatgccgttctcctattcacttataatccctataatcttcataatccccaggtgtcaaagtcagaccaggtggaggtaattggatcatgggtgcggtttccctcatgctgttctgatgatagtaagtgagttctcatgagatctgatggttttataaggggctctttcaccctcgctccggactcttctctttcctgtygccacgtaagaaggtccaagttttcttcccctgtgaagatgtgccttctgccacggttgtaagttttctgaggactccccagccatgcggaactatgagtcaattacacctcttttctttattaaattacccagtctcaggcagttctttatagctgtgtgagaatggactaatacaataaccaaggctgagaaaatgcatgtactggtacacacaggtgagcaagcccgtgccagattgaagaaactggatgcattccagaaatgagtgtttctgtcccaggctgaaaataatggactaggtatacctaataaagacaagcagaaa

SEQ ID NO: 69544 - DNA, 1454 bp, Homo sapiens
tcttgatgggaaagtagagacccagcctctcgcctgtctcacctaaaagaagaaagaccagggaccccggccccaagcaaaacaaccctctttccctcctagacttcaaacgtaggaccctctctgccatctccccatgggactccaaagttcacattgtccacctttcagaggacaccctaatgtcggatgtcgccacaacatctacctcttcagaggcccagaaattaaagctccatgccccttacagctcacagccaatcctctgggcctgatcaggaattgggggatgctctcatcagttccccccaatacccaggggaccagcagccccccagctctggctccaagctccccacctgtgcaaatagggtgccgagtgcaattgggagtcatatttattgcctccttatcatcctcgcctggaaggagtggggaaaggttcaatagcctgtggcctggacaggtgcaaactcccaggaggccacgggctgacttgattgaactggctgtgggagcactgcctcccttgtgagaatgaagataagtaagagaaaaatacagtggaagggcaacaacagggccagctactgtgtggcttctctgtcccgagggatatcctgagtctgaagctcacagatgagccaggaggctgcaaggwggattggcctggtctgcccccacagcaggatccagccccactctcatcttttgcaggaatggaatgacctggctggattcggcttgctagtgccccattctacagtgtgttcacagccccagcagcaagcgcccccagtttaaacccaccttcccaaactgctcaaaatattgcttcacgtcctccaccgtggtgttcaccgacagcccccccacaaagatcttcttcgttcgagtcaccatctgttaggggagggaatgagaaagtgggcatctgagtcctgtggcctaccgccaccagcaggggctcgagcccccctgccaggatgccagctgacaagctctctgtggccccagcctctttaaaggccccccccccgcaagctccctcttggacccccgcctctaggcctgtcatgggcagctgtgcacccacaccctggctggctcgagtgtgcctccttcctgcctccctccctagggactatgtccagaaaatgccttccctaaggactaacacagggaagggggcgggccagtgacccagacccacagcctaacactaagacctcactggccctcctgggagaccccccaaggtccatcacagagtctccctgaactcagtgccgacattttcctcatcagcctcctcccaacacaacctctggcagccctgtggccccagccctgttttaggaagaacacatggtcctaattaccccaggagcgcatggctaatccgcggcaattcccagccccatcctaacactaaagcaccttctgtcaccaaa

SEQ ID NO: 69545 - DNA, 701 bp, Homo sapiens
accataggtttggaatgcagataacctccacgtgtattaatgaaagaggtcagctatgacgtggaagccatctcctgggcagagaaggagaagaaatggcagtctggggagtagtaacatgtctccaaattttctctggtgaaaggagactgatgagaattgatacccatttccggtcaaaagagtggaaccaatgtacttccaaccacctcctctcaacccctctccgcatggacaaacataccagacaggtgatgtgggctaacaatttacttggcatgaggccaaaggcttgagggccctgccctgcccatattcttctcccttgacttcttaaggaaaggaatgattgctgatgtttccctctgcaccctttggcacctggactgattgttgcagatgtaattaggaatgttccccaacatgccgttattcttctcacgattctgggagaaactgtacccctcccccatagacttatataggtggcattcaaattcttgttcccaactttttcatctktttattaatcccacaagattgtgtgaatgtgtactccgagccaggcacgttggacttctaacttcctcttagcccaagtaggaaggggagactcaggcgctggggaccattctcctctccctgcagcagagttgcagtccctatccctcctgggtgcccatccccgtgcctattttcct

SEQ ID NO: 69546 - DNA, 1813 bp, Homo sapiens
atctttagaaatattaactggaaatgatggaagtcagcatgatagaataactgacttcacactctgtattttgaaataataaaaagaataatgtattacccatggggaaaatcactcttccagaatttcaacaatcttgttgatggctgttgtgagacctcagttcttgtcttattagtttaaaagaacttaaagaagagacacacagcaaaggagctgcagcatagagcaatttattgcaaaagagaaagaatattctaaaagctgggtgcagaatagacagtgcaccctgagagaggattcatggcaggctgctcataaagaagagaaagcatggactggccctagggagactacccttatgggaatcttacatgattattcataagggtgtggaaggagatgttactagtaagcatattgtgggtggtcctctggatgcacatgtgcagtagctgtacatgcttattcataggtcgcatgtctcattaacgtcttaaatctccacccaggggtttttttaatattagtattttttatattagtattataatgagcaaagggtcagtttgaggacaggtaaaatcaaaatgtgcatgctctctacagaggaaattccctactgaaaatagctttgcttgaatgagcttgactacagtgtcaacaccagggcttattgtgttggtggtcatcacggttgccacgtctgaaagacgtggttacttccttgactacctctcctgcctcaatctttcagatacattccagtgttagttcaccatacatataaatcaaacccacaatctgttaattgtcttattatatgaagaatggtcttgggcaaaagaaagaaagcatcatccttgcttcaaaagtgttgccagcctaagccagatatggctacaaccagtgggtgagtatagtggccactagaatgggcacaggactgggtagtcaggagcctaggagtctgggcccagttcccttaatctgctgggtgatgttgatatgaagtcacttggcatcccggagcctgcgtttgttcacctggaaagcaaaagcattagagcaggtgacttttgggatccattgcaagtctagaattctagcattttggtgacagccacaaaaatcatcacattattggtgtaaaaaaaatagttctcctgtttttccaggatagtatataagcttctgagccccactgtgaggtgggcaatcactctgtrattctccccatgcacacattgtgtatgcattaaataaattgtatgccttttctcctgttcaaacatgtatatatatatgtacgtatatatataggggcagaaaaatgataatttataaacatgtatctgtcaaggttgagctaaaattccattgtttcccagtaataagaaaatactcatttcatttctgacccattcatttaccaagtagtactaccaatcccccaaagaacaggagatacagaatctttatcaaggaaaaaaaatgccctttggcaatagtttagaggagttttcttttgtatttccatgttattctggaggaaataagataatgacacgcacattcagaatgtggccattctgcaggacaaatgaccctgtttcttgaacaaattagtagcatttaaaagaggaaagagattggcttacattaagagaaaccttaagaaacttatgaagtgcaatgtgtggtctttgtctaaatccaaactgtaaaaaagaccctttaaagacaatcaggcattatagtgttattaatacaggtatatttttatatcagtctaagcaaaacatcacctact

SEQ ID NO: 69547 - DNA, 1813 bp, Homo sapiens
atctttagaaatattaactggaaatgatggaagtcagcatgatagaataactgacttcacactctgtattttgaaataataaaaagaataatgtattacccatggggaaaatcactcttccagaatttcaacaatcttgttgatggctgttgtgagacctcagttcttgtcttattagtttaaaagaacttaaagaagagacacacagcaaaggagctgcagcatagagcaatttattgcaaaagagaaagaatattctaaaagctgggtgcagaatagacagtgcaccctgagagaggattcatggcaggctgctcataaagaagagaaagcatggactggccctagggagactacccttatgggaatcttacatgattattcataagggtgtggaaggagatgttactagtaagcatattgtgggtggtcctctggatgcacatgtgcagtagctgtacatgcttattcataggtcgcatgtctcattaacgtcttaaatctccacccaggggtttttttaatattagtattttttatattagtattataatgagcaaagggtcagtttgaggacaggtaaaatcaaaatgtgcatgctctctacagaggaaattccctactgaaaatagctttgcttgaatgagcttgactacagtgtcaacaccagggcttattgtgttggtggtcatcacggttgccacgtctgaaagacgtggttacttccttgactacctctcctgcctcaatctttcagatacattccagtgttagttcaccatacatataaatcaaacccacaatctgttaattgtcttattatatgaagaatggtcttgggcaaaagaaagaaagcatcatccttgcttcaaaagtgttgccagcctaagccagatatggctacaaccagtgggtgagtatagtggccactagaatgggcacaggactgggtagtcaggagcctaggagtctgggcccagttcccttaatctgctgggtgatgttgatatgaagtcacttggcatcccggagcctgcgtttgttcacctggaaagcaaaagcattagagcaggtgacttttgggatccattgcaagtctagaattctagcattttggtgacagccacaaaaatcatcacattattggtgtaaaaaaaatagttctcctgtttttccaggatagtatataagcttctgagccccactgtgaggtgggcaatcactctgtgattctccccatgcacacattgtgtatgcattaaataaattgtatgccttttctcctgttcaaacatgtatatatatatgtacgtatatatataggggcagaaaaatgataatttataaacatgtatctgtcaaggttgagctaaaattccattgtttcccartaataagaaaatactcatttcatttctgacccattcatttaccaagtagtactaccaatcccccaaagaacaggagatacagaatctttatcaaggaaaaaaaatgccctttggcaatagtttagaggagttttcttttgtatttccatgttattctggaggaaataagataatgacacgcacattcagaatgtggccattctgcaggacaaatgaccctgtttcttgaacaaattagtagcatttaaaagaggaaagagattggcttacattaagagaaaccttaagaaacttatgaagtgcaatgtgtggtctttgtctaaatccaaactgtaaaaaagaccctttaaagacaatcaggcattatagtgttattaatacaggtatatttttatatcagtctaagcaaaacatcacctact

SEQ ID NO: 69548 - DNA, 1041 bp, Homo sapiens
tgtgtgtatatatatatatgtttgtatatatgtatatatactttttttttttgagacagagtctcaatctgttgtccaggctggagcacagtggcacagtctcagctcactgcaaccctctgcctcccgggttcaagcaattctcctgcctcagcctcccaaatagctaggactacaggcacatgtcaccatgcccggctaatttttgcattttttgtagagatagggtttcgccatgttgggcatgctggtctcaaactcctgacctcaggtgatccgcccgcctcagcctcccaaagtgttgggattacaggtgtgagccactgtgcccgaccctaagaataccccaaatgtattctccaaatctgagaaaccatattcatccttattacaatatgtaattcgtaaaagacatgtagatatgtgcccacatgtgttataaccctattattattattgctactattttagtacccttattagtaggaacaatggactggagatttagatgtaacttttcagaggggtactgagcaccattctcaccctcctacatcactcttgccagaaatttgatgtacatttgctatttataagtaccctttaggcactgtggattaaaaaaatacaaaawgtgatggacagtgaactaaagaacatttggccaatgattccaaggttcaatgaagcttagtacagttattattattcaaaatttagtactttgtctttcaagtcttagaacatgatttagttttagtagattctaggtgcattatgtcacacttaattgattccataaattcgatgtacatgagtctaatttaaacattggaatgcaaatttacttcccttcacaaagaacttcaatgactcctaattgcttattgggtaaattccaaatctgtcggacttctttgctccatgctctgacccaagctacttttcaacctcattattagtttctttctaaagtcatgaccttcaaatggaaaaaaagaaaatgctgcatatgccctcaagtcctccagtttttccagc

SEQ ID NO: 69549 - DNA, 752 bp, Homo sapiens
tagcctaaagattttttaaaatgctacacttaaactacctaattccaaagatatccatgatatcaattgagattgcatttggttgcaagtaacagaaaactcaaatgaattaaaagtggcttaacaatatgcagttttattttatcatgttggaaaagtctggaggtgcacagagagggtagtatgccaattctacagtattacttctactttgtggcctctcacacagtttacatgtgttacctcattgacgataaaacttgcttgaacttcagtcatcacatccacattccagaaagtagaaagagggatattccccctcccttgtatgaaacttttcagaaccttaaaaagaaacttttgtttgcmttctattgaccagaacttaatcacatgatgatatggttgggaaaagtagcctctgttctgagtgatcaggtgtccagtttaaatgggatatttatttctaaggaagaaggggagaatgttcattggttctctgtgccatatggcttatttcacacagattgatacttgttaataattaactttgaaaatattctaaaattatttacatgtgtgtgttttcaactaaaatttgtaaggagatattgaattattgagtaccagttacatgcagaaaactctgttaagcgtgttgagattatttataaagataatctgggttgttaaatcaaggagcatacatatatttagaaatactataaaatataaaacatagtgaaaggatc

SEQ ID NO: 69550 - DNA, 752 bp, Homo sapiens
tagcctaaagattttttaaaatgctacacttaaactacctaattccaaagatatccatgatatcaattgagattgcatttggttgcaagtaacagaaaactcaaatgaattaaaagtggcttaacaatatgcagttttattttatcatgttggaaaagtctggaggtgcacagagagggtagtatgccaattctacagtattacttctactttgtggcctctcacacagtttacatgtgttacctcattgacgataaaacttgcttgaacttcagtcatcacatccacattccagaaagtagaaagagggatattccccctcccttgtatgaaacttttcagaaccttaaaaagaaacttttgtttgcattctattgaccagaacttaatcacatgatgatatggttgggaaaagtagcytctgttctgagtgatcaggtgtccagtttaaatgggatatttatttctaaggaagaaggggagaatgttcattggttctctgtgccatatggcttatttcacacagattgatacttgttaataattaactttgaaaatattctaaaattatttacatgtgtgtgttttcaactaaaatttgtaaggagatattgaattattgagtaccagttacatgcagaaaactctgttaagcgtgttgagattatttataaagataatctgggttgttaaatcaaggagcatacatatatttagaaatactataaaatataaaacatagtgaaaggatc

SEQ ID NO: 69551 - DNA, 752 bp, Homo sapiens
tagcctaaagattttttaaaatgctacacttaaactacctaattccaaagatatccatgatatcaattgagattgcatttggttgcaagtaacagaaaactcaaatgaattaaaagtggcttaacaatatgcagttttattttatcatgttggaaaagtctggaggtgcacagagagggtagtatgccaattctacagtattacttctactttgtggcctctcacacagtttacatgtgttacctcattgacgataaaacttgcttgaacttcagtcatcacatccacattccagaaagtagaaagagggatattccccctcccttgtatgaaacttttcagaaccttaaaaagaaacttttgtttgcattctattgaccagaacttaatcacatgatgatatggttgggaaaagtagcctctgttctgagtgatcaggtgtccagtttaaatgggatatttatttctaaggaagaaggggagaatgttcattggttctctgtgccatatggcttatttcacacagattgatacttgttaataattaactttgaaaatattctaaaattatttacatgtgtgtgttttcaactaaaatttgtaaggagatrttgaattattgagtaccagttacatgcagaaaactctgttaagcgtgttgagattatttataaagataatctgggttgttaaatcaaggagcatacatatatttagaaatactataaaatataaaacatagtgaaaggatc

SEQ ID NO: 69552 - DNA, 752 bp, Homo sapiens
tagcctaaagattttttaaaatgctacacttaaactacctaattccaaagatatccatgatatcaattgagattgcatttggttgcaagtaacagaaaactcaaatgaattaaaagtggcttaacaatatgcagttttattttatcatgttggaaaagtctggaggtgcacagagagggtagtatgccaattctacagtattacttctactttgtggcctctcacacagtttacatgtgttacctcattgacgataaaacttgcttgaacttcagtcatcacatccacattccagaaagtagaaagagggatattccccctcccttgtatgaaacttttcagaaccttaaaaagaaacttttgtttgcattctattgaccagaacttaatcacatgatgatatggttgggaaaagtagcctctgttctgagtgatcaggtgtccagtttaaatgggatatttatttctaaggaagaaggggagaatgttcattggttctctgtgccatatggcttatttcacacagattgatacttgttaataattaactttgaaaatattctaaaattatttacatgtgtgtgttttcaactaaaatttgtaaggagatattgaattattgagtaccagttacatgcagaaaactctgttaagcgtgttgagattatttataaagataatctgggttgttaaatcaaggagcmtacatatatttagaaatactataaaatataaaacatagtgaaaggatc

SEQ ID NO: 69553 - DNA, 1147 bp, Homo sapiens
attgggtgctggccaggtgcggtcactcacgcctgtaatcccagcacttcgggaggccaagacaggcagatcacttgaggtcaggagttgaagaccagcctggcaaaaatggcgaaaccccatctctactaaaaatgcaaaaattaggtaggcttggtggtgcatgcctttaattctagctactcaggaggctgaggcaggagaattgcttgagcccaggagatggaggttgcagtgagctgacatcgcgctactgtactccagcctgagtgaaggagtgagactgtctcaaaaaaaaaaaaaaaaaaaaaaaattgggtgctgaggccaaactgactagcttgtattctactaataatcttccaagagctgtgctatatagttttattttcttttagccttctttttatttagaattatagttcctaacttttcaaaattactctttgcaaacattttccttccttttaagatgaaaagggaactttatcctgatgttaggattgatcatataatctgcattaaaaaaaaaaaaaaaaaaaamaaaactccaaccgggcgcggtggctcacacctgtagtcctagcactttggtaggccaaggcggatggatcacctgaggaccggagttccagacaagcctggccaacacggcgaaaccccttctctactaaacataaaaaaattagctgggcattgtggtgggcacttataatcccagctactcaggaggctgaggcaggagaactgcttgaacccaaggagcagaggttgcagtgaggcaagatcctgccactgcactccagcctgggtgacagagcgagactcagtctcaaaaaaaaaaaaaaaaagtcctcccaaaatagcttttcagaaatatgtgactgccaaagtacagtacagtaaacctctccacacatggctgaataaactcttacagaacattgtggagaagaatttagattgggatgtcaatgtcctgcctagttaattagagtgtatatacttcctttagtagaatagtgtgttcttttgcaatgatatgtttctgaaagaggatctttaaacagcacaaggattcattgttttctattccttaatgatttgggaagaacaaattgttaatctatgtaggccaagaatgttt

SEQ ID NO: 69554 - DNA, 990 bp, Homo sapiens
ccatctcccccacaaatgagaggtctgagagggcaggggcctttgatttgctcctttctgtgtacccagcactgagagcagtgctatgtccagcacagagtrggtgattcataaatcattgagtgatataattaaaagttactgccttgaagttctgttttggcagacaacttcagagagctgggctgttagtttttaggaagcatgtacgcagaattcttcttagcaaaggcatcagtgacttaagagaagtgtttgtatacaagatctggctctcttgatgaggagggtgttggggtactttgttctggccccaaagcacaaagggcaatgaactcagtggccagaaaccatgtggcttcctgatgagagaaagatgaaattttcccgatttgagaaggggtgtcatgcaagggagggctggtatgtttttaaatatcaaggacatatattgagagataataccatagctgattggtaaatagttttttcaatcaaaaacttttattttcactattttgaattacataattaagccattattttgacaaactcttagcccagttgtcccccatcccaaaaacctttcctctcggaaagacagagctgttagtttgccatatctatttccagacatatttttgtttgtttatacacacatatatcaaactcaagatctgcaggtgtattgacaatttagcttccttggtaagtgcaaacccctcatttttttttttttcaggattgagccgtcaagcttgtctgcacagcttagtgttggtgatggtctgctctctctgtccctttggaaacgaaattttggggtggggaaacctgcttgcaaaatgggttgtgttcagattctttggagatttccagcttgtacaggaagtatagctttttttttttcctaattgtggttaaaaaaacaaataacatgaaagctacctccttaatgaaattttaattgtaccattcagtgttattata

SEQ ID NO: 69555 - DNA, 1304 bp, Homo sapiens
cgcttgcaataatttggtggcatctctaatttttattttaaccattctaataggcgtgtagtgatatggtggttttacttgaattttcctgatggatgattcttttgactatggcctaatctaatactagtttcatatggctaaaaagaactgagaagcatgtcactatgcaaagttaccctgaatttatagacaggctgaaaaatcagtcatagcttaatctataatagtacaagtagcagccatagtagtaatcatgctttttagatagagtgtgaatatactgtgttgggtggaaactacaagattacttggatatagtaatggggcgtcgttccacaagatgaaaccactgaaatgtctttagcatttgagttaaaataaatgtaaatggttatgattgttctttgctgctatgattttttaatggtaatatttatacttttggaaaagaagtgcagtggagagataattattgtgatgtgtaaagctgctttcagatatttctgagaactgagtcatgttttttttctctagtacctcacttctgcttttagttacatgaccctcaaactgaggaacctagtaatgctttctgaacctgatgaaattataactgaaaaaaatggacagttctttttagcagatgaattcatggattcctcggaaggctgagttctccaagagctgagtaaggttatttagtgatggactgatgggagacgtgtatgcctctgaagctcactgagttttggccacagcatactaataccccaaacacacagtttgctcttcttagcaggtattaagttgaatattgggttagcttcatgatcataaatgaggtgaaaaaaatcaagaggcctattttctgtttgatgggaagaggtgagacctatcagtgggcattttaatatgcagccaattaatctgcagtcaggcaaggagcattcatgtcgtcaacttactgaagcctccagcaaccttctgttggacagtgagaggcatagttcttccagctcatcaccaagtatgtcttcccacaacctctgcttccttgagcccgagctgcctaggacccaaaagcagacgtgggtaaaggagcatgtggtcagacagagggaagagcaacttccctactyaacctgttagtgctgacaaaaattaattatatttcctgcaaaatcattggaaaatattattctgtttgttctcatgtggagaaaaacaatgtggctgcatttttgcaaatcagaagacagtgaaaatcagggtagagacagatgcaagatacaaattgttag

SEQ ID NO: 69556 - DNA, 1090 bp, Homo sapiens
aaatacttagaatagtgctgggtgcttgctagaggatcaataactgttagttgttatttttttattttattttttttacaaacaatgattagtaacttgagagaataaagtttgtttatcagatcacatgtttcagtaaaatggtagagaagaacaaagaaaaaagtgataggaatgaaagtcagattaaaatagatgaaggagagaatgggtggtgagaaaagaaaacagcaggaatagagttttctatagagaaaaattttttgaaaacaaggagaaaggtacaaacaatattaagagtccctcagaaaatattttggaaacttaatcttacttattttagagtaaaatcatcttgatgattatatatttgctttgaacttttttttttttccttttgagacagagttttgttcttattgcctaggctggagtgcagtggtgcgttctcagctcattacaacctccacctccgaggttcaagcagttctcctgcctcagcctcccgagtagctggcattacaggcctgcgccaccatgcccggctaattttgtatttttagtagagacggggtttctctatgttggtcaggctggtctcaaactcstgacctcaggtgatccgctcgcctcggcctcccaaaatgctgggattagaggcttgagccaccacacccagcccttgaactattttttctagtacatgtacagtttacatatttatgtttatattaactgtattcatgtgagacactagtgctcctttcaaatctctgaatacacataaaacagtcagtgtaagctcaaatcaacaattagacattcctatgaaagtagtagattgtcacctttaagcatgcttggaatcctggctattataccaggttagtacttattcctggtgaacattcactcatgcccttaagagttacatgccaagggccaacttttacccaaacatttgccattaagttacgttttcattcaatgaaaaaaaggaaccaaagtgaatttgtatcccatttgaaataaactccagtgatatttgcacaccaagctaacttaccatgtgcttgctgaatgtgctgtg

SEQ ID NO: 69557 - DNA, 1090 bp, Homo sapiens
aaatacttagaatagtgctgggtgcttgctagaggatcaataactgttagttgttatttttttattttattttttttacaaacaatgattagtaacttgagagaataaagtttgtttatcagatcacatgtttcagtaaaatggtagagaagaacaaagaaaaaagtgataggaatgaaagtcagattaaaatagatgaaggagagaatgggtggtgagaaaagaaaacagcaggaatagagttttctatagagaaaaattttttgaaaacaaggagaaaggtacaaacaatattaagagtccctcagaaaatattttggaaacttaatcttacttattttagagtaaaatcatcttgatgattatatatttgctttgaacttttttttttttccttttgagacagagttttgttcttattgcctaggctggagtgcagtggtgcgttctcagctcattacaacctccacctccgaggttcaagcagttctcctgcctcagcctcccgagtagctggcattacaggcctgcgccaccatgcccggctaattttgtatttttagtagagacggggtttctctatgttggtcaggctggtctcaaactcgtgacctcaggtgatccgctcgcctcggcctcccaaaatgctgggattasaggcttgagccaccacacccagcccttgaactattttttctagtacatgtacagtttacatatttatgtttatattaactgtattcatgtgagacactagtgctcctttcaaatctctgaatacacataaaacagtcagtgtaagctcaaatcaacaattagacattcctatgaaagtagtagattgtcacctttaagcatgcttggaatcctggctattataccaggttagtacttattcctggtgaacattcactcatgcccttaagagttacatgccaagggccaacttttacccaaacatttgccattaagttacgttttcattcaatgaaaaaaaggaaccaaagtgaatttgtatcccatttgaaataaactccagtgatatttgcacaccaagctaacttaccatgtgcttgctgaatgtgctgtg

SEQ ID NO: 69558 - DNA, 741 bp, Homo sapiens
ctccagcagcttttcaatattatgactagtcagcccatatataaaggtcaaattcagcaactcaaatgcaggtggcttagggtatcaactggtaatgtgtaaatgcagttacttctgtgacaatcaaatgtgtgaaggttgaggcctatgggtggagggcaaggcagcatgtcactccaatctgtaaacaaggtcactctctaagcatcacatttgattttccagactgcgaacaggacttattattttttctttagatggagttttgcttctgatgcccaggctggagtgcaatggcatgttcttggctcaccgcaacctctgcctcttgggttcaagggattctcctgtctcagcctcctgagtagctgggattacaggtatgcaccaccatgctcagctaatttttgtatttttagtagagatggagtttctccatgttggtcaagctggtctcgtactcccgacctcaggcgatccacctgcctcggcctccaaaagtgctgggattacaggcatgagccaccgtgcccagccaggacttctttctaattgacgtcttccaactaaatgacaattaagttgcctggccaataaattcttgtggtttggtctacayaaatttcttaaaaagtatattagtcttttacatgttcaacattggtttctgccagatttgtgaagtaatagaaaaaagtggtcataaatgaaacacatcctttgtagctcatatgaaaagga

SEQ ID NO: 69559 - DNA, 741 bp, Homo sapiens
ctccagcagcttttcaatattatgactagtcagcccatatataaaggtcaaattcagcaactcaaatgcaggtggcttagggtatcaactggtaatgtgtaaatgcagttacttctgtgacaatcaaatgtgtgaaggttgaggcctatgggtggagggcaaggcagcatgtcactccaatctgtaaacaaggtcactctctaagcatcacatttgattttccagactgcgaacaggacttattattttttctttagatggagttttgcttctgatgcccaggctggagtgcaatggcatgttcttggctcaccgcaacctctgcctcttgggttcaagggattctcctgtctcagcctcctgagtagctgggattacaggtatgcaccaccatgctcagctaatttttgtatttttagtagagatggagtttctccatgttggtcaagctggtctcgtactcccgacctcaggcgatccacctgcctcggcctccaaaagtgctgggattacaggcatgagccaccgtgcccagccaggacttctttctaattgacgtcttccaactaaatgacaattaagttgcctggccaataaattcttgtggtttggtctacataaatttcttaaaaagtatattagtcttttacatgttcaacattggtttctgccagatttgtgaagtaatagaaaaaagtggtcataaaygaaacacatcctttgtagctcatatgaaaagga

SEQ ID NO: 69560 - DNA, 777 bp, Homo sapiens
ggccaccttcttgctgtggctttacatggtgaagagagagagagagctttcatctcttacaggggtactaattctatcatgagggcttcaccctcaggaccacatctaaacttgattactttgcaaaggcctcacccactaataccatcacgttgggggttagagattcaccacaggaatttgcgggagacccaaatgttgagcccatctgaacgataaaagcttgttggatgaacaatctttcgtggtatatttccttccagtcttttttttttctaagtgtatttagaatagtttcgattatattgtatgtacatagttttatacacagttttgtatactgtcataacttctttccttattttatcattatcaccttaagatagagtcatgtagatggaattagtgggtcaaagaacatagactttatatatttctttttttttttaatttatttttttattgataattcttgggtgtttctcacagagggggatttggcagggtcatgggacaatagtggagggaaggtcagcagataaacaagtgaacaaaggtctctggttttcctaggcagaggaccctgcggccttccgcagtgtttgtgtccctgattacttgagattagggattggtgatgactcttaacgagcatgctgccttcaagcatctgtttaayaaagcacatcttgcaccgcccttaatccatttaaccctgagtggacacagcacatgtttcagagagcacagggttgggggtaaggtcacagatcaaca

SEQ ID NO: 69561 - DNA, 777 bp, Homo sapiens
ggccaccttcttgctgtggctttacatggtgaagagagagagagagctttcatctcttacaggggtactaattctatcatgagggcttcaccctcaggaccacatctaaacttgattactttgcaaaggcctcacccactaataccatcacgttgggggttagagattcaccacaggaatttgcgggagacccaaatgttgagcccatctgaacgataaaagcttgttggatgaacaatctttcgtggtatatttccttccagtcttttttttttctaagtgtatttagaatagtttcgattatattgtatgtacatagttttatacacagttttgtatactgtcataacttctttccttattttatcattatcaccttaagatagagtcatgtagatggaattagtgggtcaaagaacatagactttatatatttctttttttttttaatttatttttttattgataattcttgggtgtttctcacagagggggatttggcagggtcatgggacaatagtggagggaaggtcagcagataaacaagtgaacaaaggtctctggttttcctaggcagaggaccctgcggccttccgcagtgtttgtgtccctgattacttgagattagggattggtgatgactcttaacgagcatgctgccttcaagcatctgtttaataaagcacatcttgcaccgcccttaatccatttaaccctgagtggacacagcacawgtttcagagagcacagggttgggggtaaggtcacagatcaaca

SEQ ID NO: 69562 - DNA, 585 bp, Homo sapiens
cttccccctgcacagatctccacccccccacacacacccccgccccacaaaatgcttaaaaagtaaactaactctttgttcagggcttagtcctttggatgttaatccgactgggccagtgcacctaaataattaatacatatcctcctgaaccccatcaatctctctgattccttaacaatcctgctacattttctttaaggaatctgagtaggctagattagaatgggttgcttagatggaagaattatgggacataacactggaaatgttgcccgaagctgcaaggagaattktgaatgcaatactgaagagttgcaccactacaagtgctttatgcaagacaaaatttagttctgcatctaatttccctacttaaaactaacacagcttaagaacgttaaataggaaatgaatgtttattaggtggcaggtcatattcagggtctcaaaagacactctatgtcagagcaatgtcagaagaatacaggagagctgttgggagggacctgaggggccagagagatataaatttaagagctacaatttgaatgtcttgatgtgaaaataactaagagggggagg

SEQ ID NO: 69563 - DNA, 506 bp, Homo sapiens
taatgcagctcatttggcatactttatacgctcagaattgagtaagttctattttccgttatatcrgtcttatcagattgatgtaagaaaaatacttaaatggcggattttcatataaaagaagaaggcattatgatgtatgaatttttaaatagtggtttccgagaaattgcactgtggcagtcctgccttcctggggttattcaacagcacttcagcttatataattaccacacatgcctcctgtacagagcccacgaggctcccaggtcggtcaccatggcaacagattctgaatggagtagccccatcctgatactgtgcatagagcctcttcctggaaaaagttttattttttaaatttaaacacattctcccaaattacagatatacagtttcagagtacttgttccagttttcttataagtgtaatgtgaacactaaatgtccaggcacacacaatttcttgaataacaaaggaaatataaagcaaacatttaaataca

SEQ ID NO: 69564 - DNA, 622 bp, Homo sapiens
tcattctaggtgatagatcactaatatatgacatttcagcagaatagaagtctcccatctgagatataaaatcaacataacattcatgctggtatcccctsctcctcgcatgggaccttatgacttacagtaaatgctcaatatacaattattaaattaatttttaaaataatctatgtgctttctcaggtaatagaagtatatgtatataaattacattcccattttgaaattgcatctcaatttctccactaatagatagaaatcatgaagtcggtaagaaaaaaaacatgcaaacaaaccccactggactgtgcagctggatctgttcctatttctgagccaaatgaaacttagttttgatcgtaagcccctaccctaaaccttcagccttggttcttcacttgttaagaaagaatattggaatagatgttgactgatatccaagtcaatgtggctatggcatctccaaggaagagatgacaggtattcttccctgagtctggcaacgagaaaagcagaggatggaggctagtaacacagcttgatttcctcactctttggggtctaggaagcctgggttgacaactgctcataatcttgctcacaaagactttgaccc

SEQ ID NO: 69565 - DNA, 1031 bp, Homo sapiens
aacactggttacacttgtatcagtcagggttcagtcagagaagctgataagctaccgatcaatctatctgtctaccaacctacctacctataaagaaacatgtattataaggaattggcttgtgtaattgtctgtagctgctgactaagcaagtctgaaatcaacagggcaggtggttaggaagggaagatccaggaagggggaagcaattgtagaccgagttgttgattggaatctctatcactgggaggagcccaggccttcgtagggcttacttgattgagttaggcccatccaggataatctccttcatttagtggcagatactccagatactcagagactttcattatatatgtacaaactccttaacagcagcacctyagtttgtgtctgattgagtcactggcagaggtgtatgcatgctaccaaatgattgctcttccctttcataagcctagtctagcccagcggacacagcaaacacccatgccaacactcagtgttattggccaaagttgtctcttcctggaacagtgagagttggaagacttctgttgtcttggaattcatactcattaccttattagctgcatgtgtattttagctagtaaaattttacaaagggaagcaggtcaataccagtagttagccacaggggctgtgaagtcaaacagcctgagttcaaagccaggtttcatcatattctatctgtgtgactttaggcacatttccaaactatgctaatttttttcttttcttttctttttttttttttgagacagagtcttactctgtcacccaggttaatctcggctcactgcaagctccacctcccaggttcacaccattctcctgcctcagcctcacgagtagctgggactacaggtgcctgccaccacgcccaaactatgctatctttttttgagagtgtttatgttaaaatattttttaaaagtttaaacaagataatccatgcaaaatgcttaaaccagtatggatgacagtgcactcaaatgttagtagttaag

SEQ ID NO: 69566 - DNA, 672 bp, Homo sapiens
ctcccaaagtgttgggattataggcatgagccactgtgcctggtgatctgctcttttatggttaatattttckgtatcctgctgaagacatctttgtcaggcagatattctcaattttttttctttttaaattatgaatacttttacccttcactttaagttatatgattcttttttttcccttttggtatgctctaaggtaggactctgtattttgtttttcattcagatgcccaattgtgctagttccttttattgcttatatatcccattttctccacttatttgcaatagcaatgttgttgtaaatcaggagacagcatacatgtacatctttttctgaaccccctattctgttctattgatctgtttctcctcaggtgtactgttacgtgtataagccttgatctcaggtgccataatttctctaactttgtttttcttaacatttataaataatataaatattaaataacataatttatgtaattatataatttaaatgtaatataaatgttatatattacacacacacacacacacatatatatatatcttatagtagcttgatttatttatttatgtttagagacaaggtctcgctcagttgcccaggctggagtgtagtgatatgatcatagctcactatggccttgaactcctagcctctag

SEQ ID NO: 69567 - DNA, 672 bp, Homo sapiens
ctcccaaagtgttgggattataggcatgagccactgtgcctggtgatctgctcttttatggttaatattttcggtatcctgctgaagacatctttgtcaggcagatattctcaattttttttctttttaaattatgaatacttttacccttcactttaagttatatgattcttttttttcccttttggtatgctctaaggtaggactctgtattttgtttttcattcagatgcccarttgtgctagttccttttattgcttatatatcccattttctccacttatttgcaatagcaatgttgttgtaaatcaggagacagcatacatgtacatctttttctgaaccccctattctgttctattgatctgtttctcctcaggtgtactgttacgtgtataagccttgatctcaggtgccataatttctctaactttgtttttcttaacatttataaataatataaatattaaataacataatttatgtaattatataatttaaatgtaatataaatgttatatattacacacacacacacacacatatatatatatcttatagtagcttgatttatttatttatgtttagagacaaggtctcgctcagttgcccaggctggagtgtagtgatatgatcatagctcactatggccttgaactcctagcctctag

SEQ ID NO: 69568 - DNA, 672 bp, Homo sapiens
ctcccaaagtgttgggattataggcatgagccactgtgcctggtgatctgctcttttatggttaatattttcggtatcctgctgaagacatctttgtcaggcagatattctcaattttttttctttttaaattatgaatacttttacccttcactttaagttatatgattcttttttttcccttttggtatgctctaaggtaggactctgtattttgtttttcattcagatgcccaattgtgctagttccttttattgcttatatatcccattttctccacttatttgcaatagcaatgttgttgtaaatcwggagacagcatacatgtacatctttttctgaaccccctattctgttctattgatctgtttctcctcaggtgtactgttacgtgtataagccttgatctcaggtgccataatttctctaactttgtttttcttaacatttataaataatataaatattaaataacataatttatgtaattatataatttaaatgtaatataaatgttatatattacacacacacacacacacatatatatatatcttatagtagcttgatttatttatttatgtttagagacaaggtctcgctcagttgcccaggctggagtgtagtgatatgatcatagctcactatggccttgaactcctagcctctag

SEQ ID NO: 69569 - DNA, 571 bp, Homo sapiens
attcttatgagaacaaaaaggaaagaaaaaacacagtgggagtttaatcaagtagttaaragctttttgcatacagttttgaaaagagagaaaatatgtgcacttagagactgggtcatatagggactagttacacccattctagaaagtgcccaggaaaagtttgacaggatttttgatgcagaaagatgaagctctggagataaaaaataattcagctttattaaccctcccactgagaaggatgcttttgtgagagacagatgacacaactgctgagaaaatctttgctggccacctaaatgtatgtctaggaaaccaaagatcagcacaatttaggaaaattaacagcatgaaatagaaggcttaatcagaacaaatgacaaggaagagaacagataatttagggaacaaaagaaaaaaaaattctgatggatgtcctcagaaggattatagaggatgctgcatccgaaaacaaaatcaagcttctataaaaagaagcaatcagaaaacaacaaaaagtttgagaactgttcaaaatagatcgaaaagttttttttaatcaatgaaa

SEQ ID NO: 69570 - DNA, 577 bp, Homo sapiens
gtgaacaggcaacctacaaaatgggagaaaattttcgcaacctactcatctgacaaagggctaatatccagaatctacaatgaactcaaacaaatttacaagaaaaaaacaaacaaccccatcaaaaagtgggcgaaggacatgaacagacacttctcaaaagaagacatttatgcagccaaaaaacacatgaaaaaatgctcatcatcactagccatcagagaaatgcaaatcaaaaccactatgagataccatctcacaccagttagaatggcaatcattaaaaagtcaggaaacaacaggtgctggagaggatgtggagaaataggaacacatttgttaattagctagattaaccatttgacratgtatatgtacttcaaaatatcatgttctacatttttatcatgtagaatgtgacatttactccaaatactgtatttgttgatttttgaaaagaaaaacagtcattgtgatacaatttatttagagcatattaaaatttaataaagataattcactgttgatccaattggaaatactgcaaaatcgaattagggaagctctatatagattc

SEQ ID NO: 69571 - DNA, 726 bp, Homo sapiens
ttgcataaaaaagtcacatacatgtgtacatttattgcagcacaattcacagttgcaaagatatggaaccagcctgagtgcccattgaccaatgagtagataaagaaaatgtggtatatatacaccatgaaatactattcagccataaaaagaatgaaataatgccttttgcagcaacttggatgtaactgaggccattattcttggtgaagtaactcaagaatggaaaaccaaatatcatatgtactcacttataagcgggagctaagctatgagtatgcaaatgcatacagagtgacataatggacttcggagactcagaagggacagggtgggaaggagttatggaagaagaaactacatattgggtaaaacgtacactactcgggtgacaggtgcattaaaatctcagaattcaccactatatatttcattcatgtaaccaaaaccactcgtaccccaaaagctattgaaatttaaaaaattataacatttaagtgtgyatttgaatgtcagcagttgaatttatttaatcaggggtttattctacttcaccagaaaagggaaacaatggagaaatgctgtgattgttccttgcttctatggtcaacattttgcataatctgaagtctctcttccttcttgagcatactcactaaaagatttattaagttagaagtgctaacctatttttattcaattttctgtgtgaggtccaaacaagct

SEQ ID NO: 69572 - DNA, 605 bp, Homo sapiens
actggcctactttaataatacttccttttaaggcaatggcatataacctgaattaaatcaagtagcatttgtttgcctctttctttaagatgaaaaattaagtaattaaactacattgtggacatayattcataattggtaattccacatctcacctatacgtttattttttattagaaaatgtctttcttacttctactctagccccaattcctagaggggccttgctgacccttacttgaggacattaattgaactgtctatgaatcagattcagagacatatgtcatatataaatggtcaagcccctgaacatgttggttaaattctctgcacctcaatttattcaaaaattaaggttttttttttttaagattaaaggcattttagtgtatgcaaattctttagaacattgaattgctggaacaaactctcagatatctgcctatagaatcaagtgagagcacaagaaaaaaaatcctgcataaccaagtagctagatttgaatatcttttttatatggttagtgttggaatagcaatttaccactagtatgcctatcactttaaaacacctcagaaaatgacatgtggatttttgttgca

SEQ ID NO: 69573 - DNA, 605 bp, Homo sapiens
actggcctactttaataatacttccttttaaggcaatggcatataacctgaattaaatcaagtagcatttgtttgcctctttctttaagatgaaaaattaagtaattaaactacattgtggacatacattcataattggtaattccacatctcacctatacgtttattttttattagaaaatgtctttcttacttctactctagccccaattcctagaggggccttgctgacccttacttgaggacattaattgaactgtctatgaatcagattcagagacatatgtcatatataaatggtcaagcccctgaacatgttgsttaaattctctgcacctcaatttattcaaaaattaaggttttttttttttaagattaaaggcattttagtgtatgcaaattctttagaacattgaattgctggaacaaactctcagatatctgcctatagaatcaagtgagagcacaagaaaaaaaatcctgcataaccaagtagctagatttgaatatcttttttatatggttagtgttggaatagcaatttaccactagtatgcctatcactttaaaacacctcagaaaatgacatgtggatttttgttgca

SEQ ID NO: 69574 - DNA, 605 bp, Homo sapiens
actggcctactttaataatacttccttttaaggcaatggcatataacctgaattaaatcaagtagcatttgtttgcctctttctttaagatgaaaaattaagtaattaaactacattgtggacatacattcataattggtaattccacatctcacctatacgtttattttttattagaaaatgtctttcttacttctactctagccccaattcctagaggggccttgctgacccttacttgaggacattaattgaactgtctatgaatcagattcagagacatatgtcatatataaatggtcaagcccctgaacatgttggttaaattctctgcacctcaatttattcaaaaattaaggttttttttttttaagattaaaggcattttagtgtatgcaaattctttagaacattgaattgctggaacaaactctcagayatctgcctatagaatcaagtgagagcacaagaaaaaaaatcctgcataaccaagtagctagatttgaatatcttttttatatggttagtgttggaatagcaatttaccactagtatgcctatcactttaaaacacctcagaaaatgacatgtggatttttgttgca

SEQ ID NO: 69575 - DNA, 605 bp, Homo sapiens
actggcctactttaataatacttccttttaaggcaatggcatataacctgaattaaatcaagtagcatttgtttgcctctttctttaagatgaaaaattaagtaattaaactacattgtggacatacattcataattggtaattccacatctcacctatacgtttattttttattagaaaatgtctttcttacttctactctagccccaattcctagaggggccttgctgacccttacttgaggacattaattgaactgtctatgaatcagattcagagacatatgtcatatataaatggtcaagcccctgaacatgttggttaaattctctgcacctcaatttattcaaaaattaaggttttttttttttaagattaaaggcattttagtgtatgcaaattctttagaacattgaattgctggaacaaactctcagatatctgcctatagaatcaagtgagagcacaagaaaaaaaaycctgcataaccaagtagctagatttgaatatcttttttatatggttagtgttggaatagcaatttaccactagtatgcctatcactttaaaacacctcagaaaatgacatgtggatttttgttgca

SEQ ID NO: 69576 - DNA, 595 bp, Homo sapiens
tgatgtttttagaacaagtttccaaaaatgtcttccaatattgacgatgaaactataaaaaccctgaataatgataataaaattaacaatcgttgaacatttattgtatggttgaaattgagaattattgcctttagttatctcaacaccactgtgatgttgttactgttatttttgctattttataaatatggtaactgaatctgggagaaattaagaatttattcaaggttatttatttatttatttatttagcatggggktctcagtacattgcccaggttggtcttaaactcctgttctcaagtttacaacagttgtgagccaccacgactggccaaggtcatccaattatttagtcatgaaggaagactgtttatcttagagagattgttttcagacctctctttcttaaccactaaatataccatacaaaactatatgagcaacattaatatctatacttagagtaattttaaaaaccaaagaaaaacaactgaaagctataatctgttttcaagaattcaaaaaactatcatagaaatagaataagagagagcctagagccgagttcaccctgcagttctctcttctc

SEQ ID NO: 69577 - DNA, 595 bp, Homo sapiens
tgatgtttttagaacaagtttccaaaaatgtcttccaatattgacgatgaaactataaaaaccctgaataatgataataaaattaacaatcgttgaacatttattgtatggttgaaattgagaattattgcctttagttatctcaacaccactgtgatgttgttactgttatttttgctattttataaatatggtaactgaatctgggagaaattaagaatttattcaaggttatttatttatttatttatttagcatggggttctcagtacattgcccaggttggtctyaaactcctgttctcaagtttacaacagttgtgagccaccacgactggccaaggtcatccaattatttagtcatgaaggaagactgtttatcttagagagattgttttcagacctctctttcttaaccactaaatataccatacaaaactatatgagcaacattaatatctatacttagagtaattttaaaaaccaaagaaaaacaactgaaagctataatctgttttcaagaattcaaaaaactatcatagaaatagaataagagagagcctagagccgagttcaccctgcagttctctcttctc

SEQ ID NO: 69578 - DNA, 595 bp, Homo sapiens
tgatgtttttagaacaagtttccaaaaatgtcttccaatattgacgatgaaactataaaaaccctgaataatgataataaaattaacaatcgttgaacatttattgtatggttgaaattgagaattattgcctttagttatctcaacaccactgtgatgttgttactgttatttttgctattttataaatatggtaactgaatctgggagaaattaagaatttattcaaggttatttatttatttatttatttagcatggggttctcagtacattgcccaggttggtcttaaactcctgttctcaagtttacaacagttgtgagccaccacgactggccaaggtcatccaattatttagtcatgaaggaagactgtttatcttagagagattgtyttcagacctctctttcttaaccactaaatataccatacaaaactatatgagcaacattaatatctatacttagagtaattttaaaaaccaaagaaaaacaactgaaagctataatctgttttcaagaattcaaaaaactatcatagaaatagaataagagagagcctagagccgagttcaccctgcagttctctcttctc

SEQ ID NO: 69579 - DNA, 595 bp, Homo sapiens
tgatgtttttagaacaagtttccaaaaatgtcttccaatattgacgatgaaactataaaaaccctgaataatgataataaaattaacaatcgttgaacatttattgtatggttgaaattgagaattattgcctttagttatctcaacaccactgtgatgttgttactgttatttttgctattttataaatatggtaactgaatctgggagaaattaagaatttattcaaggttatttatttatttatttatttagcatggggttctcagtacattgcccaggttggtcttaaactcctgttctcaagtttacaacagttgtgagccaccacgactggccaaggtcatccaattatttagtcatgaaggaagactgtttatcttagagagattgttttcagacctctctttcttaaccactaaatataccatacaaaactatatgagcaacattaatatctatacttagagtaattttaaaaaccaaagaaaaacaactgaaagctataatctgttttcaagaattcawaaaactatcatagaaatagaataagagagagcctagagccgagttcaccctgcagttctctcttctc

SEQ ID NO: 69580 - DNA, 1829 bp, Homo sapiens
cagcgacccagcttccaagatcgcctccctgctcttagcaaagctggcagattatgtggttccaggtgagaagctcctcaacaggagagtagcatggcagtgcagcattcctgtgcccagtcaggtcccccttgcatctgtgcttcctatgatgaaagagtgagtgacagagaagggagcggggacaggaatagagaagggggaagaaagattccaaatcccaaaccattatttttcattttagcagagccgccaaaacaacactgcagttttcctgaatgagctttgttttttgcttaaaggatgtcagacagttctttctccaaccgcttctgaacctgacaccacattgacaaaaaccagtcccaagaattccttgaaaggagataaagatcctggagaagagagtgaggctgtggatggcaagctctcgatatttatccacaagcgggaagaccagtcatcccatgaagtcctccagccattgctaaggtgaccataatgattgtgatagctacacatcctcaagcaccacccatgtcacaggcactgtgctaagtaagccctgtacatgtatcgactgcctcggccctctttacacccctttcaggtagacactgtcactgtgattcctgtggtgacacagaaagaaactgaggcagagctgaaatgcagatgtagtcttctctgaccatagaacccaagctctgaaccacaacttggtactgtctctctaagtgcaactgagagctaaagccatgtggacgatgtattattgtctatgggaagcctccagtgtgacttgggctttgagaaggaataatgccatttgatttttagttgttggcatccttcagctgttggtaaatttaggtaaactccaactcattgactgtgagttggagaaacaagagacacttttttaaatctttaattagttgaagtatgaaatggtgtgattactcaagaagaaagtaaaaatatagtcattgcccaaatattacaaacctgcagggctttgttagtgggatccagggcaacaggaaggcttgccacatagcacaggggaattcagagcaggtatttatgtctcagattgaagaggcctctctttacttaaatgatctgacgatgttgtcatcctcataattgaatcccctgtctgccattatggcaactgaaaacactaatgggaccatggtgtaaactaagcgggattatggcaggtcagggcttatatgaggaaatctccaagaaacattcctggacattgcaatgcatcattgtacaaatttgatgaaagattttttttggagaaccaagttcaggaggcaggggaagaagaactattagaaaggaacactaataaattttttcttagctcttttaagaaagtttaatagtttgaagttgaaaatagtttaatagcctaaaaatagtttgagataggtgagatagttgaaaataggtgaaaggttgctaagaaaataacagataataagaattacaaataccttattaaaaatataaaaatatacccaggctcacaaataattaaaggaaaggaataaaaacaatagtaatatatcatttttcatctgtcagacaagtaaartcaagaaagattagtaataccctttattgtcaaggtgagggtaaataaagtctcaagtgtccagggagaaacacacagggtgttcttcacagttttgtttgaaaaaaacaaacaaaataggccaggcgctgtggctcacgcctgtaatcttcctttctaatagatgtcattcgccaagggatcacatctatggtgtcgttaaagttccctctcc

SEQ ID NO: 69581 - DNA, 1382 bp, Homo sapiens
ggagctgtccttagggctggcatgtacattttgactgttgtcattggctacatttgaattcccagtcaagagtttgcactaacatccatccttgcatgtgtgtgtgtgagtgtgtgtgtgagtgtgtgtgtgagtgtgtgtgtgtgtgtatggaaaagtccaaataccaaaattgagagactagtataatgaaccttcaggattccattatccagtttcaacagttgtctactcataactgatcctgttttatctgtgctgcaacccctggaattatttttaatcctagatattattttattcataagtattttagtttacgtctctgaaaaataaagaatcttaaataactacaacaccattatcacctatctaaattattaacagtaatttttaaatattattaagtatctaagctgggcatggcagcatgtgcctgtaatcccagctacttgggaagctgaggcaggaggatcgcttgagcccaggcgtttgaatgcagcctgggcaacatagtgagaccctgtctctaaaaatatgtgtatatacatatctagtcagtgtttaacttcctaattttcccataaagatcatccttgtttttatatttatttatttgaatgaggatccaaataaagtttacaaattgttactttgttgctgtgtctttttaatctattttaaaatatagattcctcttagtctttttttttttttttttgccttacaatttgtttgtggaaggtttcccagtctggattttgatgactgtatccctgtggtgtcatwtaccatgttcatttgccgttttgtttcctgtaaattggtagttggcctggttaaatgaaaatttatcttttgtccccaaggatataactggaccctaagtgaaattgttcacaattcaattaacattcctccaatgctaacattttcacaaactacatgttagaaatggacggctttaaatcccttagtgcttgtaggttcatcctcttttttttttttttttttggtcttttaaaaagtctgtattactttttctcatgccgtttattttgtcagtaactctctaataccttttctgtttgtagtttttgttactctttcacattgtggtcatttctgttgttttctttttatttttaaatttgtctgtatccgttttacttctcacatctctttcttttgataagggtagtgccttggattcagcagaagctccagctgggagatccaggaaccattaataaacctcagagagatgctaagaatagagaacaagaacagaagcaaggggtgtgctaggcgtcaagggtgaaattacttgtgacttcgttttgtactcttagtaggtccttagttcactgcctctgactttt

SEQ ID NO: 69582 - DNA, 1382 bp, Homo sapiens
ggagctgtccttagggctggcatgtacattttgactgttgtcattggctacatttgaattcccagtcaagagtttgcactaacatccatccttgcatgtgtgtgtgtgagtgtgtgtgtgagtgtgtgtgtgagtgtgtgtgtgtgtgtatggaaaagtccaaataccaaaattgagagactagtataatgaaccttcaggattccattatccagtttcaacagttgtctactcataactgatcctgttttatctgtgctgcaacccctggaattatttttaatcctagatattattttattcataagtattttagtttacgtctctgaaaaataaagaatcttaaataactacaacaccattatcacctatctaaattattaacagtaatttttaaatattattaagtatctaagctgggcatggcagcatgtgcctgtaatcccagctacttgggaagctgaggcaggaggatcgcttgagcccaggcgtttgaatgcagcctgggcaacatagtgagaccctgtctctaaaaatatgtgtatatacatatctagtcagtgtttaacttcctaattttcccataaagatcatccttgtttttatatttatttatttgaatgaggatccaaataaagtttacaaattgttactttgttgctgtgtctttttaatctattttaaaatatagattcctcttagtctttttttttttttttttgccttacaatttgtttgtggaaggtttcccagtctggattttgatgactgtatccctgtggtgtcatttaccatgttcatttgccgttttgtttcctgtaaattggtagttggcctggttaaatgaaaatttatcttttgtccccaaggatataactggaccctaagtgaaattgttcacaattcaattaacattcctccaatgctaacattttcacaaactacatgttagaaatggacggctttaaatcccttagtgcttgtaggttcatcctcttttttttttttttttttggtcttttaaaaagtctgtattactttttctcatgccgtttattttgtcagtaactctctaataccttttctgtttgtagtttttgttactctttcacattgkggtcatttctgttgttttctttttatttttaaatttgtctgtatccgttttacttctcacatctctttcttttgataagggtagtgccttggattcagcagaagctccagctgggagatccaggaaccattaataaacctcagagagatgctaagaatagagaacaagaacagaagcaaggggtgtgctaggcgtcaagggtgaaattacttgtgacttcgttttgtactcttagtaggtccttagttcactgcctctgactttt

SEQ ID NO: 69583 - DNA, 1382 bp, Homo sapiens
ggagctgtccttagggctggcatgtacattttgactgttgtcattggctacatttgaattcccagtcaagagtttgcactaacatccatccttgcatgtgtgtgtgtgagtgtgtgtgtgagtgtgtgtgtgagtgtgtgtgtgtgtgtatggaaaagtccaaataccaaaattgagagactagtataatgaaccttcaggattccattatccagtttcaacagttgtctactcataactgatcctgttttatctgtgctgcaacccctggaattatttttaatcctagatattattttattcataagtattttagtttacgtctctgaaaaataaagaatcttaaataactacaacaccattatcacctatctaaattattaacagtaatttttaaatattattaagtatctaagctgggcatggcagcatgtgcctgtaatcccagctacttgggaagctgaggcaggaggatcgcttgagcccaggcgtttgaatgcagcctgggcaacatagtgagaccctgtctctaaaaatatgtgtatatacatatctagtcagtgtttaacttcctaattttcccataaagatcatccttgtttttatatttatttatttgaatgaggatccaaataaagtttacaaattgttactttgttgctgtgtctttttaatctattttaaaatatagattcctcttagtctttttttttttttttttgccttacaatttgtttgtggaaggtttcccagtctggattttgatgactgtatccctgtggtgtcatttaccatgttcatttgccgttttgtttcctgtaaattggtagttggcctggttaaatgaaaatttatcttttgtccccaaggatataactggaccctaagtgaaattgttcacaattcaattaacattcctccaatgctaacattttcacaaactacatgttagaaatggacggctttaaatcccttagtgcttgtaggttcatcctcttttttttttttttttttggtcttttaaaaagtctgtattactttttctcatgccgtttattttgtcagtaactctctaataccttttctgtttgtagtttttgttactctttcacattgtggtcatttctgttgktttctttttatttttaaatttgtctgtatccgttttacttctcacatctctttcttttgataagggtagtgccttggattcagcagaagctccagctgggagatccaggaaccattaataaacctcagagagatgctaagaatagagaacaagaacagaagcaaggggtgtgctaggcgtcaagggtgaaattacttgtgacttcgttttgtactcttagtaggtccttagttcactgcctctgactttt

SEQ ID NO: 69584 - DNA, 1382 bp, Homo sapiens
ggagctgtccttagggctggcatgtacattttgactgttgtcattggctacatttgaattcccagtcaagagtttgcactaacatccatccttgcatgtgtgtgtgtgagtgtgtgtgtgagtgtgtgtgtgagtgtgtgtgtgtgtgtatggaaaagtccaaataccaaaattgagagactagtataatgaaccttcaggattccattatccagtttcaacagttgtctactcataactgatcctgttttatctgtgctgcaacccctggaattatttttaatcctagatattattttattcataagtattttagtttacgtctctgaaaaataaagaatcttaaataactacaacaccattatcacctatctaaattattaacagtaatttttaaatattattaagtatctaagctgggcatggcagcatgtgcctgtaatcccagctacttgggaagctgaggcaggaggatcgcttgagcccaggcgtttgaatgcagcctgggcaacatagtgagaccctgtctctaaaaatatgtgtatatacatatctagtcagtgtttaacttcctaattttcccataaagatcatccttgtttttatatttatttatttgaatgaggatccaaataaagtttacaaattgttactttgttgctgtgtctttttaatctattttaaaatatagattcctcttagtctttttttttttttttttgccttacaatttgtttgtggaaggtttcccagtctggattttgatgactgtatccctgtggtgtcatttaccatgttcatttgccgttttgtttcctgtaaattggtagttggcctggttaaatgaaaatttatcttttgtccccaaggatataactggaccctaagtgaaattgttcacaattcaattaacattcctccaatgctaacattttcacaaactacatgttagaaatggacggctttaaatcccttagtgcttgtaggttcatcctcttttttttttttttttttggtcttttaaaaagtctgtattactttttctcatgccgtttattttgtcagtaactctctaataccttttctgtttgtagtttttgttactctttcacattgtggtcatttctgttgttttctttttatttttaaatttgtctgtatccgktttacttctcacatctctttcttttgataagggtagtgccttggattcagcagaagctccagctgggagatccaggaaccattaataaacctcagagagatgctaagaatagagaacaagaacagaagcaaggggtgtgctaggcgtcaagggtgaaattacttgtgacttcgttttgtactcttagtaggtccttagttcactgcctctgactttt

SEQ ID NO: 69585 - DNA, 1247 bp, Homo sapiens
tattatatctatccatttccccacagatgaacatctaagttgtttccaaacctgacccactagacgcttcacttcctcctttcatggtctcatctataaaaatgagatgccacagatgacttccaagttgccacaggctggctgcttcaaatgcagacttcacccccaggaagctcacagttcagccagggagccatgatttgtacataagtgaaagaaatctcactccatgactgaattgggtgataactggcatcttaatcctcatctctgttattggcctttaaacccttgccacccagagaatgctttgcacagtgtctggcactcctggaagagtgagtgaggccagtgggtggtatggcatgggtgagacagggaggagtggggtgcagctctgccagttgcatcagttgcatcgggggcccctgcctggtgcatccatagcagcccagcctgggcagcttcctgtcccagcccggcaggatgcacctcacgtcacacagcgggaatcctcttgctgttatttacattgcttgcaaaatccaagaaatcatccctgaatatgtggcccaatgtcttgagattaaatccttttagcaggattctctttccccagtattctcctgtgatccagaccacagagcccgcctgacggtggatccggatttgatgttactgggaacaagaaagaaaccgtgttgcgaaagctcggaatcagatctccggcccagtggaaacactgccatatgcttaattgtgctccaattacacagaatgctccagaatcgctgctctgaggtggagagacgctaatggccatcattacatttggacagccctgttcagctttatgtgatctttgcaactactgtgtggttcactgagagttgctggcctattttaacacaagagagacggtggagtttctcatttgcaaaagctgactgagcacctaggatggaccaagcctggttccagccactgaggacagtgcaaaccaggctctcatggaacttctagtccagtggggagacaagcaacacacacacgcaygcgcgcacacacacacacactgcccgtagagataagtgccgtgaagaattaagagctatgagaaatgggaacagggcctaaacagtggtccagggaggccccctgcagaggagcatttgggtacctatgtgaggtaagggagggagctgcgaggaggagatctggtggaagagtgttagcagcgggaacag

SEQ ID NO: 69586 - DNA, 1247 bp, Homo sapiens
tattatatctatccatttccccacagatgaacatctaagttgtttccaaacctgacccactagacgcttcacttcctcctttcatggtctcatctataaaaatgagatgccacagatgacttccaagttgccacaggctggctgcttcaaatgcagacttcacccccaggaagctcacagttcagccagggagccatgatttgtacataagtgaaagaaatctcactccatgactgaattgggtgataactggcatcttaatcctcatctctgttattggcctttaaacccttgccacccagagaatgctttgcacagtgtctggcactcctggaagagtgagtgaggccagtgggtggtatggcatgggtgagacagggaggagtggggtgcagctctgccagttgcatcagttgcatcgggggcccctgcctggtgcatccatagcagcccagcctgggcagcttcctgtcccagcccggcaggatgcacctcacgtcacacagcgggaatcctcttgctgttatttacattgcttgcaaaatccaagaaatcatccctgaatatgtggcccaatgtcttgagattaaatccttttagcaggattctctttccccagtattctcctgtgatccagaccacagagcccgcctgacggtggatccggatttgatgttactgggaacaagaaagaaaccgtgttgcgaaagctcggaatcagatctccggcccagtggaaacactgccatatgcttaattgtgctccaattacacagaatgctccagaatcgctgctctgaggtggagagacgctaatggccatcattacatttggacagccctgttcagctttatgtgatctttgcaactactgtgtggttcactgagagttgctggcctattttaacacaagagagacggtggagtttctcatttgcaaaagctgactgagcacctaggatggaccaagcctggttccagccactgaggacagtgcaaaccaggctctcatggaacttctagtccagtggggagacaagcaacacacacacgcacgcrcgcacacacacacacactgcccgtagagataagtgccgtgaagaattaagagctatgagaaatgggaacagggcctaaacagtggtccagggaggccccctgcagaggagcatttgggtacctatgtgaggtaagggagggagctgcgaggaggagatctggtggaagagtgttagcagcgggaacag

SEQ ID NO: 69587 - DNA, 589 bp, Homo sapiens
atttttttgtagaggcaggggtctcatcatgtttcccaggctggtctcaaactcctgagctcaagcaatctgccttccttggcctcccaaagttctgggattccaagtttgagccaccgtacctrgctattttcttctatctctatctttaagtatttaggcaatgaatttgcattgctttggaaggaaggagaaaaccagtacctatacggcccgactagaatggtactagtggggtgggaagttagaccagggtccttctcctccagtctcacccctggccctccctctgatcctggcctgggatcctgagccatgacatcctccctgcagctcacgggaggggacagcatccacataggaactgggaacctgccttcccctgcaggttcacttacccaacatcacctggtccttccagagggtctggaggggccagtgtctgcccctgcccccagcagtcacatgaaagcctctcaggctattttcccacagatttgctgagccaaacttttccctcagctctgtacccctcctgggccacattcccatgtgtagtccctggccacagtcacacctgcttgcttct

SEQ ID NO: 69588 - DNA, 770 bp, Homo sapiens
tttttggccatatcaaaacaagcttgacatttttataatgaaatgaaatataagtaatttcccctaactcatataattttacccaactcaacatctctaggaagtagacagtctaattatcataaaaagttctcaatcagtgggtaagtggtatatgtttaatgcagtctctttcaacttgtacaaatgtaaaactctattagggctatattggttattttcttgactatctattacaagcataagttataaatggctaacatgctgggaatatgacagtgaactaagtagacaagatctcattatatacaaacagaagaaagagacatagggtagagagttacattttgaagttttatgaataaaattaaggaaggcaaaggggaataaggccagacagtrgttgtgcttacaattttaagaaatgttatcagaaaggcctcactgaaccctgatacgtgagtggagaactaaagaagaatgggagacagccatgtggctgctctggagaactttccaggcagaaatcaaaggaaaggccaagtccccaaagtgactattagtcttttatgtttgagtttcaacaaagaggcaatgaatctggagcacagttggtaagaagggaatgacaggctatagggaaggaggctagaacatgtagaacttggtgggctgtggtgtgggctggggattttacagagtgaaccaggaagctcttggaaggttctgagtaaagaagccaggcgatttgctttgttgtaaatgaatct

SEQ ID NO: 69589 - DNA, 2299 bp, Homo sapiens
ataataaacaccttttttcttaatagctagatttttcaaatcataacattttaccatctgtgcttcagatatttgctaagaaacaatatattacagatacatttgaagtttctacctaataattcctctccttccccaggggaggttggtgttttttatattatatttatgatacacacacattttaaatcaatatatgtatcatatataatacaaatggtaaagcactaaatattttttccatattttaaaatttatgtaaatagcattatactttctatattctgcaattttcttttattgctcagtgttctgtttgagaggagtggttttgaggccttgaagtaaaaattatgatttattgcttttgttatttatttatggggataaataattatgtgataatataatccataagtattactgctatgtaacttgtatagataacattttataatcaaagacatttacaaactttgtatcaaaatgataattggagtcctgtttagagaacaaactaaaaaactttggcagaaaggagaagcctgttttttgagaaatgattttgtttttgctttaaattggataagtttttctggaccatagctaatgtcaattttcataataatatactggttgcataatccatttgccagtttgtcttggctgaagaagttactgaaggtgaataaaattgtaagtttttctctccttgggaacagtttctgagttattgagagaaaaggagcccaagtaccttagtgaatgggtcccggtgaccccacacaaagttgtaggagctgagctttcattagaaatagtgtttgtcccagaatattctatgcgccattttatttagtttcttctacagtcctcagaaatagacattattttctcattattcaaatgaggtaattagagcacagaggtttgcaaatcacccaaggtcacccaggtacatggtagaattgggacttaaagccagttcttttttcctccagtgttctttctattcctgccaatgcagataaacctttgaaaaaatgtaaaagtctgacttgggaaaaggaatttagtttattttactttccaatttctcagtctgattttcacaaagagagttttttgttgttgcttgtgaataggtttctatatatttttattggccctagctatgtgactcttctcaaagcctaaaaacctgaatgtattttcaaactgataatggtcacttctacccaacattatgagctttgtcaatacgttttcctcatcttctgtcatacatatgcatgcttattttattttttacatatttatttcttattttctccccccaaattcacctccctcattgtccaaattcaatacagctatggtattggcaatatctactttgccttcttatgatgtggtcatttgtatcaaatgagaaaacaaatgttgtttcaaagtatgatgagctatacaaatgaaagagatctagaaactgtatttcagtctgaagtttaatgttactctctcttatgccaggataggattaccagtgatgtcagtgaacagaaaaagagatacattttcccacagttttgttctttgaaaaactatgttttgttctcygtaaataaaggggaaagaatgattttatagataatgctttcatttgcatgtaagacagcaaaattcaacggaccaattacaatcatgcatttttattttggcaaacttttttcttgccatttaaaattcgtaaattttattgtatataacccagtaaagttgattttagaaatctctaaaagttaaaaaaaaacccaaagaatgtcactatttgcaaccacttaagatctaagtattaagcatctgtggctgctaacatcacaaaaagagagacaactagacactatgtgccttttgctgaaagatcgtaccactacctagggtcatacccaaaacagatacttgcctctgatcaatcatctggatccaacaacgaatttacaagttacatagcagccagaagatacatggaactactctatgggaattcaatcagccaaacccatatcgtgagaacatttatagaaaaacaaccttcatcaagtaaattttaaggataaaatagaagagatagagggcaagatagaagagatagagggaaaacttgcacattcaaagagatttaggtatctatcacattgaagagattataattcctcatcttgttgatgttcatgccttttgctgtctaatgttacagtacccctccaccataggaggggttacctgttctacccct

SEQ ID NO: 69590 - DNA, 1254 bp, Homo sapiens
cagatgcatggctcactgcatcctccacctcccagactcaagtgatcctccttcctcagcctcccaagcagctgggaacaaaagtgtgtgccactatacctggctaattttttagcttttgtagaagggtctcactatgttacccaggctggtctcaaactcctggcttcaagccatcctcccaccttggccttccaaagtgttgggattacaggcgagagccactgtgcctggcttgctrtggctttttagagtttctcacccaattacctcctctactcaatttctagctcccatttttggttcctccatggcctttgtcccccaaatctgcccttgttgtcagagcactggactaggagtcaggagtaccaggtttgtcatcagttagccctttgtgtctcatggccccatctgtaaactggaatggggttttctcttgatctcaggatgtaagtgggatggaaaagtgcccaatctcacttaagactgtggtttcctgacccagagtttcagttctgtcttttctttttcagtatcaggagtgttacatgcctgttatcctaaacacacactcacactcataaaggtataaaactgagtcctcccagaagtattatctgtcagttgggtatctgttgttatgttacagatgattccttcactccttacaccaaccctggcagttgggtatgtggattacccatgtgtattagttcattctcacactgctataaagacatacccaagactggacaatttataaaggaaagaggcttaattgactcacagttacacatggctggggaggcctcaagaaacaatcatggaagaagccaagagagaagcaaaggcacgtcttacatggcagcagaccagagagaccgcaaatgggcgaaactggaacagccccttataaaaccatcagatctcgtgagaactcacttactatcacgagaacagcatgggggaaacctccctctgatccaatcacctcccaccaggttccaccctccacaggtgaggattatgggaattacaattcaagatgagatttgggtgggggcacagagccaaaccatatcaccatgtttcatatgaagaaagtgggaattagagaggccaaggaacttgcccaaggtcacatgctgggaatggtaggctgcggtaccgcaggaagacataagatgaaatgcatgaagaacattctgaaaaaagtgaaattttctccagtgcttggctttatcgtgagct

SEQ ID NO: 69591 - DNA, 2207 bp, Homo sapiens
agcccagttttgtgctattaattcattgctgaagagttgcctcaaagattgggaaggctatttttctctccataggctttgctctcttcctattccagtaaagaagtatttttcttctatttgtattattttgctctatgcttgtagccaatatgatagcatatgctgctcatgggtgttacaaagacacgaagaagctttaatgctgattttctttttgagttctaacttcataggcggtgaatttaataagggcaaagaagacaaataatgtcttttgtccgtttttgctttgtaccgttgttaggtgacagtatctttcataaaggcattatggttctgatgacctaaatgtatccctcctgttgtgaagaacatgagttaccaatgcattaaaatagtctttattcctggtttactcaattttgctgcagtaaaaaggacaaagctggtgataatgccaaaatactctaatacgtaatggtgcatttcaaaacagggttttcaggacctcagcaagtccaatatgtatcagggccgagcctcagggatcataccagggtgcagttatgctttcccagctgactctgtctgcctcaatgtcacatggggccaggaatattcctgtgattttaagtgttgtggtgaggcatgagtcatctgtgaatgcactttttagggtctgaaggtcctatgaggtattacccttgagaaagactggagaaagaaaggctagggctaggagttgaccactgccacccatgtccaggccctaccagcaaagtcataggctcatcacgggtcattgcacatgcctacctgtgccttggtatggctagagcctggatccaaacctctggtcaatgttgggcaaaagagatcaccagagattgggcaagctatgctctgaggaaacttctgatgacagctctgcctgtggctacacttgctcacttcttttttgtttttagatagggtcttgctttgtcacccagtttagagtacagtggtatgatcctagctcactgcagcctcaaactcctgcctcagcttccccagtagctaggactaaactggtatgcaccactgcacctggcaaatttaacttttttgtagagatggggtctcgctatgttgcccaggctagtcttgaactcctggcctcaagtgaccctccctcctcagcctcccaaaatgctgggattataggtatgagccactatgcctcacttttactggaagatacttaaggaggaaaaggaaggaacctcttgatttcctatcgctgtctcttctcttcttatctcccccatttgcagcttctctgggatttagaaaataaccaagtagagatttgccttaaacaattggcttatttttctttgatttattaaggaataggagggagattgtgatgatggtgggaggagtgaaatgtgaagaaaattaacctttgcatccctactggatgtcagaccttttgcatacagtctcttattttggtcttgtatcacctatgcaaggtaagcattcattccatcatccattaatttattgagtgcttattatgttccaggcagcattctaggggctgatcattaatatctccaattaaagatgaagaaaaaaatctgagagagactaaaaaacttgctccaagtcgtgcaattaatcagtggagaaacagaattcaagtccaggacaggtccactgggtctgatgatttcttctttgcaggtgggaggcagttatttttaagaggtttaataaggagtttaataaggttaactagaccagtttctccttaatgattaatgctgaaagtatatctccacataatttgtgtggaaccaaagcgggaatgtgtggagactgttactgctccctttcctgctttgttttcagtttccttctgtatcacctctatttttctgactcctctcccctccatcattcattccctcccctttgatgtggacaagtcatgaactcttgatcttatgtagagtactttgcaagctcaacttcaaagacctcttccaaccacatattgaccactaaacccttctcaggtagaaatttggagcttctrtggtcagttcctttggaagcttccttaggattcagtgtaaataaagctccatatctaagattccattcagaacaaagtaaaaataatttttaatttgttggatgtttgaaggatc

SEQ ID NO: 69592 - DNA, 1029 bp, Homo sapiens
gaaacgtgatttcccctgaatgctacccctgaacacttcaacagtttctaccttttactacttcccccycaattttttttttaataagaaataatcatgccagtaggatgcaagtaggagactagactatggctggagactggacttccgacctttaagcctcagatcacaaaaaagcagcctcagtgttttcttctagaaacgccttttccctgcaaggactaattgtgttgtgttctgagttatatacagctgtatttgaggtacttgagaacaaacatagtcctttctaccttttggaggaataatttattgaaatgccacctcaagctatctgtagtgattaatttcctttaaagacataatcagacctatgctctctgtcctcctgacttttaggattcctagagaagacctattagtgtagcacccagaggtattcatattttcatcttctatcttggttgtgttgatgctgatgatgttaatatcacctgtcttaatttaatccaggcccaaatgtccattcccctcagcctcatagcggacattgtaattgaatacagtgttccctcttgagccccaaaggagccataatccagtctcctatttgcagtcaacaggagtggtgtgctgctggcatgataatccctttccctggaaagggctcattcatcacaataatttgtagtagtcctttgtggattatccaataatcgatgcagttaaaatatgagattgaagtgttggaaaaaataatattctaatcttgacatagttctttaatgaggctaattagtaacacaaattcttcatacagtttcaaaccctttatagagataattttcatgttctgaatactttttttttttaacattttaaaatatgggatattgttcttcaaatactctggagctcctctgacaatggccattcagaggtaaaccgctgactcaaaacaggtccaaaatcagtgcaagtgtctccaagacaagcagatctaggtctttatgtagtcaacatgtttgc

SEQ ID NO: 69593 - DNA, 696 bp, Homo sapiens
gcccaactcctcctcccaaagtgctgagattacaggtgtgagccactgtgcctgacctcttttttttttacacaagttaattttcagtttcccctctagctttagaaaagatcagtgtttctcgttaagaaccacatgtattttggtttgcatttaggggctataggtatgaaaaacatatattttaaaataatagactcatgctcagtaaggtgagatgctcatagtataaaagcatatcaggaacagaatacatcctaggaaatagcagactcaactccagctggagcttayacagggttataaattcactgagaagaatggccatggaactgcaagcagtgttgaaattgttatctatcttttcactaccaaatacccctcgccccacaggcaggtaaaactaaattcacagaaattaaatccctccactgatgaaaaaggcaccaggctgtaaaaagaagattaatctagcaatcaaatacctcgatgaatgtgcagagtggcttggaagtgagcagtagttaaaaacaaatgtaacaaaatataagatggaatactttacatcacagttttggctgaggctccaaagactgagaataaatcagtatctgcccagtcaccacggtgtgccaaaggaggtgctggattgcctcgtcaggacatgctacatggatggagagaagattccttggg

SEQ ID NO: 69594 - DNA, 1471 bp, Homo sapiens
ggaagctgaagaaaccgcattctcatgctgacttagctccttggtggaatcttcagactagttggcttcaactgttctgaaaacatctcaaacagaaagtcttgggctcctaacatctataggaacaatgaggaagttcatggtttatgtcacagcctatgtggtccataagtagctacagggaagtaggtcaaatggcaacctgatcaatgccctctctgtacctttatctaaagtctggcatgtaattctcgttaaccctgtggagatggtgttaacagtgcagtcttccaggaccaggaggggaaaaggggcacataacctctttgggctgtccaggcggatggcggcatttgcaaggctgctgggaagagagatggggccagcgctggaattggcttcagaggtagtggctggtcattaatgagatgccaaaatgggggcgtacaagggatcaagcagcaagtgttcgtggagagtccactgtgtgctcagcaaagcgttaggaccagcgtgtgggaggagctggtggggagcaaagcagtggggttgtgggtccatttgctcctccagagggacaccgagtgacatcagtgcctctgtagtgatgagcagagttgctacctctgtactctgggaggcagcttggtttgtgtctgaaagcctttgttggtggatgagtgtccatgtatctgatctccatgacctcagagaattatcaagcgcccaggggatcggagcctcctgcgaaaatagaaggacctaaaggtaccaggtgaaagggatggctgggaagtcccacgggcaagttttcttttcctttgtcctttgttttctttctctcccagatctggatcctataaagaatgctatagataggaaaataaataaaaactctatcacagatttgatttttactctcatttattggagttcaggcatacaggacacagagaagggaaataaacagcaattatataaggtttctgtcaaaaaattttctctatttttatggcaatacaaccaccaaaaccctaaaactcttactctcttaaaatgcagctccctttgatgggtgtgtatggcaaaggtgacaagtgattttattttgatttttaaaaacagacctgctagaacatctgccacactaggtgttgaaaaagtgagctgtttaggtacctgaccactcttagttccagtaaatacttttaataataaaagtagctatttaaaaatatttacycttggctgggagaagtggctcatgcctgtaatcccagcactttgagaggccaaggtgggaggattgcttgaggccaggagtttgagaccagcctgggtaacaaagtgagaccctgtctctataaaaaaataaaaaattacccagggttagtgatgtgtgtctgtagttccagctactcaggaggctgaggcaggaggatcacttgagcctgggagttcaaggttgaag

SEQ ID NO: 69595 - DNA, 1826 bp, Homo sapiens
aaagtgctcgtgcatcagggctttacctctcttgttgctcttggaaaggtgccaccatatgaatcagcctgggctagcctgctggaggatgagaggcacatggcacagtcttccctgccagctgacattcagtcaacttccagatatgcaagtgaggccatccaggaccagccagccaccagccaattccccagcctactgcagatgtatgagagagcccagctgagatcattcagtagcttctacagaatcaagggctaaattaatggtggttgttttaagtcactgagttttggggatgtactatgcagcaatagatcactggtatgccatggctctatacattttcagttttttaactgaattataaagggatggctgggtgcagtggctcacgcctgtaatcctagtgctttgggaggctgacgtgggaggattgcttgagcccagaagtttgcgacaccgtctctgccaaaataaaaagtaaaaaaattaactaggcatggtggcacacacatgtagtcccagctactagggaggctgaagtgggaggatggcttgagcccaggagttcgggggtgcagtgaactacgattgcaccactgcaccactccagcctgagtgacagagtgagaccccattttttttaagcatttggctgcaagtaagagaaaaacctaacagtggttgaaacaaatagggtttactatttaagaaatctgcagttgctttttaagaagtctagacaggcagttgctggtattggttcagcttttcaatgggggatatcaaggacccaggctctttttatctcttctctagcctcttcagcatgcctatatttaccttcgtgcttgtcccttagtgttgccaagatgatctccacactctgggatgcatgtccacttcaaaggaggaaggaggaaaggggctgtagtggccagtctggaagtcaaagattttcccaaaggccctattggccagatctgaatcacatggttatccctgctgcaaaggaggctggggacatgagactctgatttagttggtcagggagaaggagatttggaatgactatcagaccagccagtgagtactgtctaccacgtgtgctatcattgaaggggggaaaggaataagcatgtgtaaytaattttccatcctccacccaaacctgatgacccatgtccattccctgctcctgctgccagattgtggatgccattgcttctgaaacaaacatgtgggggtgttctttgcttgaagccaacctcttcacctctgagtgacactaggtgacctcagactctttcatccattggtatatgggccaatgtcccttagaccagagttagcaagaagttcctcccttccctggtccaaaggcccaccccatttctttgctcatccaaaacttttttaggataattcagagtaggaatatctactccctttatataaacattccagcttcaacaatcatgctgtggtctacccccaaggcccaaaaggacagctcacaaaatagtttaacattccctaaagtcttattcagtgtcatttctgatcaccttgatataaaatatttagcaggatgtaaatgtatagttataccctgaaatcatttacattgaaaatattgtgaccttaacgtgttgttgaaagaacacaaaatcctttctagaactgaaggacagacacttccacttacagataggaaatttttgaattgaggtctatgcaccattagtccatgggattttagaggaatattatttccaaatattgtataccccaggattatgtcaaaatgttgtgtataaagg

SEQ ID NO: 69596 - DNA, 2125 bp, Homo sapiens
aaatgaggagaggaaaagtgttttaatttctgttgtcagtgagtktgcccagactcaggtacagaccgttgggttcaaaacgggcttcagtggctgccagtttgggaaagttgcttaagctctgtgtgccttcgttctctcatctatgaaatgggattaaacatagtctcatctttctgagggggctgtgaggccgaaatgagcacacacacccgtagaacagggccccaggagtgcttgctggcattttcattattgtgactcttgatgttattctgtgagacactcttcttgttccctgccccttttgggtcaatgtttttgaaagaagacgttcatgtggaaacctagtgttgatctcttcagtcatttagcaagtcttcgaacacctattatatgccaggtaatggtgatttttataatttggcctgtttattaatgaacaacttaaagtaggtaaataattcctaatggtgaatgagtccatctgaggcaaaatctgataattatcaccatatattctgcagaagagaagatctaatcataaccttaacatcctattaatcctgaaaagggatatgaatagtaaaattcagatgtatttaatcagaaaccatatgtcatctgtcagctttactttattcataaaagtatccatgctgtgaggtttttttccttcttcttcttctttgaaaatatatccttctctatggttctctcctttttctttttgaatttaagcgttcacaccatttttcattttttaagaacagtggttcccaaccctggatgcacattagagtcatctagaaagctttaaaaaattatgtcctacctcaagttgagtaaatcagaatatcagggccaggcgcggtggctcacacctataatcccagcactttgggaggccaaggcaggcagatcacttgagctcaggagtttgagaccagcctgggcaacatggtaaaacctggtatctataaaaaaaaaaaagtaaaataaataaataatatatttatatatatttatataaaaatattatataaataaataataagaataccagggacttgggtggccttagtttcaaaatgtcctcaggtgtctctagtgtgccctaggattgagagccactaatgtcaagtgtgtatgtccttttgtattttagaggtgggattgcagatgtctggaatgtctgtgaaaagagtcatgggatctgctaactagtagaaagcctcctcttgaaaaactgggaactaagaaaaggaaagagactttattccctttgatacctttagaaccatttctcagatatccactttatctaaacaagaaatggtaatgattggtgtaaaaaacttcccaccaaagaaaaatgcactgtgaattacctttcagagacaactgagactccatgtaagttcacatttgcatgggtacttgaaccaaattgcatttaaggttttccagctgcaggatccctcatgtaggatctatctctaacatttcctccaaatttaagacccgtggtagcctgattcttgattctcaccccccccccttttttttttgagacggagtctcgccctgtcaccaggctggagtgcagtggcatgatcacagctcaccgcaagctctgcctcccaggttcaagcgattctcctgccttagcctctcgagtagttgggactacaggcgcatgccaccacacctggctaattttttttgtatttttagtatagacgaggtttcgccatgttggccaggatggtctcgatctcttgacattgtgatccacgtgcctcggcctcccaaagtgctgggattacaggcatgagccactgctcccggcctaattctccttttgttgggcataagtgagaggaggggagatgtcttaaacgatttcgagaacttggttgacaggccctaccttgtgggaagagggaatggcccgtcatgctctcagatcccatctctcctcaagtcatttcaaggaaatatggacagtggtcaaattagtttgcgagcatttcttttttttattttattttattttattattattcttttttgagacggagtctcgctctgtcgcccaggctggagtgcagtggcacgatct

SEQ ID NO: 69597 - DNA, 2125 bp, Homo sapiens
aaatgaggagaggaaaagtgttttaatttctgttgtcagtgagtgtgcccagactcaggtacagaccgttgggttcaaaacgggcttcagtggctgccagtttgggaaagttgcttaagctctgtgtgccttcgttctctcatctatgaaatgggattaaacatagtctcatctttctgagggggctgtgaggccgaaatgagcacacacacccgtagaacagggccccaggagtgcttgctggcattttcattattgtgactcttgatgttattctgtgagacactcttcttgttccctgccccttttgggtcaatgtttttgaaagaagacgttcatgtggaaacctagtgttgatctcttcagtcatttagcaagtcttcgaacacctattatatgccaggtaatggtgatttttataatttggcctgtttattaatgaacaacttaaagtaggtaaataattcctaatggtgaatgagtccatctgaggcaaaatctgataattatcaccatatattctgcagaagagaagatctaatcataaccttaacatcctattaatcctgaaaagggatatgaatagtaaaattcagatgtatttaatcagaaaccatatgtcatctgtcagctttactttattcataaaagtatccatgctgtgaggtttttttccttcttcttcttctttgaaaatatatccttctctatggttctctcctttttctttttgaatttaagcgttcacaccatttttcattttttaagaacagtggttcccaaccctggatgcacattagagtcatctagaaagctttaaaaaattatgtcctacctcaagttgagtaaatcagaatatcagggccaggcgcggtggctcacacctataatcccagcactttgggaggccaaggcaggcagatcacttgagctcaggagtttgagaccagcctgggcaacatggtaaaacctggtatctataaaaaaaaaaaagtaaaataaataaataatatatttatatatatttatataaaaatattatataaataaataataagaataccagggacttgggtggccttagtttcaaaatgtcctcaggtgtctctagtgtgccctaggattgagagccactaatgtcaagtgtgtatgtccttttgtattttagaggtgggattgcagatgtctggaatgtctgtgaaaagagtcatgggatctgctaactagtagaaagcctcctcttgaaaaactgggaactaagaaaaggaaagagactttattccctttgatacctttagaaccatttctcagatatccactttatctaaacaagaaatggtaatgattggtgtaaaaaacttcccaccaaagaaaaatgcactgtgaattacctttcagagacaactgagactccatgtaagttcacatttgcatgggtasttgaaccaaattgcatttaaggttttccagctgcaggatccctcatgtaggatctatctctaacatttcctccaaatttaagacccgtggtagcctgattcttgattctcaccccccccccttttttttttgagacggagtctcgccctgtcaccaggctggagtgcagtggcatgatcacagctcaccgcaagctctgcctcccaggttcaagcgattctcctgccttagcctctcgagtagttgggactacaggcgcatgccaccacacctggctaattttttttgtatttttagtatagacgaggtttcgccatgttggccaggatggtctcgatctcttgacattgtgatccacgtgcctcggcctcccaaagtgctgggattacaggcatgagccactgctcccggcctaattctccttttgttgggcataagtgagaggaggggagatgtcttaaacgatttcgagaacttggttgacaggccctaccttgtgggaagagggaatggcccgtcatgctctcagatcccatctctcctcaagtcatttcaaggaaatatggacagtggtcaaattagtttgcgagcatttcttttttttattttattttattttattattattcttttttgagacggagtctcgctctgtcgcccaggctggagtgcagtggcacgatct

SEQ ID NO: 69598 - DNA, 1294 bp, Homo sapiens
tacaccataaatatatacagctgggtgagaaggtgcatgtcagtaatcccagttactcaggaggctgaggtgggagtattgcttgaggcgatcaaccaggagcttgaggctacaggctatagtgcactatgatggcgcctatgaatagccactgcactccagcctgggcaacagagcaaaaccctgtctctaaattaaaaaaaaaaaaatgaaaacttaaaaaatatattattattatttgtcaaggaaaatacatttaaaaaacaaacaaaatgcttcagtcactgcccatggagctcctactagccagagagaatcaaacaaattgagaaagagaggaaccagcacctcagttctggcagcttgccaggtagcgtttgcttacctctgatcttacttaaaaaccaagtgagatatgtcacaacaaaagtgtctctgtcatagcagtctcaacacaatgaagatgtttttctaaccaaagaacacagttagttggaagagctctacaaaattagtaccagggaaggctttagttaacacttgccccagacgctgggacccagaaaggctaagtgatttacctaaggttacacagctggcagcagtgtctagcccagaatcaagagctaactagaatctcctaaggtgaaattgcctatcactgtgcctcttaacatgatttctaaaagacaaggttccctgttcctcagaactataacttcatcactataccttttcctaaaatcagaacacttatgactgacttttcgttgttttaatgaatttaatcattcattaaatgggacggtgcctatacatcagttacgaaaaagaatttccatctccgatacatttaattacagatataaaatttaactaattttacccatgtttacagtatgctgcttaaaatttaatcataagtatataaaagcataattatctcatayataaatgagggtatataaaaagtacctttgcagaaatatataatttatactaaaacgtcacatattctgttacaaagactgatttatttcaaagaatgaagaaactaaattaccactacacttggtaacaaagatctgtgcccataagatcttttctttaacatctgtaagaactacatgagaaaaacacaaacattaaccaaggttaaaagaaaaaacaaacaacttgcaatataagcagctataaacagtgccctccatggtgaaaaataaagtccacacataagtatcctagcaaaaatttcactacacacacacacacacacacacacacacacacacac

SEQ ID NO: 69599 - DNA, 1294 bp, Homo sapiens
tacaccataaatatatacagctgggtgagaaggtgcatgtcagtaatcccagttactcaggaggctgaggtgggagtattgcttgaggcgatcaaccaggagcttgaggctacaggctatagtgcactatgatggcgcctatgaatagccactgcactccagcctgggcaacagagcaaaaccctgtctctaaattaaaaaaaaaaaaatgaaaacttaaaaaatatattattattatttgtcaaggaaaatacatttaaaaaacaaacaaaatgcttcagtcactgcccatggagctcctactagccagagagaatcaaacaaattgagaaagagaggaaccagcacctcagttctggcagcttgccaggtagcgtttgcttacctctgatcttacttaaaaaccaagtgagatatgtcacaacaaaagtgtctctgtcatagcagtctcaacacaatgaagatgtttttctaaccaaagaacacagttagttggaagagctctacaaaattagtaccagggaaggctttagttaacacttgccccagacgctgggacccagaaaggctaagtgatttacctaaggttacacagctggcagcagtgtctagcccagaatcaagagctaactagaatctcctaaggtgaaattgcctatcactgtgcctcttaacatgatttctaaaagacaaggttccctgttcctcagaactataacttcatcactataccttttcctaaaatcagaacacttatgactgacttttcgttgttttaatgaatttaatcattcattaaatgggacggtgcctatacatcagttacgaaaaagaatttccatctccgatacatttaattacagatataaaatttaactaattttacccatgtttacagtatgctgcttaaaatttaatcataagtatataaaagcataattatctcatacataaatgagggtatataaaaagtacctttgcagaaatatataatttatactaaaacrtcacatattctgttacaaagactgatttatttcaaagaatgaagaaactaaattaccactacacttggtaacaaagatctgtgcccataagatcttttctttaacatctgtaagaactacatgagaaaaacacaaacattaaccaaggttaaaagaaaaaacaaacaacttgcaatataagcagctataaacagtgccctccatggtgaaaaataaagtccacacataagtatcctagcaaaaatttcactacacacacacacacacacacacacacacacacacac

SEQ ID NO: 69600 - DNA, 1328 bp, Homo sapiens
taatgggcaattggggtgagaactggtgtgctgcaaggagcagagcttccaaaaactataaccaaaaccctctcaccttacaactgcaaacaagagaggacttagaacaagctgaacagaggatgcatctacccgcccacccactcactcactcactcaccaagtgtttgttgagaacctactacctgccaggcaggttgaagtgtcctccagactcgatagcctgagcaaacagagagctcttctgagctagaatttaggcagcttagctctgacatcttgcagcctctgaaactcagacctctgagagtcatctaagaacagaagcataagggatggatggggagggggtgctgtgggtagaagatctctgcggtgttccagaatctctccaccccaygtgagccctttgttctgtttcctagacgtggtcagcaagaaaaccctcacactgtaaaggatttttctgcattttttttagtggccttgagaaagggggaaagactggatcataccccaaagttgttgtcacagtagcctaaatgagggtcctcagcctgggcctggaggcctgtgtcttcttttctttttcaaaagatctgtgtgtgtgtgtgtgtgtgtgtgtgtgtgtgtgtaattgcttttctttattacagaagcaatgcattattcactatagaaaatttagaaaattaaaattcgtttgaaaggtacaagtaataattatctttatattctcttatcccaaagataaaccccttcaagtaagtatatttacattttctactgtatgtgattagcccttgtttttaaccaaaatggggtgatattctacatttttttgtaatggactttttcctttactgaaataccatgatcatcctttctatatcagatattttactccatcacttaatgactggataatatttcatggtataatgtaccataaattatttagttaatccccagttattgggtatttagtttgctcccaattgaaaaccacacacacacacatacatcactgtaattaaatccttgcacacactcatcatagttttctaaaactgaaattattgagtcagaagattatagtatatttttaaataaactttttattctagaatagttttagatttacagaaaatctgcaaagataatataagagttcctgcccacatccagttcccccatcgttaagatgttacatgaatatgagacatttgttccaactaatggaccagcattgacacattgttattaactacatgtcatagtctattctgatttcctgagtttctccctaatatcctttttctgatcca

SEQ ID NO: 69601 - DNA, 1328 bp, Homo sapiens
taatgggcaattggggtgagaactggtgtgctgcaaggagcagagcttccaaaaactataaccaaaaccctctcaccttacaactgcaaacaagagaggacttagaacaagctgaacagaggatgcatctacccgcccacccactcactcactcactcaccaagtgtttgttgagaacctactacctgccaggcaggttgaagtgtcctccagactcgatagcctgagcaaacagagagctcttctgagctagaatttaggcagcttagctctgacatcttgcagcctctgaaactcagacctctgagagtcatctaagaacagaagcataagggatggatggggagggggtgctgtgggtagaagatctctgcggtgttccagaatctctccaccccatgtgagccctttgttctgtttcctagacgtggtcagcaagaaaaccctcacactgtaaaggatttttctgcattttttttagtggccttgagaaagggggaaagactggatcataccccaaagttgttgtcacagtagcctaaatgagggtcctcagcctgggcctggaggcctgtgtcttcttttctttttcaaaagatctgtgtgtgtgtgtgtgtgtgtgtgtgtgtgtgtgtaattgcttttctttattacagaagcaatgcattattcactatagaaaatttagaaaattaaaattcgtttgaaaggtacaagtaataattatctttatattctcttatcccaaagataaaccccttcaagtaagtatatttacattttctactgtatgtgattagcccttgtttttaaccaaaatggggtgatattctacatttttttgtaatggactttttcctttactgaaataccatgatcatcctttctatatcagatattttactccatcacttaatgactggataatatttcatggtataatgtaccataaattatttagttaatccccagttattgggtatttagtttgctcccaattgaaaaccacacacacacacatacatcactgtaattaaatccttgcacacactcatcatagttttctaaaactgaaattattgagtcagaagattatagtatatttttaaataaactttttattctagaatagttttagatttacagaaaatctgcaaagataatataagagttcctgcccacatccagttcccccatcgttaagatgttacatgaatatgagacatttgttccaactaatggaccagyattgacacattgttattaactacatgtcatagtctattctgatttcctgagtttctccctaatatcctttttctgatcca

SEQ ID NO: 69602 - DNA, 1328 bp, Homo sapiens
taatgggcaattggggtgagaactggtgtgctgcaaggagcagagcttccaaaaactataaccaaaaccctctcaccttacaactgcaaacaagagaggacttagaacaagctgaacagaggatgcatctacccgcccacccactcactcactcactcaccaagtgtttgttgagaacctactacctgccaggcaggttgaagtgtcctccagactcgatagcctgagcaaacagagagctcttctgagctagaatttaggcagcttagctctgacatcttgcagcctctgaaactcagacctctgagagtcatctaagaacagaagcataagggatggatggggagggggtgctgtgggtagaagatctctgcggtgttccagaatctctccaccccatgtgagccctttgttctgtttcctagacgtggtcagcaagaaaaccctcacactgtaaaggatttttctgcattttttttagtggccttgagaaagggggaaagactggatcataccccaaagttgttgtcacagtagcctaaatgagggtcctcagcctgggcctggaggcctgtgtcttcttttctttttcaaaagatctgtgtgtgtgtgtgtgtgtgtgtgtgtgtgtgtgtaattgcttttctttattacagaagcaatgcattattcactatagaaaatttagaaaattaaaattcgtttgaaaggtacaagtaataattatctttatattctcttatcccaaagataaaccccttcaagtaagtatatttacattttctactgtatgtgattagcccttgtttttaaccaaaatggggtgatattctacatttttttgtaatggactttttcctttactgaaataccatgatcatcctttctatatcagatattttactccatcacttaatgactggataatatttcatggtataatgtaccataaattatttagttaatccccagttattgggtatttagtttgctcccaattgaaaaccacacacacacacatacatcactgtaattaaatccttgcacacactcatcatagttttctaaaactgaaattattgagtcagaagattatagtatatttttaaataaactttttattctagaatagttttagatttacagaaaatctgcaaagataatataagagttcctgcccacatccagttcccccatcgttaagatgttacatgaatatgagacatttgttccaactaatggaccagcattgacacattgttattaactacatgtcatagyctattctgatttcctgagtttctccctaatatcctttttctgatcca

SEQ ID NO: 69603 - DNA, 671 bp, Homo sapiens
cctgaagcatagtaggttctgtataaagacttgttgaataaataagaaaatgcattaatgtgtgagtgaaaaaaatgagggcatcacacttctttaaaaacttaaaaaacactaatacggtgaatccataataaacctatatggacttgggatcatagaacttctccattaccagataaaacgtagtctttactccgtttcctcatacagataaagcaattgtgtcagggaacactaaayggggcattgtactaaagctaccaaggcagttgtgagaacaatccctagaccaggaccctttagatagataattagttcaagtatctgcattagctgttagttgtttttgtttttgtttttgagacagagtctcattctgtctcccaggctggagtgcagtggtgcaatctcggctcactgcaacctctgcctcctgggttcaagcgattctcctgcctcagcctcccaagtagctgggattacaggcatgtgccgccatgcctcatttttgtatttttaggagagacagggtttcaccatgttggccaggctggtctcgaactcctgacctcaggtgatccgcccgccttgacctcccaaagtgctcggattacaagcgtgagccaccgcacctggccgtgttagttgttgtgaactcccctcaggatccc

SEQ ID NO: 69604 - DNA, 1004 bp, Homo sapiens
caattagctcatgtgcctgtatgtcaattttactgattgactgagtgaattttttaatttatatttttgttttgctgatgtaagccttgagaagcctgttagcataaataaatagatggaaataggaggagacgtattatagcagtgtcatcattctttaarctcaacttttgagtgatataccaaacatataagaaaagagttgaggaactaccatacttgtggaagaatgtatagtctagacttgtgttaaccagtagccattagccacctctggctatttaaattaattaaaattttaaattaaaattcagttcttcagttgcatcagccatattttaagtgtttaatagccatatttagctagtacgtttgccagcacagataatagaacatttctgtcattgtcgaaagctctattggatagtgttggtctagacattctttcttctttattttttagagacggggttcctccatgttggtcaggctggtctcgaactcccgacctcaggtgatctgccctcttcgtccctccaaagtgctgggattacaggtgtgagctaccacacccggacaaaaaaaccagggggatttttttttttttgatatggagttttactcttgtcgcccaggctggagtgcagtggagcaatctcagcttgccgtaacctctgcctcccaggtttgagtgattcttctgtctcagcctcctccgtagctgggattacaggcatatgccaccatatccggctaattttttgtatttttagtagagacgggctttctccatgttggtcaggctggtcttgaactcctgacatcagataatcaacccaccttggcctcccaaagtgctgggattacaggtgtgagccactgcgccctggtctagatattaaagacatcttctttctcaatacttgcactaatatttttaattattttcatttttagtaccccagagctttttctaccccagaataaatgcagcatcgtttttt

SEQ ID NO: 69605 - DNA, 2295 bp, Homo sapiens
atcctcccacctcggcctcccaaagtgctgggattacaggcgtgagccaccgcgcccagccctgtctaacttttatgtacagggatggctctggcatttccttctttatttttatttttatgtttttaaccgtatccctggtggtaggtgaggctatggtatttttagccggaaaagctcagggcagcaatctgggggcaatcggggcagcaaaatgggggaagcttgaggcaattccctggaatctttttagatctggaggatgctgatggagattacagaggaggaagggctaaaagacccaccgtaggctatcttttggtgctgtcactacccacacatcttttttcttttatcttgtagaaactgcttgttctggcaggctctcacccagccaattaagccacgctcacccaatagaaaatctcaaaattttctctgaacttcccatttccatcagaagggcattaaagtgtcccacagacatttatttggtcatggggatgccaacatgaacaagatggtccttgtcctcaagttgttcacagtctaaagtgaagtagagccaggtacagtggctcacggtaatcccaacattttgggaggctgagatgggaggatcacttgaggccaggcatttgagaccagcctgggcaacatagtgagaccccatctcaacaaaaaatttaaaaactagtcaggcatggtggtgcacgttggaagtcccagctacttgggaggccaaggcaggaggatcctttgagcccaggggtttgaggctgcagtgagctatgatcatgtcattgcactcaagcctggttggcagagtgagaccttgtctctattaaaagaataataataataaagtagagtaggggtaaagggacatacacagacagacaagctatatgcatgagctgtatttgcaatgagtggtgtgttgtaaaaatcacagtgtgtgtgttctgtttacctcgtctgtgctccctatttgtatctcctctctctcatctayagcagctcgtattttattctttcccacattccattcattacacaaatacttgttgagtcttgagtctgtgctaagtgctgaggctacagtggcattggacttgtattccaatggagagaatcagataataagcaagtatacaaataagatattatttagtgaaagagaaaacagacgaagggatagaaagtgaccattaggggaggtaaagtggggaaaggttgcaacaacgggcacagcaatctctctgaggaggtgacatttgaactaagatctgatgggcaggtaagaggtaaccaagcatgggaatatctggggaagagcagggctggcaggtgaaactggaaggggcagactgagcaggaagtctgtggtattgcaggaatggaaagaaggtccaggtgactagagcttagtgtcacaggggagagggacagcagctgagatcacagaggtcatcagaggccaatcaggagggctggaagtccttgataaggtgtctgaattttattatcagtgcaatttggagaggggaatgtacttttcctatgatcagatatgcgtgttttttattcagggtatcctttttagcatataaagaaacagaattagtgatgaaaatattgattgcttggtgagtacagaattagagcaaagacagatgaaaggtcttgagggatattttaataggctctccaagggtccacagcactggggattttccttttcaaatatctggatatttgtgtgcatcagatatactaaactctcttgaacaaagtttaactcctcaagtctccttgtttttagggtaggcaggaatccatgcccttttgtctgtattctttatcacaccatcacctttccttacttccacagcctttgttacattcccagttacagatgatatttaatcacctcaagaatctagtccaggccgggtgtggtggctcacgcctgtaatcccagcactttgggaggccaaggcaggaggatcacatgaggccaggagtttgagaccagcctggccaatatggtgaaaccccatctctatttaaaaataataataataaaaaaagctggtcatggtggcacacgcctgtagtcccagctactcgggaggctgaggtaggagaatctcttgaacccgggaggcagaggttgcagtgagccaagatcaccccactgcactccagcctgagcaatagagcgagattctgtctcaaaaaaaaaaaaaaagagagaaaaaaaaagaatgtagtctaaaactatcataaact

SEQ ID NO: 69606 - DNA, 709 bp, Homo sapiens
tgcttatgaccaaggactcccaatgatcaaatccagccaactgagttaagcctcaacctcatgtgaatctatagaaatctgcatagccagttaccacttctgaactgttttgactcaattcaattccaacatgaagtcaccaaatgttagcacagactctgcaggttaagggctcagctccacaaaactgtccccacttcrgacttctgtcccaagtcccaggttgccacatgtatgtataaccagctggctataaattatggggaggggttcccatattcccctccacaggtttgataatttgttagaaacactcacaaaacccaggaaaacagttggccattttattataagagataggagtttacaatccttggagtaataatgtgtgactgatgtttccttgtttgtcatttctagcaatttccaaatcctataattctgtactaaaagtatctctttcaactccaattaggatttattccttcccacttatatgtggttacggagggtgtccttattaaagaatgcaaatgaacagccaggtgaagaggcccagaatggttcccaatgcaggagcttctgttccatggaattgggggtgtgctacctcccagcacatggaccaaatttaagtgtgcatcaacctggctgttccccaaaacccatcatttagagttgtttatggaggttttcagttatggaggaa

SEQ ID NO: 69607 - DNA, 1595 bp, Homo sapiens
ttccctctgtgtgctacaaactgttccaggcctgcagttatgaacaagataggtgagaatccctgtttcatggagcttatcttctcatgagggaggcaaaccaataaaacacgttggtgtcagatgcggacagatctgtggagaacagtgaaacagtgctgaggaggaggggtgcagggggaattggaatccaagggctaggaggtgccttggacaaccccagtccctcatccagcataaatggggacaagagcatggtggggtcaggtgcagtgagagtggcagtgaggctgtaggcattggctgggacagggcaggggtcttcccttgcttcatggagccctgtgcccctccmtctgtgatctgaggcaggagtgcacacagtcccccacgctgcttgtcttttgtcctgcgtggagggtggtggcagggcaggagtgctctgaggagctgtcccgcccccgtcctctggttctgtttgagtggaggggctgggcttcctgggctctggtcagtgcctcgatctcatccttcctgacctccagacacctgggaggatccttctcctgtgtcttcagcttttctgtcagctttttccaagcatttaaggattctctagttgaatccatccttaaaaaaaagaaggttctgcctggcctcctgctccccctggtgactgtccccttgccctgcgttcttgcctttccttccagggtgaactttggaagcagttgtccatgcttgcagcatgcttgcagtgtcctctgcccctcctacagcttcactttctggatgtggcttcccattgcacctgctttcatcatggtgacccccggcattcccatccagtggacatgttagtcctcactccccggttccggtgcccttcggcacagctgcccactctcttctatggtggctccacattcttccacccccatggctcgagcttccctctggccccttctccagctcctgccttgccaccccccgcctcgcttctcctttgtcccaagtatcctttgggggcccacgcctggcttgctgcctctgcttccccgctcccagtccactgtgctttgcgacttcccctctgttttgagggaggatgtccttggtgccatcctctgtccccgcatctggggaagcactctgcaccgctgcagcccaggccgtcctcgggagagtggcttattcggtggacccctcttgagatgcaggtctttgggtcacctgcccctttactcacagcctagcctggcctctgccagacacagatgtcctgatcatcattccattgtattcactcactactaccctaagctccctcccggcagccaggggctgccactgcataggtcaagttggctgcctggggattgtggccagtaaagcccacaggggaccccgagctgcccattttcatggtaattgaaacactgttctaaaacaatattccatataccctgagcaatattttttacataacaaacacattttggcaggaatcctaggaagcgtctcttccttggagacttcatttgagagaaggctcagcagactgtggcgtttttttccccccagagagcagtttg

SEQ ID NO: 69608 - DNA, 1595 bp, Homo sapiens
ttccctctgtgtgctacaaactgttccaggcctgcagttatgaacaagataggtgagaatccctgtttcatggagcttatcttctcatgagggaggcaaaccaataaaacacgttggtgtcagatgcggacagatctgtggagaacagtgaaacagtgctgaggaggaggggtgcagggggaattggaatccaagggctaggaggtgccttggacaaccccagtccctcatccagcataaatggggacaagagcatggtggggtcaggtgcagtgagagtggcagtgaggctgtaggcattggctgggacagggcaggggtcttcccttgcttcatggagccctgtgcccctccctctgtgatctgaggcaggagtgcacacagtcccccacgctgcttgtcytttgtcctgcgtggagggtggtggcagggcaggagtgctctgaggagctgtcccgcccccgtcctctggttctgtttgagtggaggggctgggcttcctgggctctggtcagtgcctcgatctcatccttcctgacctccagacacctgggaggatccttctcctgtgtcttcagcttttctgtcagctttttccaagcatttaaggattctctagttgaatccatccttaaaaaaaagaaggttctgcctggcctcctgctccccctggtgactgtccccttgccctgcgttcttgcctttccttccagggtgaactttggaagcagttgtccatgcttgcagcatgcttgcagtgtcctctgcccctcctacagcttcactttctggatgtggcttcccattgcacctgctttcatcatggtgacccccggcattcccatccagtggacatgttagtcctcactccccggttccggtgcccttcggcacagctgcccactctcttctatggtggctccacattcttccacccccatggctcgagcttccctctggccccttctccagctcctgccttgccaccccccgcctcgcttctcctttgtcccaagtatcctttgggggcccacgcctggcttgctgcctctgcttccccgctcccagtccactgtgctttgcgacttcccctctgttttgagggaggatgtccttggtgccatcctctgtccccgcatctggggaagcactctgcaccgctgcagcccaggccgtcctcgggagagtggcttattcggtggacccctcttgagatgcaggtctttgggtcacctgcccctttactcacagcctagcctggcctctgccagacacagatgtcctgatcatcattccattgtattcactcactactaccctaagctccctcccggcagccaggggctgccactgcataggtcaagttggctgcctggggattgtggccagtaaagcccacaggggaccccgagctgcccattttcatggtaattgaaacactgttctaaaacaatattccatataccctgagcaatattttttacataacaaacacattttggcaggaatcctaggaagcgtctcttccttggagacttcatttgagagaaggctcagcagactgtggcgtttttttccccccagagagcagtttg

SEQ ID NO: 69609 - DNA, 2103 bp, Homo sapiens
aatrgtgacaaatgggccccaatgaaaacctgtgaggtgttaagacgttgcccgctgcaatagatttttctgatttcttacagtggaaaagcaggcctacgagtgaatagacttgctggcacctttcagtcctaccctcctgccccaccccagatagctcaggcagaaagacagaggcgacttgctgaggagggaggctgctgtgatcttggtaggcagggttgggcttctgcgctgcagaagggagctctaatcaggagaaggagaaggtgtagtgcaggagtccccagcagcagtgtgcccggcagaggacgccctggctctgccatgctttgctgttctaggtttcctagaaggccagagctcatgggttggtctccgtcaacctctcccgttcccccgatgagctgtgcacatctggtcacttgctgcgtgcacagtggttagagttgaattagagggtgctgcttcacaaaccctagctacctctccccacccctcgccactagtggcctattctggttgcctggcactcaggccagagaagtggaaccctcctcagggttccctgtggggtggccagttacggcctgcaggccactggtgaacacaggcggctctatgaacccttttgcattcgccttgcggcctgctgacggccaaacagacggctcccccttctcctggggcagctgcaggtgccatgctggtgtctgacacacgcactcccacgcaagcctgggacaccaggtgaaaagaagggcaatgccggcaggcttggaggtgcctgcccatggggcaccaggatgtcctgcacaggtggcaggccagtgcgcatcaggagccccagaacccgccttgggtgcatgtggtcagagacagggcttcctctgaggccacccagggacgaggacaggagaaccccggggcaggctgtggccctgggagtgcatgcagaatgctccagtgttgaccgaggtgggcccgggttcctgcagggctggaggcaggccaagctggggactcacactgctccaggactctcccttctctgtccgtttggcacataggggccagagggtgccctaaagaagtgtctagcaaatcatcaaagcctaccagatggaccagggccgggagatgcagcaccagccacctggacgcctggcactcactgcagcctcacgccttagaagagtgaccatggactgcacggtgaatgaagttttatgctgaattcaagatgcaaacagattcaaaccactttccaatgaagctgaatcatcctaaaacagatctgatcacaccactcctgttaaagccatccctgcatttccccattgagggaaggaggtatccccagacgggaagctggtcaagtggcctgagcaaagatttgtgacccagagttcagagaaaaacagagggctgaaaaatcacgcacgtgtgggatcccaatgacaacttcataacgtgtgtatgagcgaaaagattgtaaagaacaaaaatgcccagttattgtttttctggatggtgtgattctggtgataccttatttccctttttatacctttctgtatcttccaagcattctgcaataatcaggcatcacttttatgagcgctaagtcctcaggtacagtttgcccattcattgagaggctgtgtggctgcaggagggacacagtcaggaggtgctgtgagtggcccaacttgtcctgcccctgcactttcacccttggagatgccatggccacacacacaggatagcccaggccttctgagccatacggctgtcatatatatatatatttatttattttaatttttgaggtggaatctcgctctgtcacccaggctagagtgcagtggcacgatctcagctcactgcaacttccacctcccaggttcaagcgattctcctgcctcagcctcccaagtaggtgggattataggcatgtgccaccatgcctggctaatttttgtatttttagtagagacggggtttcatcatgttggccaggctggtctcaaacctgacctcaggtgatctgcctgcctcggcctcccaaagtgctgggattccaggtgtgagccactgtgc

SEQ ID NO: 69610 - DNA, 2103 bp, Homo sapiens
aatagtgacaaatgggccccaatgaaaacctgtgaggtgttaagacgttgcccgctgcaatagatttttctgatktcttacagtggaaaagcaggcctacgagtgaatagacttgctggcacctttcagtcctaccctcctgccccaccccagatagctcaggcagaaagacagaggcgacttgctgaggagggaggctgctgtgatcttggtaggcagggttgggcttctgcgctgcagaagggagctctaatcaggagaaggagaaggtgtagtgcaggagtccccagcagcagtgtgcccggcagaggacgccctggctctgccatgctttgctgttctaggtttcctagaaggccagagctcatgggttggtctccgtcaacctctcccgttcccccgatgagctgtgcacatctggtcacttgctgcgtgcacagtggttagagttgaattagagggtgctgcttcacaaaccctagctacctctccccacccctcgccactagtggcctattctggttgcctggcactcaggccagagaagtggaaccctcctcagggttccctgtggggtggccagttacggcctgcaggccactggtgaacacaggcggctctatgaacccttttgcattcgccttgcggcctgctgacggccaaacagacggctcccccttctcctggggcagctgcaggtgccatgctggtgtctgacacacgcactcccacgcaagcctgggacaccaggtgaaaagaagggcaatgccggcaggcttggaggtgcctgcccatggggcaccaggatgtcctgcacaggtggcaggccagtgcgcatcaggagccccagaacccgccttgggtgcatgtggtcagagacagggcttcctctgaggccacccagggacgaggacaggagaaccccggggcaggctgtggccctgggagtgcatgcagaatgctccagtgttgaccgaggtgggcccgggttcctgcagggctggaggcaggccaagctggggactcacactgctccaggactctcccttctctgtccgtttggcacataggggccagagggtgccctaaagaagtgtctagcaaatcatcaaagcctaccagatggaccagggccgggagatgcagcaccagccacctggacgcctggcactcactgcagcctcacgccttagaagagtgaccatggactgcacggtgaatgaagttttatgctgaattcaagatgcaaacagattcaaaccactttccaatgaagctgaatcatcctaaaacagatctgatcacaccactcctgttaaagccatccctgcatttccccattgagggaaggaggtatccccagacgggaagctggtcaagtggcctgagcaaagatttgtgacccagagttcagagaaaaacagagggctgaaaaatcacgcacgtgtgggatcccaatgacaacttcataacgtgtgtatgagcgaaaagattgtaaagaacaaaaatgcccagttattgtttttctggatggtgtgattctggtgataccttatttccctttttatacctttctgtatcttccaagcattctgcaataatcaggcatcacttttatgagcgctaagtcctcaggtacagtttgcccattcattgagaggctgtgtggctgcaggagggacacagtcaggaggtgctgtgagtggcccaacttgtcctgcccctgcactttcacccttggagatgccatggccacacacacaggatagcccaggccttctgagccatacggctgtcatatatatatatatttatttattttaatttttgaggtggaatctcgctctgtcacccaggctagagtgcagtggcacgatctcagctcactgcaacttccacctcccaggttcaagcgattctcctgcctcagcctcccaagtaggtgggattataggcatgtgccaccatgcctggctaatttttgtatttttagtagagacggggtttcatcatgttggccaggctggtctcaaacctgacctcaggtgatctgcctgcctcggcctcccaaagtgctgggattccaggtgtgagccactgtgc

SEQ ID NO: 69611 - DNA, 2103 bp, Homo sapiens
aatagtgacaaatgggccccaatgaaaacctgtgaggtgttaagacgttgcccgctgcaatagatttttctgatttcttacagtggaaaagcaggcctacgagtgaatagacttgctggcacctttcagtcctaccctcctgccccaccccagmtagctcaggcagaaagacagaggcgacttgctgaggagggaggctgctgtgatcttggtaggcagggttgggcttctgcgctgcagaagggagctctaatcaggagaaggagaaggtgtagtgcaggagtccccagcagcagtgtgcccggcagaggacgccctggctctgccatgctttgctgttctaggtttcctagaaggccagagctcatgggttggtctccgtcaacctctcccgttcccccgatgagctgtgcacatctggtcacttgctgcgtgcacagtggttagagttgaattagagggtgctgcttcacaaaccctagctacctctccccacccctcgccactagtggcctattctggttgcctggcactcaggccagagaagtggaaccctcctcagggttccctgtggggtggccagttacggcctgcaggccactggtgaacacaggcggctctatgaacccttttgcattcgccttgcggcctgctgacggccaaacagacggctcccccttctcctggggcagctgcaggtgccatgctggtgtctgacacacgcactcccacgcaagcctgggacaccaggtgaaaagaagggcaatgccggcaggcttggaggtgcctgcccatggggcaccaggatgtcctgcacaggtggcaggccagtgcgcatcaggagccccagaacccgccttgggtgcatgtggtcagagacagggcttcctctgaggccacccagggacgaggacaggagaaccccggggcaggctgtggccctgggagtgcatgcagaatgctccagtgttgaccgaggtgggcccgggttcctgcagggctggaggcaggccaagctggggactcacactgctccaggactctcccttctctgtccgtttggcacataggggccagagggtgccctaaagaagtgtctagcaaatcatcaaagcctaccagatggaccagggccgggagatgcagcaccagccacctggacgcctggcactcactgcagcctcacgccttagaagagtgaccatggactgcacggtgaatgaagttttatgctgaattcaagatgcaaacagattcaaaccactttccaatgaagctgaatcatcctaaaacagatctgatcacaccactcctgttaaagccatccctgcatttccccattgagggaaggaggtatccccagacgggaagctggtcaagtggcctgagcaaagatttgtgacccagagttcagagaaaaacagagggctgaaaaatcacgcacgtgtgggatcccaatgacaacttcataacgtgtgtatgagcgaaaagattgtaaagaacaaaaatgcccagttattgtttttctggatggtgtgattctggtgataccttatttccctttttatacctttctgtatcttccaagcattctgcaataatcaggcatcacttttatgagcgctaagtcctcaggtacagtttgcccattcattgagaggctgtgtggctgcaggagggacacagtcaggaggtgctgtgagtggcccaacttgtcctgcccctgcactttcacccttggagatgccatggccacacacacaggatagcccaggccttctgagccatacggctgtcatatatatatatatttatttattttaatttttgaggtggaatctcgctctgtcacccaggctagagtgcagtggcacgatctcagctcactgcaacttccacctcccaggttcaagcgattctcctgcctcagcctcccaagtaggtgggattataggcatgtgccaccatgcctggctaatttttgtatttttagtagagacggggtttcatcatgttggccaggctggtctcaaacctgacctcaggtgatctgcctgcctcggcctcccaaagtgctgggattccaggtgtgagccactgtgc

SEQ ID NO: 69612 - DNA, 2103 bp, Homo sapiens
aatagtgacaaatgggccccaatgaaaacctgtgaggtgttaagacgttgcccgctgcaatagatttttctgatttcttacagtggaaaagcaggcctacgagtgaatagacttgctggcacctttcagtcctaccctcctgccccaccccagatagctcaggcagaaagacagaggcgacttgctgaggagggaggctgctgtgatcttggtaggcagggttgggcttctgcgctgcagaaggsagctctaatcaggagaaggagaaggtgtagtgcaggagtccccagcagcagtgtgcccggcagaggacgccctggctctgccatgctttgctgttctaggtttcctagaaggccagagctcatgggttggtctccgtcaacctctcccgttcccccgatgagctgtgcacatctggtcacttgctgcgtgcacagtggttagagttgaattagagggtgctgcttcacaaaccctagctacctctccccacccctcgccactagtggcctattctggttgcctggcactcaggccagagaagtggaaccctcctcagggttccctgtggggtggccagttacggcctgcaggccactggtgaacacaggcggctctatgaacccttttgcattcgccttgcggcctgctgacggccaaacagacggctcccccttctcctggggcagctgcaggtgccatgctggtgtctgacacacgcactcccacgcaagcctgggacaccaggtgaaaagaagggcaatgccggcaggcttggaggtgcctgcccatggggcaccaggatgtcctgcacaggtggcaggccagtgcgcatcaggagccccagaacccgccttgggtgcatgtggtcagagacagggcttcctctgaggccacccagggacgaggacaggagaaccccggggcaggctgtggccctgggagtgcatgcagaatgctccagtgttgaccgaggtgggcccgggttcctgcagggctggaggcaggccaagctggggactcacactgctccaggactctcccttctctgtccgtttggcacataggggccagagggtgccctaaagaagtgtctagcaaatcatcaaagcctaccagatggaccagggccgggagatgcagcaccagccacctggacgcctggcactcactgcagcctcacgccttagaagagtgaccatggactgcacggtgaatgaagttttatgctgaattcaagatgcaaacagattcaaaccactttccaatgaagctgaatcatcctaaaacagatctgatcacaccactcctgttaaagccatccctgcatttccccattgagggaaggaggtatccccagacgggaagctggtcaagtggcctgagcaaagatttgtgacccagagttcagagaaaaacagagggctgaaaaatcacgcacgtgtgggatcccaatgacaacttcataacgtgtgtatgagcgaaaagattgtaaagaacaaaaatgcccagttattgtttttctggatggtgtgattctggtgataccttatttccctttttatacctttctgtatcttccaagcattctgcaataatcaggcatcacttttatgagcgctaagtcctcaggtacagtttgcccattcattgagaggctgtgtggctgcaggagggacacagtcaggaggtgctgtgagtggcccaacttgtcctgcccctgcactttcacccttggagatgccatggccacacacacaggatagcccaggccttctgagccatacggctgtcatatatatatatatttatttattttaatttttgaggtggaatctcgctctgtcacccaggctagagtgcagtggcacgatctcagctcactgcaacttccacctcccaggttcaagcgattctcctgcctcagcctcccaagtaggtgggattataggcatgtgccaccatgcctggctaatttttgtatttttagtagagacggggtttcatcatgttggccaggctggtctcaaacctgacctcaggtgatctgcctgcctcggcctcccaaagtgctgggattccaggtgtgagccactgtgc

SEQ ID NO: 69613 - DNA, 2103 bp, Homo sapiens
aatagtgacaaatgggccccaatgaaaacctgtgaggtgttaagacgttgcccgctgcaatagatttttctgatttcttacagtggaaaagcaggcctacgagtgaatagacttgctggcacctttcagtcctaccctcctgccccaccccagatagctcaggcagaaagacagaggcgacttgctgaggagggaggctgctgtgatcttggtaggcagggttgggcttctgcgctgcagaagggagctctaatcaggagaaggagaaggtgtagtgcaggagtccccagcagcagtgtgcccggcagaggacgccctggctctgccatgctttgctgttctaggtttcctagaaggccagagctcatgggttggtctccgtcaacctctcccgttcccccgatgagctgtgcacatctggtcacttgctgcgtgcacagtgsttagagttgaattagagggtgctgcttcacaaaccctagctacctctccccacccctcgccactagtggcctattctggttgcctggcactcaggccagagaagtggaaccctcctcagggttccctgtggggtggccagttacggcctgcaggccactggtgaacacaggcggctctatgaacccttttgcattcgccttgcggcctgctgacggccaaacagacggctcccccttctcctggggcagctgcaggtgccatgctggtgtctgacacacgcactcccacgcaagcctgggacaccaggtgaaaagaagggcaatgccggcaggcttggaggtgcctgcccatggggcaccaggatgtcctgcacaggtggcaggccagtgcgcatcaggagccccagaacccgccttgggtgcatgtggtcagagacagggcttcctctgaggccacccagggacgaggacaggagaaccccggggcaggctgtggccctgggagtgcatgcagaatgctccagtgttgaccgaggtgggcccgggttcctgcagggctggaggcaggccaagctggggactcacactgctccaggactctcccttctctgtccgtttggcacataggggccagagggtgccctaaagaagtgtctagcaaatcatcaaagcctaccagatggaccagggccgggagatgcagcaccagccacctggacgcctggcactcactgcagcctcacgccttagaagagtgaccatggactgcacggtgaatgaagttttatgctgaattcaagatgcaaacagattcaaaccactttccaatgaagctgaatcatcctaaaacagatctgatcacaccactcctgttaaagccatccctgcatttccccattgagggaaggaggtatccccagacgggaagctggtcaagtggcctgagcaaagatttgtgacccagagttcagagaaaaacagagggctgaaaaatcacgcacgtgtgggatcccaatgacaacttcataacgtgtgtatgagcgaaaagattgtaaagaacaaaaatgcccagttattgtttttctggatggtgtgattctggtgataccttatttccctttttatacctttctgtatcttccaagcattctgcaataatcaggcatcacttttatgagcgctaagtcctcaggtacagtttgcccattcattgagaggctgtgtggctgcaggagggacacagtcaggaggtgctgtgagtggcccaacttgtcctgcccctgcactttcacccttggagatgccatggccacacacacaggatagcccaggccttctgagccatacggctgtcatatatatatatatttatttattttaatttttgaggtggaatctcgctctgtcacccaggctagagtgcagtggcacgatctcagctcactgcaacttccacctcccaggttcaagcgattctcctgcctcagcctcccaagtaggtgggattataggcatgtgccaccatgcctggctaatttttgtatttttagtagagacggggtttcatcatgttggccaggctggtctcaaacctgacctcaggtgatctgcctgcctcggcctcccaaagtgctgggattccaggtgtgagccactgtgc

SEQ ID NO: 69614 - DNA, 2103 bp, Homo sapiens
aatagtgacaaatgggccccaatgaaaacctgtgaggtgttaagacgttgcccgctgcaatagatttttctgatttcttacagtggaaaagcaggcctacgagtgaatagacttgctggcacctttcagtcctaccctcctgccccaccccagatagctcaggcagaaagacagaggcgacttgctgaggagggaggctgctgtgatcttggtaggcagggttgggcttctgcgctgcagaagggagctctaatcaggagaaggagaaggtgtagtgcaggagtccccagcagcagtgtgcccggcagaggacgccctggctctgccatgctttgctgttctaggtttcctagaaggccagagctcatgggttggtctccgtcaacctctcccgttcccccgatgagctgtgcacatctggtcacttgctgcgtgcacagtggttagagttgaattagagggtgctgcttcacaaaccctagctacctctccccacccctcgccactagtggcctattctggttgcctggcactcaggccagagaagtggaaccctcctcagggttccctgtggggtggccagttacggcctgcaggccactggtgaacacaggcggctctatgaacccttttgcattcgccttgcggcctgctgacggccaaacagacggctcccccttctcctggggcagctgcaggtgccatgctggtgtctgacacacgcactcccacgcaagcctgggacaccaggtgaaaagaagggcaatgccggcaggcttggaggtgcctgcccatggggcaccaggatgtcctgcacaggtggcaggccagtgcgcatcaggagccccagaacccgccttgggtgcatgtggtcagagacagggcttcctctgaggccacccagggacgaggacaggagaaccccggggcaggctgtggccctgggagtgcatgcagaatgctccagtgttgaccgaggtgggcccgggttcctgcagggctggaggcaggccaagctggggactcacactgctccaggactctcccttctctgtccgtttggcacataggggccagagggtgccctaaagaagtgtctagcaaatcaycaaagcctaccagatggaccagggccgggagatgcagcaccagccacctggacgcctggcactcactgcagcctcacgccttagaagagtgaccatggactgcacggtgaatgaagttttatgctgaattcaagatgcaaacagattcaaaccactttccaatgaagctgaatcatcctaaaacagatctgatcacaccactcctgttaaagccatccctgcatttccccattgagggaaggaggtatccccagacgggaagctggtcaagtggcctgagcaaagatttgtgacccagagttcagagaaaaacagagggctgaaaaatcacgcacgtgtgggatcccaatgacaacttcataacgtgtgtatgagcgaaaagattgtaaagaacaaaaatgcccagttattgtttttctggatggtgtgattctggtgataccttatttccctttttatacctttctgtatcttccaagcattctgcaataatcaggcatcacttttatgagcgctaagtcctcaggtacagtttgcccattcattgagaggctgtgtggctgcaggagggacacagtcaggaggtgctgtgagtggcccaacttgtcctgcccctgcactttcacccttggagatgccatggccacacacacaggatagcccaggccttctgagccatacggctgtcatatatatatatatttatttattttaatttttgaggtggaatctcgctctgtcacccaggctagagtgcagtggcacgatctcagctcactgcaacttccacctcccaggttcaagcgattctcctgcctcagcctcccaagtaggtgggattataggcatgtgccaccatgcctggctaatttttgtatttttagtagagacggggtttcatcatgttggccaggctggtctcaaacctgacctcaggtgatctgcctgcctcggcctcccaaagtgctgggattccaggtgtgagccactgtgc

SEQ ID NO: 69615 - DNA, 751 bp, Homo sapiens
tctgaaatgcaggatgcacgaggtctgtgctggactggccaacccttctgccttcctgagatgaccagatgggtttagacagtgtcatctgctggctcctcttccctcgtacctgactcaacctgctcatgatctgggagacagtgtcatatcctagtatcctgggccactccagggacagcagtacaggtggcaggtgacacccaaggttgagctgagcctcctgactcttcattcatctggcctccakggagagtctccgcctgtctgggtttcaatttcatcttctgtaagatggggacttcccactcaccccttagggcggtttgcaggtccacagaggtggtgaggcagaaggccttcctttgtaaactgagcgccagcacctgctacccacctatgctccctggggtgggcctgcttggcttggctgggaggcagcaaggggcaccttgaccaatcaaagtgatgtgctggcacagttgctaattctcacgccagtccccaggagctatctgcctgaggaggagaacaattctgcttccctgggtcaccttccatggaacaatgacttccaagtagaacaggtaaggccacaggtgggcagaatctagaatttatttgtacagactgtgactatagtgggttagtgtcccccctcaaattcatgtctacatagaacctgagaatatgaccttatctggaaatatggtctgtgtaggtgcaattagttaaggatctcaaggtgaaa

SEQ ID NO: 69616 - DNA, 751 bp, Homo sapiens
tctgaaatgcaggatgcacgaggtctgtgctggactggccaacccttctgccttcctgagatgaccagatgggtttagacagtgtcatctgctggctcctcttccctcgtacctgactcaacctgctcatgatctgggagacagtgtcatatcctagtatcctgggccactccagggacagcagtacaggtggcaggtgacacccaaggttgagctgagcctcctgactcttcattcatctggcctccagggagagtctccgcctgtctgggtttcaatttcrtcttctgtaagatggggacttcccactcaccccttagggcggtttgcaggtccacagaggtggtgaggcagaaggccttcctttgtaaactgagcgccagcacctgctacccacctatgctccctggggtgggcctgcttggcttggctgggaggcagcaaggggcaccttgaccaatcaaagtgatgtgctggcacagttgctaattctcacgccagtccccaggagctatctgcctgaggaggagaacaattctgcttccctgggtcaccttccatggaacaatgacttccaagtagaacaggtaaggccacaggtgggcagaatctagaatttatttgtacagactgtgactatagtgggttagtgtcccccctcaaattcatgtctacatagaacctgagaatatgaccttatctggaaatatggtctgtgtaggtgcaattagttaaggatctcaaggtgaaa

SEQ ID NO: 69617 - DNA, 729 bp, Homo sapiens
taatttacacccttagtttggcctccatgaaagactggagtgaccttcactgaaatgatacaaggggcccagggagctgcggcgctcagaatgcggtgacagcgccgcctcgcgtcccttccctgacctgctcccrgcggacgcggagaagtttgttggcctggaggctggaatataccggggatcaaatgcagagaatggagaaaagagggaaggatggggggacgtgttgaagaaatgagggaagagataggaataaaaggggagagaaaaagtaaaggagagtttttgtttttttttttttgagacggagtcttgctctgtcgcccaggctggagtgcagtggcgcgatcttggctcactgcaagctccgcctcccgggttcagggcattctgctgcctcagcctctggagtagctgggactacaggctcctgccaccacgcccgactaattttttgtatttttagtagagacggggtttcactgtgttagccaggatggtctcgatctcctgacctcgtgatctgcctgcctcggcctctcaaagtgctgggattacaggcgtgagccaccgcacccggccggagacagaaaatttaaaagacgtagtttcattatttcttttatttttgccctttatctagttttacttatgaacatttttaccacaaatttctctctctctaaatctgtaaatatgctgctattattgttatttcagagcctg

SEQ ID NO: 69618 - DNA, 729 bp, Homo sapiens
taatttacacccttagtttggcctccatgaaagactggagtgaccttcactgaaatgatacaaggggcccagggagctgcggcgctcagaatgcggtgacagcgccgcctcgcgtcccttccctgacctgctcccggcggacgcggagaagtttgttggcctggaggctggaatataccggggatcaaatgcagagaatggagaaaagagggaaggatggggggacgtgttgaagaaatgagggaagagataggaakaaaaggggagagaaaaagtaaaggagagtttttgtttttttttttttgagacggagtcttgctctgtcgcccaggctggagtgcagtggcgcgatcttggctcactgcaagctccgcctcccgggttcagggcattctgctgcctcagcctctggagtagctgggactacaggctcctgccaccacgcccgactaattttttgtatttttagtagagacggggtttcactgtgttagccaggatggtctcgatctcctgacctcgtgatctgcctgcctcggcctctcaaagtgctgggattacaggcgtgagccaccgcacccggccggagacagaaaatttaaaagacgtagtttcattatttcttttatttttgccctttatctagttttacttatgaacatttttaccacaaatttctctctctctaaatctgtaaatatgctgctattattgttatttcagagcctg

SEQ ID NO: 69619 - DNA, 729 bp, Homo sapiens
taatttacacccttagtttggcctccatgaaagactggagtgaccttcactgaaatgatacaaggggcccagggagctgcggcgctcagaatgcggtgacagcgccgcctcgcgtcccttccctgacctgctcccggcggacgcggagaagtttgttggcctggaggctggaatataccggggatcaaatgcagagaatggagaaaagagggaaggatggggggacgtgttgaagaaatgagggaagagataggaataaaaggggagagaaaaagtaaaggagagtttttktttttttttttttgagacggagtcttgctctgtcgcccaggctggagtgcagtggcgcgatcttggctcactgcaagctccgcctcccgggttcagggcattctgctgcctcagcctctggagtagctgggactacaggctcctgccaccacgcccgactaattttttgtatttttagtagagacggggtttcactgtgttagccaggatggtctcgatctcctgacctcgtgatctgcctgcctcggcctctcaaagtgctgggattacaggcgtgagccaccgcacccggccggagacagaaaatttaaaagacgtagtttcattatttcttttatttttgccctttatctagttttacttatgaacatttttaccacaaatttctctctctctaaatctgtaaatatgctgctattattgttatttcagagcctg

SEQ ID NO: 69620 - DNA, 1594 bp, Homo sapiens
tcagtgaaagagtgcaccagagggccaggccactcacagaaagggttgtggcagctgcgtgccctgactatctggccctgtgggcctttattcagcacagatttaatgacaaaggctttgagtcaacacacctgtgggtaattaatctggtcgcagtcccccggagagagcagtcctacaaatgatcaaaggtaaacatgctctttagataaactctcttacatgtctttgtacttactcgaagctattaactcaaggtaaggggattaggctgctttcagctataaccctatcctgaggcttttgcaaaactttccaccttccaagaaggtttgtgtctatttcctataactttatctttataattattcccaccacctgaccaatcccctacaatgttggaattttatcttttagtgtaaacttggatttgggtggattgcagtggttcatgactataatcccagctctttgggaatygaaggcaggaggattgcttaagcccaggagttccaggctgcagtgagctatgattgtgccattgcactccagcctgagtgacaggaggagaccctgtccccaaaacagaaaaataaataaaattttaaaataataaaaattataaacttggatttatgtggaggttaaggaagagaatatttcagtttgaaaatatgaagctaagccccacaacgaaatagttacagagttttaaaaacgaaaatgttcattaaaacccaccaccagaaactctctttcaagaggatccttcatattttcatggcattgaatctttcttaaagtgcatttgaaagagatgttttcagtggaatagagagatgtgtaacaatatttacaaaagcggttggctgtaataaaaaggaaaacgcaaatgagtggggacacaggggaccctgttccatttattctcaaagcacgtttgaaaactgcgttgccatagcgtccttgggtagaggcaaagtcgaggcagatcttgttcctggagtattgatttgattttggaaacggtccaaggctttcagaaatcaggctgactttcagatctaaagtctcaagaatattcgttctagcagtgagcctgtgagaatctagcccatctgggcgatgcacgctctgcttccacctagtggcagtgattggaaggacagggcacagtgttactgcatgggtgggtctgaagccaaggtgaaaccgcctttgcaaaattataactaaggaaatgatgacagcgaaagacatcaaacctaactgaccccatcttgcttccaaccgctaaactgcccttcttcatttctaggcgtaggctgaactaggcttgggaaggaatttagtttatagtttaaagggaaactgttcttgtaaaacgaagaaaggccaccggccattaagttaggatgagaggagctggaattctgaatattaccagccattattccggaggtcataagatttgcaacttctccagttactcttgaaggtaacatcactattgtgaacctcagagtggccttttgagatgtcttttcaggtttttgtatttttaacaactggagggccccatctggacctgcca

SEQ ID NO: 69621 - DNA, 906 bp, Homo sapiens
gccctctggcttctcagatgctgggactcctctcctccatgaccttctcctctgtctgcctgaatctcatgcccttgtcatataagcattatttcgtaggagagctgctatcatcctgccatggccatggtctgtccctgacaccaggatcctgttgctttgttgttgttctcccctaaagagtcctaggtctcatcatggccaagaaccccagcccttccatactctctatctcacacttyccattctctgaccatctttccactcatccccttgcacggaggccacaggctctgaggatacttatactatcattttatcatatgctgtgacgtaatatcagtgaaccactcattgcctatgtgcctgctttccaggcttggagtctgccctgtagtacatcaattccaacaatccttccacccactctgggattcccaatccagtgatcctgccatctactcactgtccctcacccttgatgtcctctcctccctcttcagccattttgaattctattgtaaataatttccatccctcccttgcccctcccttgcgttgccatacttgtttggcaaaactacacagctggtggaatccacctctgcctacactgcacctgcccccatgagctgaaggaggctggaaagcagcacacagcatgctgacttctctctctaacttcatgacccaaacctcatggggaccccccaccacgaccagcaatcaccctctccaagcatggctcaccctcagcctcctactggtctgggtgactctcacacaccttctctctgctcacacatccaaccttctatctgcattcttacttcagctgatgaccttgcttcctacttcactgagaaaactgaacacactagaagacaatttcacagattccatctg

SEQ ID NO: 69622 - DNA, 797 bp, Homo sapiens
tttcatggctatttcccctaataaatcctggcacatttaattctgtattgcagtctgctcctcaggggatgctaaccaacacaagtggcttcaggagtggtgcatagacacagacaaaaacggggattggggctgagcttgcccactgcctggcaggccgagaatgccatccacgttggttggggacagagaaagtccatggcacaaggtgcagctgagctgctgtggatatccccagcacggacctgagaagatgccctggttcccgggtgctatggcaggtggtgtgatagaagcctctacacaataatgacagggtgggagggaaaacctacaacagggaagctggctggttactgctcagctgtgttgatgccctataaaaggagaatgagaatctgagggattctaacagctgtcactggctacgtgtgaggcctctgcagtgtctcatggagaggcccttatttcctgtagcgaaagggtagatagtgtggaatggtagctgaagatatcattgtgagggttacagacctccagagatgtttgacattcagccaaggcaggcctgttgtggaaaatcagggccctggtggggaaacatgagattctgcaaactaggacagcattatcagatgggtgccctccagtaccctctgggcatgcagagaaggctcgccttttccagtaatggttcccacttcctaygctggaagatgctgcagaagcctcacccttataatgcagcgggaattccactcaggagctttgcaggaactagctggcatgtccacata

SEQ ID NO: 69623 - DNA, 604 bp, Homo sapiens
gggcaacagagcgagactctgtctccaaaaaaaaaaaaawaataagaatcttgaaaagttggcaagtggcttcaattacatgtcccccagaattacaagtgttttttctaaatatcacatccttgggcccacatggacaccagagggcaccctgagctcactgaagccacaactgtcgcattagaccattagaatcccttgtaaaggccaggcatggtggctcacacctgtaatcacagcactttgggagaccgcggagggtggatcatctgaggtcaggagttcgagaccagccgggccaacatggtgaaaccccatctctactaaaaattagccgggtgtggtagcatgcaccagtaatctcagctactggggaggctgaagcaggagaatcacttgaacatggaaggcagaggttgcagtgagccaagattgcatccttgcactccagcctgggcaacaacagcaaaactccatcagaaaaaaaaaaaaaaaagaatcccttgtaaagactgcggtttggctgggagcagtggctcatgcctgtaatgccagaaatttgaaaggctgagggtgggccacggtggatcgcttgaggtcagga

SEQ ID NO: 69624 - DNA, 604 bp, Homo sapiens
gggcaacagagcgagactctgtctccaaaaaaaaaaaaataataagaatcttgaaaagttggcaagtggcttcaattacatgtcccccagaattacaagtgttttttctaaatatcacatccttgggcccacatggacaccagagggcaccctgagctcactgaagccacaactgtcgcattagaccattagaatcccttgtaaaggccaggcatggtggctcacacctgtaatcacagcactttgggagaccgcggagggtggatcatctgaggtcaggagttcgagaccagccgggccaacatggtgaaaccccatctctactaaaaattagccgggtgtggtagcatgcaccagtaatctcagctactggggaggctgaagcaggagaatcacttgaacatggaaggcagaggttgcagtgagccaagattgcatccttgcactccagcctgggcaacaacagcaaaactccatcagaaaaaaaaaaaaaaaagaatcccttgtaaagactgcrgtttggctgggagcagtggctcatgcctgtaatgccagaaatttgaaaggctgagggtgggccacggtggatcgcttgaggtcagga

SEQ ID NO: 69625 - DNA, 968 bp, Homo sapiens
cttctatcttcaacatgtgattacaagatcaatttgcttcaaccaatgatgaagggtttcaagaagggctgaagttcaaggtctctttaatctgtgaggtgactgtttcatttatcacaacttatattcctttgtcaagaccctagtcacatggctacatctaactgcaaagagggctaggaaatgtggtccggccaggtctcagctatactttatttgtttgagagaaggaaaatggattttgtggtcagttagaagtcattacacagaccagcaatggtcaccaataatccacatatactctacttttcacatttagaaaaaactcacctcaccccctagggaaatatctcatccagttatgacatccagctcaaaatccaggatctttaggtgacatgcagttttctattggatatacacttgagtcctcatggcccagtgacccataaagtaataaaatctaaattatcacyctctaccacgtaaacacagataatatacaatggtgaagtgagaacaggataatggcaaaagaaactcttatttaaaaaacagaaacacacaatcattggcccacagcaatgattaaatcttactgggtaggaatcctaaattatccttgccctctcaatggagtaagttccaagcttagtccatctgactatcactggtcctctctgtgggaggaactcctttgtttgtcatcctgaccactggctttgctttctggaagattctttcttctccattatctaccatagccaatataagaagaagtgaggagtactcatttcttaggattgccccgtacagattttgcagcctgacttctgtggttgcaatttgagggcctatgagttattttaagcttaaccacaggcttttttatgttaggctttatggcttccttgggaatataatttcttcaaaaactaaaagggcttcttgtttatttgtttcatgca

SEQ ID NO: 69626 - DNA, 533 bp, Homo sapiens
aggactgtgmgtgtgacccagcccagtcctggaaggacatggagccagggccagagcctctctttggggagtcctcctgctgtcagagctggccaggcttgagaggaggggagggcactgggtttttcccaggtcttgtcctttggtcctggggctcttttcctcctttcatggtggctggtgggcacagggcaggggctgatgttgatggagtcacgggaggggactggcaggggctgggaaaagtgccatgggagggagaaaaaagtgcagacatcatcttccctcggagaaagggtgaatctgatttgggactgactgaggagggagaagtcgtcagggagtaaaaagcagcactgtgcacccaggggagcacttactattttctctcttttctccagagcacatgagcctgcaaggcccagatcaacacctgactcagacagaacaccagggcagtgcacagctgggatttcagtctctgctctcagctcccaggtccactggctctactgagggcacctacactctgc

SEQ ID NO: 69627 - DNA, 533 bp, Homo sapiens
aggactgtgcgtgtgacccagcccagtcctggaaggacatggagccagggccagagcctctctttggggagtcctcctgctgtcagagctggccaggcttgagaggaggggagggcactgggtttttcccaggtcttgtcctttggtcctggggctcttttcctccttkcatggtggctggtgggcacagggcaggggctgatgttgatggagtcacgggaggggactggcaggggctgggaaaagtgccatgggagggagaaaaaagtgcagacatcatcttccctcggagaaagggtgaatctgatttgggactgactgaggagggagaagtcgtcagggagtaaaaagcagcactgtgcacccaggggagcacttactattttctctcttttctccagagcacatgagcctgcaaggcccagatcaacacctgactcagacagaacaccagggcagtgcacagctgggatttcagtctctgctctcagctcccaggtccactggctctactgagggcacctacactctgc

SEQ ID NO: 69628 - DNA, 533 bp, Homo sapiens
aggactgtgcgtgtgacccagcccagtcctggaaggacatggagccagggccagagcctctctttggggagtcctcctgctgtcagagctggccaggcttgagaggaggggagggcactgggtttttcccaggtcttgtcctttggtcctggggctcttttcctcctttcatggtggctggtgggcacagggcaggggytgatgttgatggagtcacgggaggggactggcaggggctgggaaaagtgccatgggagggagaaaaaagtgcagacatcatcttccctcggagaaagggtgaatctgatttgggactgactgaggagggagaagtcgtcagggagtaaaaagcagcactgtgcacccaggggagcacttactattttctctcttttctccagagcacatgagcctgcaaggcccagatcaacacctgactcagacagaacaccagggcagtgcacagctgggatttcagtctctgctctcagctcccaggtccactggctctactgagggcacctacactctgc

SEQ ID NO: 69629 - DNA, 610 bp, Homo sapiens
gggatcccactccttctcagcctcccaaagcgctgggattagaggagtgccaaatttttcatttctccaggaaagttgaaacaaagaaacttaaataaaatgcacaaaatcaaaagcagagcatttccttaaaaggggatatgagaaagacgctggggtccctgcctccctgtggcaggtgattgagggtagataacagggtccggagttcccaaggttcactcacctattccgtaccttcgctcrggactggccctgtctgagtcccaagaggctccttctccagggaccctgactccatctctccaggtcccggggacttttgcatccttctcaccaaaattaactcctccaccccgttgtgaacacctcaggagaagcaggagcagcagaagggggacgtagcggggcattttcttctcatctcaagagaatccacatggtgctagccaggacaccttttcctccctccttctctcaaactttttccaccctgcccttctccttccacccgcagtggctgtgggtttatatgtgctttgccgagggaagccagagctccgggtcttccttcctggagggaggagcagcttctcaattaccccctgtc

SEQ ID NO: 69630 - DNA, 610 bp, Homo sapiens
gggatcccactccttctcagcctcccaaagcgctgggattagaggagtgccaaatttttcatttctccaggaaagttgaaacaaagaaacttaaataaaatgcacaaaatcaaaagcagagcatttccttaaaaggggatatgagaaagacgctggggtccctgcctccctgtggcaggtgattgagggtagataacagggtccggagttcccaaggttcactcacctattccgtaccttcgctcgggactggccctgtctgagtcccaagaggctccttctccagggaccctgactccatctctccaggtcccggggacttttgcatccttctcaccaaaattaactcctccaccccgttgtgaacacctcaggagaagcaggagcagcagaagggggacgtagcsgggcattttcttctcatctcaagagaatccacatggtgctagccaggacaccttttcctccctccttctctcaaactttttccaccctgcccttctccttccacccgcagtggctgtgggtttatatgtgctttgccgagggaagccagagctccgggtcttccttcctggagggaggagcagcttctcaattaccccctgtc

SEQ ID NO: 69631 - DNA, 635 bp, Homo sapiens
agactgggtaatttataaaggaaagaggtttaattgactcacagttctgcatgactgaggcggctgccccaggaaacttacagtcatggcagaagtggaagcaaacccgtccttcttcacgtggtgacaggagagagaaatgcacaatgaagcagggaaaagccccttataaaaccatcagatctcatgagaattccctcagcatcaggagaacagcatgggggcaccgyccccattatccaatcacctcccatgaggtccctcccccaataggtagggattacaatttgcataacaattcaagatgagatttgggtgggaacacagaaccaggccatttcagaagtgcctcattaagtccaagccacactcaagagagggaattaagctgcacctctagaaaggaacagtatcaaaggatttgaatatatgttaaaagcaaaattataactattgtttcaggtttctgaaaatcaaaatcttcttgtatctaattagttttcattaactctttaagcttgtcttttaatttaattttttttaagttccagggtacatgtgtgtaggatgtgcaggtttgttacataaatgtgtgccatgttggtttgctgcacctgtaaactcatcacctaggt

SEQ ID NO: 69632 - DNA, 635 bp, Homo sapiens
agactgggtaatttataaaggaaagaggtttaattgactcacagttctgcatgactgaggcggctgccccaggaaacttacagtcatggcagaagtggaagcaaacccgtccttcttcacgtggtgacaggagagagaaatgcacaatgaagcagggaaaagccccttataaaaccatcagatctcatgagaattccctcagcatcaggagaacagcatgggggcaccgcccccatkatccaatcacctcccatgaggtccctcccccaataggtagggattacaatttgcataacaattcaagatgagatttgggtgggaacacagaaccaggccatttcagaagtgcctcattaagtccaagccacactcaagagagggaattaagctgcacctctagaaaggaacagtatcaaaggatttgaatatatgttaaaagcaaaattataactattgtttcaggtttctgaaaatcaaaatcttcttgtatctaattagttttcattaactctttaagcttgtcttttaatttaattttttttaagttccagggtacatgtgtgtaggatgtgcaggtttgttacataaatgtgtgccatgttggtttgctgcacctgtaaactcatcacctaggt

SEQ ID NO: 69633 - DNA, 635 bp, Homo sapiens
agactgggtaatttataaaggaaagaggtttaattgactcacagttctgcatgactgaggcggctgccccaggaaacttacagtcatggcagaagtggaagcaaacccgtccttcttcacgtggtgacaggagagagaaatgcacaatgaagcagggaaaagccccttataaaaccatcagatctcatgagaattccctcagcatcaggagaacagcatgggggcaccgcccccattatccaatcacctcccatgaggtccctcccccaataggtagggattacaatttgcataacaattcaagatgagatttgggtgggarcacagaaccaggccatttcagaagtgcctcattaagtccaagccacactcaagagagggaattaagctgcacctctagaaaggaacagtatcaaaggatttgaatatatgttaaaagcaaaattataactattgtttcaggtttctgaaaatcaaaatcttcttgtatctaattagttttcattaactctttaagcttgtcttttaatttaattttttttaagttccagggtacatgtgtgtaggatgtgcaggtttgttacataaatgtgtgccatgttggtttgctgcacctgtaaactcatcacctaggt

SEQ ID NO: 69634 - DNA, 635 bp, Homo sapiens
agactgggtaatttataaaggaaagaggtttaattgactcacagttctgcatgactgaggcggctgccccaggaaacttacagtcatggcagaagtggaagcaaacccgtccttcttcacgtggtgacaggagagagaaatgcacaatgaagcagggaaaagccccttataaaaccatcagatctcatgagaattccctcagcatcaggagaacagcatgggggcaccgcccccattatccaatcacctcccatgaggtccctcccccaataggtagggattacaatttgcataacaattcaagatgagatttgggtgggaacacagaaccaggccatttcagaagtgcctcattaagtccaagccacactcaagagagggaattaagctgcacctctagaaaggaacagtatcaaaggatttgaatatatgttaaaagcaaaattataactattgtttcaggtttctgaaaatcaaartcttcttgtatctaattagttttcattaactctttaagcttgtcttttaatttaattttttttaagttccagggtacatgtgtgtaggatgtgcaggtttgttacataaatgtgtgccatgttggtttgctgcacctgtaaactcatcacctaggt

SEQ ID NO: 69635 - DNA, 799 bp, Homo sapiens
tactataaagacacatgcacacatatgttcactgcagcactatttgcaatagcaaagacttggaaccaatccaaatgcccatcaatgatagactggataaagaaaatgtggcacatatacaccatggaatgttatgcagccataaaaaagaatgagttcatgtgctttgcagagacatggatgaagctggaaacaatcattcttagcaaactaacacagaaacagaaaaccaaacaccgcatgttctcacttataagcaggagttgaacaatgagaacatgtggacacaaggagggaaacatcacatacyggggtctgtcaggggatgggggcaaggggagggataccattaggagaaatacctaatgcatgcggggcttaaaacctagatgacgggttgatggatgcagcaaaccactatggcacatgtgtacctatataaccaacctgtacattctgcacatatatcccagaacttaaaagtataattaaaaaaataatttatttcatttgtatagtccattaaattttttgtacattttttaaacctgcacttttcatagtttttgatacatccttgctccaataaatagcttgctaaaactactaaatctcatagatataccaatggtttgcatcatctaatggcacatttgcttgtcaaactgaggtcagccagtcccccttcattcactgttagtaactcatgtgttgcattgttaaaaacccagtatcacctcatctcccctctagcatcttctctgcagaggagaagccaggcactatatctcccaggatc

SEQ ID NO: 69636 - DNA, 799 bp, Homo sapiens
tactataaagacacatgcacacatatgttcactgcagcactatttgcaatagcaaagacttggaaccaatccaaatgcccatcaatgatagactggataaagaaaatgtggcacatatacaccatggaatgttatgcagccataaaaaagaatgagttcatgtgctttgcagagacatggatgaagctggaaacaatcattcttagcaaactaacacagaaacagaaaaccaaacaccgcatgttctcacttataagcaggagttgaacaatgagaacatgtggacacaaggagggaaacatcacataccggggtctgtcaggggatgggggcaaggggagggataccattaggagaaatacctaatgcatgcggggcttaaaacctagatgacgggttgatggatgcagcaaaccactatggcacatgtgtacctatataaccaacctgtacattctgcacatatatcccagaacttaaaagtataattaaaaaaakaatttatttcatttgtatagtccattaaattttttgtacattttttaaacctgcacttttcatagtttttgatacatccttgctccaataaatagcttgctaaaactactaaatctcatagatataccaatggtttgcatcatctaatggcacatttgcttgtcaaactgaggtcagccagtcccccttcattcactgttagtaactcatgtgttgcattgttaaaaacccagtatcacctcatctcccctctagcatcttctctgcagaggagaagccaggcactatatctcccaggatc

SEQ ID NO: 69637 - DNA, 799 bp, Homo sapiens
tactataaagacacatgcacacatatgttcactgcagcactatttgcaatagcaaagacttggaaccaatccaaatgcccatcaatgatagactggataaagaaaatgtggcacatatacaccatggaatgttatgcagccataaaaaagaatgagttcatgtgctttgcagagacatggatgaagctggaaacaatcattcttagcaaactaacacagaaacagaaaaccaaacaccgcatgttctcacttataagcaggagttgaacaatgagaacatgtggacacaaggagggaaacatcacataccggggtctgtcaggggatgggggcaaggggagggataccattaggagaaatacctaatgcatgcggggcttaaaacctagatgacgggttgatggatgcagcaaaccactatggcacatgtgtacctatataaccaacctgtacattctgcacatatatcccagaacttaaaagtataattaaaaaaataatttatttcatttgtrtagtccattaaattttttgtacattttttaaacctgcacttttcatagtttttgatacatccttgctccaataaatagcttgctaaaactactaaatctcatagatataccaatggtttgcatcatctaatggcacatttgcttgtcaaactgaggtcagccagtcccccttcattcactgttagtaactcatgtgttgcattgttaaaaacccagtatcacctcatctcccctctagcatcttctctgcagaggagaagccaggcactatatctcccaggatc

SEQ ID NO: 69638 - DNA, 769 bp, Homo sapiens
gatcccaaactcctagaccagctgagtacgttgaggggatgggaagcaccaacaccccacgcgggttaccggaagtgctggtgagtatagtcattccttcttccagcactggtggttagagacttacttmctctgcctgttggagacttggcactatgtaacagctgctgccatagcctaagtgtatgcttcatcctgaaggacattacccatcctgataggatgtgatcttcaagataaaacccagctgcaccctcaagagaccatcccactgctctatcagctggcagcgtgtgtgatgcagtatagggtagaaccaggagatctcatggtcgtgtgcccactaccagacagcgttcgctataaagtaggtcccttagtctggggcaatgttatgtggttcccctattagaagatcatacatatgtgagcccttagataacgtttctgagtgtggcactgtgggaagaaagaacaaactcataccgctaatacaaggcaagctaaatctgacagaacccctgcctttttcattgtgaaaaagtaagagtagaatcaatttgccatcaaattgctcattggcctccataagcaaaggtaatctgttggagtttatttatcgttggaaggtaggttgtgacaataaccacgtcagccacgctgaagggagcccaagccttgggactcacccacagtgcatctcttccaccatagatactgctttcaagagcctgtttcatgagcactgggatggttaaggacagaggct

SEQ ID NO: 69639 - DNA, 769 bp, Homo sapiens
gatcccaaactcctagaccagctgagtacgttgaggggatgggaagcaccaacaccccacgcgggttaccggaagtgctggtgagtatagtcattccttcttccagcactggtggttagagacttacttcctctrcctgttggagacttggcactatgtaacagctgctgccatagcctaagtgtatgcttcatcctgaaggacattacccatcctgataggatgtgatcttcaagataaaacccagctgcaccctcaagagaccatcccactgctctatcagctggcagcgtgtgtgatgcagtatagggtagaaccaggagatctcatggtcgtgtgcccactaccagacagcgttcgctataaagtaggtcccttagtctggggcaatgttatgtggttcccctattagaagatcatacatatgtgagcccttagataacgtttctgagtgtggcactgtgggaagaaagaacaaactcataccgctaatacaaggcaagctaaatctgacagaacccctgcctttttcattgtgaaaaagtaagagtagaatcaatttgccatcaaattgctcattggcctccataagcaaaggtaatctgttggagtttatttatcgttggaaggtaggttgtgacaataaccacgtcagccacgctgaagggagcccaagccttgggactcacccacagtgcatctcttccaccatagatactgctttcaagagcctgtttcatgagcactgggatggttaaggacagaggct

SEQ ID NO: 69640 - DNA, 769 bp, Homo sapiens
gatcccaaactcctagaccagctgagtacgttgaggggatgggaagcaccaacaccccacgcgggttaccggaagtgctggtgagtatagtcattccttcttccagcactggtggttagagacttacttcctctgcctgttggagacttggcactrtgtaacagctgctgccatagcctaagtgtatgcttcatcctgaaggacattacccatcctgataggatgtgatcttcaagataaaacccagctgcaccctcaagagaccatcccactgctctatcagctggcagcgtgtgtgatgcagtatagggtagaaccaggagatctcatggtcgtgtgcccactaccagacagcgttcgctataaagtaggtcccttagtctggggcaatgttatgtggttcccctattagaagatcatacatatgtgagcccttagataacgtttctgagtgtggcactgtgggaagaaagaacaaactcataccgctaatacaaggcaagctaaatctgacagaacccctgcctttttcattgtgaaaaagtaagagtagaatcaatttgccatcaaattgctcattggcctccataagcaaaggtaatctgttggagtttatttatcgttggaaggtaggttgtgacaataaccacgtcagccacgctgaagggagcccaagccttgggactcacccacagtgcatctcttccaccatagatactgctttcaagagcctgtttcatgagcactgggatggttaaggacagaggct

SEQ ID NO: 69641 - DNA, 769 bp, Homo sapiens
gatcccaaactcctagaccagctgagtacgttgaggggatgggaagcaccaacaccccacgcgggttaccggaagtgctggtgagtatagtcattccttcttccagcactggtggttagagacttacttcctctgcctgttggagacttggcactatgtaacagctgctgccatagcctaagtgtatgcttcatcctgaaggacattacccatcctgataggatgtgatcttcaagataaaacccagctgcaccctcaagagaccatyccactgctctatcagctggcagcgtgtgtgatgcagtatagggtagaaccaggagatctcatggtcgtgtgcccactaccagacagcgttcgctataaagtaggtcccttagtctggggcaatgttatgtggttcccctattagaagatcatacatatgtgagcccttagataacgtttctgagtgtggcactgtgggaagaaagaacaaactcataccgctaatacaaggcaagctaaatctgacagaacccctgcctttttcattgtgaaaaagtaagagtagaatcaatttgccatcaaattgctcattggcctccataagcaaaggtaatctgttggagtttatttatcgttggaaggtaggttgtgacaataaccacgtcagccacgctgaagggagcccaagccttgggactcacccacagtgcatctcttccaccatagatactgctttcaagagcctgtttcatgagcactgggatggttaaggacagaggct

SEQ ID NO: 69642 - DNA, 769 bp, Homo sapiens
gatcccaaactcctagaccagctgagtacgttgaggggatgggaagcaccaacaccccacgcgggttaccggaagtgctggtgagtatagtcattccttcttccagcactggtggttagagacttacttcctctgcctgttggagacttggcactatgtaacagctgctgccatagcctaagtgtatgcttcatcctgaaggacattacccatcctgataggatgtgatcttcaagataaaacccagctgcaccctcaagagaccatcccactgctctatcagctggcagcgtgtgtgatgcagtatrgggtagaaccaggagatctcatggtcgtgtgcccactaccagacagcgttcgctataaagtaggtcccttagtctggggcaatgttatgtggttcccctattagaagatcatacatatgtgagcccttagataacgtttctgagtgtggcactgtgggaagaaagaacaaactcataccgctaatacaaggcaagctaaatctgacagaacccctgcctttttcattgtgaaaaagtaagagtagaatcaatttgccatcaaattgctcattggcctccataagcaaaggtaatctgttggagtttatttatcgttggaaggtaggttgtgacaataaccacgtcagccacgctgaagggagcccaagccttgggactcacccacagtgcatctcttccaccatagatactgctttcaagagcctgtttcatgagcactgggatggttaaggacagaggct

SEQ ID NO: 69643 - DNA, 533 bp, Homo sapiens
gaaattggtgtagggtatatgggaactctgtgtggtggtttctcagacttttcttcattgttttgtctgaatttttttyttttttttgagacagggtcttggtctgttgcccaggctggagtccagtggcacaatcacggttcactgcagtctcaggctcaagcaaacctcccatgtcagcctcccaagtaactgtgactacaggtacatgccaccacgcccagctaatgtttttattttttgtagagatggggtctcactatgttgccctggctggtctcaaactcctgggctcaagcaatcctcctgcctcagcctcctgaagtgctaggattatagacatgagccactgtgcctagctttttgtctgatttttgaaaacaatggtaaaacatatgtaacataaaattttccgttttaaccactttcaagtgtacagttccgggcattacgtacattcacatcgttgtggagctatcttctcaatttttctgaaaatctaaaaatctattcattaaaattatatatgaata

SEQ ID NO: 69644 - DNA, 634 bp, Homo sapiens
aggcccccacccctgtgtcctaaacccacagaaccagtgagtgttcagaagagccaggacagggggcctcgggtttccctatcttgccctgccttgccccagcctcgatttccccgtctgatgaacatgtcagaccttcgagagtgaaggttagctgagcgcagtggctcacgcctataatcccagcacattgggatgctgaggtgggagaatcaattgagcccaggaggccgaggctgcagtgagcagagatcacrccactgcattccagcctgggtgacagagcaagactctgtctctaaaaaacaaagcaggccggttgggtggctcacgcctgtaatcccaactttgggagcctgaggcaggtggatcacctgaggtcaggagtttgagaccagcctggttaacatggcgaaaccccatctctactaaaaatacaaaatttagccgggcctggtggcgggctcctgtaatcccagctactcaggagactgaggcaggagaatcacttgaacccgggaagtggaggttgcagtgagcccagattgcgccactgctctccagtctgggtgatatagcaagactgcgtctaaaaaataaaataaaataaaaataaaaataaaaacagagtggc

SEQ ID NO: 69645 - DNA, 980 bp, Homo sapiens
agaaccactacactccagcctgggcctcagagccagatcctgcctccctccaccaaaaaataaaagactaaaaaaaaggaaaattggaatctttggaatgagtactactaaaaattgatttcttcccttttaaatgactaaggaaaaaaattttaattgaatttaaatcattttactacatgtttagttgctactgtgaaacaatgaaaacatcttaagaattaagtctgaaaaaaatctgtaatttccaatagaaaagtagagcttagaaatyagaaatcaaattatacagtatataagtattttaacctgtttataagaattttaaaatctttgaaaatgtcattgtcactttaagtttaaaaataaggagctttaacatgtttccttgatcactaggagtatgaattaagcttaggacattttctgaatgcaaaatggtttgaaaattaaacaattcatatttgagtttcatggtttctatctaaacattttttttacaggccaagttacaacatccatggaaatgcttttagttataagtatggtattaacaggatcaagaacagctgacaaataattacaattaataaatttgttcaagctgacaatggtgtgtctaaaaaattaatgaatttaataaaatgtcacaaatgcccttccttggaaccaagagcaacaagctataagttaatcagaatataactctgaagttccattttaggcacattttctcatgttccagggagaaaagcaccataacctcctggtaaaatactcctttttgatacttctactgccatcacttcagttatcttactggaactgcttaatctatgttttttcttacaagtatttctgcatataatgcaagtatgctttatagctaaggtttaacatttctagatacatcaaaagctagagctaaggtttaccaaatttaagaactttatgaagtttataattttctatctcaaaaa

SEQ ID NO: 69646 - DNA, 689 bp, Homo sapiens
ttatttttatgcacgccaaaatttaagaaattgttgtagtttgattttgaaaggacatgcactcttcttttcacgttatttctaagttttggataacttttttttttttctttttgagacggagtctcactctgtcgcccaggctggagggcaatggcgcggtcttggctcactgcaatctccgcctcccgggttcaagcgactcccctgcctcagcctcccgagtagctgggattacaggcgcccacgaccatggctggctaattttttttttttttttttttttttgtatttttagtagagatagggtttcaccatgttggccaggctggtcttgaactcctgacctcgtgatctgcccgccctggcctcccaaagwgctgggatgacaggcgtgggccaccgctcccggcttcttcttctttcttttttctttttttttgagacagagtctcactgtcacccaggctggagtgcagtggcgcaatttcagctcactgctaccttcgcctccacgtctccagtctgtgaggtccttgaactggggactgagtttaatttgccactggagctgtttttcccagcaccgtctttgaccttgtaggtactgttgccaccctttttgccacctctttttgctacaggctggaggagtcttttatgggcggtgtcctaagcaggtccagctg

SEQ ID NO: 69647 - DNA, 1424 bp, Homo sapiens
aacccggcacaggagctgacacttacaaatattcaggaacaagccagtaggtgactctcagaaacactgcccagatccccgaaataaatctcggctcggggagccccagacccaaaccctagagcaaagagcagggagacattcggggccgctccagagtctcagtgtctgtggtttcccagttctgaccttgaatccccccaggaagggattgcagaaggctgggaagaaggttgcagtggaaggggattcggttcccaaataggcagcgggaggagggacggaatcagggcgggcagagtcctccttggttctggccccagtgtcctgtgtgattctgagtaggaccacctatcccctcccactctggagccattcgagttgtcctgttatgtccctctgaatggtcaacaggacattcctgggcaacagagaccttggcagctggtatcttacaggtcctcgaagtctcatgtaggggaaagatcatgagatctggaggtgaaggagtggccctaactggccctaaacacttcaagtgcccctgggcacgtggtttcatggctctgagcctcgatttcttcctctggtatgtggggatggcaactcctggagatcccatgagattaagtgaggagttgggagggaatgagctgagatatcacacggcaccccgtttacttctttttttttttttttttttttttgagacagggtcttcctctgtcacccaggctgcagtgcagtggcgcaatcatggctcaccgcagcctccacctcctgggatcaagggatcctcccacctcagcaccccgagtagctgggaccacaggcggacgccacagcatctggctgtttgtatattttgtagacagggtttcaccatgttggccaggctggtctcgaattcctgggctcaaatgatccacctgcctcagcctcccaaagtgctaggattacaggagtgacccaccgtgcccagcaccccctttacctctgagcaatccatctctctccttgggggcaccccatgatctagacaccacccaccttgttctgccttggccaaaataccacctaactgcccccacctatgccaggtgcccctcmcccaccctcctccacccttcgctgagtcccacttggctggtgcccaggacagggacagtcccagcccttccagcccatctccccacatcagtacactccggagagccagccaagagtagattctttattcatttctcttttttttcttaaaaaaaaaagtattcatttggtataaaaaataaatattttaaatatgacattgaataaataaaaataatctgtcagtatgaaacatccccacagggtacattcatcaaagaggaatttgtcacccaaggccatgtgcttttcagtggaaaggaaggagggaaacc

SEQ ID NO: 69648 - DNA, 829 bp, Homo sapiens
cccaaaggtgcagagctcaggtgggtcttgcgcactgcataaggccacgttgccatgtccttgagcacctccacagaggagcagccaccccaggaagtagctgcagactctacggggtgataccctcaaagggtgaccagggcatgaccgacagctcgaaggaagcaaagaggctgctgctggtgaaagaagaagtgaagtgagagtgtggtgcctgggcctggggtgaagggagcagagagaagtgcagtgggggtgcaggtgtggggcaaagggagaggccacccacagacgcctcccgacttccccttcttcctgcagaagctasaagacagcagccgagacagcagctgagacggcagcggcagcttctcaggtcagcctcctccgggcctctccccactctcctctgcccagttctctgtccttatccacaggcccctcagtgggcactggccatacccatgtccaggtgggcacagacctggtgatatcctggtgagcaagctggggacccaccctccttccctttctggttggcagctccacatctggggcaatgtagagatctgtgcttttggaaggaggggcaatttaaattaagaagtggttaggcatgggtctcgaatcttagcttccccgcgaggtctgggacaagtgaagagaggtttcttttctggacctcagtttctcatctgtaaaatggggtgagtctgggaacctgcaccttggatggctgtcaggggctcagtagaggacctggcacacagtttgtgcttggcaatctggagcaggtgcagctcctttcagagtgacctggattggatcc

SEQ ID NO: 69649 - DNA, 1069 bp, Homo sapiens
tttgggaatgtcttctctaaattcactgttaaatatctcagctgctttcacttgacttgatctgcactggattgcccctcattggctcagccaggacaatcagttgggctcagcatgggtaggtgcaagcagtaggttgccaatatctctaacgtgccacttatttccatctgtaccagggatatataaagattgattcagcattgaagaaaacttgctgaccccgttttatacctaaagtaatcaaatcttgcaggaggaagatgagagaagtctgaaatattgagttttacctgtttcctctaaggctgttatgcagatagatgcaaatatatgtgtagacatgatagaataatactttccattaattcagagtgaagccgaaaagcctccaagctggattgtttctcatactttaatgtgcatatatatcatcgggggatctaagtccccatgccagatctgctaaaagataatctgcaatttaactaagatatccaggtctgaaccagtggttcttaaagtgtggtcccaagaacagcattagcatcacctgagtacatgtcaaaaactcactttcttggggtcccacctcagaacttatgaatgaaaaactctggagatgaagcccagaaatccgtgttttaagaatccatccaggggattctgatgtctactcaaatgtgagaactgctctatgccattcctcgccttcagacaagattggcttccactcagccatagaagactgcagtaggagatgggcagggtttcagagattccagtattcattcaagaaagctctccctctttttttactgaaaacctttatgctgctttctctgcacccagagccctcattctcattggcaacccttttcaaatcttctttgctacaggaaaaccttcacagagatttggcaaggacttcttaaaatcccctatagartgcctattttctgagactcagtgtcttagtcataatcatctgtaaggaatgtagctgtggtgcagccaggcaggcataggctgaagtaaacatcttgcatgactcagcaggatcggagca

SEQ ID NO: 69650 - DNA, 1141 bp, Homo sapiens
taaacactcccattcatgtgagctctttcccgtacatgtgtgcacacacacacacatacacacaccacacactcgggattttctttctcctgctattgcactcaacatttcatattcaaaatatatggcagaatgagtagtccagcctcagtagtaaacaaaattattgtatagaaagagcaattgtcctcaatccttggatcttttcttatgctggcaaaacagtctcgacaacttcaaataaataaatgaatgacatttttaactatccaagattttttgactaagatcaaatgtgctaaaaataaggtttgcttaatttttcagaattcagttttaactctgcaatatatactgtggactccaaaatctctaaaatagttcctcaaccatcagcaaaaacctcacccttatcaaacagtcttaatttagatggggatgcctttgaagccacaaactttccataggttaaaacctactcattctttctgaagtttttttgttgttgttgttcctcctagtgaagtttattctctttgctgaggcaaacatagaaaaattaagaaacagtatctaaactgatatctgacacctatcatgcacaatggaaaactactgtataacaaaccctgttgtgtttcagtaattcagcacttacaatcattgtttgtagattttattttaatttaccaactcagaaaactgaagtaccatgttttcttctgtccaatgtcacttagctgttaagtgacattgttgtaacgtggaaacaatctattgttctcaatttagartcgtttctagtatcacacagagaagaaaatatgcagcaagtatacttttcagtgttattttaaaagtccatataatccacataatttgatcactgtttaaatagagaaacctaaaaccaatccctggtggattaaagatattctgatatacctagccttcctagctcaagagaatcattgagcatcagtaaccttgggaagataatacagcattagtttgaatgtgaggggcaattcaattcaattcttcatttacttttgggacaatacacacttattttattgacacactgtatttgcacatatttatgggatatcattttatatataattatatataatatatg

SEQ ID NO: 69651 - DNA, 1676 bp, Homo sapiens
catgcataggaaaaaagagtaaaaggagaaagccccagatttataacagattatccctaatcacaggatcatgagggatttttttttctgtatatattttgtattttctgttttccctaatgagcatgtatatattttaattatataaaaataaggcctggtgcagtagatcacacctgtaatcccagcactttgggaggccaaggcaggtgtatcatttgaagtcaggagtttgagaccagcctggccaacatggtgaaaccctgtctctactaaaaatacacaaattagctgagtggtagtggcagtcatctatattcccaactactcgggaggctgaggcagtagaatcgcttgagcgtgggagacgaaggttgcagtgagctgagatgatgccactgcactccagtctaggcgagagagtgagaccctgtctcaaaaacaaaataaaataaaataaaataaaataaaaaataaaggttattactgtagaagggccttgtagttggcgggagctggtctaatatgaccaaagcatctactcctaatttaatgaagggattttgttgatgggagaaacaaagcttttccagagggtatttgcagcaggagtgaggggcataaagtcaagggcaaacagacccaagaggaagctgagttcacggacaggcgcaggtggctgcttctccatccccaggctgaggggactggcatgtgtcacctccatggtaggacttgagcaaaccccaaagggtcatccattggacatgaaatccttggagataaaatatctttgcctcaaaacatccccatgaagtgtagatgtctggatggagtaatccaatgagttttcttcagctattcatgtcttagcatcgatgaaagtattgattttttttcttgaacaaggttcagccaaggtgagcgtgggtggaaggccacagatattcttcagaatcagggttttctcccagtcacacaagtccagagggtgccctggctggggcccttcacgtgggcgagcaaaatgctctgtcttctatttctaatcactcgccatgacaattgtgggcagtttgtgtgatgctgtgtggcagaaactctacctcaatcgtcaaaggggaatgagtttaggaagacaagagaggaaataaaatacttaatttaagaattataaaacattttcaaaaataaaagtagcataaagaatacttggatatctttgcctggatttctactctgacatttataatacaaatgtaatatgcatgatgtaaataatatcatgtataatgtcataaatgtaatgtaaataatcaatgtacctgctattatatttttctctttgctttattgtctactctctctctgtttattttgtaagttacacacattgtggtcctaaatacttcagtgtgtgctcctaggagcagggggctctcctacctggccacagtgccaacgtccatgtgtttaaactgagacaaaactgttatccaccgtttctatgccacttaacccagcaatgtctgcttgaacgttttcctctccagtagagtctaagggcagggattacattttttccttgtcatgtctctttagccttgcttaatccaggacatttctaatcttccctyctcttctgtaattttgaaattttaaaataatttttttga

SEQ ID NO: 69652 - DNA, 974 bp, Homo sapiens
tgtcttttcatggcttgttagtttatttctttttagcactgaataatattccattgtctggatgtaccacagtttattcattcacttactgaagggcatttggttgtttctaagttttggtagttaagaataaaactgctataaacaatgtgtgcaggtttttgtgtggacacaagttttcagcagagattttttttaagttttcaatycatcacagaccaatagtttgttttaatgaaataaaatgaattattagcctaaagaaacagaaaaatggatagaaaatacaaaccctaactttttattgctagattcaacagacttataaatactctatcaaattgatataaaaggttctaaaggcttgctcttaatttctgtacttaatgttgaaccagaaatagttgttggcaagtcccagtccacagaccacacttttgagcagatttgtatagggaattcagagtatgtagggagaggaaggtcagataactccatcctttcatcttgaaaactccatgcttagcctgcaagaatcaggcttttctgacttctgtagtctggttgagctgccccttctttggctccagagtgatgcttgcagtgctctctggcggtgctgattcccacgccttcccgcctacagaaggctacttgagtgcgggtgccaacttcatagtcctagtacctaccacaggcaggcacacagaagactttcaatttagcttagttaaatgactaaacaggaaaacaagttgaaattgaaaagaatagttatctttgccattgcagattgaagacatcaaataacctttaaatatggattaaaattatattattttgtatactataatgtggatttagctttacattgggtcaatgtatgtctctcaaaatctaataactactaaatctgttaaactacagatatatatctgtgcacatgtattacattaatgtgtgtcacttaataa

SEQ ID NO: 69653 - DNA, 611 bp, Homo sapiens
acaggccattgaaaagcaggatgtctattgggggcagggggtaccggccagggttgtggtggaagactgatggcttgggagtggaggtccctttgtgccaacccaatttccatcagtgcctccatggacaggcggagctgctcccagagaggccaagctctgcccgttcctcactgacatgtgtcctaggacctgggggcctcagagtgggggcagcagagcaatggtgagagagtctgagagggagaaaatctgagtggaatggactccaccacatcccagccatgcaaatgcaagcaagttccttcccctctctgggcctcaatttcctaactgtcccaatggagaggatagcaatacccctcatggggccgttggggtggccatccgagaggaggcgtgtgcagctgtctgcacagtgcctggtgcaaatgcttgggaagagcctctcccggcgttctacagcggggctccctccatgaggtgctgacttcagccaggcccccagggatgataccctccrcaaccccatgctacagggacagtgaggagaagccatcagcctgtgctgcagttgggcagatggctctggatcttagaagattccttcc

SEQ ID NO: 69654 - DNA, 1095 bp, Homo sapiens
atcacttttgtggtgagaacactttacattcactctcttagcatttttctagaattcaatatattgcaaactatagttgccatgttgtacaattctatcaaaaatatcaaatatcatttcaacaaagttacacaatgagaactacactcattgttttaaatcataggataaaaaaataaatttgttttcctcatgtataatcagcacattgtgacagttcactgataaagctttagttgagatggcaaagtgtatgtgagaacacaattgcattgggmgaacatcgtttttgtctcaaaaggaagattataaactttaattagatgtttggggatctttaaagtgctttaagtcaccaaagttatgtatcaactttaaaaaatcaaccaagggaatactcacattgtcacttaagtcctcaagtcaaactttttcaccttgaatctgtaatttaagaagattcaaagttagacatattggatgttatttctgttctgtttgatacaacaggaaaaggaaaatgaatttatgttgattgattttcaaagagattagttctatggatatgctctaagaaaaacatggaatttttaaaaacacattattgtcaataataaaaacattgttaactaataaacaaggcattttctaatctcctccataaggtgacagctgcttttgtagccaaggcagtgaaattaaacctggaatataatgctactctacacattggggggcggggaaagaagcataaactggatcaaatgatgttttacacttcagacaatatggaataaaaataattgaagtcattttttttctaactattgcaacttacagaaatctgtgcccttaaaaagcagaatgcactgtagattttgaatcaccatttaccaaacagttgattttgccattataataaacccttttaaggagctttaattctaggtttcagcattcctgttctttattcttaccagcttcaagctcattaaaaacatttaagacaaagaaaaaagtcctcttcctaggccatagagattgtaataaacttacatctgaggtgcaacattctttttcagtggataacaaagg

SEQ ID NO: 69655 - DNA, 1106 bp, Homo sapiens
aaaatagctgtttaatttagatggcaacgctactttcccctgcccctgttttgtttggtttttattgttctgtggtggtggtggtggtgatcgttactatgtcagtcaggatccaatcaggaaattatggcaaactcaaggtgcctaatttaaggagcatttcataaaaggactgttgaccaaggcatgggcagagcacaggagacggcagggtggctgggcaggcatgagcagatgcaggtgggcacgggcactagyccagaaggaggaggaacccccagagaggggccagctcacagcccacagtgagggaaccatgtgggggcatgttctgaccttgcacttctccctccctccagtcttctgtgtgttccacattggctgaacccagctgggaggcagcgggtgagggggcccatgaatgcctcctcccagtcagcgtcccaggaccctggccaggaagagcaaagtgggacagaagaggcaggtgcaaggtagcctaccccttttgggtatttattcacttactcttcctgctctccttgggtttgctttgttctttttatcctgattttaaaaaatgtaaggattgaattttcaggttcttgatttacattcttcttgtttactaacaatagcagctaaactatacaatatttaattaccagtgactgtataggcaccgcctagtcagaatgcacactgcccttgggactcctggagagcccttgctgtgcccgcattaaccctttagctgctgcaccttgcaagggtcggttgtccccagagaggctgaaagcagtgctgttttccaatcctcacagaagcgttgccctgtcctaacatggttcagcatggctgacccagccagtgctggctagacggcaatcctacgtaatgctatggattccactgttgcacataattttatttgtattccttttgtggcattctcattgtctttcatttctgagcagtatgtaattgcaatttaaaattcctttttaaccaaaggttaaatcgttaacaaatggttaaggtatttttaaacttcaaagttgtattattaatacaatatctatcctagttgctttgcagtcagaaaa

SEQ ID NO: 69656 - DNA, 541 bp, Homo sapiens
ctcttcctctctcattagtggccaaagtaatattaataactgacwttgagtaggagaaggcaaggccattttgagtggccgcttcctattatgtggagattctggttcacgctattgttgcaaggaaccacgtagtgacgtgtcgcctcccatgcagcctcagcttttgctttcttggatgcactccagaggatgaaattctgatccatgcatgatggctggacagtaggcagaagggggcactcagtgaagctcagatggcctctaaattgctttcagaatcttatctgcagtgtatacaactcattttccagctgcaacattttgtctttttggataaaactaacatggctcctccttaaaaaatgacagcattatggctttggcaaacccatagaggggtcaagttagatccacacaatcagaagggggagaccagtgcaattagttgggaccaggacttaaatatttataaatctggcaggaattagtataggtgttccatacttttgaatgagacttttccgtggacctgctaaat

SEQ ID NO: 69657 - DNA, 541 bp, Homo sapiens
ctcttcctctctcattagtggccaaagtaatattaataactgacattgagtaggagaaggcaaggccattttgagtggccgcttcctattatgtggagattctggttcacgctattgttgcaaggaaccacgtagtgacgtgtcgcctcccatgcagcctcagcttttgctttcttggatgcactccagaggatgaaattctgatccatgcatgatggctggacagtaggcagaagggggcactcagtgaagctcagatgkcctctaaattgctttcagaatcttatctgcagtgtatacaactcattttccagctgcaacattttgtctttttggataaaactaacatggctcctccttaaaaaatgacagcattatggctttggcaaacccatagaggggtcaagttagatccacacaatcagaagggggagaccagtgcaattagttgggaccaggacttaaatatttataaatctggcaggaattagtataggtgttccatacttttgaatgagacttttccgtggacctgctaaat

SEQ ID NO: 69658 - DNA, 685 bp, Homo sapiens
atcctttgagcccaagaggaggaggttgcaatgagctgagatcacaccactgcactccagcctgggcaacagggtgagaccctgtctcaagaaatacaaaaacaaaaaataaagtaaaataaatatgtcttgatacacacacataagcacagcaagacatgaaaaaatacagtagaatgttaacaatggctaactctattgataggattatcagtgattttttggccattactatgattttctgaattttcaaaaatgtcaagaagaagtataatggactttttctattaaaaaaattaatggaatattgttcaaccttgaagaggaaggaaattctgacacatgctatataacatgtatgaaggttgaagacattatgctacaaaacacaaataccatatgattccatttattaggtacctagagtagtcagatttataggagcaaagtagaatggtggttgtcagggggttgggagatggagtggttgtttaatgagtacagagtttcagctttgcaagatgaaaagagttctggagattggctgcacaacaatgtgaaagtatttcactwctaaactgtacatttcaaaatggtcaagatggtacattttatgtatattttattacattaaaaattttttgtttcatttacattataaaaggagagctttaatgatgccctt

SEQ ID NO: 69659 - DNA, 744 bp, Homo sapiens
atttcattcttttacattaaaaaagctagtcacacaaagttatgctgttagaagagagtgatttggtcgggcgcaggggtagttacaggaagggagtacacggagatttctggttgttagttatgttcagtgtcaatctaggtgctaaacaggtacaataaagattttagaattcatcaatttgcacacttatgatagatgcactttcctgtatgtatatttcaatacaatcttttaaaaagtaaaatgacaaaaagacactattaacaaaaatgacatattacattaactgttatactaaggaaaatataaaaatgagttctataacaggggctctgcaggtcatgtggtcatgccaaggaccatatgtgctcaagattctcatgacattttggaaggaggttgggctttctttatctttcctttcttctctcccttcccttcccttccctatttttaaacctaggtttggtattttcctggggtgatggtgaytttggaaaattgggccggggcggaagtgaaggctgcaacattccccagaacattgagagactaaatggacagggggtgtgccagattgagtgtggagctcagttcctactggcgctcaccaagtctggagtggtgtggacatggtacgtaaacgtcctccccatcacagtgtgcgtgcttgtgccggtgcgtgcagggaacttgggcctcgccccaggaccaccccggcgtgattgtgacctgtcatat

SEQ ID NO: 69660 - DNA, 744 bp, Homo sapiens
atttcattcttttacattaaaaaagctagtcacacaaagttatgctgttagaagagagtgatttggtcgggcgcaggggtagttacaggaagggagtacacggagatttctggttgttagttatgttcagtgtcaatctaggtgctaaacaggtacaataaagattttagaattcatcaatttgcacacttatgatagatgcactttcctgtatgtatatttcaatacaatcttttaaaaagtaaaatgacaaaaagacactattaacaaaaatgacatattacattaactgttatactaaggaaaatataaaaatgagttctataacaggggctctgcaggtcatgtggtcatgccaaggaccatatgtgctcaagattctcatgacattttggaaggaggttgggctttctttatctttcctttcttctctcccttcccttcccttccctatttttaaacctaggtttggtattttcctggggtgatggtgactttggaaaattgggccggggcggaagtgaaggctgcaacattccccagaacattgagagactaaatggacagggggtgtgccagattgagtgtggagctcakttcctactggcgctcaccaagtctggagtggtgtggacatggtacgtaaacgtcctccccatcacagtgtgcgtgcttgtgccggtgcgtgcagggaacttgggcctcgccccaggaccaccccggcgtgattgtgacctgtcatat

SEQ ID NO: 69661 - DNA, 651 bp, Homo sapiens
agctccaaaatggaaattatatgtactccatcagggacaggcacaccttgtaaatcaccctagagaagtggggaaactgaggctcaagaggacaaggtctgcttctgaaaccacattgcagaaatgctcaagtttctctaaaacacagattcaatgatacaagtacattcggtgactcttcccatttctataagatcttttaatttattcactagtcaagaacggctgctgaattaagtcttgtaaagtggatttcattctctgggttaacaacacagcacaactcccatgcagttcactttgggccctgcttccaatgcccagctctcctggcctccgctgccagctagcycactcccctctctcccttttctacttacatgagcatttgcagtaggggctggccaaccctccactaaaacagcagctcaaaggataacagctgggagagccatgacactgtgtgacccgcccctgcctcccacagccgaaaaaaataaggtgtgggcgatgccacaggtggcaaagctaaggagccagccagcacttgagtatcaatgagtctggccagcgtcctctcacttcctccacccatcacttccgactcctacacccacacacgggaatgcctggtaatttacagctcacctt

SEQ ID NO: 69662 - DNA, 651 bp, Homo sapiens
agctccaaaatggaaattatatgtactccatcagggacaggcacaccttgtaaatcaccctagagaagtggggaaactgaggctcaagaggacaaggtctgcttctgaaaccacattgcagaaatgctcaagtttctctaaaacacagattcaatgatacaagtacattcggtgactcttcccatttctataagatcttttaatttattcactagtcaagaacggctgctgaattaagtcttgtaaagtggatttcattctctgggttaacaacacagcacaactcccatgcagttcactttgggccctgcttccaatgcccagctctcctggcctccgctgccagctagctcactcccctctctcccttttctacttacatgagcatttgcagtrggggctggccaaccctccactaaaacagcagctcaaaggataacagctgggagagccatgacactgtgtgacccgcccctgcctcccacagccgaaaaaaataaggtgtgggcgatgccacaggtggcaaagctaaggagccagccagcacttgagtatcaatgagtctggccagcgtcctctcacttcctccacccatcacttccgactcctacacccacacacgggaatgcctggtaatttacagctcacctt

SEQ ID NO: 69663 - DNA, 636 bp, Homo sapiens
aaattagccgggcgtgatggcacgtgcctgtaatcccagctactcgggaggctaagacaggagaatcacttaacctggaaggcagaggtttcagtaagctgagattatgccactgcactccagcctgggtgacaagcgtgagactccgtctctaaataaataaataaataaataaataaataaataaataaggagtcgagccttcccattttattgctgtatctaaactcagagctggtttcctcatttataaaagggaataatacaactttggaatttccaagggccagtgccttctggccctgaaaagcagtcactttgtgagaacaagcagcctggcctcagagccggttgacttcctagggccttgagtcacataccaccactccagcgctgggtgactgcrggtgggtcatcatgcagcctcattcattcccctcactggcctccaagggctgctttgagaaacccctcacgcagcacagtagtgctggaaaggcaggggtcatgtcaggcttgcactccccagtgtcccagtcagggcaggtctgcaacttactgctgaagcgaacgggctgcgccacgttcaccgcgtggaagtgcgaagggtcgcctcctctggcccgcccctgccgc

SEQ ID NO: 69664 - DNA, 656 bp, Homo sapiens
tgaataaagataaaactaaaaatttgaagtagacaatcaaaatcagttcctctacagatctgggatgccccgccccaccttttttttacatcggagctgccgctgaggcrtctactgctctgattcctgatccttttattgtgacccaggtttcccgctacaggggttgatgtcctctgcattaccaacgtgctgcagctgcacaaggaggtaatttatacaggcctttttaaaattattgtgccagtcccttccaatccaaggatacaatctttcatttctgggaaattttcttatataacttctttgctaattccctcctcccccatctcctctattttcttttaaggaatttgtattaatcagatattggattttctgaactcatttttaaccacttaagagtgtacagttgggctgggtgcagtggctcacgcctgtaatcccagcactttgggaggctgaggcaggcagatcacaaggtcaggagatcgagaccatcctggctaacacagtgaaaccccatctctactaaaaatacaaaaaattagtcgggcatggtgaaaattagccgggcgtggtggtggacgcctgtagtcccagctacttgggaggctgaggcaggacaatggcgtgaacccgggaggcagagcttg

SEQ ID NO: 69665 - DNA, 1553 bp, Homo sapiens
tagctgagccttgcaatgttctaggcactgggtacagatatgcagtgaacacacaggcacaacatctgacctcagggaacttccactctcgtggagaagacaaacagaacaagtaggcaagtaaaggaatgagtatgtgtgactagttacacactgtgataagccctaagaaggaaatgaactgggcatggcaataaagaataacaaggtgggacttcctttgatagggtggccaggggaggactgcctaagaaggtgacattgatgccgtctcccacctccccaggttggaagtgagccatcagagcctctggagccgtgcttgtgaactccctggatgcaggtggaggccctgggctgaccaatggctaagggttggagctgaattgccagcctctcacttggcatggaagatggcagtctcctccccttaagcagccccaaaggttggcagaggggagagcagaagggggagctgcacaaggccaagatcaaagccactcccttgcttggggagcaccctttttcttccatggggctgagtccagggccctgtggccatactgaatgttgagaaggaggcagcatctccccaggagctctcctgtttcaccttcctcccacctccttcccttctccgccatctccccagttggggaactactgtgccaagtcccttccctctggtctagcctgctgcctctgtggccactttactttacttggctcaggaatcaccaaagagagggggtcaaggcctagaggggacctgggccctggaagagaggacagaaccagaaaggaaggctggggttgggaccagagaggacagggctcaagggaggatggaggctgggacaggagaggcacacgggaaaaacctgagcccagatggccctttggctgggctctccagagtctctcctgggcccttggaatctgctgcccaaactgggggagactctgagaccagagggccagatggggctgattcaagacacgggctctacatcagctgggaggaaatgcccctgtctggtccacctgcagctctacgcttcacccctctcaggaggttaactttcacatcagcaacttgggtgtcaggttccggctctaggccagcaggcctcagcccctctcacctccaacctcttctcccaggaaggtttttctggggacccagagcttcaggctgcaggaaggtgttgcctggcccttgccttagattattgagtgtcaaaggagccctgactccaggtccgcttttccccctgcacactgccaaggctgccttccaccctgggcctctctggaggctgctcagtgctcttcccgactcccaggccttcccgcccaagctccacagcccccacagcaggatggggaggggacttctcctcgtcaggaaggccctgggctaagctcaccatccccaccctgtctccgcaccacttcctttttcctccatcttgcctgcagggattgtaaaccctggtggtcagaagctttgggcctatagggtcagcctctcaccctggsgatccgtaggg

SEQ ID NO: 69666 - DNA, 620 bp, Homo sapiens
tgagtacctggctgctttcaggtacgtgctctgggggcccagaggggcaagtccaccctctcctgtcccttctcccaagagcaccaggggggaggtgatcagttggattgtcagcctgtccccaccagttcctagacattgyaggtgaacgccagtgagaataggacaaacagagagaagaatgcaaaagtcaaagggtgctttgcaaaggcatacattaccgagagccaatgtcaaactgattgctggcaggtgggtggtggagtgagcagagctggcacatttagtcagagaaggctgccactctatttgggaaaagagaattctggaaatggatcttcaaacacttttctggagttatctccatgacagctaattctacgagagccctgggctggagttcctggagtcttctcagagcccagggctatgaagaacacccaagcaggccccagagttggatcaggggtagaggaaggcagctgggggggggcctggaagagggagaggatgagagaatgtagccaggtggcgcagaacctcagaggacctagttgtcccctactcagctctcaagtagtgagtagctgggtgtggtcaactcagtccaaaggactgag

SEQ ID NO: 69667 - DNA, 620 bp, Homo sapiens
tgagtacctggctgctttcaggtacgtgctctgggggcccagaggggcaagtccaccctctcctgtcccttctcccaagagcaccaggggggaggtgatcagttggattgtcagcctgtccccaccagttcctagacattgtaggtgaacrccagtgagaataggacaaacagagagaagaatgcaaaagtcaaagggtgctttgcaaaggcatacattaccgagagccaatgtcaaactgattgctggcaggtgggtggtggagtgagcagagctggcacatttagtcagagaaggctgccactctatttgggaaaagagaattctggaaatggatcttcaaacacttttctggagttatctccatgacagctaattctacgagagccctgggctggagttcctggagtcttctcagagcccagggctatgaagaacacccaagcaggccccagagttggatcaggggtagaggaaggcagctgggggggggcctggaagagggagaggatgagagaatgtagccaggtggcgcagaacctcagaggacctagttgtcccctactcagctctcaagtagtgagtagctgggtgtggtcaactcagtccaaaggactgag

SEQ ID NO: 69668 - DNA, 758 bp, Homo sapiens
cattcctcaatgtacaatttgcatttctatggacatgcattatttgccttattattagctttctacactttataatgttgaaaaaaagctcaaagtaaatgaaagactgatataaccatgtagggtgctctagaaaggacattcactgaattattttccccaatttcaaagtcctctacaattttttatgacagggtagagggtagtgggtcttataacactttcttgtgtcctcttcttacatttttttaaaccttgtctccaacttttgggaggatttttcagaatcttttataccagctacagaaagcagaaaaaaagagaatattatttttaattaaatatttcattttgaaagcattgtagagtcacatgcaagtgttcaggaaaaataactaatgggtactaggcttaatacctgggtgatgaaataatctgtacaacaaacccccatgacacaagtttacctgtgtaacaaagctgtacttgtaaccctgaacttaaaagttaaaagygtaacatggagatactttgtgtattattaactcttttatccattgcaacatctttcaaaactacaacacaatatcacaaccaggatattgacattgatatagtcaagatacagaacatttccatcacgacaaggatccctcctgtagcccttctgtagtatagccatgctcactttcctcccacctccggtacctccttaagccctggaaatcactaatctgttcttcgtctctctaatttgt

SEQ ID NO: 69669 - DNA, 1504 bp, Homo sapiens
atgccttgactttgatctccacaccaatctttccaagaataatgatggtacctgctctttggaatataacattagacttgctttcaagcctgagcatttgttgatcatgaaaagaaaaatcataggaccaccaatacactagattttcttcagtatcttagtgtttgagaatatttaccaacccataccaatttcattatttttttaaaaaagtatgactaaccaagttctagtttgttgataacraaagattcttgacaagcagatgagataaggagaggaggagaaatagcataatgatatgactggactttagagtgtgagtttggggatatgtggctaaagttgatactggaagatgtaggctgaggccacatcatggaagtcgttgaggtccatatttaaaggttttcatctttaccctgaagatggagaaaacacatcaaaaggtgtaaacaggattaagtttattcagattcacagttgagaatatatttctggtagaattgtgaagagtaaatttggagagcttgcagatctgattcagggaaatgaattttaagagttttgcaaatgagatttgtttaaatacagtgttcggctattaaactactaaaattgaaagcccctgtctcaaatgaatatatttgggtccaggtgatacacttgagcataatttctaaataactgttaccatcaaactcatttttgaaatgcaagaatcaattcttttaagtcaattaaatatacaaaatattggtctaatataattgttaagttagataacagatacctttagaaaaaacttaaaaggtctcaaatataagaggtattttacctagattatctgtgtttactgtatttactgtgaaaacaaaaattctgcccaagtatacaagacactaagaaaaccttggcattaaaaggacctgccacttcctctcagcctcctcatttactgtaacgtaaggaatttctgtacaaagctgccagctgccatgaacaaagattaagaaggtgatttacaggagttaatagaagataaactctgcattagatgaagataattgtaaaaaggttctaggaacagtgtatgactgatcaaaatggattttaaaaactttaaaagaaatatcactatattgacaggcaagttaatatatattcatgtatgtcagcgagaaagtaggacaagagaaaaaggaacttggtcagtcacgggaggtggtctggtggaggagatttggcacaaagagtgagcaataaataggaggggaagactttttaaaaatacattattcaacttacaggatgctttatttttgtcaaattgagggcaggccataacccttcccacctactacagcccagatgagaacatgtaaagaactgaaaaagagaacaagcagcagacaagaaatatagagaggaaagagcccttcctggggtaacaaacaatagatgtaccgtcaaggacacaatggaagatccagcagtggatgaa

SEQ ID NO: 69670 - DNA, 1504 bp, Homo sapiens
atgccttgactttgatctccacaccaatctttccaagaataatgatggtacctgctctttggaatataacattagacttgctttcaagcctgagcatttgttgatcatgaaaagaaaaatcataggaccaccaatacactagattttcttcagtatcttagtgtttgagaatatttaccaacccataccaatttcattatttttttaaaaaagtatgactaaccaagttctagtttgttgataacgaaagattcttgacaagcagatgagataaggagaggaggagaaatagcataatgatatgactggactttagagtgtgagtttggggatatgtggctaaagttgatactggaagatgtaggctgaggccacatcatggaagtcgttgaggtccatatttaaaggttttcatctttaccctgaagatggagaaaacacatcaaaaggtgtaaacaggattaagtttattcagattcacagttgagaatatatttctggtagaattgtgaagagtaaatttggagagcttgcagatctgattcagggaaatgaattttaagagttttgcaaatgagatttgtttaaatacagtgttcggctattaaactactaaaattgaaagcccctgtctcaaatgaatatatttgggtccaggtgatacacttgagcataatttctaaataactgttaccatcaaactcatttttgaaatgcaagaatcaattcttttaagtcaattaaatatacaaaatattggtctaatataattgttaagttagataacagatacctttagaaaaaacttaaaaggtctcaaatataagaggtattttacctagattatctgtgtttactgtatttactgtgaaaacaaaaattctgcccaagtatacaagacactaagaaaaccttggcattaaaaggacctgccacttcctctcagcctcctcatttactgtaacgtaaggaatttctgtacaaagctgccagctgccatgaacaaagattaagaaggtgatttacaggagttaatagaagataaactctgcattagatgaagataattgtaaaaaggttctaggaacagtgtatgactgatcaaaatggattttaaaaactttaaaagaaatatcactatattgacaggcaagttaatatatattcatgtatgtcagcgagaaagtaggacaagagaaaaaggaacttggtcagtcacgggaggtggtctggtggaggagatttggcacaaagagtgagcaataaataggaggggaagactttttaaaaatayattattcaacttacaggatgctttatttttgtcaaattgagggcaggccataacccttcccacctactacagcccagatgagaacatgtaaagaactgaaaaagagaacaagcagcagacaagaaatatagagaggaaagagcccttcctggggtaacaaacaatagatgtaccgtcaaggacacaatggaagatccagcagtggatgaa

SEQ ID NO: 69671 - DNA, 534 bp, Homo sapiens
ctcctggcttcaagtgatgcgccagcctcagcctcccaaagtgctggggttacaggcatgagccaccgtgcccagccctttttactatttttttaaagatggggtctagctctgttgcccaggctggagtgcagtggcgtgatctcactgcaacctctgccttctgggttcaagcaattctcctgcctcagccccccgagtagctggggttacaggcatctgccatcatgcccagctaattttttttgtattcttagtagagatggggtttcaccatgtcggccaggttggtctcaaactcctgacctcaggtgtcccacctgcctcggcctctcaaagtgctgggattacaggcgtgagccactgtacccggcctactttttaaatatgtctattaactgactttaaactacatatatggctcatatttctattgaacagtgcaacagtcccttcctyatacgattttattgtaaactctgcctgatactgctgcaaggtagggctcatgatacttctaatgtatacacatta

SEQ ID NO: 69672 - DNA, 499 bp, Homo sapiens
cttttttattttaaagtgccaatatgttgctttgaaaaagaataaattccttacatccagktatctggactagacttcagtgcatttagtgattatagcaaatccaaacagtagcttttgatatcagagaatgggtaaagtgtttttgacaatttctaagaacttagagttcttcggtgatacgttccatgcaactgaagctctgctctccaaatttaggtgggtacatacccaagtccatcacctggggcttctatttcctttgctcagatgctcacctcctaggtgggcacctgacataagatagactaataaaaataagtcctgtaacttttgatactcctattaaaaaagagttgcaaaccaataggaggtacacttgagaatcagcacaaatgaaagtagaacctggaaatccaggaagcagatacccaatcatgtcatttaaacatttagatccagctgtgcctgaagctgaactttagcattacataagcca

SEQ ID NO: 69673 - DNA, 850 bp, Homo sapiens
ctagcaaatcaacaaaataagagattcatgaacctctcctcctccccctcctgccccagcattaggtcttacttaaattaaacatttgggcagtatttcgttagttaccagctttgaggagaagtggtagtcacttacataaagcaattgtctctgaaaatgcattcttcttgacaaattagcatagcctaattctccatcctaagggggactgttttacaagtctacatataaaagtacctaaatggttgtcttctgaatccctccctagtagaaattgaatttggcatcagtggagccagtgactgtacctgggattcagtgcatatagaattgcattgactgtgaccctttaggcaaatggatgtaagactttggctcttaggattttcccaaacaccaataagagcatcttgaagagaatccatttactttatgatatataaggatatttcaggtttgatattatgatccttattaggtccagtctagctgagctggacatgaattgaagaaccagaattagaactagaaaatgaaacccaggctgagtgcggtggctcacgcctgtaatcctaacacttttgggaggccgaggcaggtggattgcttgagaccagcctgggcaacatgacgaaatcccatctctacaaaaatagaaaaattagccaggcgtagtggcatgcatttgtagtcccagctacttgggaggctggggtgggagaatcacctgagccggagaggtcaaggctgtggtgagctgtgatcatgccactgcactccagtcagggattgagaacctatctcaaaaaaaaaaaaaaaaraaggaaagaaagaaaatgaattaata

SEQ ID NO: 69674 - DNA, 850 bp, Homo sapiens
ctagcaaatcaacaaaataagagattcatgaacctctcctcctccccctcctgccccagcattaggtcttacttaaattaaacatttgggcagtatttcgttagttaccagctttgaggagaagtggtagtcacttacataaagcaattgtctctgaaaatgcattcttcttgacaaattagcatagcctaattctccatcctaagggggactgttttacaagtctacatataaaagtacctaaatggttgtcttctgaatccctccctagtagaaattgaatttggcatcagtggagccagtgactgtacctgggattcagtgcatatagaattgcattgactgtgaccctttaggcaaatggatgtaagactttggctcttaggattttcccaaacaccaataagagcatcttgaagagaatccatttactttatgatatataaggatatttcaggtttgatattatgatccttattaggtccagtctagctgagctggacatgaattgaagaaccagaattagaactagaaaatgaaacccaggctgagtgcggtggctcacgcctgtaatcctaacacttttgggaggccgaggcaggtggattgcttgagaccagcctgggcaacatgacgaaatcccatctctacaaaaatagaaaaattagccaggcgtagtggcatgcatttgtagtcccagctacttgggaggctggggtgggagaatcacctgagccggagaggtcaaggctgtggtgagctgtgatcatgccactgcactccagtcagggattgagaacctatctcaaaaaaaaaaaaaaaagaargaaagaaagaaaatgaattaata

SEQ ID NO: 69675 - DNA, 850 bp, Homo sapiens
ctagcaaatcaacaaaataagagattcatgaacctctcctcctccccctcctgccccagcattaggtcttacttaaattaaacatttgggcagtatttcgttagttaccagctttgaggagaagtggtagtcacttacataaagcaattgtctctgaaaatgcattcttcttgacaaattagcatagcctaattctccatcctaagggggactgttttacaagtctacatataaaagtacctaaatggttgtcttctgaatccctccctagtagaaattgaatttggcatcagtggagccagtgactgtacctgggattcagtgcatatagaattgcattgactgtgaccctttaggcaaatggatgtaagactttggctcttaggattttcccaaacaccaataagagcatcttgaagagaatccatttactttatgatatataaggatatttcaggtttgatattatgatccttattaggtccagtctagctgagctggacatgaattgaagaaccagaattagaactagaaaatgaaacccaggctgagtgcggtggctcacgcctgtaatcctaacacttttgggaggccgaggcaggtggattgcttgagaccagcctgggcaacatgacgaaatcccatctctacaaaaatagaaaaattagccaggcgtagtggcatgcatttgtagtcccagctacttgggaggctggggtgggagaatcacctgagccggagaggtcaaggctgtggtgagctgtgatcatgccactgcactccagtcagggattgagaacctatctcaaaaaaaaaaaaaaaagaagraaagaaagaaaatgaattaata

SEQ ID NO: 69676 - DNA, 713 bp, Homo sapiens
gctaattttttgtatttttagtagaggcagggttttgccatgttggccaggctggtcttgaactcccaacctcaggtcatccgcccaccccattctcccaaagtgctaggattataggcgtgagccgccgggcccagcctcttctccccatttgtttctcctgtgccagacccgcaggttcaaggatcatacttgcctgtgtttgaacatggctatgaggagacctgtgctgtcagtgtgggggacccccccagctttctcaggctgatcaagcagaagttggccatgccggccaacagttggtggcattcttcccatctcgtgggcccactcatgacagagcagctgttactgtcatggttattttatttttattcctccctctgggagcccagaatcaaagggaaacatcagcactgctgcctcattacagagagcagagaaaatggggatggggattggacattatctctttttttcttttttctttctttgagacggaatttcgctcttgttgcccaggcgggactgcagtgtcatggtctctgctcactgcaacctccacctcccaggttcaagcgattctcctgcctcagcctcccaagtagctgggattacaggcgcccaccaccacacccagctaattttgtatttttagtagaaacgaggtttcaccatgttggtcaggctggtctcaaactcccratgtcagg

SEQ ID NO: 69677 - DNA, 951 bp, Homo sapiens
ccaaaattttagaatatttggaatatatactaatgacaacaaaacatacataattacttaagaatgaataaaaataaatgaactatgtattgaactcaagaatttgaagaaagaataatcaaataacatgaaaaagaaaattgttttcaatagttttttggttaaaacaaatagattctatgtttaatcaattcaggcagtttatacattttatcagaagacatcaggaagctcattaaccctccagcaggactcataaactaggcttagaagctccacagccaagagcmacattaaaaaaacacagcactgaactgaacacacagttatcactgctaaatatggaaattgcaacttgtaccatcagctctgctctggatgtgaacgctgccactcttagaatgaatttctcatgatgccagcttcctcatcagtttctgattcagtctcctgtgagtccatctgattgggagagctgaggtcacatgctgtgccatagtctcaatgtttgtgccccaccccactcacaaactcatatactaaaatcaaatccccagtgcaatagcattaagaggtggggtctttaagaggtgattaggtcatgagggtgaagcccttatgaggggattattgcctttataaagaggactaaaggatctggtttgccctttataccctatgaggatttactagtgctttggtcttggactttctagtctccagaactgtaagaaataaatgtctgttgtttataaattactcactctgtggtgttgtgttattgcagcctgaaagaattaaggcatgctttaaagaaatctgggaaagcaataatctacctggcctttgttcctgtaagataaagaactccccaaacctagagactgtatttcataacagctcaaaaatacgacaaatactcaccacagcccactgcattagcttctcagc

SEQ ID NO: 69678 - DNA, 1203 bp, Homo sapiens
tgcatttatgttataacaaaagtaccttagagaaagaaatatgcacttataccaattaacaatatactcccattccactttcattaagttaattattgttaggagtacctctgctgatctagccagagttttatagcttcttccttacgcactcaggtgtagcaatagaactgagcattcaattctaggcacttaaaaaataaaaaaggaatagagacttatttggtaaatagtggcagcyactgcctgccttcactccctgtcccatggccagacactctgcattcaaggcagtttccactggaatgaatgaggctggcaaaggatgcaggcttaaaagtacctccttgactgagactcaacagcagtaggtgccaaggatcctgttcatgagggaaagggcggggcatagaggagcagagctgggtttctggacacatgtatatagtatgttaattgcaataaattcagtcttcaatcttctaaaatgctcaccttctcagcttctgaatatcagacatgtgggtttatctctcaacagtttattcagtcttaagagctactcagagaaaagaagattcaactgatttatcttgttgaggaggacaaagagttaggtaccttgtgctcaccatttttttatggctaggttgtgctcattgttccaaactatctgagcttcaccatacatttttaaacaaaaataaactcaatatccagaacaaaatatgtttaatatgaccttcccgtgccttttgtatctttcatggtgaggtaattgcatcaattcttttagaaaattcttctccataattaggcggattccaactttccttttctcactttcccagtggagatcaccaacaataaaatctcgagaacctccctgtacaattattaactattacttgcatctttgagaggccaaatacaatatttggagtggtgaactggagctttcaacttcagtttttacaccaaagttttctcagaaaacttgtttgctcatatcacctgacctttacaaagtacatgcatactcaattaactcttaggttcagtgatttccaagccagtctcattcatctttggcttcataaaaaatatgctcaagttgccagatagcaatcaaataaatcttcgggaattgctcttctttatttgattgtttccataattaggttttaagcttcttctctgaaa

SEQ ID NO: 69679 - DNA, 1076 bp, Homo sapiens
taacattaaaaaagtaataaaagcactttctagtttagatgttatgagtcagattgataagtcagaagaaatggaaaacttgaattttattcatttgctccacaaatatttattaagcattaattatgttgctgtcatgttgctggatgttagtgtgatctctgccccacaggaacttaccaagaataacagacaaaacagaaaagaccagataggccaggaacattttcttcaaggcacacattactgaaagaactggaaattaaaactagacaggaattgtgtaattgtagattattgtgtatatttattcatactgaaatttaaccaacaaagtcttcacatgtattgcaatggtttagattgacagaggttcagtgtacagacgttgtagccagaatgtctatttccagtctcttgtttactacttaacagctgtgtgcccttgggcaatktattcaacctcttggttcctcagttaccttgtcagtcaaatggagatagtattcgtacctaccttaaaaggctgtcctgaggattaaatgagctagtacctgttaaacgtcagaatgataccttgtacatagaaaacgtgtgatacgttttgctaccattgcaattttaatgtattgtatttgctattggacagtccagttactttaatcctttgttgtcattttaagagctttatttaaagaacttcctaggttccattatatgctcaattttttgagtgatttttgaggtttgaagggctttttgaaacgctgtgtgtcttttttaggcagaagcctttgcaaaccagtgtactagttgtcattgtcacatcctttctcctgacttgggaatcgtggaatcaagggttgacatggtgctctgtcagccccagctggccaccaatggccatataacatgaggcagaaaaaagcctttgctgtttgattgaagtgtctgagatttcagggctgtatttgtagcattaactcacataacctgactaatatatgtggtatagcccagcgcagaagcaatgtatataacatgatgatgataatatatggtgcattgtaaatgcc

SEQ ID NO: 69680 - DNA, 1076 bp, Homo sapiens
taacattaaaaaagtaataaaagcactttctagtttagatgttatgagtcagattgataagtcagaagaaatggaaaacttgaattttattcatttgctccacaaatatttattaagcattaattatgttgctgtcatgttgctggatgttagtgtgatctctgccccacaggaacttaccaagaataacagacaaaacagaaaagaccagataggccaggaacattttcttcaaggcacacattactgaaagaactggaaattaaaactagacaggaattgtgtaattgtagattattgtgtatatttattcatactgaaatttaaccaacaaagtcttcacatgtattgcaatggtttagattgacagaggttcagtgtacagacgttgtagccagaatgtctatttccagtctcttgtttactacttaacagctgtgtgcccttgggcaatttattcaacctcttggttcctcagttaccttgtcagtcaaatggagatagtattcgtacctaccttaaaaggctgtcctgaggattaaatgagctagtacctgttaaacgtcagaatgataccttgtacatagaaaacgtgtgatacgttttgctaccattgcaattttaatgtattgtatttgctattggacagtccagttactttaatcctttgttgtcattttaagagctttatttaaagaacttcctaggttccattatatgctcaattttttgagtgatttttgaggtttgaagggctttttgaaacgctgtgtgtcttttttaggcagaagcctttgcaaaccagtgtactagttgtcattgtcacatcctttctcctgacttgggaatcgtggaatcaagggttgacatggtgctctgtcagccccagctggccaccaatggccatataacatgaggcagaaaaaagcctttgctgtttgattgaagtgtctgagatttcagggctgtatttgtagcattaactcacataacctgactaatatatgtggtatagcccagcgcagaagcartgtatataacatgatgatgataatatatggtgcattgtaaatgcc

SEQ ID NO: 69681 - DNA, 1076 bp, Homo sapiens
taacattaaaaaagtaataaaagcactttctagtttagatgttatgagtcagattgataagtcagaagaaatggaaaacttgaattttattcatttgctccacaaatatttattaagcattaattatgttgctgtcatgttgctggatgttagtgtgatctctgccccacaggaacttaccaagaataacagacaaaacagaaaagaccagataggccaggaacattttcttcaaggcacacattactgaaagaactggaaattaaaactagacaggaattgtgtaattgtagattattgtgtatatttattcatactgaaatttaaccaacaaagtcttcacatgtattgcaatggtttagattgacagaggttcagtgtacagacgttgtagccagaatgtctatttccagtctcttgtttactacttaacagctgtgtgcccttgggcaatttattcaacctcttggttcctcagttaccttgtcagtcaaatggagatagtattcgtacctaccttaaaaggctgtcctgaggattaaatgagctagtacctgttaaacgtcagaatgataccttgtacatagaaaacgtgtgatacgttttgctaccattgcaattttaatgtattgtatttgctattggacagtccagttactttaatcctttgttgtcattttaagagctttatttaaagaacttcctaggttccattatatgctcaattttttgagtgatttttgaggtttgaagggctttttgaaacgctgtgtgtcttttttaggcagaagcctttgcaaaccagtgtactagttgtcattgtcacatcctttctcctgacttgggaatcgtggaatcaagggttgacatggtgctctgtcagccccagctggccaccaatggccatataacatgaggcagaaaaaagcctttgctgtttgattgaagtgtctgagatttcagggctgtatttgtagcattaactcacataacctgactaatatatgtggtatagcccagcgcagaagcaatgtatatamcatgatgatgataatatatggtgcattgtaaatgcc

SEQ ID NO: 69682 - DNA, 1029 bp, Homo sapiens
gaggacttctaccaaatatagggcgtggagaactctttgaaaagaattcattgaatagaatggaaaatgtattctgactattttcttcttaaaaatgttctgtatgtctagcttttctaaaatgtaaatgtattacttttaaaatcaacatgaaaacattctaggtgtcttctctagcatgaggcatgaggaagtttatggggagctaggagcatggattgacacgatagctggtcacttttgaggctgtgactaatcccaaagaggcaaaggactctgtgcatggtcagtgctttctttgtctgaaggataccttgtttggcttctagagaaaggaatgcaggaaaaattatctggtatggatcccctttctcctgtgcatcttgacgggtggtggcaaataagactgtgctttagctacagggaaagaaggagaagaccagcagaaggaacggcaagctggggaaatcagaaaactaggctaagtcacagtggtttgcccaaacaggtggcaagcaagccacccaccaagtaatgtggcctccactgcgggggaatcttcagagtagaacaccagcatcatgcccagaacacagaggctttttcagttggagtccaaatgcagagcatctgtcactgagtcgcttataattaattctgcctttaaattagcagctgtcttaggacactttgctggtgggtgggttggggacgaagatacatttacagtgtaatggatttgagcttgtcagttttagggtggccacagcatccaaggttgctcccttctgagggctgttcgtgttgatagcagtggtaatgatccacttttgacatctttaatatttcattggcagagatgagagagatagctattttatttcagartttgccccatcgaattctcctaattcctctttccttttctcctgcagcttgtattaatgtaatttgatggaaatctgatttgatttacaaaagttgttgtccaataattccaccaatttttgaagtaatagatgcttattt

SEQ ID NO: 69683 - DNA, 563 bp, Homo sapiens
gttttcctgctcttgttaactcgctcgctctctcctgctggcatgtaatatgtgcctgcttccccttccaccatgattgtgcatttcctgaggcatccccagccatgtgaaactgtgagtcaattaaacctctttcctttataaatttcccagtctcaggtatttctttatagcagtgtgagaatggactaatacaaaatgccttgctctacttggaacctctccacagggaatcatgcagagttcctcatcacatacccaactttttgtgtctataaattgtttggcttaacarttggtctacagctctgcaggcctgtaggtataggtcccacttatcatgatagtactcttaccctcatggcaccattctcttaattccaacaaggcactaccgtggagcattcagggtctgctggtgaactgtgtaggctttgatacaaaaggctctagaaatgagtgagaatggtatgttatctaaattaattccaagattttgcttagaggtcactttatttctcctctcacattatattgagacacattgtctactagagctcacc

SEQ ID NO: 69684 - DNA, 1029 bp, Homo sapiens
ctccagtgacaaactgggctctgactctgtcactgctgtttatcatgtgtgaccttgggaatataagttaatttctttggacatagtgtcacattcattaaatgggaataatcattaagaatattgagttaataaaygtacagcacttaaaacagcacatagcacaaagtagatgttctcttaatgttagccaaaacaatcttaatggttttggagtttttccctatttattttttttatttgggaatcagttagttatttcttcttttttctttttttgttttgaggttttcatttatttacccttctattctcttccagtgatataattcttttattaatgcacaagactcattaagtattatattgactattctgtttaagtcttcttgaaaatctcttgcagagcatccttttttgagagtgaggaagaaactctctttatcattctaatattttccttttcttctcatttgtgctgaaacccatgacttttactttaatatttactcccttgatttgctgaaatacatccttcaatggctttccaaaacaagtgaattaaaggtaaacttttaaaacattacctgtatcctgtattaaaaagtctatattttacttttacatttgaattatagtttagcttgtttagattctaatttgaaagttatttttcactaaaatatctctgttgtattctggcttccaatgctgctactaaaaagttcaatgtagtttttatattgactagtgccttctggatcattctatccttgttgtaatgatatgcctctggcttcattttatcccatactaacctccccagtaaacagttttctgtttctctcttgaaaaagttttctgttagttttctctcttgaaaaagttttctctcttgaaaaagtcctttaattctgccatgtggtcaggttgagagttctttgaatgcctgagttttgtttcactttcaattataaattccacctttaaattatttctttcttttcatgttttgctatatgcagttaa

SEQ ID NO: 69685 - DNA, 554 bp, Homo sapiens
ttttgtgggtttcttttttaattccattgtagtaaagggcatgctttgcataacatatctctgttgaaatttgttaaagtgtgttttctagcccagaacataatatgtcttggtgaatgttctgtgtgagtttgagaagaatgtgtttcctgtttttgttggatgaaatattttgtaaatgccaactatctttcttacaamcccttaacctcttaaccagattattcatgagttgacactctccactcctactgtataagatgttgactttggcctaagactaaatgtcaccatgagggtggggtgctgtctttgcaatactcacttcatttactagttgaagattcttgctgcactgtatgcaaaaaattaggccaagtatgataaagcaaaccagtcataccattgtagcaggaagagctgcagacaaaaacccctcagacaccgagttaaagaaggaaggggtttattcggccgggagcatgggcaagacccctgtctcaagagctgagctccccgagtgagcgattcttgtcccttttaagggctcacaa

SEQ ID NO: 69686 - DNA, 1772 bp, Homo sapiens
tagaaagtggggagagtgagtgatcccaggtttgaaattctggaacattgggggtagacctgaacctgggcttctgaagctgctgtttcaggaagtctccaacagtcttgtccttggcgttgtagttgatggtccagtagatacagagctggcggtactgggtgaccagctccaggaccgtgcggaagccctcagccatgttgaactgggagtccttcccgccctgctcccaggcatacacagtcaggagttccagcccgtgctgtgggggtagggagcctctccccttggagatcttggtacactggagaacgagaagaaagatatgttggttcatattggcactgatgaggtacagaagggattattctggacttggcaaagcaaccccaaaacttttattgagcacctacatgtgccagatgccttgccatgcattatcccatcacatcctgtgacatagttttatcacccccatcttacagataagaaaactaaggtcccacagctgagatatagcactctttctgctctgctccaccaacccaggatcttggccagggctgggccctgcttcctcccaggaaagtgctccagaggcagatcccagggcaacttaggaaggtggcctatccatgtgccgaacctgctggtaccagtgcttcaccagccggatcaggctcttcagcttggtagggcgagagatgatgaagtcccgttgtagctctgtgaagcaggtggagtactcgcccgcattgctgtagctgtggatgaggtcgacgtagacttgagagctgggcctggagccagagaccagctggcctggagatggggagatggttaccatcactccggctcccatgktgtcccagtggggccaacttagaaaggacttctgagatctcctacctcttgggtgttttcctaagggtggtctgggatccactgggaggccacagggtgtttttaggtggaacacagatgtggcctgatccacattaaatccctggtgacagtcatcctcccttttctgctccctttcaaaccatctgcttacctatcttggaaaaagtctcagctgggagctagcctgtctttaacacctctctaatacttacttatctttctgtctaaccgagggagggcaggcctcagtcttacatcctcctgcaggtaacagagctgtgtatggagttgacatcaccattctggttacattgcacttaaaggcattccttaatatccaaattcttgctctctgaactgaagaactgagtagattcagataaatttctgggctgggtgcagtggcttacgtctgtaatcccagcactctcgaaggccactgcaggaggatcatatgtggccaggagtttcagatcagcctgggcaacatagtcatatccccatctctacaaaaaattctataaattagccaggtgtggtggtgtgcacctgtagtcccagtttctcaggacgctggggctggaggatcacttgagcccaggagtttgaggctgcattgagtcatgatggtgccactgcactccaggccaggtgataaagtaagaccctgtctcttaaaaaaaaattctgcatgaatccctcccttggccacctgctccctcaaactcagaaaccaaataaattcggatacaagggaatttctcactctgaaaactgctaatcaaactgagagttgaaaagatatgaagagagttgtgtctattttgttcaaggctttatttttggtgcctggaagagcactgggc

SEQ ID NO: 69687 - DNA, 1142 bp, Homo sapiens
tgcatgcaaacagaaaacagatcattaacaacaaaaaatcaataactgacagagacttctcatcagcaacaacaggtaagaagacagcagaactaaggaaaacaagtgtcaagcatcccattcaagcatggaggtgaaacagaaatggttttagacaaagtctgagaaaaatttgtcactcataaaccctttctgaaaaagtactaaaagatgtatttctgtaagaaggaaaatgaatccagaaggaagaacaggaaatcaagtagcaatggtgaaaaaatttgttaattatattaatagggtttaatttgcatagattgtaaaaacaaaaacaaaagaaataatctcccctattattagtgtctggaagtttagttccaagatattatcaaacccttgaagatcattatatcattgttgcttctttcatttttgtcttttagctttgtgctgcctgtaatgggtacaatttaataacacatgctagtaaataaagagtagagagggtacgtcaggaaaatgctgacaaaggaggactaaagccctattaatgtcagacaaaaggctttaagacaaagataactttcagaaatgaagattattacttaataataaaagaacaatccaataaaatataatattatgcacttatatgttcccaataacatagcctcaaaatattaaaaacaaaatttacagaattgcaaggaacaagggataaatatccattcagagcaggagattttaagatattttactcagaaattgagagaccaaacaaaaaattatccgagcaagaagtcataagctagatctaaaggacctatatagaagtctgcattcagcaatggaaagcatgagatagagtctcactctgtctctcaggctggagtgcagtggtgcaatctcagctcactgcaacctctgcctcccaggttcaagagattttcctgcctcagtctcccgagtagctgggattacaggtgcgtgccaccatgccaggctattttttttttttttttttttttttgtatttttagtggagatggggtttcactgtggccaggctggwctcgaactcctgacctcaagtgacctgcccgcattggccttccaaaatgctgggattacaggtgtgatcc

SEQ ID NO: 69688 - DNA, 586 bp, Homo sapiens
taacgatattccatcttttttttttttaaccaacagagtcttgctctatcacctagactggagtgcaatggtatgatcatagctcaatgcagccttgaactcatgggctcaagcaatcctcctgcctcagccttcagagtagttgggactataggtgtgggccaccatgcccaactaatttttaatttttttgtaaagatgggtcttattatgttgcccactcctggggcttcaagcagtcctcccatcttggccttccaaagtactgggattacaggtgtgagccaccatgcctagtctggttttttaactttaaaatagatkgtgagccattttccatgtcatgacctaatcttttaaatgtaaattttttaactttaattttaggttcagggaaacatgtgcaggtttgttatataggtaaattgcgtgtcatggtggtttggtgtacagattactcatcactcaggtaataagcatagtacctgataggtagtttttcgatccccaccctcctctcactctccactctcaagtaggcctcaatgtctgttgttcccttctttgtgtccatatggactcaatg

SEQ ID NO: 69689 - DNA, 1590 bp, Homo sapiens
ttctttttttaatcatttatgttatttttctatttaacctaccaaaattttaaaatttcctttattagactcaagctactcattacaaaatagaacaagttcaccaatattatgtttaaggaaaaaatgaaatttaatttttttattgtagacaaagtaaaccttccaaggctatgctttgatttcctcagtaatttagactgatcctattaactaaagatttattcctaaaaaaactagataatgagactattagtaaacctaagggataataattatcatttctacagaaatttacagttcaccaatcacttgcaaatgattctgatggatgattacaattgctttctgtgtttagatatctaagactttaagtctatatcagtatccgttatctatatctatattcatactatctaatttgtaaatatgtaatatgttttcatatgctttatcatttatgtttaaatgctaaattttgtgatatgtgctactgatttttgcttttcacgataacaaagaagagatgcataatgagaatgtgaggagtcagggaaatttaataaatacttttggggctgtcagatgcagcagcaacaggatgataggtactactgtagacagttgcaaaggaaacaagcccagaattggacagggacaggggttgggtgaactttacagaagtgattcctaagctgattgttgaggatgtgcaagaatcaatcagaaacacaaaaagagaaaggatattcaaggcagaaagaaaaacatggatttagataaggaggtccaggagagcaaggaataatttaggggtggaaagtgattggggagtgcgtgagtgtctgtttggaaatgggaagtggctgttgaagagattggagagagaagaggaggagatataacggagggctttgtatatcttgctgagaagtttgattttgtagctttaactttaatttgaaaaagcaaaaactgtcataaatgaagaggattgagaagcaagacttgtcaaaaagaattatacatggatacaaaagttagagagaatcctaacttaaaactggatatggctaccaacatacctcctttcatattttttccaagtagtatctgttgagccaaagataaaacaaagcaaaacaagcaaawaaaaaacttcactatacctcaggttaaattaactaaaactaattgaagaacctagaaagaatctcactagttgcaaaaggtaacagaacataattgagaaatataattttcagcctgagcctaaatcctttaatagagagcatcaatactaagaaaaattaagtgattctttaaaaataatgagctatcatgcaaggttaatatatagtatattactaagtaaaaataacatttaaaaatcatttagtaatatgtatagaatgatctcatttttgtgaacaccttgatgaagggaagcaactatgtatttatgaatacttttgaatatatccatagaggcacaaaaaagatgcaaaaggacactgaacaaactgattaacattggtaatctgtggagagagaagttatcacatttattcgtaaactttgtattacttc

SEQ ID NO: 69690 - DNA, 1211 bp, Homo sapiens
tttctctgttaatttgtgaaaacaaattactgcctgttgaatgtatggttaggtcaggcaccgtggctcacatctggaatctcagcactttctgagaccaaggcaggaggatcgcttgagaccccatctctacaaaaaaaagttttttaattagccagatgtggtggcatgtgcctgtaagtcctggctactctggaggctgaggtgggaggatcattttagcctgggaggctgaggctacaggaagccgtcaaccactgcacactcgagcctgggcaacagagtgtctaaaaaaaaaaaaaaaaaaaaaagtaggtagtcatatttaaggcagagttaagcattgctgggttgtagtgtgaaatgataatgataactgtcgttatttttctaactttaataattatgtctcaggatattcggaatcagcggaggtaccgacagaggagaaaggccgaactagtgaaactgcaacagacatacgctgctctgaactctaaggccaccttttatggggagcaggtggattactataaaagctatatcaaaacctgcttggataacttagccagcaagggcaagtgagtattttttctttttaaagaatcaatgtcagaattagagtgaggaaaaagcagaggcaactgaaatgacactggaaatttttacttaaaatacactggatctatttattgcattagtcttttattttacctctaatcatttgtgtaattgcctaattccatttgtaagtgtatgatgtgaatagtgggtgggggatttcatggatgcttatcgctaagtattccttttgcaaaatatcttcttggggcctgtcaaggtggctcacacctatcatcccagcactttgggaggccgaggcgggtgtgtcacttgatgtcaggagttcaagaccagcctggtcaacatggtgataccccatctctactaaaaatatacaaattagctgggtgtggtggcacgcacctatagtcccagctacttgggaggctgaggcaggagaattacctgaacctgggagatggaggttgcagtgagccacgattgcatcactacactccagcctgggcgacagarcaagactctggaaaaaaaaaaaaatcttcttggccttagaaattaaaatcatgaaaggagatcatctgctggtcccagaatcacttaaggaatattatacaaatttgggtccc

SEQ ID NO: 69691 - DNA, 1558 bp, Homo sapiens
tttgtggggtatgagggaaactgaaatctaggtctcgctttgtcacaaattcattgggcaagccatgctctcccctgggctcagcacgcagctgtcaaatggacaggttgggccatgtgaactccacacctcttacagctctaaagttgtgtgagcattcatgtttctttgatgatcttaaagacccttcaggatcttgcagttcagcacataaaaacaaattcccatgaaacacattttatttgagcttcctggtcatttagattctggataaataggaattttttgccatctatataatgcataataaaatcaggtcttataagatgcctataaacttccatacctttgtaatcattttcttttataatttcaggtaaggcaatttgcttcccttcattagagataagtataggcacagagcaatttatatgagttgattatagtgcattttactataattccatggtaaaaaagcctgattagaatcacatattcactgtagcacctattttctgacacagttcagtatcatgcaggttccttagaaattgtcggagggaatgtaattatccaaaaatgctgaaattacttgttgtaaactagcctatgtgttatggatccatggcttatactaaaagccagttttcaggtagagttgaatgtagctagagctgctgcccccaatgtgacatcaacatttactgaattcatacaaagatgtgtgatttttttttttccacaatgttgggattatacttctaatttgccaaagaaatagctaagctttctagagtatggagtctgtccagataatcttggtatagtctccttttttggagggtgtgtggtagcgggggaatcatgtggtccctggaactctgtatgcaattatttgctctgctgataaaaaaaaatgttttattgctacaaaaaggggtgtaggtagcttgaaaataggtttcgatttagtcattgtactagagttctgggaaaacaaattgttcttttgaatttctgaacaataataatttgcttaagacattttgcacaatcatgataagtaacacatcttggtaaggaagtcttgcattggcagagcatctgtagaaggactgctacacagataatgagcacagttatgtttaaattaaattaagtgggcaccaagggatagaagtagatagggaaggaggaagtaattgaagcagcaaatagtccgaggcacagaaatggaaatatgtgtaaactctgcaaatttaaaagtcacttgatgccataaactattttattaatttctctggagttttaaattggtacgagtaatgatgactgtggaaaaaaaatcaacatatgcgtcagaattggggaagaatctctttgtgtttaggcactttgggaccgaaggatatttcccagatcctcgatgtgcaaagtgtggtccatggaccaaaagcattcagtatcctggggacttawtagagatgcaggatttcaggccctgcccagacctactgaatcagaatctgcatttagcaaagtctccaggtgatataca

SEQ ID NO: 69692 - DNA, 681 bp, Homo sapiens
tcctttgtatgtagagtttggcagaaattcrgattgacttgcttcataaaatgagcagttttctcactacaatgggtgaacaacctaccttctcctcttgatttgtgccagtacatttatcgtgtactatattaggttttgaataatgcagggttattttctgagatttccaatcgacttacccagacctaggtctgttccacgtttcataattttaaaaatgactatgactctattgtgtgtctcagcgcgtgggagggaacagctcttcccttgattccatatttatttatttatttatttatttattttagacagagtctcactctgtcacccaggcagcacactgcaacctccgcctcccaggttcaagcaattcttgtgcctcagcctcccaagtggctgggattacaagtgggccatcacacctggctaatttttgtatatttagtagagacgggctttcgccatgttgctccggctggtcttgaattcctgacctcaagtgttctgcccagctcggcctcccaaagttctgaaattacaggtgtgagccaccgtgcctggcctgatatttatttttctgaaggaattttcaaatagttttatcaaatttacagttgattcactggaattgtaaatataatacaatattatattattgagtattattaagtattg

SEQ ID NO: 69693 - DNA, 681 bp, Homo sapiens
tcctttgtatgtagagtttggcagaaattcggattgacttgcttcataaaatgagcagttttctcactacaatgggtgaacaacctaccttctcctcttgatttgtgccagtacatttatcgtgtactatattaggttttgaataatgcagggttattttctgagatttccaatcgacttacccagacctaggtctgttccacgtttcataattttaaaaatgactatgactctattgtgtgtctcagcgcgtgggagggaacagctcttcccttgattccatatttatttatttatttatttatttattttagacagagtctcactctgtcacccaggcagcacactgcaacctccgcctcccaggttcaagcaattcttgtgcctcagcctcccaagtggctgggattacaagtgggccatcacacctggctaatttttgtatatttagtagagacgggctttcgccatgttgctccggctggtcttgaattcctgacctcaagtgttctgcccagctcggcctcccaaagttctgarattacaggtgtgagccaccgtgcctggcctgatatttatttttctgaaggaattttcaaatagttttatcaaatttacagttgattcactggaattgtaaatataatacaatattatattattgagtattattaagtattg

SEQ ID NO: 69694 - DNA, 693 bp, Homo sapiens
ttgaagactgtactttcggtgaaactaccatgcattagtagcctttcacagtgatatctaccccacacctgcatcaaaatcttgcagtgcctattaayaaatgccaacccactaacggggaggggagaaaagacttgggactctgtacttgtaaaaccctctaccctccccaggcaattctttacacactaacactgttgaggtaaaaggagacaagtgagggagcaaatggaaggtgtgtttttggattatacagtggctcatggaagggtgggaggggtacagatggcccttagacactggcggaaagtcagagaaaaaaaattacagtaagcaggtaaagggatcaagactacacagggactagtcttgggacgacatttcttcctctgacagtttgtatggaattcttgagaaaaattcctcgaaggggcctgaaatctcagaatggtcatgtttttaatgggaatagggagtgatgctgccccattacaaccatctgttctaacagaatgtctgtaccgaggagggatgagtaacatcggcaagttctgttcgaagcctttttcaagtttctttttgatatgtatctatctatctatcatctccctatacaagcaagcatccccaaaagtagttgtctcaggaaaccagggttaggatgaccagctcatttgctggagctgccaaggt

SEQ ID NO: 69695 - DNA, 2132 bp, Homo sapiens
ttatttagaaagttctttccagagccaggtgtggtggctcatgcctgtaatcccagcactttgggaggctgaggccagtggatcacctgaggtcaggggttcaagatcagcctgaccaacgtggtgaaaccctgtctctactaaaatacaaaaattagccgggcgtggtggcagatgcctgtaatctcagctacttgggaggccaaggcagaagaattgcttgaacatgggaggcggaggctgcaatgagctgagatcacaccattgcactctagcctgggaaacattttgagccatctcaaaaaaaaaaaaaaatttcatctcaaaaaaaaaaaaaaaaaaaattccagaatgttagcagagaacatcacacatcccaaaccagtaattacaattttctaccttttgatattctaatatcccaacatactatttttattaccaaaatgctggcatttttggtgctgcaacaccatttatctgaaataacttaaaagttttattagaattcttggctttctccaatctcttgccacttcccttccctgcccctttacaaatccaccagtcagcaagagaaaacaaaaaagaaacacacaacaacagaaaactggacatgaaacttgcaggagcatctctcaggtaaggaggagaggaatcggaccccagttcatgatactccttttggggaggctgacaagagaaaacaagtctgctgtagcacagaaccctccaacatagcagaaaagctgccctgcagtgggtggtaataaagcctcctcacactgcaggagggctctgaagcttaactgaaccagctacacctaaggaggtagaccaaagagcaccaccgaagaacagagacagaccctgcaggaagtggcagatcagcagtggtcacaatgaccagtctggctatattattacggagctgtttctttggacttttaaacgaaacctttaaaaattttatacaatgaaaacagggaacaaaatgcatctctattcctataagtgttatgtgtgttacattaacattttgaattaaacaagaatgcatatatttagaaagctgaagaaaacacgaagaagcttccaggtttccacataaaagtggtggctgtatcgatcacatcctactcacatctctaaaaatctacccggatcaaaaaggggaaaataaaaaaaaaacctatgacttaggtctagagtaaaactaggagacagaacaataaactccaaataccaaagaagtggggaaatgagcagggtccagcaggagctacatcgaagagtggcttgtgcggaatcatactgattagggatcacccaaggccagaccccaccccctccaccacctgcccctcaacagagcactactgagkgtaggttagagcactggcaacagggtggttaaaggaaggactacagaaaagtacttgggtccagcaatggcaggctcaggaaggcaccatgcatgaaaggaaggggggtaccttcaaaagcagaagtgtcccttaagcggctgtaaaggggtggaagcagctaatgaaaaagagtcttcattaagctacatggagctgaaaaatcagaaagtggtgattctgcccttactaaagcaacagaagagggatcccttcaaccaagacccctaaagccacacaattcctccctgctccaccatgaggtctagtaataacaggtccagaaaaaagtaacatctgttatagaaacataaacaagaaaaacagaattcggaagtctaaataaagttattatgggaagagtctggcgaatgagaagcaaaactttccggtagacaaaagtagaccagaaaaattcagtcataaacaatgggaaactagtaacaccacattccaacacaaaaggagaatgcagcagcagacaagacagaccaccagtgatgagaaatacaaattcagaaagaaatgagcacatcttaaataaaaataagaatactaaaaaatactgaagaaatatgcaaggtaactttggaaataaaggctaattttattataaggtgaccaaagaagaagcagtatgactaaaatttctactgaggacagactctagaaaattaaaaaacaaagaaaatgaataaaataaacata

SEQ ID NO: 69696 - DNA, 2132 bp, Homo sapiens
ttatttagaaagttctttccagagccaggtgtggtggctcatgcctgtaatcccagcactttgggaggctgaggccagtggatcacctgaggtcaggggttcaagatcagcctgaccaacgtggtgaaaccctgtctctactaaaatacaaaaattagccgggcgtggtggcagatgcctgtaatctcagctacttgggaggccaaggcagaagaattgcttgaacatgggaggcggaggctgcaatgagctgagatcacaccattgcactctagcctgggaaacattttgagccatctcaaaaaaaaaaaaaaatttcatctcaaaaaaaaaaaaaaaaaaaattccagaatgttagcagagaacatcacacatcccaaaccagtaattacaattttctaccttttgatattctaatatcccaacatactatttttattaccaaaatgctggcatttttggtgctgcaacaccatttatctgaaataacttaaaagttttattagaattcttggctttctccaatctcttgccacttcccttccctgcccctttacaaatccaccagtcagcaagagaaaacaaaaaagaaacacacaacaacagaaaactggacatgaaacttgcaggagcatctctcaggtaaggaggagaggaatcggaccccagttcatgatactccttttggggaggctgacaagagaaaacaagtctgctgtagcacagaaccctccaacatagcagaaaagctgccctgcagtgggtggtaataaagcctcctcacactgcaggagggctctgaagcttaactgaaccagctacacctaaggaggtagaccaaagagcaccaccgaagaacagagacagaccctgcaggaagtggcagatcagcagtggtcacaatgaccagtctggctatattattacggagctgtttctttggacttttaaacgaaacctttaaaaattttatacaatgaaaacagggaacaaaatgcatctctattcctataagtgttatgtgtgttacattaacattttgaattaaacaagaatgcatatatttagaaagctgaagaaaacacgaagaagcttccaggtttccacataaaagtggtggctgtatcgatcacatcctactcacatctctaaaaatctacccggatcaaaaaggggaaaataaaaaaaaaacctatgacttaggtctagagtaaaactaggagacagaacaataaactccaaataccaaagaagtggggaaatgagcagggtccagcaggagctacatcgaagagtggcttgtgcggaatcatactgattagggatcacccaaggccagaccccaccccctccaccacctgcccctcaacagagcactactgagtgtaggttagagcactggcaacagggtggttaaaggaaggactacagaaaagtacttgggtccagcaatggcaggctcaggaaggcaccatgcatgaaaggaaggggggtaccttcaaaagcagaagtgtcccttaagcggctgtaaaggggtggaagcagctaatgaaaaagagtcttcattaagctacatggagctgaaaaatcagaaagtggtgattctgcccttactaaagcaacagaagagggatcccttcaaccaagacccctaaagccacacaattcctccctgctccaccatgaggtctagtaataacaggtccagaaaaaagtaacatctgttatagaaacataaacaagaaaaacagaattyggaagtctaaataaagttattatgggaagagtctggcgaatgagaagcaaaactttccggtagacaaaagtagaccagaaaaattcagtcataaacaatgggaaactagtaacaccacattccaacacaaaaggagaatgcagcagcagacaagacagaccaccagtgatgagaaatacaaattcagaaagaaatgagcacatcttaaataaaaataagaatactaaaaaatactgaagaaatatgcaaggtaactttggaaataaaggctaattttattataaggtgaccaaagaagaagcagtatgactaaaatttctactgaggacagactctagaaaattaaaaaacaaagaaaatgaataaaataaacata

SEQ ID NO: 69697 - DNA, 2132 bp, Homo sapiens
ttatttagaaagttctttccagagccaggtgtggtggctcatgcctgtaatcccagcactttgggaggctgaggccagtggatcacctgaggtcaggggttcaagatcagcctgaccaacgtggtgaaaccctgtctctactaaaatacaaaaattagccgggcgtggtggcagatgcctgtaatctcagctacttgggaggccaaggcagaagaattgcttgaacatgggaggcggaggctgcaatgagctgagatcacaccattgcactctagcctgggaaacattttgagccatctcaaaaaaaaaaaaaaatttcatctcaaaaaaaaaaaaaaaaaaaattccagaatgttagcagagaacatcacacatcccaaaccagtaattacaattttctaccttttgatattctaatatcccaacatactatttttattaccaaaatgctggcatttttggtgctgcaacaccatttatctgaaataacttaaaagttttattagaattcttggctttctccaatctcttgccacttcccttccctgcccctttacaaatccaccagtcagcaagagaaaacaaaaaagaaacacacaacaacagaaaactggacatgaaacttgcaggagcatctctcaggtaaggaggagaggaatcggaccccagttcatgatactccttttggggaggctgacaagagaaaacaagtctgctgtagcacagaaccctccaacatagcagaaaagctgccctgcagtgggtggtaataaagcctcctcacactgcaggagggctctgaagcttaactgaaccagctacacctaaggaggtagaccaaagagcaccaccgaagaacagagacagaccctgcaggaagtggcagatcagcagtggtcacaatgaccagtctggctatattattacggagctgtttctttggacttttaaacgaaacctttaaaaattttatacaatgaaaacagggaacaaaatgcatctctattcctataagtgttatgtgtgttacattaacattttgaattaaacaagaatgcatatatttagaaagctgaagaaaacacgaagaagcttccaggtttccacataaaagtggtggctgtatcgatcacatcctactcacatctctaaaaatctacccggatcaaaaaggggaaaataaaaaaaaaacctatgacttaggtctagagtaaaactaggagacagaacaataaactccaaataccaaagaagtggggaaatgagcagggtccagcaggagctacatcgaagagtggcttgtgcggaatcatactgattagggatcacccaaggccagaccccaccccctccaccacctgcccctcaacagagcactactgagtgtaggttagagcactggcaacagggtggttaaaggaaggactacagaaaagtacttgggtccagcaatggcaggctcaggaaggcaccatgcatgaaaggaaggggggtaccttcaaaagcagaagtgtcccttaagcggctgtaaaggggtggaagcagctaatgaaaaagagtcttcattaagctacatggagctgaaaaatcagaaagtggtgattctgcccttactaaagcaacagaagagggatcccttcaaccaagacccctaaagccacacaattcctccctgctccaccatgaggtctagtaataacaggtccagaaaaaagtaacatctgttatagaaacataaacaagaaaaacagaattcggaagtctaaataaagttattatgggaagagtctggcgaatgagaagcaaaactttccggtagacaaaagtagaccagaaaaattcagtcataaacaatgggaaactagtaacaccacattmcaacacaaaaggagaatgcagcagcagacaagacagaccaccagtgatgagaaatacaaattcagaaagaaatgagcacatcttaaataaaaataagaatactaaaaaatactgaagaaatatgcaaggtaactttggaaataaaggctaattttattataaggtgaccaaagaagaagcagtatgactaaaatttctactgaggacagactctagaaaattaaaaaacaaagaaaatgaataaaataaacata

SEQ ID NO: 69698 - DNA, 899 bp, Homo sapiens
ttttaaagatatgaatgtcctgggccttacccctttggtgtctgagctagcagctgcagagaggccctctgaatacacagtatattttgctatcccttcaagttattaaataccagaaacacaaaaggttttccataagaaattgtgtgattggactacaggaattaaaaccraacaacctcagtcttgggagaatgtattcaaacgtgcaatctctgaagtccctgtctactgtccaggtgtaaagcatggatttttataaattaataatgcccagacctctgccaatgactgtggcgtcaggcagcaggttggctcaggcttgtggggtggcttttgggacaagtgaattatgagtcagtaggcctgcatgaagagggcagcagaaaggtgagtcacatctgggaacactcaacaggctatggagacaagaaccgctattacaagcccggtaataagtagcacaggccagttagagcatgttcaatgcaaatcagaagcttctgtaaacacaatcaggcaggattagagaggcaatgagcggtaacactaaaagcaaaggagcttgtgcaatgaattagggaaagaacaatcaggctagaggtttagggaaacatgggatttcaaacaacagggaaaagtcaaatggaatgtttccaaagggacctaaggtgactgtggacagggcgcagcgccaggaagcgccaccagggggcagcacaggcctccccagcaatcccagacaccctgaggcctctgcactgcaagcccagggagaccagtggcccttggggcaggggtgtgaccccgtgctccatcaccctcacacagcatctgctggcaggtctgggaggctgatcagtttgcttgtgcttctaaccaaatcatgtcaccatctt

SEQ ID NO: 69699 - DNA, 392 bp, Homo sapiens
tgactcctcatggtctacaccgctcaaacacacccatagaaagcytattaggaaatgtgactaaagttcaaactatatatgccccagggaagggactgtgttgtctacaaacagggaggatgtcttcaccaaggccccccatgagcagggacagctcccaactcaaggaatagactcaattcatacttggcagtccctgacctggctctttgaaaggacaaggcacacacagctacccacttgtccaagtaacaagatcagccttcagaggatgtttctttgatgctctcaacgtagaacatgatctctcaggttttctaaggatgactatgacttttggaaataactacaagttatctggaataacaactagttaaaaaaaatggtggtcg

SEQ ID NO: 69700 - DNA, 655 bp, Homo sapiens
tcctgttttcaatgggtcactttaccctgggactgactgggaggctctgaccatttagccaccamgtgtaggtgtagttctcacttttagggtcacaggtgaagggtaagacatccttattctccctgggttttgagttgttgatggtgatgtagggcttgggcagcttcgctgtgtggataacagagagaagattgtcctgtgtgacacctttgattcctccacaggcatccctcaatcagagttggcatctcccacctgtcatcccacgcgagtccttgaaagccaatagctggtgcatgtgtcacaagacagatgtatgatgatctaagggctcaaagactgtgaggccgcctgctctgtcttagggaagcatagactttctcaagtgtcaattgagcagcagtgttgggtcatggacagacacatcagtaggagtcacagcccctggtacccctcccagtccctccctaatcagttgactggctggctcaccttgggttccttacctggaatatgcaactgctgggccccttccaaattccatcctactttgtccccctagacgtgatttctctgcagcttccatttccaaggacattctagagatgagtaataatgggacttcccattgtcctgaaaccctgaatatact

SEQ ID NO: 69701 - DNA, 655 bp, Homo sapiens
tcctgttttcaatgggtcactttaccctgggactgactgggaggctctgaccatttagccaccacrtgtaggtgtagttctcacttttagggtcacaggtgaagggtaagacatccttattctccctgggttttgagttgttgatggtgatgtagggcttgggcagcttcgctgtgtggataacagagagaagattgtcctgtgtgacacctttgattcctccacaggcatccctcaatcagagttggcatctcccacctgtcatcccacgcgagtccttgaaagccaatagctggtgcatgtgtcacaagacagatgtatgatgatctaagggctcaaagactgtgaggccgcctgctctgtcttagggaagcatagactttctcaagtgtcaattgagcagcagtgttgggtcatggacagacacatcagtaggagtcacagcccctggtacccctcccagtccctccctaatcagttgactggctggctcaccttgggttccttacctggaatatgcaactgctgggccccttccaaattccatcctactttgtccccctagacgtgatttctctgcagcttccatttccaaggacattctagagatgagtaataatgggacttcccattgtcctgaaaccctgaatatact

SEQ ID NO: 69702 - DNA, 655 bp, Homo sapiens
tcctgttttcaatgggtcactttaccctgggactgactgggaggctctgaccatttagccaccacgtgtaggtgtagttctcacttttagggtcacaggtgaagggtaagacatccttattctccctgggttttgagttgttgatggtgatgtagggcttgggcagcttcgctgtgtggataacagagagaagattgtcctgtgtgrcacctttgattcctccacaggcatccctcaatcagagttggcatctcccacctgtcatcccacgcgagtccttgaaagccaatagctggtgcatgtgtcacaagacagatgtatgatgatctaagggctcaaagactgtgaggccgcctgctctgtcttagggaagcatagactttctcaagtgtcaattgagcagcagtgttgggtcatggacagacacatcagtaggagtcacagcccctggtacccctcccagtccctccctaatcagttgactggctggctcaccttgggttccttacctggaatatgcaactgctgggccccttccaaattccatcctactttgtccccctagacgtgatttctctgcagcttccatttccaaggacattctagagatgagtaataatgggacttcccattgtcctgaaaccctgaatatact

SEQ ID NO: 69703 - DNA, 1078 bp, Homo sapiens
gttaataatctttatgtctgaatgtttctgaaacaatgagacacatcaaatttgtggaaatggtatcattgaactagagagccagctcctttggtaatgggcattggccacttttgacatggaaaattatcctcaggaagtatatttggtgttttcattataatattatagaaaatatttatagaaaaaggtccatatgctttggttttttgtttgtttgtttgttttttggtaatcatctttatgctatagtccttaccacttctgatgatcaactggctcctcttctgcctgtcctcaaagtgctaacatttttaaagatattcttagcatacttctttattaccacacgtttcttgcacaataccatctactcatactacaaaatcaacatcaccatccctctcatgtctccagaccttcagatccttgttcccagtttcctagtggatggcatcaccagaatgacttcccacaggcgcttaatctcccaatatttctatgagttttaattttattttccagccaacttgttaccactgttttccttgcagatgcaagcaagctttctcaaccttttttatgtttctatttagccaagaatcatcaagctkagttaatcctacgtctgaattatcccttagatccatcatttcttcctctttttctctgctactgttttggttcaggttcacttctttttcaaatgaaatattgcaattagttatttaattagtctcccttccttcaaggtctctattaaaccaccctttaatatctactcagcgattcttctagagccaggatgacctacttaaaaagaaaacaaaatgaaatgtagtgactccctatttcctgtaagattaagtttaaatgccttagcagcacctttacgatttggccgtagcctgccttctacaagtttttggcaagctcttctatttctcctctaaagtaatgctccctggcgttcagcagtaagaagctattttctttttttcccctttctttattgacaagtgaaaattgtgtataattatggtgtacagtataaggctatgagatatgtatacattgt

SEQ ID NO: 69704 - DNA, 2210 bp, Homo sapiens
tgcatatgtgtgtgcctgtgtatttagctagacatatattattgaaaccctgtcatgtacccttccaagattacatggagtagtaattagaggtacatacacactgaagactatggagccagactgcttggatgtgaatctgaaatctatactttctcagctatgtaattgagggcaacttcatactcggttgccctatatggggataactggaatacctacctcatgggttttataagaattaaataacttagtatctgttaagtacttggaacagtgtgacatttcctggcatgtagcaaacaccatcatccatttgttattaaataaattacatctccattcacaagtggaaaccctcttctaaacttttgtttgtaattccttgtttttctttatatatttgacttgtcaatgcttttcagccacaaaccaccaggaacacacccgtagttgagcaagttgggtttgttactcagtggagctggggagaatgcaaccatgggcatctcagtaaggatatcagaaatgacattataaataatgtgttagattatttttaaggagtttcaataaatgggctttgcatgggttgcatgctataagggagcaagaataattctacgactgggtatctaaataaaccttatctggaaggcgaaaaaactggaaggagactaaagctataattggtaaagaagcagaactcatttatattagctggtagaaggaaagatttgatatttcagggctctcacagtgaccttgtttttgcttagacaaattttatagtcttattttttgtctcactccatcatagtcacagaatatgtgatgtgctgccctatgaagttgttcatgttaaacaggaaccatgtcataggtgtgagtgccaggccagcccctaaaagcatcaggcctagctgaaagtgtcaggccaggtccctgatattcatgactgctttcctctttctcagacttatgcatttatcccaaaaccttatgatactgcattttcaaaaaaataaaataaagctttatatgaatggtatcattaaaaaatatattcttcggcttgctttttcactttctgatgacatgtatgtggattttatattggtgattatgctctagcttatttccacctctgtatagttttgacataacgttattcaatacctcttctcttttaattggacatgagttgtttctagatacttgctattataaacaatactattatacaataaccattcttataaatatctctcagataaatgtctgatagttttccatgggatatacctagaagtatgcacatcttttcaatcatactagaatattccaaattattttacattttgatcaaaacaacttaaattcccaccagcagtgtctgtyttagctgctttatgtcttctccagcacttagtgttatcaaactttaaaatgttttgacaaactagtggatgtgccattttagtttttagtttcctattcagttgataatgtgaccgttagtggttaattttagccttttgcaatcaattcttccatctttttttattctctttcttctactttcttcacttctcctttcttgcctttcttaaaatttattgcaacagttttgttattacactacttcccatgtttcacaagtcatacatccttatcctatacatatatggatttatatatatatatatggatttatatatatgtatatgtatggattaccttaaaattttaaggtggagttgcaaatgaatatagtttgtaattaatgtatttaccttcctaagaatattttactcttataaccctccaccaacttacatagtcttctattttaggtcttctatcttgcaattatttataactgtgtgtattagttttctactgcctccataacaaatttccactaacttcacaccttatcatacagttctgtaagtcagaggtctggcatgcatctctccaagctaaaatcaaggagctgacagggttccatttctttctggaggctctaggggaggagctgtgtgcttgctcattcagagtgttggcagaattcagttccttcgagttcaaagactgagatcttcatctccttcctgattgtgagctggagactgttcccagcttctaggaatcacccacatcccttggctcctggcctctttccccaaagccagcaatggcatatc

SEQ ID NO: 69705 - DNA, 2210 bp, Homo sapiens
tgcatatgtgtgtgcctgtgtatttagctagacatatattattgaaaccctgtcatgtacccttccaagattacatggagtagtaattagaggtacatacacactgaagactatggagccagactgcttggatgtgaatctgaaatctatactttctcagctatgtaattgagggcaacttcatactcggttgccctatatggggataactggaatacctacctcatgggttttataagaattaaataacttagtatctgttaagtacttggaacagtgtgacatttcctggcatgtagcaaacaccatcatccatttgttattaaataaattacatctccattcacaagtggaaaccctcttctaaacttttgtttgtaattccttgtttttctttatatatttgacttgtcaatgcttttcagccacaaaccaccaggaacacacccgtagttgagcaagttgggtttgttactcagtggagctggggagaatgcaaccatgggcatctcagtaaggatatcagaaatgacattataaataatgtgttagattatttttaaggagtttcaataaatgggctttgcatgggttgcatgctataagggagcaagaataattctacgactgggtatctaaataaaccttatctggaaggcgaaaaaactggaaggagactaaagctataattggtaaagaagcagaactcatttatattagctggtagaaggaaagatttgatatttcagggctctcacagtgaccttgtttttgcttagacaaattttatagtcttattttttgtctcactccatcatagtcacagaatatgtgatgtgctgccctatgaagttgttcatgttaaacaggaaccatgtcataggtgtgagtgccaggccagcccctaaaagcatcaggcctagctgaaagtgtcaggccaggtccctgatattcatgactgctttcctctttctcagacttatgcatttatcccaaaaccttatgatactgcattttcaaaaaaataaaataaagctttatatgaatggtatcattaaaaaatatattcttcggcttgctttttcactttctgatgacatgtatgtggattttatattggtgattatgctctagcttatttccacctctgtatagttttgacataacgttattcaatacctcttctcttttaattggacatgagttgtttctagatacttgctattataaacaatactattatacaataaccattcttataaatatctctcagataaatgtctgatagttttccatgggatatacctagaagtatgcacatcttttcaatcatactagaatattccaaattattttacattttgatcaaaacaacttaaattcccaccagcagtgtctgttttagctgctttatgtcttctccagcacttagtgttatcaaactttaaaatgttttgacaaactagtggatgtgccattttagtttttagtttcctattcagttgataatgtgaccgttagtggttaattttagccttttgcaatcaattcttccatctttttttattctctttcttctactttcttcacttctcctttcttgcctttcttaaaatttattgcaacagttttgttattacactacttcccatgtttcacaagtcatacatccttatcctatacatatatggatttatatatatatatatggatttatatatatgtatatgtatggattaccttaaaattytaaggtggagttgcaaatgaatatagtttgtaattaatgtatttaccttcctaagaatattttactcttataaccctccaccaacttacatagtcttctattttaggtcttctatcttgcaattatttataactgtgtgtattagttttctactgcctccataacaaatttccactaacttcacaccttatcatacagttctgtaagtcagaggtctggcatgcatctctccaagctaaaatcaaggagctgacagggttccatttctttctggaggctctaggggaggagctgtgtgcttgctcattcagagtgttggcagaattcagttccttcgagttcaaagactgagatcttcatctccttcctgattgtgagctggagactgttcccagcttctaggaatcacccacatcccttggctcctggcctctttccccaaagccagcaatggcatatc

SEQ ID NO: 69706 - DNA, 1160 bp, Homo sapiens
atcatccttccacttactctttcttctgtcttgcttaagtaatgcctgaactcctgtttaaggaaaacattccctactaatttgaaacttggcattatgcttatttgatgtaactttaatgacctaatttgtcatgaaatcatgatgacagcaacaaaaataatagcaggcatcactcatcctgcccttactctgttcttggcactttgcaagcatcatctcatcgagttctccagcagcactaaagtgggggtattattttcaatattcaacagcagaggagttgaggtctacaagtttatgtgatttagccaagatcagccatctgataggtggtagagctaggatttggacctgggtgtgtagggctccagaggacaattgctgctttattgtactcatttgtactggccagcatacgacctatagttgacatctggcttacagtgaatataaccgttaatttttaattgaaattcaaatatgggttttaggtttggtaccctggaaacacagtctgagataggggttctcaagcatgtgatttacttaaggcatgctctcaaaaggtagggagtgtgtgacatagcaaagaaaggaagtaggcaaaaatttcctgtcagctggagtatagcctcaacccgatcccagaygcagctctagagcatatatagaaccgctgttaatcccatttgaggcaagggctgtggcgatttataaccaactctcccttgttcttcggctgccaaatttggagtgtttggtgacataacttcctggtgaggtggctctcattaaccaggagcaattctccagagagttgggaagctatgaaccaggatcagctaacagtgacagcagccagggatacagtgtcctgtttcataagagctggatggggtgccgatagcacccactatgattgataatactcaatacttttaggtatcttacttagagttttcttgatgttcctgactctgaccgaacagacactagtctctgccactgaaatgaagtgtttttatgtctttgacaaaaaagtacatactttattattgaattcattcttttgtgttgtgcatatcttaatttctaataactctctttatccatttctaaattgttgctttgcttgtggcctcaaaaactaaattgaa

SEQ ID NO: 69707 - DNA, 1030 bp, Homo sapiens
gaaatttctatctacattataattagtatttgtcaagcggcctctttttcttcctgctgtttagagcctaagatgagtcagggaaaacacgttgaactaatggatatgtatcttctttctcaccgtcagcagagttccctactctgctagcatgtgacagtaggtggttctatgtcaatttctaaaggtttatctttgtctagatgtgttcaatatcgatattatagcatcttaggtgcttgtgctctgtgttcatgccttgatgaacattgcatatttgcactgagaaacagctgtgaattatccaggttcatgagcataatgaacacatgaatgagagcatgaaatgaaatgtgctgtttctaccactatctgttgtttagccccaccataaatgtaaagcaagtatgagattgagtttggcttatgtgatgactcagttctgtaatgacgtcattgtatttagcagacagctgagagatgatccatgcgttagcctgtaaggtgcatctgtcagtgccttatttatttttctgggattgccaggactctactccctgtgacttgagcagtattgtcagtgatatcatgcagtaggctgaaaaatggccctccaaaagatatctaattcctgaaacttctaaatgtgaccttayatggcaaagatgtgattatattaaggatcttgaaatgggaagatttttctggattatctgggtgcctcttagatacaatcacatgtgtttttagaagagagatgcagaagaagattacacacacacagaggagcaagccatgtgaagatggatttgagagagatttgaagagatgggctttgaaaattagagtgatgcaactacagctaaggaaagctggcagccactcagagctgcaaggggcgatggattctcccctaggccctcctaggggagcatagctctgctaccaccttgagtttggcccattgatactgatttctgacttctctccagaactgtgagagaataaagtcatattgatttaagccacc

SEQ ID NO: 69708 - DNA, 761 bp, Homo sapiens
ttttcttatttttggagaccgtcttgctctgtcacccaggctggagtgcagtggtgcgatcttggcttactacagcctcaacctctcrggctcaagtgattctcctacctcagtctccagagtagttgggactacaggtgtgcaccaccatgcccagctaatttctgtattctctgtagagatgggatcttgctatttttcccaggctggtcttgaactcctggactcaagcgatctgcaggccttggtctcccaaggttctgggattacaggtgagacttgagtcttaaatgacaaaagtgcagaaaaggatcttgtggggttcagtgtcttgcagattgaattcagcagcagggttggggtcttcctcaccttgtcccacattcagccaagcttcattgaaacaagagctgcctttacaattacaaaccagacttcaaggactagagcctggttgaagttttgtttttctgtgagggcctgagagtaattaaatggtgacaatggactgttagctagggattttgcttgtgtccacagatttacaagcacatataccagatgttagaacttatccatttagggagaaaaacaacaactatcttctagttattatagtatttacaaataatgatacagccatatgtgattctgtttaatgatccgctcaaatcacacaccttcgtgttctggacaaactggtttaaatggctcttattttacctaagtcatgaggtgctaagtacctctcattataacca

SEQ ID NO: 69709 - DNA, 761 bp, Homo sapiens
ttttcttatttttggagaccgtcttgctctgtcacccaggctggagtgcagtggtgcgatcttggcttactacagcctcaacctctcaggctcaagtgattctcctacctcagtctccagagtagttgggactacaggtgtgcaccaccaygcccagctaatttctgtattctctgtagagatgggatcttgctatttttcccaggctggtcttgaactcctggactcaagcgatctgcaggccttggtctcccaaggttctgggattacaggtgagacttgagtcttaaatgacaaaagtgcagaaaaggatcttgtggggttcagtgtcttgcagattgaattcagcagcagggttggggtcttcctcaccttgtcccacattcagccaagcttcattgaaacaagagctgcctttacaattacaaaccagacttcaaggactagagcctggttgaagttttgtttttctgtgagggcctgagagtaattaaatggtgacaatggactgttagctagggattttgcttgtgtccacagatttacaagcacatataccagatgttagaacttatccatttagggagaaaaacaacaactatcttctagttattatagtatttacaaataatgatacagccatatgtgattctgtttaatgatccgctcaaatcacacaccttcgtgttctggacaaactggtttaaatggctcttattttacctaagtcatgaggtgctaagtacctctcattataacca

SEQ ID NO: 69710 - DNA, 761 bp, Homo sapiens
ttttcttatttttggagaccgtcttgctctgtcacccaggctggagtgcagtggtgcgatcttggcttactacagcctcaacctctcaggctcaagtgattctcctacctcagtctccagagtagttgggactacaggtgtgcaccaccatgcccagctaatttctgtattctctgtagagatgggatcttgctatktttcccaggctggtcttgaactcctggactcaagcgatctgcaggccttggtctcccaaggttctgggattacaggtgagacttgagtcttaaatgacaaaagtgcagaaaaggatcttgtggggttcagtgtcttgcagattgaattcagcagcagggttggggtcttcctcaccttgtcccacattcagccaagcttcattgaaacaagagctgcctttacaattacaaaccagacttcaaggactagagcctggttgaagttttgtttttctgtgagggcctgagagtaattaaatggtgacaatggactgttagctagggattttgcttgtgtccacagatttacaagcacatataccagatgttagaacttatccatttagggagaaaaacaacaactatcttctagttattatagtatttacaaataatgatacagccatatgtgattctgtttaatgatccgctcaaatcacacaccttcgtgttctggacaaactggtttaaatggctcttattttacctaagtcatgaggtgctaagtacctctcattataacca

SEQ ID NO: 69711 - DNA, 589 bp, Homo sapiens
tcagggatgttgttatttccaaacactttggagtagccattgaattggtcagttcttcggtcagtaaacttactaggaatgctgggtttggacatgtgcaatgggagaggaattgttgtacttgataatcttgragttgtaaactgtttgttctctggcaaagccccagaaggatatgtagttatttccggtttgttggtccagtgacgaggtgactgggaagttacaaagtatctggaagcgctttgtgtggacatttcaggcagcctcactgttgctgttggtaggatgggtttggcagggactctggttagttgatgagaagcatgaactcttccatcctggcgttggctatctgggccacgtggtagactcctactaccaaatacttgcttttccaattccagctttgtagacaagttaaatgcatcctggtcggaagagggtgttgataattcatttggccctgacatatgctgtgttccttcattgttcactggggttgcttctgtttctggattccccacataattcaagaaaacattttccttggaatctctagatgcttgagatattcttggactgggaa

SEQ ID NO: 69712 - DNA, 2491 bp, Homo sapiens
tttttcattaatgtgaggaataagagcgtctactctaacctctactattcagcattgcattgaaaagcctatctaatgcaatgagtcaggaaaaagcagcaaagaattaaggattgaaaaggaagcttgcagataaaagtctacgaacagaattaatgaagagatgtgtggcaaaattgaaagctgatacaagaaaattcaatagtgctcctataaattattatctagttagaaaattcaatgcaaaaaggtaccattcaccaaaaggaacttaggagagatgacaaaggaagtgtaagacctttatgaagaaaattataagccttaattaaaggatataaaagaaatcccagtagatattcatagtaaagctccagtgtttattttctaggtatgcaaatttgagctacttatttatcatccctgtgcctcattttccacattggtaaaatagacataataataaaatctacctaatcaagttgttgaggatcttgtaaaataatacatacaaaaggacttagaacagtgcctgatacataacaagtgttattgttatcgttaagctgtagcttttaagacagtaagggtagtgacactgagatagataaatggaatataacagaaagctcagaaacccacctaggcacatattaagtctgaagtataacagaggaagcaatatcaatgcatgaaaaaaggaaagagtatgcaagaactggtgataggacgaatggctttcttcatgaaaaaatagactttacttgcattagataaaaaaataaacttagctggattaaagacatgaaaaataggagtctaaacctattcaaatagaaggacagggattgatttcctaaaccatacacagaaaacagttatggctggccgcagtggctcacacgtgtaatcccagcactggctgaggcgggtggattacttgaacccaagagtttgagaccagccgaggcaacatggtgaaaccccatctctacaaaaattacaaaacttagcagggtgtggtggcgtgtgcctgtagtcccagctacttggtggctgaggtgggaggatggtttgaacctgggaggtggaaggctgcagtgagctgtgattgtgccactgcactccagcctgggtgacagagtaagaacctgaaaaaaaaagacagtaagaaaagaacaaaacaaagaaagaaagagaaagaaggaaagaaagaaagaaagaaaatggatacagtgaagaaaatgattcataaaattgacatcaaaactaaaaacatctttaaaaaatccaaaacttcattacaaagaaagggctagtatccacaatatataacatctataaataaataattgataatagataattgacagaagaggacacccgaatgaaaattctcaatctcaatagtaataagggatatacaaattaaaactacataagatatcatttcatgttcagactggcaagaacttgagttggaccatactaagttttagccactacataaatagatacctcaaacactcctggaagggcacattgatataatcactttggagagtaatttggcaacatctaatgaggttgaaaatgtacctatctgaagagtcaacaaattccactcctagatatactccctatttgtatacacccaaaaactcttgcctatgtacacaaggagacaagtattctgttcactgcagcattgttataataacccaattgtcaacaagtaggcaaagaaataaacataataaatggtaaatggagtatccacagcaattaaaatgaaataactagatttataggcattaacatggatagatgttggaaacgtaattttgagcctgaaaaataagttgcagaatgtcacatacagtgatatgatttatatacattttagaagcaacaacatgccacaatatagtatttatgaatgcatataatatatattatgtaataaatataaaaacatggtttggacacacatcaaattcatgatacggttgcctatgggcagagagaaaggacataggactggcaaggagaatctatggaactccatagacattaacattaatatatgatttctttaagtaaaggatctgaggtaaataaatgtggggaaagattaacatgtgttaatttttgtatcaagtatatctcttgatttttttctgtattaaaatgttcatatacatagtgtctgacctccagaattaaatacttctatggtagaacagacagaaaatagactaaaatgtagagaagctgagtgatggctgacttttatcatgcaaccttggccagttctcttaaccaagagaatctcggttatctgatctgctgaatgaggacacygcaaaccttaaggggagtgggtatgtgttgagaacacagcacgtgctaggcatgaatcacattaacacaagagttgagctgtgagctaaaaactaaatagtatattgtaaattcatcttaggaaaca

SEQ ID NO: 69713 - DNA, 2491 bp, Homo sapiens
tttttcattaatgtgaggaataagagcgtctactctaacctctactattcagcattgcattgaaaagcctatctaatgcaatgagtcaggaaaaagcagcaaagaattaaggattgaaaaggaagcttgcagataaaagtctacgaacagaattaatgaagagatgtgtggcaaaattgaaagctgatacaagaaaattcaatagtgctcctataaattattatctagttagaaaattcaatgcaaaaaggtaccattcaccaaaaggaacttaggagagatgacaaaggaagtgtaagacctttatgaagaaaattataagccttaattaaaggatataaaagaaatcccagtagatattcatagtaaagctccagtgtttattttctaggtatgcaaatttgagctacttatttatcatccctgtgcctcattttccacattggtaaaatagacataataataaaatctacctaatcaagttgttgaggatcttgtaaaataatacatacaaaaggacttagaacagtgcctgatacataacaagtgttattgttatcgttaagctgtagcttttaagacagtaagggtagtgacactgagatagataaatggaatataacagaaagctcagaaacccacctaggcacatattaagtctgaagtataacagaggaagcaatatcaatgcatgaaaaaaggaaagagtatgcaagaactggtgataggacgaatggctttcttcatgaaaaaatagactttacttgcattagataaaaaaataaacttagctggattaaagacatgaaaaataggagtctaaacctattcaaatagaaggacagggattgatttcctaaaccatacacagaaaacagttatggctggccgcagtggctcacacgtgtaatcccagcactggctgaggcgggtggattacttgaacccaagagtttgagaccagccgaggcaacatggtgaaaccccatctctacaaaaattacaaaacttagcagggtgtggtggcgtgtgcctgtagtcccagctacttggtggctgaggtgggaggatggtttgaacctgggaggtggaaggctgcagtgagctgtgattgtgccactgcactccagcctgggtgacagagtaagaacctgaaaaaaaaagacagtaagaaaagaacaaaacaaagaaagaaagagaaagaaggaaagaaagaaagaaagaaaatggatacagtgaagaaaatgattcataaaattgacatcaaaactaaaaacatctttaaaaaatccaaaacttcattacaaagaaagggctagtatccacaatatataacatctataaataaataattgataatagataattgacagaagaggacacccgaatgaaaattctcaatctcaatagtaataagggatatacaaattaaaactacataagatatcatttcatgttcagactggcaagaacttgagttggaccatactaagttttagccactacataaatagatacctcaaacactcctggaagggcacattgatataatcactttggagagtaatttggcaacatctaatgaggttgaaaatgtacctatctgaagagtcaacaaattccactcctagatatactccctatttgtatacacccaaaaactcttgcctatgtacacaaggagacaagtattctgttcactgcagcattgttataataacccaattgtcaacaagtaggcaaagaaataaacataataaatggtaaatggagtatccacagcaattaaaatgaaataactagatttataggcattaacatggatagatgttggaaacgtaattttgagcctgaaaaataagttgcagaatgtcacatacagtgatatgatttatatacattttagaagcaacaacatgccacaatatagtatttatgaatgcatataatatatattatgtaataaatataaaaacatggtttggacacacatcaaattcatgatacggttgcctatgggcagagagaaaggacataggactggcaaggagaatctatggaactccatagacattaacattaatatatgatttctttaagtaaaggatctgaggtaaataaatgtggggaaagattaacatgtgttaatttttgtatcaagtatatctcttgatttttttctgtattaaaatgttcatatacatagtgtctgacctccagaattaaatacttctatggtagaacagacagaaaatagactaaaatgtagagaagctgagtgatggctgacttttatcatgcaaccttggccagttctcttaaccaagagaatctcggttatctgatctgctgaatgaggacactgcaaaccttaaggggagtgggtatgtgttgagaacacagcacgtgctaggcatgaatcacattaacacaagagttgrgctgtgagctaaaaactaaatagtatattgtaaattcatcttaggaaaca

SEQ ID NO: 69714 - DNA, 752 bp, Homo sapiens
tgcatcttttgatgctttatttgaacaactctgtccccaaatcccagacaggttatcatattttgcaataacttctctgtccacattattcaatggccgagttcaataaatgcttggaggttttcaaactccttattctcattcaacacatccttgtatctcctgaaaaatagtgggtttgcagatatttacctgggcctttagtgtatcagctagcatgccagttgttacttggtccrtttattctttaacccatccaaggattcatctatgcctcaatgttccttcaaggacaatcaccacccaattctattatctgactctctcatgctactgcagctgtagtcaacagaactaattatttctgggtaggtcatccaacatccaatcctaccatcaaaaatctttatagccatagaaattctggaaaccaacatatagtactattacccaccacccatctatcacaacatcatcaattccaacagtccctgatgcaaaatccatatcttcaccaccaagcaaataaatgccacatctccaacactaatctgtaacagactcctttttaggaatggaacttaagtgtcaatacagggataatactgtcaactttagttagcttaatgtattccccactatattagcctctgcaaacctttttaaaccccacataatatgtccatcattctgaaataactaaaatattcctccaattcttggcttattcctggaatgatcagtttcacttt

SEQ ID NO: 69715 - DNA, 752 bp, Homo sapiens
tgcatcttttgatgctttatttgaacaactctgtccccaaatcccagacaggttatcatattttgcaataacttctctgtccacattattcaatggccgagttcaataaatgcttggaggttttcaaactccttattctcattcaacacatccttgtatctcctgaaaaatagtgggtttgcagatatttacctgggcctttagtgtatcagctagcatgccagttgttacttggtccgtttattctttaacccatccaaggattcatctatgcctcaatgttccttcaaggacaatcaccacccaattctattatctgactctctcatgctactgcagctgtagtcaacagaactaattatttctgggtaggtcatccaacatccaatcctaccatcaaaaatctttatagccatagaaattytggaaaccaacatatagtactattacccaccacccatctatcacaacatcatcaattccaacagtccctgatgcaaaatccatatcttcaccaccaagcaaataaatgccacatctccaacactaatctgtaacagactcctttttaggaatggaacttaagtgtcaatacagggataatactgtcaactttagttagcttaatgtattccccactatattagcctctgcaaacctttttaaaccccacataatatgtccatcattctgaaataactaaaatattcctccaattcttggcttattcctggaatgatcagtttcacttt

SEQ ID NO: 69716 - DNA, 1061 bp, Homo sapiens
aggaaacactcacccaagtgctgcctgttgttgttgtaagagaagagagcttggtaactaagggaatggggtctgagtggaggcagaggaggatgagttcaggggctcaggttgcagggaagagggcatccagaatatatgatggagagaaagagtcggcagcagaggcagagcagaggaagacagcctcttctgccaagagaagacggacaatgcaccaaaatagaagcataaataattgctgcttgctattttattcatctttttatgtttctttcgcatctccctcattctaaggtccctggtagcaggaaccaggcttcacccttcattgcgtttaaagagaccatgtagaaaagtgattatggccagcgactctgaagccaaactgcctgggttcaaatctcagctttgccattgacttactagctctgtaaccttggacaatctacttagtttctctgtgctccagtttccccatgtgtaaaatgtaagtactactaacttctcatattgctgtaaaattaaatttattaatttatgtaatttttagaatagtgcttggcaaatagtgcttaaaaatgacagagactgttgttatgttttcgtttgtttgtttgttttttgttttttaagagacaggrtctggctctgttgtccaggctggagtgcagtggcgccatcatagctcactgtacccttgaactcctaagctcaagtgatcgtcctgcctctgccttctgagtagctggggctataggtatgtgccaccacacccaactaatttttgtggggttttttttgtagacatggggtctttctgtattgcccaggctggtcttgaactcctgggctcaagtgatccttccacctcagcctcccaaagcactggaattacagacatgagccaccacacgtagtcagtgactgctatttatatccccagtgcctaatagaatgggtttaaattttacctgtgcttaagaagtgactagtacgtactagtggtaacatgaaggcaaattgaaggcattagtggtaacttggaggaccctgttctt

SEQ ID NO: 69717 - DNA, 1061 bp, Homo sapiens
aggaaacactcacccaagtgctgcctgttgttgttgtaagagaagagagcttggtaactaagggaatggggtctgagtggaggcagaggaggatgagttcaggggctcaggttgcagggaagagggcatccagaatatatgatggagagaaagagtcggcagcagaggcagagcagaggaagacagcctcttctgccaagagaagacggacaatgcaccaaaatagaagcataaataattgctgcttgctattttattcatctttttatgtttctttcgcatctccctcattctaaggtccctggtagcaggaaccaggcttcacccttcattgcgtttaaagagaccatgtagaaaagtgattatggccagcgactctgaagccaaactgcctgggttcaaatctcagctttgccattgacttactagctctgtaaccttggacaatctacttagtttctctgtgctccagtttccccatgtgtaaaatgtaagtactactaacttctcatattgctgtaaaattaaatttattaatttatgtaatttttagaatagtgcttggcaaatagtgcttaaaaatgacagagactgttgttatgttttcgtttgtttgtttgttttttgttttttaagagacaggatctggctctgttgtccaggctggagtgcagtggcgccatcatagctcactgtacccttgaactcctargctcaagtgatcgtcctgcctctgccttctgagtagctggggctataggtatgtgccaccacacccaactaatttttgtggggttttttttgtagacatggggtctttctgtattgcccaggctggtcttgaactcctgggctcaagtgatccttccacctcagcctcccaaagcactggaattacagacatgagccaccacacgtagtcagtgactgctatttatatccccagtgcctaatagaatgggtttaaattttacctgtgcttaagaagtgactagtacgtactagtggtaacatgaaggcaaattgaaggcattagtggtaacttggaggaccctgttctt

SEQ ID NO: 69718 - DNA, 1061 bp, Homo sapiens
aggaaacactcacccaagtgctgcctgttgttgttgtaagagaagagagcttggtaactaagggaatggggtctgagtggaggcagaggaggatgagttcaggggctcaggttgcagggaagagggcatccagaatatatgatggagagaaagagtcggcagcagaggcagagcagaggaagacagcctcttctgccaagagaagacggacaatgcaccaaaatagaagcataaataattgctgcttgctattttattcatctttttatgtttctttcgcatctccctcattctaaggtccctggtagcaggaaccaggcttcacccttcattgcgtttaaagagaccatgtagaaaagtgattatggccagcgactctgaagccaaactgcctgggttcaaatctcagctttgccattgacttactagctctgtaaccttggacaatctacttagtttctctgtgctccagtttccccatgtgtaaaatgtaagtactactaacttctcatattgctgtaaaattaaatttattaatttatgtaatttttagaatagtgcttggcaaatagtgcttaaaaatgacagagactgttgttatgttttcgtttgtttgtttgttttttgttttttaagagacaggatctggctctgttgtccaggctggagtgcagtggcgccatcatagctcactgtacccttgaactcctaagctcaagtgatcgtcctgcctctgccttctgagtagctggggctataggtatgtgccaccacacccaactaatttttgtgggkttttttttgtagacatggggtctttctgtattgcccaggctggtcttgaactcctgggctcaagtgatccttccacctcagcctcccaaagcactggaattacagacatgagccaccacacgtagtcagtgactgctatttatatccccagtgcctaatagaatgggtttaaattttacctgtgcttaagaagtgactagtacgtactagtggtaacatgaaggcaaattgaaggcattagtggtaacttggaggaccctgttctt

SEQ ID NO: 69719 - DNA, 1061 bp, Homo sapiens
aggaaacactcacccaagtgctgcctgttgttgttgtaagagaagagagcttggtaactaagggaatggggtctgagtggaggcagaggaggatgagttcaggggctcaggttgcagggaagagggcatccagaatatatgatggagagaaagagtcggcagcagaggcagagcagaggaagacagcctcttctgccaagagaagacggacaatgcaccaaaatagaagcataaataattgctgcttgctattttattcatctttttatgtttctttcgcatctccctcattctaaggtccctggtagcaggaaccaggcttcacccttcattgcgtttaaagagaccatgtagaaaagtgattatggccagcgactctgaagccaaactgcctgggttcaaatctcagctttgccattgacttactagctctgtaaccttggacaatctacttagtttctctgtgctccagtttccccatgtgtaaaatgtaagtactactaacttctcatattgctgtaaaattaaatttattaatttatgtaatttttagaatagtgcttggcaaatagtgcttaaaaatgacagagactgttgttatgttttcgtttgtttgtttgttttttgttttttaagagacaggatctggctctgttgtccaggctggagtgcagtggcgccatcatagctcactgtacccttgaactcctaagctcaagtgatcgtcctgcctctgccttctgagtagctggggctataggtatgtgccaccacacccaactaatttttgtggggttttttttgtagasatggggtctttctgtattgcccaggctggtcttgaactcctgggctcaagtgatccttccacctcagcctcccaaagcactggaattacagacatgagccaccacacgtagtcagtgactgctatttatatccccagtgcctaatagaatgggtttaaattttacctgtgcttaagaagtgactagtacgtactagtggtaacatgaaggcaaattgaaggcattagtggtaacttggaggaccctgttctt

SEQ ID NO: 69720 - DNA, 1061 bp, Homo sapiens
aggaaacactcacccaagtgctgcctgttgttgttgtaagagaagagagcttggtaactaagggaatggggtctgagtggaggcagaggaggatgagttcaggggctcaggttgcagggaagagggcatccagaatatatgatggagagaaagagtcggcagcagaggcagagcagaggaagacagcctcttctgccaagagaagacggacaatgcaccaaaatagaagcataaataattgctgcttgctattttattcatctttttatgtttctttcgcatctccctcattctaaggtccctggtagcaggaaccaggcttcacccttcattgcgtttaaagagaccatgtagaaaagtgattatggccagcgactctgaagccaaactgcctgggttcaaatctcagctttgccattgacttactagctctgtaaccttggacaatctacttagtttctctgtgctccagtttccccatgtgtaaaatgtaagtactactaacttctcatattgctgtaaaattaaatttattaatttatgtaatttttagaatagtgcttggcaaatagtgcttaaaaatgacagagactgttgttatgttttcgtttgtttgtttgttttttgttttttaagagacaggatctggctctgttgtccaggctggagtgcagtggcgccatcatagctcactgtacccttgaactcctaagctcaagtgatcgtcctgcctctgccttctgagtagctggggctataggtatgtgccaccacacccaactaatttttgtggggttttttttgtagacatggggtctttctgtattgcccaggctggtcttgaactcctgggctcaagygatccttccacctcagcctcccaaagcactggaattacagacatgagccaccacacgtagtcagtgactgctatttatatccccagtgcctaatagaatgggtttaaattttacctgtgcttaagaagtgactagtacgtactagtggtaacatgaaggcaaattgaaggcattagtggtaacttggaggaccctgttctt

SEQ ID NO: 69721 - DNA, 1479 bp, Homo sapiens
aagtgatccactgccttggcctcccaaagtgctaggatacaaattgggtttttgtgaggactaaatgaacgagtgaaggtcaaagcactagcactgtgctcaacacacattaagggagatgtgtatgatattaactactacacgatccacatttctcatatgcaaaatagatgtaataaagcctaactttcacaatttggtaaggattagaaatcayacacacacacacacacacatagacatgcacacacaataaagtatgaatctgaatctggcacctatttgtcactcattaaataattgtttaaaatacctctataaaaatacaaacatatacaatgaaggaactttcccaaaatgaagtttcaagggttatagtctgacgtaatgtaaaaaatgtgccctagatacaaatttagtgatggggagacactgaagtaacactgatcctgaataactcatgcatacatcctgtaaaatttcattttctaattaattggaaagatgaagcaggaaagtctcttccagaaactgattggtttttaaaacatggattggagactagtgcattaagagaaaattctgaaatgtgaaaacagctatgctcattaggacgttctagaaaatgtaaaaggttatctatcctctgatctgtggaatttatgttgtcagagaacaagcactaaacagatggggagatgtatttatgagttttccctttgcaatctacaaaacaatgaggataaaaccagtgaaactatggctttgatgctttttagctttcactaaagtgaaggagggctaatgaagataaaaaagttgttcccctcatgatggccaggcaggaggaggaagaatctgagcactccagggtctcaacaaggatgagtaacggcgaataaatgtgattgcatactctttccatcaaataaaaacatataaaacaaaccccaaaagccaagtactgtttgaagtatcaatgaacaactctagtgcttacctcataacaatgtgcagatccagtgaaaactttcccaatatccagcaattcaaagttgaagtgaatcttaggtcccatgccttcccctttgattcggaggggcagacggatttctcggcctagaaaaacagttcagactttatcatccaaatggtgcttcatttaccccaaatcatgttccctcatgtacgttaccaatataaataatcaaaattattaaatagctccctgcattgcaccgagggaactgcaatttaactaacgctgaagattcatcctatatgggagccaatcataatcctgaatgccaaaatcctgactgccgaaattgtgaaagaccaaaatcccaaagatataattctggaaaaacaaaagacattctttacaatatatttatttacattttaaagagggatttacttgagaaacatataaaaacacaacagaacacttcaaaggccactttatgcaataaaata

SEQ ID NO: 69722 - DNA, 1479 bp, Homo sapiens
aagtgatccactgccttggcctcccaaagtgctaggatacaaattgggtttttgtgaggactaaatgaacgagtgaaggtcaaagcactagcactgtgctcaacacacattaagggagatgtgtatgatattaactactacacgatccacatttctcatatgcaaaatagatgtaataaagcctaactttcacaatttggtaaggattagaaatcacacacacacacacacacacatagacatgcacacacaataaagtatgaatctgaatctggcacctatttgtcactcattaaataattgtttaaaatacctctataaaaatacaaacatatacaatgaaggaactttcccaaaatgaagtttcaagggttayagtctgacgtaatgtaaaaaatgtgccctagatacaaatttagtgatggggagacactgaagtaacactgatcctgaataactcatgcatacatcctgtaaaatttcattttctaattaattggaaagatgaagcaggaaagtctcttccagaaactgattggtttttaaaacatggattggagactagtgcattaagagaaaattctgaaatgtgaaaacagctatgctcattaggacgttctagaaaatgtaaaaggttatctatcctctgatctgtggaatttatgttgtcagagaacaagcactaaacagatggggagatgtatttatgagttttccctttgcaatctacaaaacaatgaggataaaaccagtgaaactatggctttgatgctttttagctttcactaaagtgaaggagggctaatgaagataaaaaagttgttcccctcatgatggccaggcaggaggaggaagaatctgagcactccagggtctcaacaaggatgagtaacggcgaataaatgtgattgcatactctttccatcaaataaaaacatataaaacaaaccccaaaagccaagtactgtttgaagtatcaatgaacaactctagtgcttacctcataacaatgtgcagatccagtgaaaactttcccaatatccagcaattcaaagttgaagtgaatcttaggtcccatgccttcccctttgattcggaggggcagacggatttctcggcctagaaaaacagttcagactttatcatccaaatggtgcttcatttaccccaaatcatgttccctcatgtacgttaccaatataaataatcaaaattattaaatagctccctgcattgcaccgagggaactgcaatttaactaacgctgaagattcatcctatatgggagccaatcataatcctgaatgccaaaatcctgactgccgaaattgtgaaagaccaaaatcccaaagatataattctggaaaaacaaaagacattctttacaatatatttatttacattttaaagagggatttacttgagaaacatataaaaacacaacagaacacttcaaaggccactttatgcaataaaata

SEQ ID NO: 69723 - DNA, 1479 bp, Homo sapiens
aagtgatccactgccttggcctcccaaagtgctaggatacaaattgggtttttgtgaggactaaatgaacgagtgaaggtcaaagcactagcactgtgctcaacacacattaagggagatgtgtatgatattaactactacacgatccacatttctcatatgcaaaatagatgtaataaagcctaactttcacaatttggtaaggattagaaatcacacacacacacacacacacatagacatgcacacacaataaagtatgaatctgaatctggcacctatttgtcactcattaaataattgtttaaaatacctctataaaaatacaaacatatacaatgaaggaactttcccaaaatgaagtttcaagggttatagtctgaygtaatgtaaaaaatgtgccctagatacaaatttagtgatggggagacactgaagtaacactgatcctgaataactcatgcatacatcctgtaaaatttcattttctaattaattggaaagatgaagcaggaaagtctcttccagaaactgattggtttttaaaacatggattggagactagtgcattaagagaaaattctgaaatgtgaaaacagctatgctcattaggacgttctagaaaatgtaaaaggttatctatcctctgatctgtggaatttatgttgtcagagaacaagcactaaacagatggggagatgtatttatgagttttccctttgcaatctacaaaacaatgaggataaaaccagtgaaactatggctttgatgctttttagctttcactaaagtgaaggagggctaatgaagataaaaaagttgttcccctcatgatggccaggcaggaggaggaagaatctgagcactccagggtctcaacaaggatgagtaacggcgaataaatgtgattgcatactctttccatcaaataaaaacatataaaacaaaccccaaaagccaagtactgtttgaagtatcaatgaacaactctagtgcttacctcataacaatgtgcagatccagtgaaaactttcccaatatccagcaattcaaagttgaagtgaatcttaggtcccatgccttcccctttgattcggaggggcagacggatttctcggcctagaaaaacagttcagactttatcatccaaatggtgcttcatttaccccaaatcatgttccctcatgtacgttaccaatataaataatcaaaattattaaatagctccctgcattgcaccgagggaactgcaatttaactaacgctgaagattcatcctatatgggagccaatcataatcctgaatgccaaaatcctgactgccgaaattgtgaaagaccaaaatcccaaagatataattctggaaaaacaaaagacattctttacaatatatttatttacattttaaagagggatttacttgagaaacatataaaaacacaacagaacacttcaaaggccactttatgcaataaaata

SEQ ID NO: 69724 - DNA, 1479 bp, Homo sapiens
aagtgatccactgccttggcctcccaaagtgctaggatacaaattgggtttttgtgaggactaaatgaacgagtgaaggtcaaagcactagcactgtgctcaacacacattaagggagatgtgtatgatattaactactacacgatccacatttctcatatgcaaaatagatgtaataaagcctaactttcacaatttggtaaggattagaaatcacacacacacacacacacacatagacatgcacacacaataaagtatgaatctgaatctggcacctatttgtcactcattaaataattgtttaaaatacctctataaaaatacaaacatatacaatgaaggaactttcccaaaatgaagtttcaagggttatagtctgacgtaatgtaaaaaatgtgccctagatacaaatttagtgatggggagacactgaagtaacactgatcctgaataactcatgcatacatcctgtaaaatttcattttctaattaattggaaagatraagcaggaaagtctcttccagaaactgattggtttttaaaacatggattggagactagtgcattaagagaaaattctgaaatgtgaaaacagctatgctcattaggacgttctagaaaatgtaaaaggttatctatcctctgatctgtggaatttatgttgtcagagaacaagcactaaacagatggggagatgtatttatgagttttccctttgcaatctacaaaacaatgaggataaaaccagtgaaactatggctttgatgctttttagctttcactaaagtgaaggagggctaatgaagataaaaaagttgttcccctcatgatggccaggcaggaggaggaagaatctgagcactccagggtctcaacaaggatgagtaacggcgaataaatgtgattgcatactctttccatcaaataaaaacatataaaacaaaccccaaaagccaagtactgtttgaagtatcaatgaacaactctagtgcttacctcataacaatgtgcagatccagtgaaaactttcccaatatccagcaattcaaagttgaagtgaatcttaggtcccatgccttcccctttgattcggaggggcagacggatttctcggcctagaaaaacagttcagactttatcatccaaatggtgcttcatttaccccaaatcatgttccctcatgtacgttaccaatataaataatcaaaattattaaatagctccctgcattgcaccgagggaactgcaatttaactaacgctgaagattcatcctatatgggagccaatcataatcctgaatgccaaaatcctgactgccgaaattgtgaaagaccaaaatcccaaagatataattctggaaaaacaaaagacattctttacaatatatttatttacattttaaagagggatttacttgagaaacatataaaaacacaacagaacacttcaaaggccactttatgcaataaaata

SEQ ID NO: 69725 - DNA, 1603 bp, Homo sapiens
gagcataaacgatcaacacatccagaaatctataaacagtcccgccagctaaatagaaaactaaggaaagacaacttgataaataattaggctccagctccagacagtccctggtgcattctctatttgcagtctggctagaaagaacatacttctggaataaagaatgtcraaaagaacaaaatggtttaaaaatgcagatatcaaacaagagggagaaaataaaaatctagagccaatttgggtttattaattaacacaatcagtcttatcagtatactttgcaggcagtgtctttcctaacttcagaatgaaggaggcacaagggcttaagggggagcagagagggctgtaaatattatgcaggtatgatacctcgggccattgctctgtttttgtagagtaagagtgtttccttatgctgtcacctcaaaagttagaaacgtggtgcctccaccaaggaagtcaagtacttcttcctctgtgacccctctgggctgtatttatatagacacagcacttactgtaaaatgtttgtatatatgtttatcatcccactaaggtatgagttctctgcagtcacggcccacacctttctgcttctctgaagccctggtactgggaatgcattgggcagacagtgaatagtcactcaatgtacattttaaaatgtcgtatacatcctagtttcctttagatctcacatccccagatcagcctgtgagaatgaaggctccataagggtagctgccgttctacccccacccaaaccagagtaagccatccctggtttgggtaggggcagaacagcaactaccctcagggaagcttcaatcttcatggctcttagtaggtgctcaataaatatttgttgaatctgcaatatctactcagtttgcacactgtgtagtcagtagcagacacctattcatctctgcaacctacttctactattttctcttcatccagaacctcaaaagtcacacaactgtagagccaaaagagacctatgagagcatatgaggaacagagaagtcctaagcactttgatgtatttaggcatttcactgtggcacctttccaatcttgaaataagtatctgttttcttctgataaatgataaatatctggccccttttgattggtgggggttttagtgatatgcagtgttagaaacactcatggctagactcaactggcaaggccaggcagatgaggcagctcagccaatcagtggtgtatcagtagttatctcatctcaggactactgaaatcctgggcttcttactcacccatgacacaaacatattcctttggtgggttaatactctgctgtgtttgggtaaacagaatggacaccgctaacctgctcctacacaaatggaatgaccaaagggccaggggctatcttagatcctgagagaacccaggctagagaagtctcaccagaactgtaggaagtggcccccactggaaatcacataaactcagtgcatgtgggcaagtcagggtcttatggtttgaagtggaccaggaatgctttcaaaagtatgatcccagcaatccagggtccatgtgcagaagagggtaacacacttcagtt

SEQ ID NO: 69726 - DNA, 1603 bp, Homo sapiens
gagcataaacgatcaacacatccagaaatctataaacagtcccgccagctaaatagaaaactaaggaaagacaacttgataaataattaggctccagctccagacagtccctggtgcattctctatttgcagtctggctagaaagaacatacttctggaataaagaatgtcaaaaagaacaaaatggtttaaaaatgcagatatcaaacaagagggagaaaataaaaatctagagccaatttgggtttattaattaacacaatcagtcttatcagtatactttgcaggcagtgtctttcctaacttcagaatgaaggaggcacaagggcttaagggggagcagagagggctgtaaatattatgcaggtatgatacctcgggccattgctctgtttttrtagagtaagagtgtttccttatgctgtcacctcaaaagttagaaacgtggtgcctccaccaaggaagtcaagtacttcttcctctgtgacccctctgggctgtatttatatagacacagcacttactgtaaaatgtttgtatatatgtttatcatcccactaaggtatgagttctctgcagtcacggcccacacctttctgcttctctgaagccctggtactgggaatgcattgggcagacagtgaatagtcactcaatgtacattttaaaatgtcgtatacatcctagtttcctttagatctcacatccccagatcagcctgtgagaatgaaggctccataagggtagctgccgttctacccccacccaaaccagagtaagccatccctggtttgggtaggggcagaacagcaactaccctcagggaagcttcaatcttcatggctcttagtaggtgctcaataaatatttgttgaatctgcaatatctactcagtttgcacactgtgtagtcagtagcagacacctattcatctctgcaacctacttctactattttctcttcatccagaacctcaaaagtcacacaactgtagagccaaaagagacctatgagagcatatgaggaacagagaagtcctaagcactttgatgtatttaggcatttcactgtggcacctttccaatcttgaaataagtatctgttttcttctgataaatgataaatatctggccccttttgattggtgggggttttagtgatatgcagtgttagaaacactcatggctagactcaactggcaaggccaggcagatgaggcagctcagccaatcagtggtgtatcagtagttatctcatctcaggactactgaaatcctgggcttcttactcacccatgacacaaacatattcctttggtgggttaatactctgctgtgtttgggtaaacagaatggacaccgctaacctgctcctacacaaatggaatgaccaaagggccaggggctatcttagatcctgagagaacccaggctagagaagtctcaccagaactgtaggaagtggcccccactggaaatcacataaactcagtgcatgtgggcaagtcagggtcttatggtttgaagtggaccaggaatgctttcaaaagtatgatcccagcaatccagggtccatgtgcagaagagggtaacacacttcagtt

SEQ ID NO: 69727 - DNA, 1603 bp, Homo sapiens
gagcataaacgatcaacacatccagaaatctataaacagtcccgccagctaaatagaaaactaaggaaagacaacttgataaataattaggctccagctccagacagtccctggtgcattctctatttgcagtctggctagaaagaacatacttctggaataaagaatgtcaaaaagaacaaaatggtttaaaaatgcagatatcaaacaagagggagaaaataaaaatctagagccaatttgggtttattaattaacacaatcagtcttatcagtatactttgcaggcagtgtctttcctaacttcagaatgaaggaggcacaagggcttaagggggagcagagagggctgtaaatattatgcaggtatgatacctcgggccattgctctgtttttgtagagtaagartgtttccttatgctgtcacctcaaaagttagaaacgtggtgcctccaccaaggaagtcaagtacttcttcctctgtgacccctctgggctgtatttatatagacacagcacttactgtaaaatgtttgtatatatgtttatcatcccactaaggtatgagttctctgcagtcacggcccacacctttctgcttctctgaagccctggtactgggaatgcattgggcagacagtgaatagtcactcaatgtacattttaaaatgtcgtatacatcctagtttcctttagatctcacatccccagatcagcctgtgagaatgaaggctccataagggtagctgccgttctacccccacccaaaccagagtaagccatccctggtttgggtaggggcagaacagcaactaccctcagggaagcttcaatcttcatggctcttagtaggtgctcaataaatatttgttgaatctgcaatatctactcagtttgcacactgtgtagtcagtagcagacacctattcatctctgcaacctacttctactattttctcttcatccagaacctcaaaagtcacacaactgtagagccaaaagagacctatgagagcatatgaggaacagagaagtcctaagcactttgatgtatttaggcatttcactgtggcacctttccaatcttgaaataagtatctgttttcttctgataaatgataaatatctggccccttttgattggtgggggttttagtgatatgcagtgttagaaacactcatggctagactcaactggcaaggccaggcagatgaggcagctcagccaatcagtggtgtatcagtagttatctcatctcaggactactgaaatcctgggcttcttactcacccatgacacaaacatattcctttggtgggttaatactctgctgtgtttgggtaaacagaatggacaccgctaacctgctcctacacaaatggaatgaccaaagggccaggggctatcttagatcctgagagaacccaggctagagaagtctcaccagaactgtaggaagtggcccccactggaaatcacataaactcagtgcatgtgggcaagtcagggtcttatggtttgaagtggaccaggaatgctttcaaaagtatgatcccagcaatccagggtccatgtgcagaagagggtaacacacttcagtt

SEQ ID NO: 69728 - DNA, 1603 bp, Homo sapiens
gagcataaacgatcaacacatccagaaatctataaacagtcccgccagctaaatagaaaactaaggaaagacaacttgataaataattaggctccagctccagacagtccctggtgcattctctatttgcagtctggctagaaagaacatacttctggaataaagaatgtcaaaaagaacaaaatggtttaaaaatgcagatatcaaacaagagggagaaaataaaaatctagagccaatttgggtttattaattaacacaatcagtcttatcagtatactttgcaggcagtgtctttcctaacttcagaatgaaggaggcacaagggcttaagggggagcagagagggctgtaaatattatgcaggtatgatacctcgggccattgctctgtttttgtagagtaagagtgtttccttatgctgtcacctcaaaagttagaaacgtggtgcctccaccaaggaagtcaagtacttcttcctctgtgacccctctgggctgtatttatatagacacagcacttactgtaaaatgtttgtatatatgtttatcatcccactaaggtwtgagttctctgcagtcacggcccacacctttctgcttctctgaagccctggtactgggaatgcattgggcagacagtgaatagtcactcaatgtacattttaaaatgtcgtatacatcctagtttcctttagatctcacatccccagatcagcctgtgagaatgaaggctccataagggtagctgccgttctacccccacccaaaccagagtaagccatccctggtttgggtaggggcagaacagcaactaccctcagggaagcttcaatcttcatggctcttagtaggtgctcaataaatatttgttgaatctgcaatatctactcagtttgcacactgtgtagtcagtagcagacacctattcatctctgcaacctacttctactattttctcttcatccagaacctcaaaagtcacacaactgtagagccaaaagagacctatgagagcatatgaggaacagagaagtcctaagcactttgatgtatttaggcatttcactgtggcacctttccaatcttgaaataagtatctgttttcttctgataaatgataaatatctggccccttttgattggtgggggttttagtgatatgcagtgttagaaacactcatggctagactcaactggcaaggccaggcagatgaggcagctcagccaatcagtggtgtatcagtagttatctcatctcaggactactgaaatcctgggcttcttactcacccatgacacaaacatattcctttggtgggttaatactctgctgtgtttgggtaaacagaatggacaccgctaacctgctcctacacaaatggaatgaccaaagggccaggggctatcttagatcctgagagaacccaggctagagaagtctcaccagaactgtaggaagtggcccccactggaaatcacataaactcagtgcatgtgggcaagtcagggtcttatggtttgaagtggaccaggaatgctttcaaaagtatgatcccagcaatccagggtccatgtgcagaagagggtaacacacttcagtt

SEQ ID NO: 69729 - DNA, 1175 bp, Homo sapiens
tgcaggatatttctacttttcagttgggatttaagtaaaagagaaagaacttctatttccttatagcaaaaactcaatatagcattttctatcaaatgggagagcaaacctcagaaataggtaacaagcctcaactttagaccccacttccagtttcacgtctttgaaagatttcatatgacttctttaacacttctgaaattaaattccatgtcatttatgtctctgcaaaaaaaactttctttctttattactcagttctaacatttctgaaaatcaaaacatccagaaatttccttcctggctctgacatcaatatcccttcttcccagttctacaaaacctgcctcatcacacggatccgcgtcccccattctgcgagccttctacatgtgacccccctcccatgactgcccattttcctgctccaaatgagaggttgagtacataggattgaatctgtaagtgactatgaccttctttgttgaaaagaattgtcaaaatggccttcagttatactgtaattatcttccttcttggtcttaatgttttctttcagattcgcaatgagtaaagtaattgcattttacttattaataaagtgacctactagaaaaaaatcaactttaaattttcaagcctaaagctaattcccatattgcgatttttgcccaaattattaaatatctctggacacggagtttcatgcttccttctggaacaagaataaacaaccaagtgactcgatggccacagttctgagactttctgaaagctgtctatgaacaaacagccactggtttgtgatagatgataaatatgatcatgagaaaggtgtcatttaaaagtgttcaccttttaaaaattatatcagcaatacttacaggggatctttaaaaaaaactcccttgaaaatccttaaacatctttttaaaaaattgycttccttcccctctattacccctctacctcctttccttcgtttctcccttccttccttccttgaaagattatttcttacaaatcttgcccccctcccaaaaaaaaaaccaaagtgcaagaacagagatttatatacatatgtaattttcctggtttatctaaaaagtagtttacgactcaacttttacatttatcaaataaaatggttatgttctagttcccaacttacattt

SEQ ID NO: 69730 - DNA, 1111 bp, Homo sapiens
tttgtcattcttaaaaatgcttgtaccaactatacttaagaagagctgctcaatatgagagaatytaagtccatttgagaacagtgatcaggagggaaaattcagtaacttcaaaaatagaaaactgactacttaaaagaaaccacatccctaaacagcaattaaaacaaaacaaaacaaaacaaaacaaaacaaaacaaaacaaaagaaacacacacacacacatacacacacacacacacccctgacatgtctggatagtggccacataaaaagaagacaaaaattgtactaaaaatttaaaaattttaaatattaggaatatctttattcagtatagcaatttaagcccctgactttattcaggatgcaccaattaccttgattcttagtatataagtgagttttcaagaagacacaaacctataaactatatttgatttgatctctgcaatgtcacagcaggtgcattactctgacatcatatagaaaaaataaatatcgaaataccatgaatgttttgttgatttatgttgctaaagttttaaagcatcattacttgcatcttattttttagcaaacatttctgctccattcactgttgtatgaaccagtcattcaggaaatcaacaaccctttatacattttaaatgttctttaggctcaataactttggatgcagaaaaaactttccccaaagaaagaaaaagtaagcatctaggcatttgactttaaaatttttatttcaaaaacttatatagagagtcaaaatttcaagtactataaaagcaaatacaatgaaactaaaaaatatatttctccccttcacctaactccaagtctgatttttagaggtaagaactgtcaatattttcatgcacatcctttccaaaaaaaaggtatgcactcttgtcaacttttaaactttctttgagtgaaatgtaacaatctgatacgtgaaaactcattgttactttaattggaatatccttaattatggatggtgttgaacaccttttcataaattaattggcttaaaccaaagagaaaacccctcctccaaataagttaatactcaaagaactatgccttctgctggttgtggtggctc

SEQ ID NO: 69731 - DNA, 1111 bp, Homo sapiens
tttgtcattcttaaaaatgcttgtaccaactatacttaagaagagctgctcaatatgagagaatctaagtccatttgagaacagtgatcaggagggaaaattcagtaacttcaaaaatagaaaactgactacttaaaagaaaccacatccctaaacagcaattaaaacaaaacaaaacaaaacaaaacaaaacaaaacaaaacaaaagaaacacacacacacayatacacacacacacacacccctgacatgtctggatagtggccacataaaaagaagacaaaaattgtactaaaaatttaaaaattttaaatattaggaatatctttattcagtatagcaatttaagcccctgactttattcaggatgcaccaattaccttgattcttagtatataagtgagttttcaagaagacacaaacctataaactatatttgatttgatctctgcaatgtcacagcaggtgcattactctgacatcatatagaaaaaataaatatcgaaataccatgaatgttttgttgatttatgttgctaaagttttaaagcatcattacttgcatcttattttttagcaaacatttctgctccattcactgttgtatgaaccagtcattcaggaaatcaacaaccctttatacattttaaatgttctttaggctcaataactttggatgcagaaaaaactttccccaaagaaagaaaaagtaagcatctaggcatttgactttaaaatttttatttcaaaaacttatatagagagtcaaaatttcaagtactataaaagcaaatacaatgaaactaaaaaatatatttctccccttcacctaactccaagtctgatttttagaggtaagaactgtcaatattttcatgcacatcctttccaaaaaaaaggtatgcactcttgtcaacttttaaactttctttgagtgaaatgtaacaatctgatacgtgaaaactcattgttactttaattggaatatccttaattatggatggtgttgaacaccttttcataaattaattggcttaaaccaaagagaaaacccctcctccaaataagttaatactcaaagaactatgccttctgctggttgtggtggctc

SEQ ID NO: 69732 - DNA, 1111 bp, Homo sapiens
tttgtcattcttaaaaatgcttgtaccaactatacttaagaagagctgctcaatatgagagaatctaagtccatttgagaacagtgatcaggagggaaaattcagtaacttcaaaaatagaaaactgactacttaaaagaaaccacatccctaaacagcaattaaaacaaaacaaaacaaaacaaaacaaaacaaaacaaaacaaaagaaacacacacacacacayacacacacacacacacccctgacatgtctggatagtggccacataaaaagaagacaaaaattgtactaaaaatttaaaaattttaaatattaggaatatctttattcagtatagcaatttaagcccctgactttattcaggatgcaccaattaccttgattcttagtatataagtgagttttcaagaagacacaaacctataaactatatttgatttgatctctgcaatgtcacagcaggtgcattactctgacatcatatagaaaaaataaatatcgaaataccatgaatgttttgttgatttatgttgctaaagttttaaagcatcattacttgcatcttattttttagcaaacatttctgctccattcactgttgtatgaaccagtcattcaggaaatcaacaaccctttatacattttaaatgttctttaggctcaataactttggatgcagaaaaaactttccccaaagaaagaaaaagtaagcatctaggcatttgactttaaaatttttatttcaaaaacttatatagagagtcaaaatttcaagtactataaaagcaaatacaatgaaactaaaaaatatatttctccccttcacctaactccaagtctgatttttagaggtaagaactgtcaatattttcatgcacatcctttccaaaaaaaaggtatgcactcttgtcaacttttaaactttctttgagtgaaatgtaacaatctgatacgtgaaaactcattgttactttaattggaatatccttaattatggatggtgttgaacaccttttcataaattaattggcttaaaccaaagagaaaacccctcctccaaataagttaatactcaaagaactatgccttctgctggttgtggtggctc

SEQ ID NO: 69733 - DNA, 1111 bp, Homo sapiens
tttgtcattcttaaaaatgcttgtaccaactatacttaagaagagctgctcaatatgagagaatctaagtccatttgagaacagtgatcaggagggaaaattcagtaacttcaaaaatagaaaactgactacttaaaagaaaccacatccctaaacagcaattaaaacaaaacaaaacaaaacaaaacaaaacaaaacaaaacaaaagaaacacacacacacacatacacacacacacacacccctgacatgtctggatagtggccacataaaaagaagacaaaaattgtaytaaaaatttaaaaattttaaatattaggaatatctttattcagtatagcaatttaagcccctgactttattcaggatgcaccaattaccttgattcttagtatataagtgagttttcaagaagacacaaacctataaactatatttgatttgatctctgcaatgtcacagcaggtgcattactctgacatcatatagaaaaaataaatatcgaaataccatgaatgttttgttgatttatgttgctaaagttttaaagcatcattacttgcatcttattttttagcaaacatttctgctccattcactgttgtatgaaccagtcattcaggaaatcaacaaccctttatacattttaaatgttctttaggctcaataactttggatgcagaaaaaactttccccaaagaaagaaaaagtaagcatctaggcatttgactttaaaatttttatttcaaaaacttatatagagagtcaaaatttcaagtactataaaagcaaatacaatgaaactaaaaaatatatttctccccttcacctaactccaagtctgatttttagaggtaagaactgtcaatattttcatgcacatcctttccaaaaaaaaggtatgcactcttgtcaacttttaaactttctttgagtgaaatgtaacaatctgatacgtgaaaactcattgttactttaattggaatatccttaattatggatggtgttgaacaccttttcataaattaattggcttaaaccaaagagaaaacccctcctccaaataagttaatactcaaagaactatgccttctgctggttgtggtggctc

SEQ ID NO: 69734 - DNA, 1050 bp, Homo sapiens
tattcagtgcactggaatgccacttccttaggtcttagacatcaggaatgatggaaatagaatttccacagcaacttacatgtcaaaggattgtaggtttagattcagaatttttagttgaatgtgtactggcctctgaagcttaaaaaacatgggctgagtaatgggtggaaaaggatgcccattaattcagctttcaaaatgaaaatgtaaacatgctgaccctagtcgaagcacccagccctcgccagcacacctcactgaccttctccagtcggtagatgagctgcttggtggagagctggatgagaggtgcgacgaactcacaggtgatgttcacagccatcaccaagctcttccccttctgtgccccgatgatggcgtggcacaccagcttctctttcactatctgccagtgagataagccagcatttggggaacaactataacttaatacttactcagaatacttatttacccactgagagaaaatggatttccgactacctgcctggggacacaaggaagagcacacttttctgaacagcacgtttcagggactgctctttgtcacatgattatgtttttgttagttacacatggccttgatggattctgtatttatttctgactgccctgaggcagttgatttacattcagttctgggagtaaaaacattgatgaacaagacagataaaatctttcatggggcttatagttcaaaggtggttayatgatttcttaatcaactattgaaaactgtagttggaaagtttttgtctttttcttccttttttttttcagatggagtttgctcttgtcgcccaggctggagtgcaatggtgcaatctcagctcactgcaacctctgcctccccggttcaagcgattctcctgcctcagcctcccaagtagctgcgattacaggcatgtgccaccacgcctggctaattttgtatttttagtagacacggggtttctccatgttggtcaggctggtctcgaactcccgaccacaggtgacccacccacctcggcctcccaaagtgct

SEQ ID NO: 69735 - DNA, 1050 bp, Homo sapiens
tattcagtgcactggaatgccacttccttaggtcttagacatcaggaatgatggaaatagaatttccacagcaacttacatgtcaaaggattgtaggtttagattcagaatttttagttgaatgtgtactggcctctgaagcttaaaaaacatgggctgagtaatgggtggaaaaggatgcccattaattcagctttcaaaatgaaaatgtaaacatgctgaccctagtcgaagcacccagccctcgccagcacacctcactgaccttctccagtcggtagatgagctgcttggtggagagctggatgagaggtgcgacgaactcacaggtgatgttcacagccatcaccaagctcttccccttctgtgccccgatgatggcgtggcacaccagcttctctttcactatctgccagtgagataagccagcatttggggaacaactataacttaatacttactcagaatacttatttacccactgagagaaaatggatttccgactacctgcctggggacacaaggaagagcacacttttctgaacagcacgtttcagggactgctctttgtcacatgattatgtttttgttagttacacatggccttgatggattctgtatttatttctgactgccctgaggcagttgatttacattcagttctgggagtaaaaacattgatgaacaagacagataaaatctttcatggggcttatagttcaaaggtggttacatgatttcttaatmaactattgaaaactgtagttggaaagtttttgtctttttcttccttttttttttcagatggagtttgctcttgtcgcccaggctggagtgcaatggtgcaatctcagctcactgcaacctctgcctccccggttcaagcgattctcctgcctcagcctcccaagtagctgcgattacaggcatgtgccaccacgcctggctaattttgtatttttagtagacacggggtttctccatgttggtcaggctggtctcgaactcccgaccacaggtgacccacccacctcggcctcccaaagtgct

SEQ ID NO: 69736 - DNA, 873 bp, Homo sapiens
atgagagaaatcctaatcaagggaagccagagaaatattttccctcaatttgttcttgtgttggcattccaggaccatgataatttcatcgctaaataaatacatggacactaaggctaacctgcaaggaaaggccagcaggatctcggtaagaatcaccttcactccctaatctataaaaggaagcacagatttcaaagcaaataatgataatgatgctttaaataaaacttgattaatctcctaaatattaataaatacaccaatcacatagttctagatacaggattaatattacagttactttctccttaaagacaactcagattaagaggcagtgaatctgttaatctaatcatctcctttttttttatttaacaaaactgaaagctttgcaaccatctggttaatgattcatataaaccactggcaaaaagaaaattacctaaacaatcctaatttatcgttttcrgaacatctctgtctacaagtatttgattcaatatctttatgcatcatatttttcaaaaacagttataaaaaatttggccaatagtaatgaaatactttcccttgtatcagaaaaaaaattcaatcttctaatttgactcttttatcttattatttttagtctttatgttggagaacaatggcagaaaaaagaaagcaatttggcaatttgggcatgaaatgaatatattgcacatttgtaggccctcttgaggtgtatgttctggttttgagccacatgatgatggccattcatgtgaaattggtagtacacttgtgctagattttctgaccagagctggtcatctcaaacattatccacctttgctattctgtttcagattctagaagtcaggtcccaac

SEQ ID NO: 69737 - DNA, 639 bp, Homo sapiens
taggaattgatggatatggtagcggtcttacctaatagagagtaatgtgcccactaagtctcaaagaatgctttgcccttaggaggcaaattttcataaccctgtggcaatatcattaaagtatattgcaaactttcccaattaaaggtcaggtgaggctagctgtcctcaatctttgagatagagaaaatgacatttgccatgtacacaggcctaagtgacctggttgttgactatgatcatgatgttcctgcaactaacaacatttcatagtagaaggtaagaattgcaataygtcctttattccccaatttgtggatctatttgctaaaatcagcccatttagctttcttaaattggggctaatgaattttaagccagtaactcctaggtagagagaggaatgcatattttaaaagttttctttgaatattggtgtctttgccacaagaactacagcaaattgctggttttataaattttaaaaagtgtttgaacattgacaattacatgtggttcaactatgctccaccacaggaaactgactaccctacttgcagagaagtattacaagaatggatttgttcctgagaaaaagtaagaattaatgtgatgggtcttgttcctggccccaggttt

SEQ ID NO: 69738 - DNA, 639 bp, Homo sapiens
taggaattgatggatatggtagcggtcttacctaatagagagtaatgtgcccactaagtctcaaagaatgctttgcccttaggaggcaaattttcataaccctgtggcaatatcattaaagtatattgcaaactttcccaattaaaggtcaggtgaggctagctgtcctcaatctttgagatagagaaaatgacatttgccatgtacacaggcctaagtgacctggttgttgactatgatcatgatgttcctgcaactaacaacatttcatagtagaaggtaagaattgcaatacgtcctttattccccaatttgtggatctatttgctaaaatcagcccatttagctttcttaaattggggctaatgaattttaagccagtaactcctaggtagagagaggaatgcmtattttaaaagttttctttgaatattggtgtctttgccacaagaactacagcaaattgctggttttataaattttaaaaagtgtttgaacattgacaattacatgtggttcaactatgctccaccacaggaaactgactaccctacttgcagagaagtattacaagaatggatttgttcctgagaaaaagtaagaattaatgtgatgggtcttgttcctggccccaggttt

SEQ ID NO: 69739 - DNA, 822 bp, Homo sapiens
gaagaggagagaaaggcagtgttttgcatgccatgccaaaaggtttggacttcacactgaaggcaaaggaaagctaccgatctgcattttagaagaattatcatgcagtagggtgaaaagtaagttggaagtgggaagaggctggaggctgagagatgccttagaaagttcttgaagtaaagtcaagaatctggaggtcctggaccaagacaactttatgagagaaggaaagaggatgctttgagaaaacaaacaaacacaaagtcaatattttagggactgattatagttgagagaggagtggggagggacatggataaagaatcaagaatgataaaaagatggacagcttaaaaatgagatggcttttgacgcagttaaccagcatgaggaagccagtgasggtttgggggtaaagggtgaagaagtaaattcaatttttaataagttcggcttgcagtgcccctaggaatcatcagaggacatgtgcccctatcccagggagaatctgatttcttgtgtccctgatgtgaattaacctgcaggtaaaagactactgcccagagaggtgacaagctggagtcacaaaagctacagaagtaaagattttaagaagaaaacagtgattgaccctggcataccttacaaagtggttatgtcagagaaaagaccattggattgcaaataggacagtattcaatgaccttaccaaacccagtttcagtgcaatggaaggggcagaactagactctagaggttgtggaaagaaagggggatcctacagccaatccatgctgttaatatctacaccacaacagaaaa

SEQ ID NO: 69740 - DNA, 626 bp, Homo sapiens
ttgaacctggaagactgaggttgcagtgagccaagatcacggcactgcactccagcctgggcaacagagcgagactccatctcaaaaagaaaaaaaaaagtgcctctggaacccctcattgcacaggaacgttctagaaatctccaccaagccagggcctctgagctggtgtcagacagggtctacgttctctgaggtccccctccccaggcccagctccccagcaggaagcatccggaagcattacttgagcagtgcgaggaaggcrgcgggttccacgtcgggcagctcaatctccgtggatgttgtggccattcccccgttgaacatggcatcaaagacggcgctgcccacggccagcacgaacctggtacgggagagagaaggccctggttaagcccgtggccgccaccccacggccgggagggccagcccggtatcctgggtgaccaccccactagggctccctgccagcctccagcaggcatgtaccaggccccccgatggcagaggcttctggaaggggcctgggacagcaggagggtgatgcagacggacccacggcaaggacaggcagggctaggaccatgccctgggccacacagggcctcacgctctgccagccc

SEQ ID NO: 69741 - DNA, 1320 bp, Homo sapiens
tagttttgttagacacggccacatacccttccttagaggtagtacccttttgtattcctgccagtaatatatgagagtccacagagtatgtggttaagctttagaatgcttgtccrtctgatagggaagaaatcgtgttgccttaatttgcccttcttttattatgaatcagattttaatcttttaaaagcctttctgctgtgagtctctttctacttaaatacatccttcattctgactgttgccaagttaaacatattttagcattttcctaaagctttctgcatccctccttgtagcatcaatttcctctaccatctgtcacaatccatatttcaactatatctccaactcttgtccatgtatcagaagagcagaccgattcaattcattacccctaaatacactccaccttttcttgcctctgagcttttgcccatttgtggtaatgccatctttctgggatggcaaatattctattttcatgggttgatattttgtctatatttcggggtccagctcaaacatccaccctgattttcccattgatatttgttttatctgtgtactccctgtcagactttagatgctataccaatgactttctctaggggaaaggggacatatcaaatcactcgaagaggacttttcttttaacatacatgctcatcagtttgactcatctctcaaccccaggtgtataaatgtttctggagcaatttggcatgttctaggggatgtggtgaggaaaacagataaattctcttctaaggagcttaaattcttggtgaggcaattgataaataaattagtaaataaacaggaacttagggagtgaaagtcaccagagaatttaagcaaggtgagatggtgactttcttttccattcaagatggaagagaacaaatttatctttctgcatgaaacagccaaaatactgggcaaaatgcatgaaacaacggcctcaagactttggacatcaggcaaccaaaggcagtgatccctgagaagtggggtaataaatgaggtgagcttcttgattgacccagtttactgcctggaaagagtttccaggtcatagtgcatgggtggggaagtgaggtttgggatggggaatataggcagagttcagtggtcatcctcagttgaagagatggagctgggagttgggggacactcaggtggctggagttctcaggggaaaataccagagtggagagagatgcacagagaactccagagatctacagagtgtttccctcaagtatttagctgatattgatgaacacatgtgggtgaagaaactactgagaatcagta

SEQ ID NO: 69742 - DNA, 1320 bp, Homo sapiens
tagttttgttagacacggccacatacccttccttagaggtagtacccttttgtattcctgccagtaatatatgagagtccacagagtatgtggttaagctttagaatgcttgtccatytgatagggaagaaatcgtgttgccttaatttgcccttcttttattatgaatcagattttaatcttttaaaagcctttctgctgtgagtctctttctacttaaatacatccttcattctgactgttgccaagttaaacatattttagcattttcctaaagctttctgcatccctccttgtagcatcaatttcctctaccatctgtcacaatccatatttcaactatatctccaactcttgtccatgtatcagaagagcagaccgattcaattcattacccctaaatacactccaccttttcttgcctctgagcttttgcccatttgtggtaatgccatctttctgggatggcaaatattctattttcatgggttgatattttgtctatatttcggggtccagctcaaacatccaccctgattttcccattgatatttgttttatctgtgtactccctgtcagactttagatgctataccaatgactttctctaggggaaaggggacatatcaaatcactcgaagaggacttttcttttaacatacatgctcatcagtttgactcatctctcaaccccaggtgtataaatgtttctggagcaatttggcatgttctaggggatgtggtgaggaaaacagataaattctcttctaaggagcttaaattcttggtgaggcaattgataaataaattagtaaataaacaggaacttagggagtgaaagtcaccagagaatttaagcaaggtgagatggtgactttcttttccattcaagatggaagagaacaaatttatctttctgcatgaaacagccaaaatactgggcaaaatgcatgaaacaacggcctcaagactttggacatcaggcaaccaaaggcagtgatccctgagaagtggggtaataaatgaggtgagcttcttgattgacccagtttactgcctggaaagagtttccaggtcatagtgcatgggtggggaagtgaggtttgggatggggaatataggcagagttcagtggtcatcctcagttgaagagatggagctgggagttgggggacactcaggtggctggagttctcaggggaaaataccagagtggagagagatgcacagagaactccagagatctacagagtgtttccctcaagtatttagctgatattgatgaacacatgtgggtgaagaaactactgagaatcagta

SEQ ID NO: 69743 - DNA, 1320 bp, Homo sapiens
tagttttgttagacacggccacatacccttccttagaggtagtacccttttgtattcctgccagtaatatatgagagtccacagagtatgtggttaagctttagaatgcttgtccatctgatagggaagaaatcgtgttgccttaatttgcccttcttttattatgaatcagattttaatcttttaaaagcctttctgctgtgagtctctttctacttaaatacatccttcattctgactgttgccaagttaaacatattttagcattttcctaaagctttctgcatccctccttgtagcatcaatttcctctaccatctgtcacaatccatatttcaactatatctccaactcttgtccatgtatcagaagagcagaccgattcaattcattacccctaaatacactccaccttttcttgcctctgagcttttgcccatttgtggtaatgccatctttctgggatggcaaatattctattttcatgggttgatattttgtctatatttcggggtycagctcaaacatccaccctgattttcccattgatatttgttttatctgtgtactccctgtcagactttagatgctataccaatgactttctctaggggaaaggggacatatcaaatcactcgaagaggacttttcttttaacatacatgctcatcagtttgactcatctctcaaccccaggtgtataaatgtttctggagcaatttggcatgttctaggggatgtggtgaggaaaacagataaattctcttctaaggagcttaaattcttggtgaggcaattgataaataaattagtaaataaacaggaacttagggagtgaaagtcaccagagaatttaagcaaggtgagatggtgactttcttttccattcaagatggaagagaacaaatttatctttctgcatgaaacagccaaaatactgggcaaaatgcatgaaacaacggcctcaagactttggacatcaggcaaccaaaggcagtgatccctgagaagtggggtaataaatgaggtgagcttcttgattgacccagtttactgcctggaaagagtttccaggtcatagtgcatgggtggggaagtgaggtttgggatggggaatataggcagagttcagtggtcatcctcagttgaagagatggagctgggagttgggggacactcaggtggctggagttctcaggggaaaataccagagtggagagagatgcacagagaactccagagatctacagagtgtttccctcaagtatttagctgatattgatgaacacatgtgggtgaagaaactactgagaatcagta

SEQ ID NO: 69744 - DNA, 513 bp, Homo sapiens
cctcctgggcagcacagggccaggtggcataggacgctttcctggggaagggtgtgcccagaatctgcttctccctaaggtggcaaatgtggtgagcgggggcaggcggcgggggcagggtagctgctcagtgtcagcagcactgctcacccccacagcgatgagctaaggcaattgtttaaagaaatgtccacccaaactcaggcatattkccccagggcagctttctgagcagaggtggagacaggcttccaggcagccggggctgcgggagaggagtgggggccggttgtctgcaacctggtcgctggtcagctggggctcaggcctcacatcccctatccttcatgagccttaattctgggagttggggccgatgatgacctcttttgacagatgagaagacagggtcagatgttcggctgcatatgctgtggcagggcctggactcgagtgccccactcacagcccaggctcggccaggaggcctcctgtcagccagattgggatccc

SEQ ID NO: 69745 - DNA, 2980 bp, Homo sapiens
cacctctagtgctgtttccttacccctgggcccggggctccttcctccctgcctctttccctcccccaggtacctgtcccaccctgggggacaagcccaaagctccttctgcccactttgaggcccctcccctgctcacacccactccaggcagaaagcctcggcagctgggtgtcagggcgggaaggtgctgcctgaggctccaaaccgttggttccaggtgtggctttgagattaaacctggcgcctttcctgtggcccttgataagggtgatcctgagtgtttctctggcattttctgtttaaggcctgtctgaggttcagcaaagtcccacctccccacggagccctccatgataagcacagcactcgcgggtccacctccctgtggcctgctctgtggggagcccagggttggcaccattcctgggccctgcccctcccctcccctccccagcacaaggactgaccctgaggagtgctattaataattatatcaggacagttttgtaatcaggaactgccgtgcacgggaactgtagtctgcgggaggattgttctgttactgattgatctcccaccaccgtgcccttcaaactccgggttcagatccttggattgtatttgggggttggagctcagatgaggggaatcctcttggtgggctggagcagtcgaaagcttcttgaagggggaggattgaaactggaccctgaaggaaagtgggtgggaggaggggcagagagcattccagataagcagagggtctgggttgtcaggggcaaggggcctggggagtctgggggtggtgggaaggttaaggatgtcagggctggatcctgaagggctttgaatgtcaggttaaggagcttgagctgtgagcactagggagccatggagggtttcagagcaggacagtgatgggtccaagctgtttgggaagactgatgtggcaacaatgtggaggacagatcagaaggaagacgctaacttcttagctggggccatggagaggaggatccggtgtgagagagcctgctttttttttttttttcttttttttgagacagggtcatccaggctggaggtgcagtggcacaatcacagctcactgcagccttgatctcctgggctcaagcaatcctcctaaatcagcttcccaagtagctgggactacaggtgtgtgccaccatgcctggctaattttttaatttattttaatagagacaaggtctttctgtgttgcccagactgttctcgagctcctgagctcaagcgatcctcctgtgcaggcctcccagagacatcctgccttttagtgcttcagccaaaggagcaaggtggtgggcccatggacccgcacccaagtccccgctctcttccctgcttcctggcaggcagatcttgcctccagcagcggttccgtctgcctgcttctccgtcagcactggtggctgcagctgtccctagagcatctttgcaaaacatccccgccacgtgatgaaggaaggcttcctctgcccccgtgccttggcaaaccatgaaggagggggcctcaattcgaggaagtgcccagggctttgttctggctcccgccatggctggacccactgtctattgttttccatgccgttggtgaccttgggccagctggactggctggctcccacctccaagtccattgcggaagacagccaggctggcaggatgattttcagtccctaggtggtcttgagtaggccccctacccatggagagacttagtttccccagctcttgggggtcccagttggcattatggagactgtttatctcctgaggaccaggaatctcttattaggcaggaaagtgagttcccagccccagaacagagacccatacctcctcctgtgtctgctgttgttgggggcccttgtcctggacctgtggatcagaggcgcaagtctgtctgccattccctctctcttggttttggggatccttgctgcccctaccgcagggtgtggtctgtgaggaaaggggcttgggttggatgatgaagtgattacaagcttctactggaatttggaccacctgagtttagatcttagctccaacctctcagttgtgtcaccgtagctaagttacaaaayatgcatgcacgcacacacacacgcacgcgcacacacacacatgcacacacacacacacacataaagtgacctttctgagcctcagtttccctgtctgtaaaatgggaataataacagcgtaaactatataagattggtgtgaggattaagtgtaaggtgcctagaagagcacctggcgcctagtaggtgcccagtaaatgttggctcttttgccatgagctgataggagggtgtgggggttggggcaagttcacctcactgagattcaggaagggtgaccgtatgagatgctgtgatgtagtgaggtctgctgggcattgtctctgtggactgatccctggaaatcagtccctccctgtacctttccaaacccagccctgaaaggcaaggccctcctctcctttccctggctctccaggccccatagctgctcctgggccaactggataaatggcttcttctctgcttgcccccttaaggctgttcctccctgctctgggctttggttccctgcttgtgaaaggaggtgattggatgaggaggccctccctgcacagcgactgggccagcattcccagcagtgaccactcctgagactgagatcgagggcaacagggacagacactgtgtacagcccctaacgagcctggcactcacacctccctggtgacagataaagaaactgaggctcagccagccaggtgctggctcggggcctgaggctaacagatggcaggtgcccaagctctccctgctcattcctcgcctcccagaggatttgctgagattctggaaggcccccaagcagggcagaggagagggtggggcttcccggagcccctcctctc

SEQ ID NO: 69746 - DNA, 2074 bp, Homo sapiens
ttcttaacttcatagactgtcagtgctggaaagatccttagaatccaaaccctttatttggcaggcggggaaaatagagccccagagaacagaaaggaaatgactcacttgagcttttgcaggtgtagcaaagttwttttcataaactctgttttcccttgtagttaatgtttaaagctttctttttaaataggcatgctcctcctgtattcacttaaagcctccatcacagatgtcactaaccaacatatgatgtcttgctcttcatgttacagatcctttggttttgggtagacttgatttcagactctgaattcctggagtcataccctcaaaaaaaaaaaaaagaccctgtcaattcacagacatactcatttattcagttaatttattcaacaactatttagcaaggaccagcagtatgttaaagatggcttgtactggcttcgaatgctgatttttagtgccccttcttaactttgcattcagtgacatcacattggtagcttggaattggtcatgtttagaatatttataccatggagattggcaaatgcagcaaatcaaggtccccatccctggagagccagttgttaacatttaccagcacaccacctgcgatggcctactgtgtgccagacccaccagccagtcagctgtgaacaaagcagattgagtccctgccctcttggatcttccacttccagtgagacgaggcagcccacaataacaccaaaacaaggaaatatataacatatctgaggattacaagtgctaaggggaaaaataaatcatggaagagtgacagggagccctggggacagagctgctattttataaagaggtagccaggaaaacctaccagagagggttacacttgagaggaggccagaaaggagacagggaacttgcactttgatctctggacgcaaatgccgacagcagttgtgcacaggccctgcagtgggagcatgttactgattgaggctggactacatgagggagagaggaaaaaaagcaagaaaggaagcaagggcttggtcatgtggggcctggaagctgctgaatgcattggcttttactttggatactcccgcatctaggagatatgggagcctttggaggtcgagcagagacatgctgtgatctcacttgtgttttaatagggtccctctggctgctgtgttgaatagattcaagtgtggaaggaggaaggcaagtgtggaggcagggagaccagttaggcaactgcagtagtagaagagagctggtggtggcttgcatcagggaaatggcagtgaaggtggtgagacatgggctagaatatgggtgtatacatacatacagacatacatcagcagggctatgttctgagaagtgcattttcagaagcgcatccacatctgtgggcccctggaggcactgaaggacctgggagagtttggggtgcacctgtctctctcctcgagactgctgaagtggaaacatcatagagtgtacttacactgacctggatggtgcagcctactacacacctaggctaaatggcttagcctgttgctcctagtatacacacctggacagcatgttgccgtattgaatgctataggccattgtaacacaatgggaagtatttgtttatctaaacacatctaaatttaggaaaggtacagtaacaatatgatactataatcttatggaaccactgtgatatatgtggtctgatattgaccgaaaccacatatctcattgggattcgtgtatggattggatgtgctgtgttagagaaagaaaggaggcaaggataactgcaaagattttgctgaacaactgtaagaggggggttgccgttccctgaaatgaagactgtgggagaagcaggtttaggtcatggtcattgggccataatttatacctctggtctgcatgttactttcttcttttttttttgagacagagtctcgctgtgtcgcccaggctggagtgcagtggcgtgatcttggctcactgcaagctccgcctcccgggttcacgccattctcctgcctcagcctcccgagtagctgggactgca

SEQ ID NO: 69747 - DNA, 2074 bp, Homo sapiens
ttcttaacttcatagactgtcagtgctggaaagatccttagaatccaaaccctttatttggcaggcggggaaaatagagccccagagaacagaaaggaaatgactcacttgagcttttgcaggtgtagcaaagttattttcataaactctgttttcccttgtagttaatgtttaaagctttctttttaaataggcatgctcctcctgtattcacttaaagcctccatcacagatgtcactaaccaacatatgatgtcttgctcttcatgttacagatcctttggttttgggtagacttgatttcagactctgaattcctggagtcataccctcaaaaaaaaaaaaaagaccctgtcaattcacagacatactcatttattcagttaatttattcaacaactatttagcaaggaccagcagtatgttaaagatggcttgtactggcttcgaatgctgatttttagtgccccttcttaactttgcattcagtgacatcacattggtagcttggaattggtcatgtttagaatatttataccatggagattggcaaatgcagcaaatcaaggtccccatccctggagagccagttgttaacatttaccagcacaccacctgcgatgrcctactgtgtgccagacccaccagccagtcagctgtgaacaaagcagattgagtccctgccctcttggatcttccacttccagtgagacgaggcagcccacaataacaccaaaacaaggaaatatataacatatctgaggattacaagtgctaaggggaaaaataaatcatggaagagtgacagggagccctggggacagagctgctattttataaagaggtagccaggaaaacctaccagagagggttacacttgagaggaggccagaaaggagacagggaacttgcactttgatctctggacgcaaatgccgacagcagttgtgcacaggccctgcagtgggagcatgttactgattgaggctggactacatgagggagagaggaaaaaaagcaagaaaggaagcaagggcttggtcatgtggggcctggaagctgctgaatgcattggcttttactttggatactcccgcatctaggagatatgggagcctttggaggtcgagcagagacatgctgtgatctcacttgtgttttaatagggtccctctggctgctgtgttgaatagattcaagtgtggaaggaggaaggcaagtgtggaggcagggagaccagttaggcaactgcagtagtagaagagagctggtggtggcttgcatcagggaaatggcagtgaaggtggtgagacatgggctagaatatgggtgtatacatacatacagacatacatcagcagggctatgttctgagaagtgcattttcagaagcgcatccacatctgtgggcccctggaggcactgaaggacctgggagagtttggggtgcacctgtctctctcctcgagactgctgaagtggaaacatcatagagtgtacttacactgacctggatggtgcagcctactacacacctaggctaaatggcttagcctgttgctcctagtatacacacctggacagcatgttgccgtattgaatgctataggccattgtaacacaatgggaagtatttgtttatctaaacacatctaaatttaggaaaggtacagtaacaatatgatactataatcttatggaaccactgtgatatatgtggtctgatattgaccgaaaccacatatctcattgggattcgtgtatggattggatgtgctgtgttagagaaagaaaggaggcaaggataactgcaaagattttgctgaacaactgtaagaggggggttgccgttccctgaaatgaagactgtgggagaagcaggtttaggtcatggtcattgggccataatttatacctctggtctgcatgttactttcttcttttttttttgagacagagtctcgctgtgtcgcccaggctggagtgcagtggcgtgatcttggctcactgcaagctccgcctcccgggttcacgccattctcctgcctcagcctcccgagtagctgggactgca

SEQ ID NO: 69748 - DNA, 2074 bp, Homo sapiens
ttcttaacttcatagactgtcagtgctggaaagatccttagaatccaaaccctttatttggcaggcggggaaaatagagccccagagaacagaaaggaaatgactcacttgagcttttgcaggtgtagcaaagttattttcataaactctgttttcccttgtagttaatgtttaaagctttctttttaaataggcatgctcctcctgtattcacttaaagcctccatcacagatgtcactaaccaacatatgatgtcttgctcttcatgttacagatcctttggttttgggtagacttgatttcagactctgaattcctggagtcataccctcaaaaaaaaaaaaaagaccctgtcaattcacagacatactcatttattcagttaatttattcaacaactatttagcaaggaccagcagtatgttaaagatggcttgtactggcttcgaatgctgatttttagtgccccttcttaactttgcattcagtgacatcacattggtagcttggaattggtcatgtttagaatatttataccatggagattggcaaatgcagcaaatcaaggtccccatccctggagagccagttgttaacatttaccagcacaccacctgcgatggcctactgtgtgccagacccaccagccagtcagctgtgaacaaagcagattgagtccctgccctcttggatcttccacttccagtgagacgaggcagcccacaataacaccaaaacaaggaaatatataacatatctgaggattacaagtgctaaggggaaaaataaatcatggaagagtgacagggagccctggggacagagctgctattttataaagaggtagccaggaaaacctaccagagagggttacacttgagaggaggccagaaaggagacagggaacttgcactttgatctctggacgcaaatgccgacagcagttgtgcacaggccctgcagtgggagcatgttactgattgaggctggacyacatgagggagagaggaaaaaaagcaagaaaggaagcaagggcttggtcatgtggggcctggaagctgctgaatgcattggcttttactttggatactcccgcatctaggagatatgggagcctttggaggtcgagcagagacatgctgtgatctcacttgtgttttaatagggtccctctggctgctgtgttgaatagattcaagtgtggaaggaggaaggcaagtgtggaggcagggagaccagttaggcaactgcagtagtagaagagagctggtggtggcttgcatcagggaaatggcagtgaaggtggtgagacatgggctagaatatgggtgtatacatacatacagacatacatcagcagggctatgttctgagaagtgcattttcagaagcgcatccacatctgtgggcccctggaggcactgaaggacctgggagagtttggggtgcacctgtctctctcctcgagactgctgaagtggaaacatcatagagtgtacttacactgacctggatggtgcagcctactacacacctaggctaaatggcttagcctgttgctcctagtatacacacctggacagcatgttgccgtattgaatgctataggccattgtaacacaatgggaagtatttgtttatctaaacacatctaaatttaggaaaggtacagtaacaatatgatactataatcttatggaaccactgtgatatatgtggtctgatattgaccgaaaccacatatctcattgggattcgtgtatggattggatgtgctgtgttagagaaagaaaggaggcaaggataactgcaaagattttgctgaacaactgtaagaggggggttgccgttccctgaaatgaagactgtgggagaagcaggtttaggtcatggtcattgggccataatttatacctctggtctgcatgttactttcttcttttttttttgagacagagtctcgctgtgtcgcccaggctggagtgcagtggcgtgatcttggctcactgcaagctccgcctcccgggttcacgccattctcctgcctcagcctcccgagtagctgggactgca

SEQ ID NO: 69749 - DNA, 634 bp, Homo sapiens
ggatccttgctctgtctcccaggctggagtgcagtggcatgatctcagctcactgcaacctcagtctcccaggttcaagcaattctcccctgactyggcctcccgagtagctgggattacaggtgtgtgccaccacaactggctgatttttgctttttttagtagagatggggttttgccatgttggccaggctggtctcgaaactctgacctcagctgatctgtccacttcagcctcccaaagtgctgggattacaggcatgagccaccatgcctggccaatttttctgtagagacggggtctccctatgttgcccagactggtctcaaacacctgggctcaagtgatcctcccacctcagcctcccaaagtgctgagattacaggcatgagccacggtgcccagcacttttttcttttgaactattactctcacatgattttcactgccacaggtgggggtcctctgagatagtttgtgtgttatctccacaggtgataggctgtgttctggaaggatgttcaggacttgaatttcagttttcagtcactctcactggattcccaaaccaacctagtttgggacaagagattatgaaacactccttagaaacactagctcatctcaactaaa

SEQ ID NO: 69750 - DNA, 634 bp, Homo sapiens
ggatccttgctctgtctcccaggctggagtgcagtggcatgatctcagctcactgcaacctcagtctcccaggttcaagcaattctcccctgactcggcctcccgagtagctgggattacaggtgtgtgccaccacaactggctgatttttgctttttttagtagagatggggttttgccatgttggccaggctggtctcgaaactctgacctcagctgatctgtccacttcagcctcccaaagtgctgggattacaggcatgagccaccatgcctggccaatttttctgtagagacggggtctccctatgttgcccagactggtctcaaacacctgggctcaagtgatcctcccacctcagcctcccaaagtgctgagattacaggcatgagccacrgtgcccagcacttttttcttttgaactattactctcacatgattttcactgccacaggtgggggtcctctgagatagtttgtgtgttatctccacaggtgataggctgtgttctggaaggatgttcaggacttgaatttcagttttcagtcactctcactggattcccaaaccaacctagtttgggacaagagattatgaaacactccttagaaacactagctcatctcaactaaa

SEQ ID NO: 69751 - DNA, 2024 bp, Homo sapiens
caacagatcactctatgatcaacagaatctatgatcaacagaaaatggtacctaaactcagactactatactcctaaaattatttctatcaagaagatgttagactccaccgagatttctataaggatgacctctcttccttcagttttatctgaaaaatagagatagaggtttttgtggaaaaatgtttttaataagtgatgattaaatggcacaatgcatgttaagtactctaagtatacacaggaagtagttttcaaaaagttaactatcattattattgtaagagtttttgtttttaatttttttaagttggcaaataaaaattgtacacattcatggcatacaacattatgtttcaaaatatattgtggaatgactcaatcaagctaattaacacatccatcacctcccgtacttaccatttgtgtgtgtgtgtggcagtaatattttaaaacctattctcttagcaattttcaagtatacattgtcattcattataatcaccctgttatacaacagatctcctgagcttattcttccaaggacttttttttttttttttttttgagatggggtctcactctgtcacccaggctggagtacagtggcacaatctcagctcactgcaacctccaccccctgagttcaagcaatcctcccttctcagcctcccaagtagctgggaccacagatgcgtgccaccacgcccaactaagtttttgtatttttggtagagatggggtttccccatgtagcccagggtggtctcaaactcctgagctcaagcaatccacccaccttggcctctcaaagtgctggattacaagtgtgagctactacatccggcctgaggaattgtttttgatagaagtatggggaatatctcttactgttcaacatctgattcaggaggtcgcagagggacctcaggaatttgattttagaaaatctaccctgaattatgtgaaacagatgagcacctggttagctcctgctgttagcctgggtgctgaggccccagctgtaaccagtttcttcagtaaggtcagcttctgcaggtcctggtttcattctgggaccccaaagaccaagttgattccttcttctaagaggatcccttcaaaaacatcaagacccactcttgcactctatttgcacaccactgtccattccaatcatttcctctagcactggggcaggctcacttactgtctgtcataaatccagcgtgccttctatacctaatgcttcctctcccaacccatacactgatccataccataactgtgggtgggtcctcctgcttccccgggatgtggctcatgtagacctgcccacattttgtcctatcagagttgacctcctatgcatcctattccaagggatgccttgagctttgtaatgctactgctggggcattacctgatgagttttattaatgtattcaatgtagttcaagtgcttacattttgctctttccttagactaccatttgaagaggcagtaataccttaactcaaataatggaatttcaggcatttttgagactaacttggagacttcgaatcatttagaggattggccaactggaaagagagtggtgacacccctgaagcctacaaatcatctattatttgactccagttcctgctgacattgtgggattctagtaaactttagaaggkaaacggtgagattgagcacaatggagaggcatcatatccacattaaagatgcacggctttttatctgaacgtggaaaagcagactgtcagctgaaggtttttatttttcttttcatttaccagtaataaggaatgaacgaaaattactcaaatttggctttggaacatgtaaaagtacccacttaattctgatgtacatttgggttaagattcactctgttggtctctcaggttctatgaggtcaaggagcttgcttgtcttgttcactatgaaactcccaaatgttcagcatattgcctggttctcaatgaatacaaaggaaggcactgttctga

SEQ ID NO: 69752 - DNA, 1283 bp, Homo sapiens
aaccttaaaacagtgaacatgctgctcgcattacacagatcttaagtggacagggaatagcttgagtactgagtcagctgaaggatacaaaagagggacgatgagatacgtttctccccggcttctgtttttttttttgttttgttttgtttttactttttaggatcttcaccttcttactccatttcaaggttatcaacttcaaagttgtgtcaaagtcatttcttctattttatatttcctgactccattcgcaaaatattcagttacatattgtatcccttttgaaaaggtcagagaaacaggcagcagtctacttgttcaagcttatctcaaactccctttactcagcgcctttaattaaatgaaagttatgtgcctccactggaccaatttttgaattatacatattctccagctttgttcctcgcaggaggggaaaaagaatatgttcacctttacagatcaaatgaaatgtgatgacacagcaattatgtaatgcaggaaacttgtatgattctagatagagaataaaggaccactaggattttctgaagacaatagtctgctaatagcaccatttactccaatctccgtatacaagtgttcatggggactcccaggcactgaaaacaactgggagatagattaaaaaggtagtaagaagagataagtttatataaaaaaggttgcccttctggtggataaccctacaatgttttcctacatcctgattttacaagaggtaaaggtacacatagcgattgcagttttccactgcccagacagaaggatttactttctatccattttgtctatacttagaggtcacaaaatacctatcttgggagaaataaggatatactctaaactgttctgtattttcttccaccccaaagactcaacagcaagtaggaggaaagttataaactgtcaagcaagcaggttacaatacccattatccacctggacctgtttttggcttgtgtagacactgcctcatgtggatatattttctctaattctaggaaagagcaacattcattacctccttgttttctttcttytttttttaagtgggctttttattatcagtacaaaattcatcctctcttctccataaaacagcattattatgttaacatgttctattaaatacgaaacactcagaggtagcttgcagaggtaattgtctgactttcagcaggtttccaagaaaagccagtttagcttcccaatatgaaatattgtaattaatggagcgccaggttactaatgcacat

SEQ ID NO: 69753 - DNA, 1283 bp, Homo sapiens
aaccttaaaacagtgaacatgctgctcgcattacacagatcttaagtggacagggaatagcttgagtactgagtcagctgaaggatacaaaagagggacgatgagatacgtttctccccggcttctgtttttttttttgttttgttttgtttttactttttaggatcttcaccttcttactccatttcaaggttatcaacttcaaagttgtgtcaaagtcatttcttctattttatatttcctgactccattcgcaaaatattcagttacatattgtatcccttttgaaaaggtcagagaaacaggcagcagtctacttgttcaagcttatctcaaactccctttactcagcgcctttaattaaatgaaagttatgtgcctccactggaccaatttttgaattatacatattctccagctttgttcctcgcaggaggggaaaaagaatatgttcacctttacagatcaaatgaaatgtgatgacacagcaattatgtaatgcaggaaacttgtatgattctagatagagaataaaggaccactaggattttctgaagacaatagtctgctaatagcaccatttactccaatctccgtatacaagtgttcatggggactcccaggcactgaaaacaactgggagatagattaaaaaggtagtaagaagagataagtttatataaaaaaggttgcccttctggtggataaccctacaatgttttcctacatcctgattttacaagaggtaaaggtacacatagcgattgcagttttccactgcccagacagaaggatttactttctatccattttgtctatacttagaggtcacaaaatacctatcttgggagaaataaggatatactctaaactgttctgtattttcttccaccccaaagactcaacagcaagtaggaggaaagttataaactgtcaagcaagcaggttacaatacccattatccacctggacctgtttttggcttgtgtagacactgcctcatgtggatatattttctctaattctaggaaagagcaacattcattacctccttgttttctttcttctttttttaagtgggctttttattatcagtacaaaattcatcctctyttctccataaaacagcattattatgttaacatgttctattaaatacgaaacactcagaggtagcttgcagaggtaattgtctgactttcagcaggtttccaagaaaagccagtttagcttcccaatatgaaatattgtaattaatggagcgccaggttactaatgcacat

SEQ ID NO: 69754 - DNA, 573 bp, Homo sapiens
attatgtgccatttaaaaataataacaacatagaaagacacctgcctctagtaaaaaattaaaaaataaagctgaggcgggcagatcgcctgaggtcaggagttcatgagcagcctggcaaacatggtgaaaccccatctctactaaaaatacaaaaatyagcctcaaaaataaccccatttctactaaaaacacaaaaacacacacaaaaaatccagcctgtcgcccaggctggagtagctgggatcacaggtcaaatactattcagcctttaaaaggaggaaattctgtcatttgccacatggatgaatttagagagaacattacggtaagtgaaataatccagacacagaaaaacaaatactgcatgatctcacttatacatgagatctaaaaaagtccgactcgtgaaagtcgagaggtagaatggtggttgccaggggctggggcaggtaatagggagatactgatcaaagcatacaaaatttcatattatgttcttttgtttttttttttttttttttgagagacagggtcttgttctgttgcccaggctggagtgcagcagtggtg

SEQ ID NO: 69755 - DNA, 573 bp, Homo sapiens
attatgtgccatttaaaaataataacaacatagaaagacacctgcctctagtaaaaaattaaaaaataaagctgaggcgggcagatcgcctgaggtcaggagttcatgagcagcctggcaaacatggtgaaaccccatctctactaaaaatacaaaaattagcctcaaaaataaccccatttctactaaaaacacaaaaacacacacaaaaaatccagcctgtcgcccaggctggagtagctgggatcacaggtcaaatactattcagcctttaaaaggaggaaattctgtcatttgccacatggatgaatttagagagaacattacggtaagtgaaataatccagacacagaaaaacaaatactgcatgatctcacttatacatgagatctaaaaaagtccgactcrtgaaagtcgagaggtagaatggtggttgccaggggctggggcaggtaatagggagatactgatcaaagcatacaaaatttcatattatgttcttttgtttttttttttttttttttgagagacagggtcttgttctgttgcccaggctggagtgcagcagtggtg

SEQ ID NO: 69756 - DNA, 641 bp, Homo sapiens
ctcatgaatggcttagtgccattcctgcagaattgagttctcactcctggttccagcggggratatcgctgctaaaaacagtctggcagctcccctctctcttgctcttttgctctctccctgtgatgcctgctctccttcaccttccatcatgagtagaagtcccctgaagccctcgccagaagcagaggctggtaccatgcttcttgtacagcctgtagaattgtgaaccagataaatctgttttctttacaaataacccagccttgtatgttcctttatagcaatgcaaaatggactaaaacagtaagtcccaatgtgcataaattttagtatgtatcatatgatatggatcaggatctccaaaaataagaatgtgtatggtctaggaaggtctcaaaatggctctttcaaggtgtctatacactgatatccaggctccaaggagatgatagtgtggagccttctctctaaaagtcctaagactgatagattcagcacagtatttggcccggagtggcctgagacaatacatttctttcttttaattttattttttttgagatggagtcttgctttgtcaccgaggctggagtgcaatggcaccatctcggctcactgcaacctcctactcctgggtt

SEQ ID NO: 69757 - DNA, 549 bp, Homo sapiens
tggtggaaggagaggagtgagttaagacaaaaaactggatggtgaagtatcaagttttactaataatttcaaacatataagcacttgagagacacaggtgaataggagggacctgggactccaaaaggagctcccgaggtccgtcctttcatcaaattcacatttttggcccagagtagtagaagaggttcctctgagaagtgagttacctcacccaaagggagtattttaaattataaaacatttctattgtatgtacaaataattacatagcttatgtgacatttatagggaaccatattccacaaatgtatagaccctagatttgtttcctagaagaaatccagaaatcctaaaccatggaccacctaataaaacatttatatrcattaggattcttaattcatttgcttcccgtgagaatgattactagcatgtttactagagggtgagactaggttaacctgctttctttcattctcattagtgtccccagtaataggtagaaaaatagatcatagactagcttccaaagtctttctttcccag

SEQ ID NO: 69758 - DNA, 467 bp, Homo sapiens
atttgaaaatacacataagacatacttggaagaataacaacaaggtcttgtgatgacaggtcttattattttgttctttctgtttatttaaattttctatttttgtctacaataaaaatgcctggcttttrttataggatttttaagaaattacttttctctgttaaaagggggaaatggccaatatctgagcacagctttaagaataagatgaattccttccctatcctggatgccacccaaatgcagtaattcttcactcaagatgtttaattatgtaaactgtgttgctacccttttccttttataagaaagggcaaatagccagagaagctgtgaatgttgccactttagcaaaaagtggagagcattttatttgaagccagcttctggggcttgtcctgggctgactacagtctgcctgattggtcaggccccctccctttgtccaggttctggcaccaccc

SEQ ID NO: 69759 - DNA, 1380 bp, Homo sapiens
tctttgcctggctcagtctcacctctactcctgcatacccatcccagttctgcctgtcttttaaggctgagtaccaggctccctctaacaggaagctttcccagattgctcccattagccttgatttctcctttctcatgctgtcacccttgaccttttgtatcctactttgtatcagaccttaattcctctacccatagatatttattttcstagcaccagctggggagggctgtggactgcagggtcgtccctgacacctggatgccagtgatcagcctgcctgagatatgccagctttagaatcctgatggagggagggaggaggagggcagcaaagagacccagcagttattttatgcctatctgtgacaggcacagtgccaaacaccatatgtaacttttcacattttccccactttacagatgaggaaacaagctcagagaagttctgtggcagtgaatgagtggtggtgctgtgagttaaacccaggctctgcctaactccaaagttcgtgctcttaacctccatgatcttgtctctggccctcatttccccaccacacccggaggtaggctgggctgggtgggctgaggcagggtcttcctaggccttgctggccagagcaggaggctggtgaaagcccaggacttaagggacttcagagggggacgtggttccctctcacccaagggggagctcttgacctgctggaggatctggggcagtgtagcatccctgctgggggcttggaagtgccactacccccaaggaagcaaagcaagaggcttccctggggaacctgtctggaggggagggaggttggacatgttggtcaagaaagagcgtcttcactcagaaatcctccagcagtacgaggtcagtgagatgaaaatgagtaattttgtgcttctgaagcaacaacctacttgacagcaatatttaatggtcatatccagggtcttttcaaaccctgacaggaaatcccaagaggtaggcaggtggggccaatgcccgcttgacagagggttactggggttctgtgaggtgacatcatgccctgggaagagcccagctcacgggctaggatttgggcttctggactccccgaggggatcgtgccctcctccaggcccctccaccagcctgggctcagtggatatccctgcctggaggggctgggtgagtctctgtgagcctggggggctgggtgggcttcagttgccccactgtgggctctggactgtgggagagttgagaggccttggtggagttaatgccaagcttgggagaagccaggggttcaccatgaattgtgtgtgcctgtactcattccggccttggtgacaataggaatgccagcttggggatggaggaag

SEQ ID NO: 69760 - DNA, 1380 bp, Homo sapiens
tctttgcctggctcagtctcacctctactcctgcatacccatcccagttctgcctgtcttttaaggctgagtaccaggctccctctaacaggaagctttcccagattgctcccattagccttgatttctcctttctcatgctgtcacccttgaccttttgtatcctactttgtatcagaccttaattcctctacccatagatatttattttcctagcaccagctggggagggctgtggactgcagggtcgtccctgacacctggatgccagtgatcagcctgcctgagatatgccagctttagaatcctgatggagggagggaggaggagggcagcaaagagacccagcagttattttatgcctatctgtsacaggcacagtgccaaacaccatatgtaacttttcacattttccccactttacagatgaggaaacaagctcagagaagttctgtggcagtgaatgagtggtggtgctgtgagttaaacccaggctctgcctaactccaaagttcgtgctcttaacctccatgatcttgtctctggccctcatttccccaccacacccggaggtaggctgggctgggtgggctgaggcagggtcttcctaggccttgctggccagagcaggaggctggtgaaagcccaggacttaagggacttcagagggggacgtggttccctctcacccaagggggagctcttgacctgctggaggatctggggcagtgtagcatccctgctgggggcttggaagtgccactacccccaaggaagcaaagcaagaggcttccctggggaacctgtctggaggggagggaggttggacatgttggtcaagaaagagcgtcttcactcagaaatcctccagcagtacgaggtcagtgagatgaaaatgagtaattttgtgcttctgaagcaacaacctacttgacagcaatatttaatggtcatatccagggtcttttcaaaccctgacaggaaatcccaagaggtaggcaggtggggccaatgcccgcttgacagagggttactggggttctgtgaggtgacatcatgccctgggaagagcccagctcacgggctaggatttgggcttctggactccccgaggggatcgtgccctcctccaggcccctccaccagcctgggctcagtggatatccctgcctggaggggctgggtgagtctctgtgagcctggggggctgggtgggcttcagttgccccactgtgggctctggactgtgggagagttgagaggccttggtggagttaatgccaagcttgggagaagccaggggttcaccatgaattgtgtgtgcctgtactcattccggccttggtgacaataggaatgccagcttggggatggaggaag

SEQ ID NO: 69761 - DNA, 1380 bp, Homo sapiens
tctttgcctggctcagtctcacctctactcctgcatacccatcccagttctgcctgtcttttaaggctgagtaccaggctccctctaacaggaagctttcccagattgctcccattagccttgatttctcctttctcatgctgtcacccttgaccttttgtatcctactttgtatcagaccttaattcctctacccatagatatttattttcctagcaccagctggggagggctgtggactgcagggtcgtccctgacacctggatgccagtgatcagcctgcctgagatatgccagctttagaatcctgatggagggagggaggaggagggcagcaaagagacccagcagttattttatgcctatctgtgacaggcacagtgccaaacaccatatgtaacttttcacattttccccactttacagatgaggaaacaagctcagagaagttctgtggcagtgaatgagtggtggtgctgtgagttaaacccaggctctgcctaactccaaagttcgtgctcttaacctccatgatcttgtctctggccctcatttccccaccacacccggaggtaggctgggctgggtgggctgaggcagggtcttcctaggccttgctggccagagcaggaggctggtgaaagcccaggacttaagggacttcagagggggacgtggttccctctcacccaagggggagctcttgacctgctggaggatctggggcagtgtagcatccctgctgggggcttggaagtgccactacccccaaggaagcaaagcaagaggcttccctggggaacctgtctggaggggagggaggttggacatgttggtcaagaaagagcgtcttcactcagaaatcctccagcagtacgaggtcagtgagatgaaaatgagtaattttgtgcttctgaagcaacaacctacttgacagcaatatttaatggtcatatccagggtcttttcaaaccctgacaggaaatcccaagaggtaggcaggtggggccaatgcccgcttgacagagggttactggggttctgtgaggtgacatcatgccctgggaagagcccagctcacgggctaggatttgggcttctggactccccgaggggatcgtgccctcctccaggcccctccaccagcctgggctcagtggatatccctgcctggaggggctgggtgagtctctgtgagcctggggggctgggtgggcttcagttgccccactgtgggctctggactgtgggagagttgagaggccttggtggagwtaatgccaagcttgggagaagccaggggttcaccatgaattgtgtgtgcctgtactcattccggccttggtgacaataggaatgccagcttggggatggaggaag

SEQ ID NO: 69762 - DNA, 1570 bp, Homo sapiens
gtcctctcttccttcctccctccctttctctctcctctttgattttattttttaatcagaaagttctttttaaaggaagagaaatatcaacattgtacattctaacattccaaatgcttcatatagttccttgttttattgctttaaacattttttcaacagatacttaaggacatttttcaggagttgtgcaaggcatgaacacctggagatacgtaagctacagtggtgaacatggaggtgtccacagtaagcgggagagaggcaggtactctgcagtaagagacgggtgttaaagaaagataaattatctcaataactctggaatgacatcaaccccacttagaattaaaggaacagaagtctttgtgataaatattctctcagtctttccctctctgtgtgtgtataatatttttgttaatacacagatggtaatctaatgagatgcatttattcctcctgatatttgtaagtacagtgtatcttttcattgtattaactgttgttctacatctgtttggatccattctgtggattcaaaatcatgtagatcaccagtctctaatggttggacatttaggatttatctggtttctcatctgagtgtttattagatgactattggatttccttagacatattcttggaaatagaattgctatatcaaaaattatggaaaatctgaagctattgatatacctaatgctagatgacacattggtgggtgcagcgcaccagcatggcacatgtatacatatgtaactaacctgcacaatgtgcacatgtaccctaaaacttagagtataatataaaaaaaagaaaaaaaaaaaaaaaaaatctgaagctattgatagtcttatttttaattgctctaaaataagtattaatttcttagaaagaattatttatttaaattaagatatttatgcagatgaaatacccaaatattctggtttgctgtttatttttatcccataactcaacgggtatttatataattaattatacttttcaagtttttcacccctatgttctacatatattgctacccatgtactccatactctattcttttatgcttctttgaattctgtamtttaaaaaatcaaagcaaactaaaaacaaaacaattcagctcaaataacattttttcctaaaaacctaagtctcccagcttctttgaactcctccttctatggactcttacagtcctcctctagcctatttatctcatttgttaattagctagctagcttttatgctatgttttattattagaatcctgtttcttttagtagattgcaaactactcagagccagagaccatgccttgtgttatttgtgtacacagctagcagagcaccttacacatcataggaatgggatctattttagtgattaatctgttctgtttttatttcagcagggtttgtggaagggcatggccaagttgatggtgatcatatgccttcaaatatcatgttgacaattatcacgttgatatggaaggaagggagactggcttactaaaaaagcattctagttgtctagattggaaaaaaatgca

SEQ ID NO: 69763 - DNA, 1120 bp, Homo sapiens
gaagtaagtgtcaaacataaagccaaatataagagttttctgggacaaagtatgttttgattagtgaatataattatataccagcagcgcccccacccccgcccccagtttgtggatgttggtgatagcttgagttcaacttatgaacttcagttttgtagacatttttcctaaggccaattatgaaatatcctttcacctagtcatgtgtatataaaatcaccatgttattacagaatttagtaayactgtttttaaaaagtatgattaatccattaaattagaataatgcacccttcatatattatggtactacagtgattcatgaaataattctatataattctacatacaatcaaagaaatataaaatgtgttttgtacggaagtgcttatttttcatctggggaattccagtgagattggtatattctaggccagataattttttcaaaatagaggacaacaaacatgagatgttcccactgaccaatttggaagcctgatcattaccatatcttctcttgcaggtggttgaaaatctccttaactattgcttccaaacatttttggataagaccatgagtattgaattccccgagatgttagctgaaatcatcaccaatcagataccaaaatattcaaatggaaatatcaaaaaacttctgtttcatcaaaagtgactgccttaataagaatggttgccttaaagaaagtcgaattaatagcttttattgtataaactatcagtttgtcctgtagaggttttgttgttttattttttattgttttcatctgttgttttgttttaaatacgcactacatgtggtttatagagggccaagacttggcaacagaagcagttgagtcgtcatcacttttcagtgatgggagagtagatggtgaaatttattagttaatatatcccagaaattagaaaccttaatatgtggacgtaatctccacagtcaaagaaggatggcacctaaaccaccagtgcccaaagtctgtgtgatgaactttctcttcatactttttttcacagttggctggatgaaattttctagactttctgttggtgtatcccccccctgtatagttaggatagcatttttgattta

SEQ ID NO: 69764 - DNA, 696 bp, Homo sapiens
tgaaaccctgaagatactgagcagcctggcctgggactggatgtttcagcagaaataacacaggggagaccagagtcaagcctggaggtcagttcagtcatcaggcagtggaggcagaaagtggggcagtgttttgcaggtgtttcatgatgacttacttgaaccagtgacctctaaagatagagcagagcgcaaggaatgatctaggaagagtgaaggggataggcaagagctggtggctttggagcagaaccatgttccctgtcctgggtcctttaagtttcctttccttctgcagagggcaggtgaggaccatgtggatctttccagaaatacatgtggacatttgcaaatgcagaactgactggtggaaagggtgggaatgaactgctggaaatctggtcctcatggaccatatgtgtttgatggatatgagacaaatttggagaaaagttttgcaagtagtttctttcattggatattctactctctgatcccctgggttcgactactctagggacctcatgtaaatggattccagagtgaatatgagaagagactgctggttkccaggagctgggagtggggagaatcagaagttgttcatgggtgtgcagtttccgttatacaagttggggagtttctagagatctgctgtagagcttgatgcgtattgttcacacagattatttctta

SEQ ID NO: 69765 - DNA, 696 bp, Homo sapiens
tgaaaccctgaagatactgagcagcctggcctgggactggatgtttcagcagaaataacacaggggagaccagagtcaagcctggaggtcagttcagtcatcaggcagtggaggcagaaagtggggcagtgttttgcaggtgtttcatgatgacttacttgaaccagtgacctctaaagatagagcagagcgcaaggaatgatctaggaagagtgaaggggataggcaagagctggtggctttggagcagaaccatgttccctgtcctgggtcctttaagtttcctttccttctgcagagggcaggtgaggaccatgtggatctttccagaaatacatgtggacatttgcaaatgcagaactgactggtggaaagggtgggaatgaactgctggaaatctggtcctcatggaccatatgtgtttgatggatatgagacaaatttggagaaaagttttgcaagtagtttctttcattggatattctactctctgatcccctgggttcgactactctagggacctcatgtaaatggattccagagtgaatatgagaagagactgctggttgccaggagctgggagtggggagaatcagaagttgttcatgggtgtgcagtttccgttatacaagttggggagtttctagagatctgctgtasagcttgatgcgtattgttcacacagattatttctta

SEQ ID NO: 69766 - DNA, 1244 bp, Homo sapiens
ataggaaattactgacttggcaacttaattacatttggaggccacttaataggactgattccctttatttagacagcctgaatcttcttagtcatgacttgagaatgtgatcatctacgcgttgctttatcttgaaaacttaccaaaccaccacagccatctctccaagcaaacaaaatgtcatgttgagacastacagtttggacatccccaaaaccccattcgagatttctcatctggcaaaattcactgttgcctgctgcagggtgggtggtaacacagtctaattgtggttcttcttttctatttctgcagcataaagtcattctgccgcaattgtttctcatcactgcaccctaggttttccacaaagaacctctgttttgatagaggcctatttttttttaaccctgccaagaagcagtctattgtgttggaaagagttcagctgaacttacaagcccaaatttaaggactgcatgtaccatttttaaaaatcagagacccagcatgggaaatctccaagagctatttctagtgtgtgactgcccaatattctaaactaagaacttgaggaagccattcccaatgatcaaattggtggctcccatctgcctagtttttgcttcctaaaaataatttcccagaagcctcagagctgtggttgagaaggaggcaacataatcagtcatcagggagattcctggtcaaagaaattctttcttcaccaagctaagggtgccagccccctacagaagcggggcccaccagcatcctaggacccagaaatgtggatagcatgaagatggttcaagctcccagagcccttttcccatgtaaactggcactccattgagatatcactttatgcctattaaaatagctattatcaaaaagacaaaagacaataagcactggcaggagattgggaaaaaggaaccactgtacattgttggtggaaatgtagaatggtacagccattatggagaacaccactgagttttctcaaaaaattaaaaacagcactaccgtatgacccagcaatctgtcttctgggtatacatctaaagcatatgtaattagtatgtttaagggatatctgcactaccacgttcattgcaacactgttcacaataaccaagatatagaatcaacctaagtgtccatcaatggatgaatgaagaaattgtggtatatatacacaacggaatactacacagccattaaaaagaagtaaatcctgt

SEQ ID NO: 69767 - DNA, 2915 bp, Homo sapiens
ggaggagtcacaaggtgtcttgttccctgtaggaaagtgggcctcttggtggtccctgagcgatctgggaggctgagcatatggagctctctggtccctgaccccagtctgcctccaggtgcccaggatagcgcatcaggagcccctcacccttggcaggtggacgcagttcatcctgtgtgtgcctgtctctgggcgtctggggacaacaggcctctgtgtccaggtccccctgtcaggtgcagagactccagagaccccagcaggcatggggccactgggtcttcacccagggctgtggtggcatggggctcacccggccggcggtgtctcagagcccccgggagcggttcagatgttctctgaagcgctcaggtgcagcgttgcctttgggcgatgttgtctcacaggatggacgtggaggaagacgtggctaccctacttgcacaggagcagggggcatcattgcccagtgtgagcaggtacaggtcgggctgctccctcgagagaggtggggcctcgcctctcccactgtgccctggtgggaggatcctgggctcccttaggaagcagggtgggagctggttgcccatgcctttgtgcccccacagcccttcacctcagccccctcactctggacccctctgggtcccagggacgctgtagggcccaaggatgtggacagcttacaaagttaccgatcgcctcgagattctgcagtgagtcctctgtccctgctgcccgaccatcaccaaactcacctcagaggatgagttttgtttttagaaaagcctctctgaggcaggacacgtcttcccagcttgggccagcctcctttccagggtaggaatgccagctggctaccctgcaggtggtctgcagcaggccagagctgcgaggctcatctagggatcttgggggagcaggtggggatggagaggctctcagcagagcagtctcaaaggcagcatgagagtagggaacagcctgagggtctggccctgtcaccctgggccctgccccagtgagacccgcaggctgtggccacagggcaagggggtgcctggcccagcctgtgggcagttgtccagcaggtctctgaggattcagggggcccagctgagccaccctacagggaggggcgtggggggcagtgagggccatacccctgggagggcggaggggaagacgggcagggtgtcagccagggcatgtcagggtgagggcagggatgcagcagaacttgcagctgaaggcaacctgccttggtgctgagagggagcctgggtcctgggaaggggagcccagcctggagcctgcccctcaggagtcacaggacagagagagggaggagcctgggggaggttggttggggacgatcccacgggaggtgccacttctgggacgcacctgaatggagccagcctagggtggagctgatggcctggggtgaacaacacatgaggtggggctttagcagaggggcctcagtcagtccccagggctctgcatggccctccggagaccctggctccccgctggatccgtcagcacaaaggcagagggaggagcaggaaggccgagtaggggcaggcaagacagtgggggaacaaccaggggcccagtgcatggctgccacagtggctcagaggagggcaaggactgatggatggacgacagccccgagagccagctgagtttggagacggggctgtgtggccatcccggctgcccgcggggctcttgctcaccctcgtcacctctggcatctccccggcagcacttagcagcccagtgagagagcggtcaaggcaggcgtgtggatggatccagggccctytctcaagggttctgacagatgagggtcgaagaagggccaggctgtccagtctctgggccagagaggatgggcaaagtcaaggaacaggcagggtcagcagccggggtgcagggagaggcaggtgtatgctggaaggtcaggccccacgagggcccttgggggcatcaagtgggacagggccccggcgcaccctcagtgccctgggcaggcctcgggccagtgatgtggtcactccctcgggaaatgctgttgggaccggaccacccaccctgggccacacccatcccgcctcaggcctggattttctgagctcccgcagagtgtgctgcctagcccaggaggggcacccccattgtgcaatccaagcctcgccctccacaagccccaggcagcccctgttgggtgggccctagttccctcttctcccaggccccagcccctcccaggcgccagctggcagggaagcaccggtcctcccttccctgtgtgtcccctggatggagacctggggcgggggtgggggacagggctggttctttcctggggcccactaggggaggaggaggacagttcctggcccagcacaggtcctcagctctgcctgggttgccttacagtgagacgtagctgccacccatcagtgccctggaagtgaaggtaagagcctgaccctgctgtgtgagtggttggtccagggacagggggacccagtgggtggtcagcaggctgtgggcctgggtggtgatgagtgggagcgacaggctgtccctgggcctgcgggacctgacctcaagactctgtccccatggtggcttgatcaaatcctaaaccgagaaccacagtcgtggctcagcagtcactgcccacttgtgccaagaccccacctgaatgttgggactccaccaacgcccggggtgcctgtggcctgaggatggcatgtcccaagtcatgaggccaggacacctgtgctcattcagtcagagggtctccattccctggggccggccctttcctggctccttccagtttgatcctgtcagggccctggagcccaggacccagcatccaaggggca

SEQ ID NO: 69768 - DNA, 540 bp, Homo sapiens
ttgtaactgactcagaaaaaaagtgagtcaacatcctgaaaaaaaacttgtttgttaaatggaaaacataaatgctttcaagcctactttcagatatataaatagcttttggaacaaaaactacttctgttctatatatagagaatagagagctaaaaacactaaagatggctgatagccaaatgcatatggggtagaaaacagatggaggtcatttaaatttctgcattattttttctaatgataatcaattttcctcccactccccatcatgaacaaggtactcgctcttctaccctaagtctacattacgcaaatgtagtcaagaacatcattcctgamagggcgcggtggctcacgcctgtaatcccagcactttgggagaccaaggtaggtgaatcatttgaggccaggagttcgagaccagcctggccaacacaccaaaaacccgtctctactaaaaatacaaaaaaaaaaaaattagctgggtgggttggtgcatgcccgcagttccagctattccagaggctgaggcatgag

SEQ ID NO: 69769 - DNA, 1169 bp, Homo sapiens
tgcataaatagtggctagaaatgactgcaaatacataatcttgctttagaaattcacaaattgaaatatttaaaataaatctgttccaactttttttttattcttcagctttgtccttctgtaatttgttatttatagccaaagcttcagggaaaatttttaagtcaacttgcagtgtagattaagccactgaaaaatagtgattgtgagatgtattcaatagcattctgtacaagaactcatttcaccaccataatgatgagatgctgatatttggcaaagcaattccatagatttatagcttcatcatctgctttactgattgctagtctcccaaggacaaatgggctttcagacacaattgtaaatatccagaataaagcaatgatatctctactcagaatagttatgccataattagaaaaaagttgctaaataaacttaattgaacatttaaaggtctctataaaacatttcttttaattttttccctagaggatcatgctgggttcttatttcaaaatattatccaatctttcattggccatctctctttcttcttacatagaaattgcctagttgatatttggtaaagtatcaccattttcacagagataggtaattctcccattccaaagcctccaggattatttattttttcttcttcttttttttaattccttaggagtttgacaataactaagtccttcaggtattagawgaaggacagtaagagcttgagaaaaacacaagaaactttagagagaaagatcagtttggaaaagaaggcaagattttgctgaacccttagagcaatgaaaatagcctagaaatgaaagtaagcaatgattaaacactaaaaatggtttctttcaatcacctcttgacatttatatggtatcataatacctctggtaagtcttctctggtttatgaaaacaataatagaaccactgaaattattcagcgatttattcataaagcaatagacaagttcattgaatggaaagcatttttttagttattaaagcagaaaaatttagctggagggatgcctgttaggaaagcactgcacatattcatagcagtataaagggcttgatggacatttaagctgtttccagttttttgcaaatacaaaaagagctgcacacagccttgtgcatgca

SEQ ID NO: 69770 - DNA, 1169 bp, Homo sapiens
tgcataaatagtggctagaaatgactgcaaatacataatcttgctttagaaattcacaaattgaaatatttaaaataaatctgttccaactttttttttattcttcagctttgtccttctgtaatttgttatttatagccaaagcttcagggaaaatttttaagtcaacttgcagtgtagattaagccactgaaaaatagtgattgtgagatgtattcaatagcattctgtacaagaactcatttcaccaccataatgatgagatgctgatatttggcaaagcaattccatagatttatagcttcatcatctgctttactgattgctagtctcccaaggacaaatgggctttcagacacaattgtaaatatccagaataaagcaatgatatctctactcagaatagttatgccataattagaaaaaagttgctaaataaacttaattgaacatttaaaggtctctataaaacatttcttttaattttttccctagaggatcatgctgggttcttatttcaaaatattatccaatctttcattggccatctctctttcttcttacatagaaattgcctagttgatatttggtaaagtatcaccattttcacagagataggtaattctcccattccaaagcctccaggattatttattttttcttcttcttttttttaattccttaggagtttgacaataactaagtccttcaggtattagatgaaggacagtaagagcttgagaaaaacacaagaaactttagagagaaagatcagtttggaaaagaaggcaagattttgctgaacccttagagcaatgaaaatagcctagaaatgaaagtaagcaatgattaaacactaaaaatggtttctttcaatcacctcttgacatttatatggtatcataatacctctggtaagtcttctctggtttatgaaaacaataatagaaccactgaaattattcagcgatttattcataaagcaatagacaagttcattgaatggaaagcatttttttagttattaaagcagaaaaatttagctggagggatgcctgttaggaaagcactgcacatattcatagcagtataaagggcttgatggacatttaagctgyttccagttttttgcaaatacaaaaagagctgcacacagccttgtgcatgca

SEQ ID NO: 69771 - DNA, 1169 bp, Homo sapiens
tgcataaatagtggctagaaatgactgcaaatacataatcttgctttagaaattcacaaattgaaatatttaaaataaatctgttccaactttttttttattcttcagctttgtccttctgtaatttgttatttatagccaaagcttcagggaaaatttttaagtcaacttgcagtgtagattaagccactgaaaaatagtgattgtgagatgtattcaatagcattctgtacaagaactcatttcaccaccataatgatgagatgctgatatttggcaaagcaattccatagatttatagcttcatcatctgctttactgattgctagtctcccaaggacaaatgggctttcagacacaattgtaaatatccagaataaagcaatgatatctctactcagaatagttatgccataattagaaaaaagttgctaaataaacttaattgaacatttaaaggtctctataaaacatttcttttaattttttccctagaggatcatgctgggttcttatttcaaaatattatccaatctttcattggccatctctctttcttcttacatagaaattgcctagttgatatttggtaaagtatcaccattttcacagagataggtaattctcccattccaaagcctccaggattatttattttttcttcttcttttttttaattccttaggagtttgacaataactaagtccttcaggtattagatgaaggacagtaagagcttgagaaaaacacaagaaactttagagagaaagatcagtttggaaaagaaggcaagattttgctgaacccttagagcaatgaaaatagcctagaaatgaaagtaagcaatgattaaacactaaaaatggtttctttcaatcacctcttgacatttatatggtatcataatacctctggtaagtcttctctggtttatgaaaacaataatagaaccactgaaattattcagcgatttattcataaagcaatagacaagttcattgaatggaaagcatttttttagttattaaagcagaaaaatttagctggagggatgcctgttaggaaagcactgcacatattcatagcagtataaagggcttgatggacatttaagctgtttccagttttttgcaaatacaaamagagctgcacacagccttgtgcatgca

SEQ ID NO: 69772 - DNA, 1234 bp, Homo sapiens
agaatgtgggtacaccagaggcatagatgggcctgagcgacagaatccagggtttgtacaggtttgaggactcttggggaagatgtaggttattgggtatccatgagaaagtgtttggaatgattttgtagctgtaaaaagcccttatagttaagatctcttgtaaagatggatacatgaacagtaatggtaactggagtgtgtgtctgaggaatgtgctttagcatctggaatgccagttaaaagttaattgctcctggtgatttgtcccagttccaccatgaattttatgcaatttattgcaaagattaaatggatatcctttaagtaacaagctaacaaggtcagcttatctcactgggaggtagagaagtgactgtaattcctattccgccaaaaatgagaagaccccagtatttttgcaatttatttgtgacctcaagaataaaatgggctcatgcagattaagtaacttgcaccaagttacacagctcgtgagcagtagaagaggtctccagactccctctgttgggatccagatcccatgcacttagccatctrtcttccctggattgagaaatatcaactgtagaacaagtgtccacaggacatgggagcatatgaggttaattgggcatgagctagggcatgaacaagctttttgtcttcagtgcacactgacagatactattcctggtagtggtgatggtggaagtgatccatccacatactaattgtttcccttaatggctaatagtcattaggtatgaattatttatacttaggtgttagcattttgtacctggtaattaggtacaaaaatgggagagccacattaaacaatgtaccaaaggtctctttctggaactttctatgagcaataggttggaaatctaagtatcagtgcacagaaatcaatgcattatggcagtagaaaaagccagaaaatgggaattgggaaagaaggattctatcttggcaccaccactctaatatttggcagatgacttcccctttctggacctcattccccatctgtccagtgatagagttgaactaaataattttcttttaaggcctttccagttcttacattttgcgattcattacatcaaaaatagtatgttagcattgcttgtaaccctcttcaagtctttttatggttactgctaatgggaatcattaaatcgttaacaactggaagcaacaataatcatttagtgtctctaatata

SEQ ID NO: 69773 - DNA, 1420 bp, Homo sapiens
tgaattgattagtaatgtctgccctgggtatgggatagaatggtggtatacgtgccacatatttagctatccctgaaaggaggtcagatttctggtgatgtattcctaattctctcacacctaatgctcaggtgaaccagagccattttagagatggttgatggtttcatttctctgattatggaatggagtttgtcactgcttatccagaagggcctcgtgaatctttgaacacttgtgaggctcttgtctacccttacaaagtaccaggaaaggccctcctgctgcactactttaatattgatgggtgtttttgtattgaataggccaaatagactatatgtcttagggcatcatttctattaaacctgaagacagatgctggtcactggaaatagccattgatttgctttctcttgtactattccaactctctaatttctccagaggaaaaaaagaaagcccatgtaaaaatcatcccctctagctttctaagtaagcagcgagatcaattctcattcaggaatttgttggataaatatttgtttgattgtcaggaaaagtggatgaatcttagatgaaaatttggccgatggaaacagatctatcagttgggtttagtgatcacagatacaggaggagtgcagacccggtgctgcctggatgttggggcttggaagcaaatgcatgcagaggtaatacgacgccagatggtgccgggttttgttgtactcccatggagctccaaggatgtttctcccgtatgcagtgttggctcagtgcaattgctgtttcttctttttgagggtgttgaaggacatcaggtgtctccagggctcaagacacctgggtgagagacttcagggaaagctggttgtcaccatcatcatcctcattttccattctcctgccactgcaacttggaaagtgaattcatgacttggggaaatcgggaggtggagaatgaaagggggaaaaggattgaaaggagccagtgagscttcgttggggtctccagtgggggtggggttgtgggtgtctcgattgtagtatagtcttgtgatgacaaaaaggggatccttcctgtgtgctcttttgttcctttcttagacaaggtgagtggggaacacttctgtcctttcttgactgacagtgtaatggaggtgtggtgtgaaattggctttggatgccagccgtcttttgtgctcctctcagaggcttcacagggaaagctggtgatgggcggtcacttgggggagccctagggaggacctggacacccagctgcaagtgggaatagctggcctggcaagtctgagtgggactgtgaggtggcggggggcatgacccctcctcactccagccaggggctgaggagcttctgtcaggagccgaagcccagtaacaccaccataggctg

SEQ ID NO: 69774 - DNA, 617 bp, Homo sapiens
cggactgtagttaataataatgtatccatattggtttattaattctaacaaatgtaccatcatcatcataagaagaagatgttaataataaggaaaactaggtgcagagtatgtgggaactttttgcactatatttgcaattttctgaaaatctaaaactattctaaaaattaaagtttttatatatatatacacacacacgcacatatatatatatatatatatatatatatacatacacatacttttttttttaagacagagtcttgctttgttgtgcagtggcatgatctccgctcactgcaacctccgcctcctgggttcaagtgattctcgtgcctcagcctcctgagtagctggaactacaggcacgtgccaccacacccrgctaatttttgtatttttgtagaaatggggtttcactatgttggccaggctggtctcgaactcctggcctcaagtgatctgcccgcctcggcctcccaaagtgctgggattacaagcgtgaaccacagggcctggccaaaatattgaaaaaaaacaaaaaaacaaaaacagacagaacaaatcagaggaagaattagtccctggtagggacttccttttctcaggtactg

SEQ ID NO: 69775 - DNA, 976 bp, Homo sapiens
gcaccattatttatttatccagtcctttcttgttgggtytcctttctctgaattgtgactactctttctgctcgtctgcctcatcctcttctgccaaggttgcctttggaagcactaagcttatgagtgttgaaaagaaaccgaggcctatataccagaaattgactgcaaccaaactgaaaccagtgaggtggtaggtgtggaggccttgtccaccaaaggggtatggcagggaaaagagcaaaggtaacactctttagggtaaaacccacttcactgttgggaagaaggagcctctgactaggtgatgtgtagagttctgttgtttttgagataggttctcactctgttgcccaggctggagtgcagtggtgtgaacacgactcactgcagcttcatactcctgggctcaagtgatcctcccacctcagcctcctaagtatctggaattacaggtgtgcaccaccacaaccagctaatttttaaattttttgtagagatggggtcttgctatgttgctgtggctggtctcaacctcctgatatcaagcaatcctcctgcctcagcctcccaaagtgctgggattacattcgtgagccactgcacccaacctaatgtgtggagttctagatggggtaatgggacaacctcactccaaaggtcatgtatagaggtcaggaaattgagctggcactacttacttcccaacacaataattttcctgcgagtgtcctcactcaggaatggcttcatgaggttgtagcccacagggaacagtttggtagctggagagatagaagtaaggataatgggaagaaaagaattacattgggcaaccccctccataatggttatagccaatgatacagaggagtcatgactaaccctggtcaattccagtgtctgtcctgcacccaacaaaccatccaaccaaccagtcaaccagccaacaaacagccaactaaccaatcatgca

SEQ ID NO: 69776 - DNA, 2723 bp, Homo sapiens
taacatacttctcatactagttaggaatgtgtttgtctgcaaataacaaaacttaaccatgggmgtgtacatgggaactttttttcttctctaataagtctagaggcaggcaggcagttcagcactggtgcatctgctaccatcaggagcctgggctcttcctatgcttctatttttctaaccagagcttgtttgttggcactgtcctctttttctcacctcatgattgccagatggctgctgcacctcccggatttacctcagagttccatgcaagaaaaagaaagaagcaaccagggagggatacaggatagagcaggcaggcccaatctgtccctttttttatcaggaaaacaaaaactctcttggaagccctacccagaggacttctgctatatctcactggccagaactgtgccctatggccacttttgcttactgatgaccagggattcttaatggagataaggtcagaaacccaaagtatagcacctcacttacatatttagttcatttcaacatttacaaagaactctctatgtgccaggcatcctattagatactttggaaacagagatgagtaggacacattgacctcaggaagcgtaaactgaatggcagacattcatgcgtaggggagaaggaacagcttttcctcacttgtcaaaaggtttacagctgacactcctataacaaagaagagattaacaagaagagtaaattaacaaatttatttaaccaaagttttacatgacgtgggagggcttcagaaatgaagacccaaagacccccagggaaaactgtatttttatgctgaagttcaatgaagaatgggcagtcgtgtagaatcgtaactggacaaaaaggggtatgacataaaggtaataaactggggaaacttagcaaggccctgtttgttcagattcttcttggtctctggttgtagggtctggaatcctctagaatcaggttcttatgacctacttttaggggtggtaggtcagagaattcctttatgatcatgcttcaggggagaaagttgggagaaagagtgggcttcctgcttctgagaaggttttcttcaattgccaagatgtcatattttggggtatcgtgttctgatttctgatacatgcatacactaattataatccaatatgacaattactataacgtttgtataagaaccagtgggggaaaagtggaaagaatttcagttgtgaagacaaacatatatttgtttttaaatctccactttaaatgtatctctccaaattatgcagacagaataaggtcatggcccctttaaaaacacctcctagatcaggtagctaccctttcagaggaaggaaagctgcccaggtaggaaacaactgcagcaggtgttgctcccttcagaaaaaaaaatgtagtgccatcaaaagcattctgagagcagctgcgggggcttgtggcttctgcagtgagttgaggagttgtttggggagggggtactcagagttgcagcagaaattgttaatgaaatatttaacacctgtgctggaactaacagctgtacagaaagtcaacagccagcctgcaggagcggtggacataatctggaagaaaactttctcagattaggaaaaggtaataacagtttaggacataacatattatggcctttgtacttagacgttttattctgggtgcttgggggtactaagtagaagcaaatgacatcgttaggttcgtaaaagtagaagggaggtgggttaatttgctactgaccaacctgtgcttctcaaccttggctgtaaattgaaaccactgggggagctttaaagaacacggatgtctgtgtcccaccctgtgaaagtctgatgtgattggacttggatatggcctgggcattaggactataaagcccccagggaatctaatgtatggccaggggtgagaactgctggtttgccacatcatctcccaaaatttccaagtcccactcctggagttttcgagtctgagtctgcatttctgcattgtctgagaacaattttgcatatttggcaaatatcttaggcaattattctggacgaaaaggctgggaacactggtttgtttatttttgagacagggtcttacctctatcacccaggctagagtacactggtgcaatcacagctcactgcagcctcaactttcctggctcaggtgatccttccacctcagccttccaagtagctgggactacaggtgcccgccatcacacccagctaatttttgtattttttatagatagggtttcgctatgttgcccaggctggtctcaaactcttggggtcaagccatccacctgccttggcctcccaaagtgctaggattacagacatgagccaccacacccagtggaaacaccggtttataagtgttttgcaggctttagaagtgtgttcaggcattagaacatacttaggctgattttaaaaatgcagattcctggacattgcctgagaatgctgagtttgaatacaaacctccccggtgattctgatgtaccatgtacttcaagaaccactggactgaacaaacaaggacagagtttaacaaaacactaaagcacatgcctgaagcgacctaggcttggtttgtgtctgtcatcttaacctggtggggtccacgagtcaccctgctggtggcagcaactagagaatgaataatggatttttaaaaatagctatagg

SEQ ID NO: 69777 - DNA, 2723 bp, Homo sapiens
taacatacttctcatactagttaggaatgtgtttgtctgcaaataacaaaacttaaccatgggcgtgtacatgggaactttttttcttctctaataagtctagaggcaggcaggcagttcagcactggtgcatctgctaccatcaggagcctgggctcttcctatgcttctatttttctaaccagagcttgtttgttggcactgtcctctttttctcacctcatgattgccagatggctgctgcacctcccggatttacctcagagttccatgcaagaaaaagaaagragcaaccagggagggatacaggatagagcaggcaggcccaatctgtccctttttttatcaggaaaacaaaaactctcttggaagccctacccagaggacttctgctatatctcactggccagaactgtgccctatggccacttttgcttactgatgaccagggattcttaatggagataaggtcagaaacccaaagtatagcacctcacttacatatttagttcatttcaacatttacaaagaactctctatgtgccaggcatcctattagatactttggaaacagagatgagtaggacacattgacctcaggaagcgtaaactgaatggcagacattcatgcgtaggggagaaggaacagcttttcctcacttgtcaaaaggtttacagctgacactcctataacaaagaagagattaacaagaagagtaaattaacaaatttatttaaccaaagttttacatgacgtgggagggcttcagaaatgaagacccaaagacccccagggaaaactgtatttttatgctgaagttcaatgaagaatgggcagtcgtgtagaatcgtaactggacaaaaaggggtatgacataaaggtaataaactggggaaacttagcaaggccctgtttgttcagattcttcttggtctctggttgtagggtctggaatcctctagaatcaggttcttatgacctacttttaggggtggtaggtcagagaattcctttatgatcatgcttcaggggagaaagttgggagaaagagtgggcttcctgcttctgagaaggttttcttcaattgccaagatgtcatattttggggtatcgtgttctgatttctgatacatgcatacactaattataatccaatatgacaattactataacgtttgtataagaaccagtgggggaaaagtggaaagaatttcagttgtgaagacaaacatatatttgtttttaaatctccactttaaatgtatctctccaaattatgcagacagaataaggtcatggcccctttaaaaacacctcctagatcaggtagctaccctttcagaggaaggaaagctgcccaggtaggaaacaactgcagcaggtgttgctcccttcagaaaaaaaaatgtagtgccatcaaaagcattctgagagcagctgcgggggcttgtggcttctgcagtgagttgaggagttgtttggggagggggtactcagagttgcagcagaaattgttaatgaaatatttaacacctgtgctggaactaacagctgtacagaaagtcaacagccagcctgcaggagcggtggacataatctggaagaaaactttctcagattaggaaaaggtaataacagtttaggacataacatattatggcctttgtacttagacgttttattctgggtgcttgggggtactaagtagaagcaaatgacatcgttaggttcgtaaaagtagaagggaggtgggttaatttgctactgaccaacctgtgcttctcaaccttggctgtaaattgaaaccactgggggagctttaaagaacacggatgtctgtgtcccaccctgtgaaagtctgatgtgattggacttggatatggcctgggcattaggactataaagcccccagggaatctaatgtatggccaggggtgagaactgctggtttgccacatcatctcccaaaatttccaagtcccactcctggagttttcgagtctgagtctgcatttctgcattgtctgagaacaattttgcatatttggcaaatatcttaggcaattattctggacgaaaaggctgggaacactggtttgtttatttttgagacagggtcttacctctatcacccaggctagagtacactggtgcaatcacagctcactgcagcctcaactttcctggctcaggtgatccttccacctcagccttccaagtagctgggactacaggtgcccgccatcacacccagctaatttttgtattttttatagatagggtttcgctatgttgcccaggctggtctcaaactcttggggtcaagccatccacctgccttggcctcccaaagtgctaggattacagacatgagccaccacacccagtggaaacaccggtttataagtgttttgcaggctttagaagtgtgttcaggcattagaacatacttaggctgattttaaaaatgcagattcctggacattgcctgagaatgctgagtttgaatacaaacctccccggtgattctgatgtaccatgtacttcaagaaccactggactgaacaaacaaggacagagtttaacaaaacactaaagcacatgcctgaagcgacctaggcttggtttgtgtctgtcatcttaacctggtggggtccacgagtcaccctgctggtggcagcaactagagaatgaataatggatttttaaaaatagctatagg

SEQ ID NO: 69778 - DNA, 666 bp, Homo sapiens
agagaggggtacctgccaactttagggtgatagcattttctaaggtgaaaaggagaatgggttgggcaggagtaggggtacttcaaagagttttattgttttttaattaaaaatttggagacaaaagaaagaaaatacctttgagatagtggccagagagcacagcttagagcatatttacaagcaaagaaagttgtatctagcagatcttccagcctaaatgtyccttgggataaagttaaggtctgaagagccatctcaccctttaatatcccagcatgaccatggccttttaaaatcaatttctttattattattgccattctgtttgatttttcttgagcatttttttggccttaaattcccttcttaagattcttggggagtgacttttgttgtctagtgactttgattgtgggagagaaaacttctgccttgaaatgtaagtttgagtgattttcaatgtgccagcctctatgtcaagtacctagcaaagaatttaagattcacagcaaccctataatatagatattttacagccccattttacacataaaaaaactgaagcatggagaagttaaacaatgttaatcgaggtcaagattaaatggctaatcacaggcggggcaagccaggatttgaacccaggtcttactggccattaca

SEQ ID NO: 69779 - DNA, 708 bp, Homo sapiens
tgcatggaaacttacggttctacaaatcttctctgaaaagaaagccaaacatgtccacaaagaacaaaagcaaaacgttcatgtccaaatctgagacatactccagatatgggtggtgttcatttttaaaatggatatgatgttggtattaatcagcacaaataccaggatggtttgtgaggctctggcttttgaaataaagcttttaaattgcactggttaataactacagagtgagtctgagagcaataacatgtcctcttaataaaactttatgtatgagtattttaatgaattgtttcagtatactttcaaagagagccaagttagtggttgaaaacagaataggattaagtccttactaagaaactcaatcctaacaactggtacaagaattaaaatgaagaaaggagcctgtcttacacactagcatttttggaagcyattctttttagacactatgttttagaatttccaggcatctgtctgttgctagaatacctacacactttgcggaagctttatttgaaaatgctgtgtaccttgtctaaagggccagctgggataccagaaatagtatcggctctatttatgtctttggagtaattacagtggaatttaaagacttagtttatagatccaagaagaagatcttctgtgtacactaaaaggatgaatcctttccagacgacttctcatttggctgaa

SEQ ID NO: 69780 - DNA, 1253 bp, Homo sapiens
gtgcaaggagctcagggttttgcctattcagaaaacagggagcagaatgtttcctcaattaaaactccaaacctaatttaaggattctatattctctctagcttcattctagaaatttttatctagtcttgggtataagggaaaagctggcttcccaactgattagtgtttcttatctggagatcttaacataggaaaacccaaagtaaaaaagcttacattttaatccctggattcttatagtaccactgtcctttgagacaatgggtgcctcatgactttgctaattttcccataaawataaaaagcagagtagtgaaaagagagtaagacaaattggtaaaattcctggataatctttgtttttcttcgcagatgcaccccactatgtgtccaaaccctgactcttgcctatggtttctggttgggtttagccaatagaagacactggcaggagaacagtgaggtcagcattttgattattggagcagcctcttggccaggatgtggagaggttaccacatccctgtacgggtggctacgggtggtacaggtggctacgttgtcttccccacagagctcctccacaccacttcctggagccattcctagcagagtaacaccagctcccagggcacagcaccagcctggttagtttctgaaaactgcgccatcacctccagctgtagatagccttcttaatgaactctcctcaaatatgctatttagttttctatctatttcctgccagaacacagattgatagaggtaatatatttttaaaaaagttcttcatagcagggaaatgatcacacctccttcacagatttgattattttatatattaacccactaaaagacatttctggtttagatggctctcacttagatagcattaacgtactcttggaaacacagaaagtcttttttttttggacatagcactgagaaagaagtaaaaaagttcatttattgtcagattctggaagatcttgccagtgattccaaagaagtcagttaacactcaaagtccctgtctggagtatccttaacatctgaactaaactgacaagcaattttggtggagaacaagaattctaaaatgaatgtggtgttatttttaagcaaactatttttttagagcagttttaggttcacagcaaaattgatcagaaggtacagagatttcccatatatccccttctctgatgtagaaacaacttcctccactatcaaaatcttgatacagagta

SEQ ID NO: 69781 - DNA, 1253 bp, Homo sapiens
gtgcaaggagctcagggttttgcctattcagaaaacagggagcagaatgtttcctcaattaaaactccaaacctaatttaaggattctatattctctctagcttcattctagaaatttttatctagtcttgggtataagggaaaagctggcttcccaactgattagtgtttcttatctggagatcttaacataggaaaacccaaagtaaaaaagcttacattttaatccctggattcttatagtaccactgtcctttgagacaatgggtgcctcatgactttgctaattttcccataaaaataaaaagcagagtagtgaaaagagagtaagacaaattggtaaaattcctggataatctttgtttttcttcgcagatgcaccccactatgtgtccaaaccctgactcttgcctatggtttctggttgggtttagccaatagaagacactggcaggagaacagtgaggtcagcattttgattattggagcagcctcttggccaggatgtggagaggttaccacatccctgtacgggtggctacgggtggtacaggtggctacgttgtcttccccacagagctcctccacaccacttcctggagccattcctagcagagtaacaccagctcccagggcacagcaccagcctggttagtttctgaaaactgcgccatcacctccagctgtagatagccttcttaatgaactctcctcaaatatgctatttagttttctatctatttcctgccagaacacagattgatagaggtaatatattttwaaaaaagttcttcatagcagggaaatgatcacacctccttcacagatttgattattttatatattaacccactaaaagacatttctggtttagatggctctcacttagatagcattaacgtactcttggaaacacagaaagtcttttttttttggacatagcactgagaaagaagtaaaaaagttcatttattgtcagattctggaagatcttgccagtgattccaaagaagtcagttaacactcaaagtccctgtctggagtatccttaacatctgaactaaactgacaagcaattttggtggagaacaagaattctaaaatgaatgtggtgttatttttaagcaaactatttttttagagcagttttaggttcacagcaaaattgatcagaaggtacagagatttcccatatatccccttctctgatgtagaaacaacttcctccactatcaaaatcttgatacagagta

SEQ ID NO: 69782 - DNA, 1253 bp, Homo sapiens
gtgcaaggagctcagggttttgcctattcagaaaacagggagcagaatgtttcctcaattaaaactccaaacctaatttaaggattctatattctctctagcttcattctagaaatttttatctagtcttgggtataagggaaaagctggcttcccaactgattagtgtttcttatctggagatcttaacataggaaaacccaaagtaaaaaagcttacattttaatccctggattcttatagtaccactgtcctttgagacaatgggtgcctcatgactttgctaattttcccataaaaataaaaagcagagtagtgaaaagagagtaagacaaattggtaaaattcctggataatctttgtttttcttcgcagatgcaccccactatgtgtccaaaccctgactcttgcctatggtttctggttgggtttagccaatagaagacactggcaggagaacagtgaggtcagcattttgattattggagcagcctcttggccaggatgtggagaggttaccacatccctgtacgggtggctacgggtggtacaggtggctacgttgtcttccccacagagctcctccacaccacttcctggagccattcctagcagagtaacaccagctcccagggcacagcaccagcctggttagtttctgaaaactgcgccatcacctccagctgtagatagccttcttaatgaactctcctcaaatatgctatttagttttctatctatttcctgccagaacacagattgatagaggtaatatatttttaaaaaagttcttcatagcagggaaatgatcacacctccttcacagatttgattattttatatattaacccactaaaagacatttctggtttagatggctctcacttagatagcattaacgtactcttggaaacacagaaagtcttttttttttggacatagcactgagaaagaagtaaaaaagttcatttattgtcagattctggaagatcttgccagtgattccaaagaagtcagttaacactcaaagtcyctgtctggagtatccttaacatctgaactaaactgacaagcaattttggtggagaacaagaattctaaaatgaatgtggtgttatttttaagcaaactatttttttagagcagttttaggttcacagcaaaattgatcagaaggtacagagatttcccatatatccccttctctgatgtagaaacaacttcctccactatcaaaatcttgatacagagta

SEQ ID NO: 69783 - DNA, 1253 bp, Homo sapiens
gtgcaaggagctcagggttttgcctattcagaaaacagggagcagaatgtttcctcaattaaaactccaaacctaatttaaggattctatattctctctagcttcattctagaaatttttatctagtcttgggtataagggaaaagctggcttcccaactgattagtgtttcttatctggagatcttaacataggaaaacccaaagtaaaaaagcttacattttaatccctggattcttatagtaccactgtcctttgagacaatgggtgcctcatgactttgctaattttcccataaaaataaaaagcagagtagtgaaaagagagtaagacaaattggtaaaattcctggataatctttgtttttcttcgcagatgcaccccactatgtgtccaaaccctgactcttgcctatggtttctggttgggtttagccaatagaagacactggcaggagaacagtgaggtcagcattttgattattggagcagcctcttggccaggatgtggagaggttaccacatccctgtacgggtggctacgggtggtacaggtggctacgttgtcttccccacagagctcctccacaccacttcctggagccattcctagcagagtaacaccagctcccagggcacagcaccagcctggttagtttctgaaaactgcgccatcacctccagctgtagatagccttcttaatgaactctcctcaaatatgctatttagttttctatctatttcctgccagaacacagattgatagaggtaatatatttttaaaaaagttcttcatagcagggaaatgatcacacctccttcacagatttgattattttatatattaacccactaaaagacatttctggtttagatggctctcacttagatagcattaacgtactcttggaaacacagaaagtcttttttttttggacatagcactgagaaagaagtaaaaaagttcatttattgtcagattctggaagatcttgccagtgattccaaagaagtcagttaacactcaaagtccctgtctggagtatccttaacatctgaactaaactgacaagcaattttggtggagracaagaattctaaaatgaatgtggtgttatttttaagcaaactatttttttagagcagttttaggttcacagcaaaattgatcagaaggtacagagatttcccatatatccccttctctgatgtagaaacaacttcctccactatcaaaatcttgatacagagta

SEQ ID NO: 69784 - DNA, 2426 bp, Homo sapiens
ctatgcatggaacagtggctggcacatagtagtaactcaaaaaatacttctagaatgaatatacagaatacaatctgatctacaatatgtggtcaaattgagtcttacaataaccataatcaaatattatgtctaatgttttaagtttaccaaaactgttttgtttatttctaaagatctttattttcctgtggtttttaatgactaaaagaaagttttaagccgaacacagtagcttgcgcctataatctcagctacttagaagtctgagatgggaggattgcttaaagccaggagttcaagaccagcctgggtaacatagtgagaccctgtctctataaaaataaataataaaaaagaaagttttagatatgttggtgattgttttctaaacatacttaaacttttaaactttgaggggaaattgaccatttctagacttcttatcaagaagttatttaaaatttttcagacaaaaactagatttggagcaaatgttatatgtagttttgcactggcatgtattattaaaacatgaaattgaagttttgggtcactggagtaaatttcctgtttcttatgctcagtgaaacatccccattctttttttgcccccccgccgagtcggagtcttgctctgtcacccaggttggagtgcagtggtgtgatcttggctcactgcaacctctgcctcccaggttcaagcaattctcctgcctcagcctcccgagtagctgggattacaggtgcccgccaccacacctggctagtttttttgtatttttagtagagacagagtttcaccgtgttggccagggtggtcttgaattcatgacctcgtgatccacccacctcagtctcccaaagtgctgggattacaggcatgagctgctgcacctggcctcccctttcttttaaatactctttctagagctatactgagaatcttgcagaaaatcggaagtctttaggatactgttcttctcatatcatagtgtgccacatgtattcctgatttttgtcttcttttcatatttttactatgcagaaatttctcgttgccttttgatttctctgagcaaacattcatctaaaaatcatccactggggatctacaacctactttgccagatacttatattgtgccaaatgctatgtttctggagactttttgtttgttttttttatagattataaagcttccttttagagtttcaaataagtgggagcaaatataaggatgcataagcctgcagaggattaaagaagaaataggatatctttgaaattagtttgaatgccagagtttaaaattttaaagaatagctcagatgtaccagttaagtaacaaaacaagcattttaaacctaccatgtgaatgatctttggaaggcagctatgctcatcactgtaccaccaacacatctagtgaataatctttgaactaaaaatktaatatttctggtgctttttatttattcattttttttggagtggagtttcgctctgtcacccaggctggagtgcagtggcacgatcttgggtcgctgcaacctccgcctcccgggttcacgcgattctcctgcctcagcctccagagtagctgggattacaggcgcccaccaccacactcagctaattgtatgagacggggtttcaccatgttggccaggctgatctccaactcctgaccttaggtgatccaccagcctgggcctcccaaagtgctgggattacaggcatgagccactgcgcccagccttctagcgctttttaaatttgtgaacaattgaggaaagagataatttgcaagtgtttttcaccaaaatactctcttacaatttagaattacattaacttcaattggaagtcatctgcatacttgatatgctcaaatgaaaaaaatattataactaaacaagatagtgttttaaaaatatgctcctcagagcataaatatgttaattttttaactttctgggcataaagttattgacagctattttcaactcatttactttgtcatataacctcactgattagctactttgggacttagcttctataggataaatgacagaaatcactattgcccattgttactgcctttatggcatatcagctacagggtgaggaatattgtcatatatcagccaattccataaaaaagtgtataaggcctttggttatcttgcttaactctagtccaagatgcccttcgtttaaggtcatttcttcccattgtttcttaaatgtctctccctctgtcttagttttagactagtttcattatactaccagtttctaatatgttggttttttattcactatttgatatatttgttttaatatatgttcttgttttagcaggtaaaagaatcataacaaatgtttttaaaagaacattattattctttaataactgt

SEQ ID NO: 69785 - DNA, 2426 bp, Homo sapiens
ctatgcatggaacagtggctggcacatagtagtaactcaaaaaatacttctagaatgaatatacagaatacaatctgatctacaatatgtggtcaaattgagtcttacaataaccataatcaaatattatgtctaatgttttaagtttaccaaaactgttttgtttatttctaaagatctttattttcctgtggtttttaatgactaaaagaaagttttaagccgaacacagtagcttgcgcctataatctcagctacttagaagtctgagatgggaggattgcttaaagccaggagttcaagaccagcctgggtaacatagtgagaccctgtctctataaaaataaataataaaaaagaaagttttagatatgttggtgattgttttctaaacatacttaaacttttaaactttgaggggaaattgaccatttctagacttcttatcaagaagttatttaaaatttttcagacaaaaactagatttggagcaaatgttatatgtagttttgcactggcatgtattattaaaacatgaaattgaagttttgggtcactggagtaaatttcctgtttcttatgctcagtgaaacatccccattctttttttgcccccccgccgagtcggagtcttgctctgtcacccaggttggagtgcagtggtgtgatcttggctcactgcaacctctgcctcccaggttcaagcaattctcctgcctcagcctcccgagtagctgggattacaggtgcccgccaccacacctggctagtttttttgtatttttagtagagacagagtttcaccgtgttggccagggtggtcttgaattcatgacctcgtgatccacccacctcagtctcccaaagtgctgggattacaggcatgagctgctgcacctggcctcccctttcttttaaatactctttctagagctatactgagaatcttgcagaaaatcggaagtctttaggatactgttcttctcatatcatagtgtgccacatgtattcctgatttttgtcttcttttcatatttttactatgcagaaatttctcgttgccttttgatttctctgagcaaacattcatctaaaaatcatccactggggatctacaacctactttgccagatacttatattgtgccaaatgctatgtttctggagactttttgtttgttttttttatagattataaagcttccttttagagtttcaaataagtgggagcaaatataaggatgcataagcctgcagaggattaaagaagaaataggatatctttgaaattagtttgaatgccagagtttaaaattttaaagaatagctcagatgtaccagttaagtaacaaaacaagcattttaaacctaccatgtgaatgatctttggaaggcagctatgctcatcactgtaccaccaacacatctagtgaataatctttgaactaaaaatgtaatatttctggtgctttttatttattcattttttttggagtggagtttcgctctgtcacccaggctggagtgcagtggcacgatcttgggtcgctgcaacctccgcctcccgggttcacgcgattctcctgcctcagcctccagagtagctgggattacaggcgcccaccaccacactcagctaattgtatgagacggggtttcaccatgttggccaggctgatctccaactcctgaccttaggtgatccaccagcctgggcctcccaaagtgctgggattacaggcatgagccactgcgcccagccttctagygctttttaaatttgtgaacaattgaggaaagagataatttgcaagtgtttttcaccaaaatactctcttacaatttagaattacattaacttcaattggaagtcatctgcatacttgatatgctcaaatgaaaaaaatattataactaaacaagatagtgttttaaaaatatgctcctcagagcataaatatgttaattttttaactttctgggcataaagttattgacagctattttcaactcatttactttgtcatataacctcactgattagctactttgggacttagcttctataggataaatgacagaaatcactattgcccattgttactgcctttatggcatatcagctacagggtgaggaatattgtcatatatcagccaattccataaaaaagtgtataaggcctttggttatcttgcttaactctagtccaagatgcccttcgtttaaggtcatttcttcccattgtttcttaaatgtctctccctctgtcttagttttagactagtttcattatactaccagtttctaatatgttggttttttattcactatttgatatatttgttttaatatatgttcttgttttagcaggtaaaagaatcataacaaatgtttttaaaagaacattattattctttaataactgt

SEQ ID NO: 69786 - DNA, 742 bp, Homo sapiens
ccattgcactccagactgggcaacaagagcgaaactctgtctcaaaaaaaaaaaaaaaaaaaagcaaaagcaaaacaaaacaaaaaaattagccaggcgtagtggcacatgcctgtaatcccagcgattctggaggttgaggcaggagaatcacttgaacctgggaggcagcagttgcagtgacctgagatcatgccactgctttccagcatggacagcagagcaagactccatctataagtaaataaataaataaaattccctaggtgcttaaaaacaaasgaagaggaaaaaaaaggaggtgcatctaacatctaggaagagcacctgggggagcacctactgggagcacctgaaggagcaactcaagggccactggcaggaacctccgggaagcgcagaaggcatgtgtggggagagattggtgggggttgggtgttcttacctactgaatgggcgggctagatcaagaggtgacaacctggaagagaaatggggctagagacaggctggctgtaaaccagtggttgtcgaggagatagcatcagtgagggaggtgccccagtgggagagccgccctgaaaagggaggagggtgtctctccactgttgagccagagccacaaagagggttgactctgccatagagcggcctttcttcccagctattatgtcggctctgcagggaccctcacacttgatgagtcaaggggcttgtgccttactgagcagccagagggatc

SEQ ID NO: 69787 - DNA, 649 bp, Homo sapiens
gggaggctgaggtgggtgtatcatgaggtcaggagttccaagaccagcctggccaagatggtgaaaccccgtctctactaaaaatacaaaattagctgggcatggtggtgggcgcctgtaatcctagctacttgggaggctgaggcaggaaaatcacttcatccgggaggcagacgttgcagtgagctgagatcatgccactgcactccagcctggatgacagagactccatctcaaaaaaaaaaaaaaagtcactggtactttaatggctctatttgtcagggcttggcctggcctgctgcaacattccttgacaacatccccaataccaacatggggcacatcacacatattaagggtattacttctgtaacttgyttgaatgcttaggtgaatacctaagactatctgatgagacagaatgtcttatcgagccaaccatcaaatgctcctggaaggtaaagctcctgatgacagtgcctttgtgcaccatcacctcactgtagaactcagccagttggccttggcttgtgaactctcaccacagcttgccactgtcagttgaaactggtggcacatgcacataagatgatcagagttccaagtggctatctacaagcatgagcattgagaatggtgaaatacttgg

SEQ ID NO: 69788 - DNA, 819 bp, Homo sapiens
caggcttggctaaatttcaggaattggacctggggacccctcatttgctttagggcctgggaagggagagacaagagagagaaacttcataacaactctcaggaataaaaactgaaggatgactctgattctaagtacagcaatggtattaatttgtcttttggctcatatcctcaattttttttwaaaaaaaaatagatatgatttgcttaaaacacttttcaaaacacaagtagcagctcaactccctttattgtacaatgttgaacaggctgggaaggagtcattactgttaacttacccataaacaaccagagagcttgggcacctcaggttcttagaagcaataccttgctgagaagctctgtaaaatttagcaaagctgtagctatgtccacccagtactactaggcccaaggagagtagagaggcacaattaagcaacagtattatctgtgcaatagttcatgctagctgcattagatttgtttcatgaaatagactctagaaacttcgataagtacctagggagagagctactacatggaggttaggatcttgcattaggaattgcataccaaagtcaagaaaacacaagtgattaatcagtgtaattgctggtaagtcaagaaactcaaattctgggtactctgcaagataaataccactaacttttattttataggtaaccaaaagtaagctattagtggtaaaataatttgtcaaaatccacataataaattgctagagctaaaatttgatttaaaattgtcgattctaaaatccaagctctttccagtattcatatgctttgtataa

SEQ ID NO: 69789 - DNA, 673 bp, Homo sapiens
atgaagttatatttcctatgtattgaaatatatggtatatgtatacctatgtgtacacataaatgtattggtatatacacacacacacacacacacacaaatactgctctggtgaaagtaaagaaaatcttaaaggaaagacaagaagtttaattagaaaatcattcatattaattaatttttgaactaattgtaatttattgaacaaaaggtaaagaamttttgcaaattttacctcagaaattttaactaaataaaatgatcttctcttgtcacacatatacatatgagaatttttatttaattgataacctcattcttataataataccttgactctgaaaaaaaaaaaaaacaactttagaaaatagaaaaaagaaagctttcagaaggcctaccactttttaaagtgctatttactaagtccttcctatgaagttaaggttaaaatcattgatttaacctttggattcacaggatcaccatcacattgagacttgcatgtgtctttgatttctaccaaaactgaagcacatagtgtcctggaatagccccttacattggatgatggaatatttgtcatttgtttaaaacccaaaccctaattattttcttgtgattcatgcaggtttttctgaagacttcattgtatcacatatcccaaatggaagat

SEQ ID NO: 69790 - DNA, 768 bp, Homo sapiens
cccatcaggtctagccattcttgtggttatatgggtcctgaggtcctyttgattcctccctattttactggtgacattgcctgttccagggatgtgagaaactgcccacagcctcaggacggtcctcagtatgaatggcaagattgggtgaattgatgatcaacttctcaggaatctcatcttcctaggaggcctcaagcctgcttgaagtctgttcctccacatatgcataacgcgaaaaggcaactgctaagtcatatagattgtggtctttgctgtagttggaaattatctttaggtgtattagatcccatccactcatccattcaaggacctggcttcaacagttgtatccctacctcaccatttttttttgttagcatgccaattgtacgcatatatcctttattttaatttttaatttttatttttttctccaatatggagttttgctctgttgcccaggctggagtgcagcggcatgaactcggctcactgcaatctccacctcccgggttcaagtgattctcctgcctcagcctcctgagtagttgggattacaggtgtgtgccaccacgcctggctaatttttttgtatttttagtagagacagggtttcaccatgttggccaggctggtcttaaactcccgacctcaagtgatctgtccaccttggcctccccaagtgtgggattacaggtatgagtcaccaagcccggcctgtatcctttattaaaagaaacaaacaaacaaacaaaaaaccctttt

SEQ ID NO: 69791 - DNA, 768 bp, Homo sapiens
cccatcaggtctagccattcttgtggttatatgggtcctgaggtcctcttgattcctccctattttactggtgacattgcctgttccagggatgtgagaaactgcccacagcctcaggacggtcctcagtatgaatggcaagattgggtgaattgatgatcaacttctcaggaatctcatcttcctaggaggcctcaagcctgcttgaagtctgttcctccacatatgcataacgcgaaaaggcaactgctaagtcatatagattgtggtctttgctgtagttggaaattatctttaggtgtattagatcccatccactcatccattcaaggacctggcttcaacagttgtatccctacctcaccatttttttttgttagcatgccaattgtaygcatatatcctttattttaatttttaatttttatttttttctccaatatggagttttgctctgttgcccaggctggagtgcagcggcatgaactcggctcactgcaatctccacctcccgggttcaagtgattctcctgcctcagcctcctgagtagttgggattacaggtgtgtgccaccacgcctggctaatttttttgtatttttagtagagacagggtttcaccatgttggccaggctggtcttaaactcccgacctcaagtgatctgtccaccttggcctccccaagtgtgggattacaggtatgagtcaccaagcccggcctgtatcctttattaaaagaaacaaacaaacaaacaaaaaaccctttt

SEQ ID NO: 69792 - DNA, 690 bp, Homo sapiens
aggcatgcaccaacacacccagctaatttttaaatatttttgtagagtcagagtctcactatgttgcccaggctggtcttgaactcctgggctcaggcgaccctcccacctcggcctcccaaggccagggttacaggcatgggccactgtgcctggcctcagtgttttcacataatggtgtagtctcataagagattcatggtagctgagcctaccatagttcagcgtaaagctgaggctaccctcagtggtgggacaaaaaaatccatcgattttattcatgtctttagaactgtcacatagtgagttgctaaaaataattatttttccctttggagaattcctaagatccgaagatggttcttttcctcctatacagctcaattgtggatttcctcatcaagttgaacaattttgtccttgatctttgttcagtaattattaaatattacccaagtattatttactgaacctgtacctatttacctgtaactatttattatgccattttgtgtatattcctattcagtgtttatccctrggaggatgctgagataagagaatggagcagagggtgagtatgaagatgagcatatctgtacaggaaatgtgcaagttaagggtgtgtgcattagaggtttgcgagactaggcttgtacatatgcagcaggctctgtgggagccccaccc

SEQ ID NO: 69793 - DNA, 690 bp, Homo sapiens
aggcatgcaccaacacacccagctaatttttaaatatttttgtagagtcagagtctcactatgttgcccaggctggtcttgaactcctgggctcaggcgaccctcccacctcggcctcccaaggccagggttacaggcatgggccactgtgcctggcctcagtgttttcacataatggtgtagtctcataagagattcatggtagctgagcctaccatagttcagcgtaaagctgaggctaccctcagtggtgggacaaaaaaatccatcgattttattcatgtctttagaactgtcacatagtgagttgctaaaaataattatttttccctttggagaattcctaagatccgaagatggttcttttcctcctatacagctcaattgtggatttcctcatcaagttgaacaattttgtccttgatctttgttcagtaattattaaatattacccaagtattatttactgaacctgtacctatttacctgtaactatttattatgccattttgtgtatattcctattcagtgtttatccctargaggatgctgagataagagaatggagcagagggtgagtatgaagatgagcatatctgtacaggaaatgtgcaagttaagggtgtgtgcattagaggtttgcgagactaggcttgtacatatgcagcaggctctgtgggagccccaccc

SEQ ID NO: 69794 - DNA, 1024 bp, Homo sapiens
tgggctcctctgatgcttatataaatgatgtaacatttgcatatataaaatgatgcggtatttgcatataacctatgcacatcctcctgtatactttaaatcatctgtagattacttataacacctgatacaatgcctacacatcactgcatttgcatagacttaatgaagtagttggtgtacagcaaggtcaagttttgctttttggaattttgtagaatttttttttttcctgaatatttctgatccttgtttggttaaatccatgaatgtagaattcatggatgcaaaacccatggatatggagggctcactgtattataacaactttacagaattatgttgtagaagaatctttaaataacatattgaattacttgtattaaattgttaggttaataaaagtagctttcataaaaaagattattaatggtgttctctttgtgctggaacaatgactaatgcttgttttcccctttgagtttttctatattttagaattttccataccatagttacagttaatggtagcagctataaaagaacactatgtaaaagaaaaaggaaaaatccctgatcactgacagaagttgtacttggattagtacttgacttcaggttcagtctcaccaggaaagctgaacttatgtgaatcaggctttattgaggaataaagttggtgaatataaatagtgattgctatatgtcatttacattaatttctgtcatttaagtcatagggtagattgtactccatctgcagtgctacaaggttaatttaacaaagataccatatactgaataaaatgttatgaagaattttccatcaaatgaataaaataacctgcgaacttattttccaggtgtgctcagtgaaggaacggcatgccagtgaaatgagggatttgccaagtcgatatgttgaaataggtatggctccaacacttgccttctgtggatgtaaaacttcattcaaaattttcrtcttcattaatctcacccagactgccatagtcttttgcct

SEQ ID NO: 69795 - DNA, 376 bp, Homo sapiens
aactttattgtttatttagccattaaatagaaaaaatttaaaaagacactgaaaagtatttgaaaataaaatatttttcattagttaataaccataaaaacaccactgaaggttttccttaaaaatctaatacatataaaaattacagtttgttcaaataagaatctaaataagacccatatattccaattgtctactatgcctctgagaattcttttactctatcaattaataaatttatagtaawttagtaacctataaattctacttttttactgttggaattattttttaaataaaactgtatcatttgttcctgttggatttctcatacagtctagattttttgatgacatccctatagtgtaattttaca

SEQ ID NO: 69796 - DNA, 644 bp, Homo sapiens
ggtttgagttgcagctctagaggtccctttctctaggtttctaagattttccctttgattttttcaaggtagctgctagttgctacctccatgacaccttagagttctctttttaccctttagtagttaactatagatatatgatcatatatgtagttatatatagtatatatagttatatatatatatatatatatatatatatatatwtttttttttttttttttttttttttgagacagagtctcaccctgtcaccaaggctggagtgtaatggcgagatctcggctgactgcaacctctgcttcctgggttcaaatgattcttctgcctcagcctccccagtggctgggattacaggcgcccaccaccacgcccagctaatttttgtatttgtggtagagacggggtttcaccatgttggccaggctggtctcgaactgctgacctcatgatccacccgccttggcttcccaaagtgctgggattacaggtgtgagccaccgcgcctggccctagtagttaacaatattatacccagttaatgatatcttatattgtctctgttcagataagtgatgggctgggcacagtggctcatgtgtgtaattccagcacttagggaggcggagttggtggtagga

SEQ ID NO: 69797 - DNA, 504 bp, Homo sapiens
acagatacaacaactagactagaacttggaagatgctattttcctggcatactcaaatgggttggaaattagttaaaggttattcactgagtgtctgtcctctgaagatttccaaccagagagtatgatattaagaagacattgattctaggatgtaaaaataattttaaacacttagaacatctccctgttcttctccaccacaatcctgccaaacataaaacagtactggaaatataccttacaggagtatttgcagataattggtcttatgttcatatttggtcacagaaacaactcctcaacttttatcatcagacagttrgatagttctcacagagctaagcactaagaccctattctacaaatttatatgtggtggaataaaatatagtcatacattctctgagactaccatcgagtcaaggtattatattcgcaggtttaaaattgtaattaaaagatagtatggatgctatgctgatatttatggaaaccatcaat

SEQ ID NO: 69798 - DNA, 681 bp, Homo sapiens
aaattcataggtagattctatggaagatataatagagttataaaaagtgatccctgtcctcaaactaagactaacccacattgatctaacacacacttggatgatatatgatgtcatatctcatttagtgctcaacaatgtggtttagaccctatataaaaagagtacagtaaataactagctttaagattgctgatggcagtgaaaagcctggatacttttattcaaattcatgagtgtttaagttcaatcatatstgttgctatcaaataaagtaattaatcactaaagtaggtctacatggcataaaatgcagtaggatgttgaaaatttaagttaaaatcaaggcagggcagatcactgactcattaacttgtggactgccttgatcatgaccatcttgattaaaagcatttatcaactgcccacttgctgtgcacacgtacatactaggaatcctcactgtgttctaaaagggtcattgtattagtgagtgtttgctggttccaagcaacaattaccaactggttaggaggttttcaaagccaagaggccccattttgtggatgctgtggaacacacctaacaactggccccctgccccgaccccaccaccatggatgctcagaaagaacactagaagtgagtcacaggatctttccaacactgagggattccaat

SEQ ID NO: 69799 - DNA, 1042 bp, Homo sapiens
gcatgcttgacttgaaaagtgggttttagaaaaaaacgtaattcatgggggaataatgtaagtagaatttgctatgaaggacactttcccttataggaagtaggtgtactttcttttattggtatacttataattttctcactgtaagtatacggaatataagtattggacaggtgcagccaatacttatattctgtatacttacagtgagaaaattacattagtcttgattttagtaaagtatgctctagtagatacttttcactatttttggttttaccagtttattcttgttaaggtacatagggcaggcttaccgcccagatgaaaaccaaaaactaaaattcaaaactctacaaaactggtgcttgctcttccaaagatgaaagctaaaaatatatatattaacccaagtctttagctttttctttcctatttttcttctttaattttgtccttaatataacaatatattgtagaaattgacttttgaaatgtgctcaaaggaagttatgtcagcaaatattttttacttaccctccctataattagtcacaagttattttgaagaaagtgatctataccttctttggttgaacttgacctcatattaaataattattttgttatacaatgaatggacttgatagaaatataagccaaacaatatttattggaaaaatctaggtaaaggatgtcagtggaaaatatttgcagaaccaaatattatactttttgtccccatatttttaataaatacacatacatctatatattctgatatgtaaaaaagtaaacacaacaattattagtatttgaaactaaaataaagcagtcatgaaaataaatatatttgggggctaccacctcatagaatatgtaagtttcatgaaataagatataaagaagaaataacctgagctaaactagtacatgtggaccttcacatcgtaattgtatgcttagtgtttgttatgggtttttattggtatcatttttccactttttttaaatcataataaacatstatttaagatgcaca

SEQ ID NO: 69800 - DNA, 1380 bp, Homo sapiens
ttaaactttcaaaagcacgtaaattcagataactgcgataactgcattatttacttattctacttttactttttctttctttactttacttttacttttttttttttttggacaaggtctggctctgttgcctaggttggagtgcagtagtatgatctgggctcactgcaacctctgcctcctgcgctcaaaccatcctcccatcttagcctcttgagtagctggcactacaggtgtgtgccaccacatccagctaacttttcaagtatttttggtagagatggggtttcaccatattgcccaggctggtcttgaactcctgggctcaatcaatcctcccacctcggcctcccaaagtgccaagattacatgcatgagctactgtgcacagcctactctttttttgagatggagtctcactctgtcacagctggagtgcagtggcgcgatctcggcttactgaaacctccggctcctgggttcaagcgattctcctgcctcagcctcccgagtagctgggatgacaggcacgcgccaccatgcccagctaaattttgtatttttagtagagacaggttttcaccatgttggctagggtggtctcgaacccctgacctcaggcgatccgcccaccttggcctcccaaagtgctaggattacagacgtgagccaccacgtctgacctctacttttctctcttttttttaagattttgcaaatgctattacaagcatattaaaaccatctaaaaattaacatatttctcccccatactcaatcaatagtagattcagtacatccgagctattgtgaagtaagtatctctgcagattttacattatttatattcacagtttacttaaaaccctaaagagaaagatcccatctaagtgtgagtgaggtaatactaaattcatcactcccttgtcaggatttctccagctttgctgccttcttcacatgaggttcagtaactaagatgttacattcatgtgaagttcagtaactaagatgttacattcgcatccagttcagtaactaagatgttacattcacatccagttcagtaactaagatgttacattcacatcaagtttagtaactaagatgttatattcacattgagcttcctaatgaacagcaaataggtcttataaaacttgacttttttgctatcattctcacatgaattcagatatatatgtccttattttggaagataattacttttagacttgttctgcaatagagtggtcatatggtaaaagtaaaaaaaaaaaaattatttccattatcattcattctaggaaactttatgaaataagttttctcaattgastgcactcaatttgacatgtgacaattggaaaagcaggctaa

SEQ ID NO: 69801 - DNA, 1111 bp, Homo sapiens
tccatatgtcatgggtggggggaccggatgaaaggtaattgaatcaagggggttggattttctcatgtttttctcataatagtgaataagtttcacgtgatctgatggtttcctaaaggggagtttgccttatcacgctctctcttgcctactgcaatgtaagacgtgacttttgccttctgccatgattgtgaggcatcccaggccatatggaactgtgaggccattaaacctctttttctttaaattacccagtcttgtgtatgtttttattaggaacatgagaacagactaacacagagtcttgggtcagtatattagacagacataaaaataagtgcatgctaacctagcaatggatccacaaaatacatgagggacaatcaaaaaagacaaacaattaattcaacaattttggtctgatatttcttcttttatcagtaacaggacaataagacacaatcatgaacaataaaggtatctggatcatgaagcagctgagctgtgactctctgtatttacagtctttctaaattttagggtggttatcatggtacagaatataatattcttgagatttccttaaaaataaatctaagtaaggacgcaaaaggcttagaagtaatcattcctatctttacagcaagaccaacttggagatacactcttggacccattagaaaaggcagtttgcagaaaaaaccactaccctgaaatctggagagawgggtagctccagagagccatggctgagacgtgtgacctggaggagaaaccctgggggtccatacagtggtcggaacacttaatagtaaatgggatgaaccactggagttgcatgagagagggaatctcctggggacagcagtcttgggatggggggcaaacatttgtggtccttacttctgggaagctcatcaagttctcgtgatgaagatccaagatggagtctctcttggctctggcagaacaaatgcaagaataacttttgtgacgtacacttagcacattctctatggtaaaggcccaccaatcaggggagaagacttcaccagagacttaccccaaatggggaaagggcatttcttcccccttcattcccctgtagctt

SEQ ID NO: 69802 - DNA, 1111 bp, Homo sapiens
tccatatgtcatgggtggggggaccggatgaaaggtaattgaatcaagggggttggattttctcatgtttttctcataatagtgaataagtttcacgtgatctgatggtttcctaaaggggagtttgccttatcacgctctctcttgcctactgcaatgtaagacgtgacttttgccttctgccatgattgtgaggcatcccaggccatatggaactgtgaggccattaaacctctttttctttaaattacccagtcttgtgtatgtttttattaggaacatgagaacagactaacacagagtcttgggtcagtatattagacagacataaaaataagtgcatgctaacctagcaatggatccacaaaatacatgagggacaatcaaaaaagacaaacaattaattcaacaattttggtctgatatttcttcttttatcagtaacaggacaataagacacaatcatgaacaataaaggtatctggatcatgaagcagctgagctgtgactctctgtatttacagtctttctaaattttagggtggttatcatggtacagaatataatattcttgagatttccttaaaaataaatctaagtaaggacgcaaaaggcttagaagtaatcattcctatctttacagcaagaccaacttggagatacactcttggacccattagaaaaggcagtttgcagaaaaaaccactaccctgaaatctggagagatgggtagctccagagagccayggctgagacgtgtgacctggaggagaaaccctgggggtccatacagtggtcggaacacttaatagtaaatgggatgaaccactggagttgcatgagagagggaatctcctggggacagcagtcttgggatggggggcaaacatttgtggtccttacttctgggaagctcatcaagttctcgtgatgaagatccaagatggagtctctcttggctctggcagaacaaatgcaagaataacttttgtgacgtacacttagcacattctctatggtaaaggcccaccaatcaggggagaagacttcaccagagacttaccccaaatggggaaagggcatttcttcccccttcattcccctgtagctt

SEQ ID NO: 69803 - DNA, 1111 bp, Homo sapiens
tccatatgtcatgggtggggggaccggatgaaaggtaattgaatcaagggggttggattttctcatgtttttctcataatagtgaataagtttcacgtgatctgatggtttcctaaaggggagtttgccttatcacgctctctcttgcctactgcaatgtaagacgtgacttttgccttctgccatgattgtgaggcatcccaggccatatggaactgtgaggccattaaacctctttttctttaaattacccagtcttgtgtatgtttttattaggaacatgagaacagactaacacagagtcttgggtcagtatattagacagacataaaaataagtgcatgctaacctagcaatggatccacaaaatacatgagggacaatcaaaaaagacaaacaattaattcaacaattttggtctgatatttcttcttttatcagtaacaggacaataagacacaatcatgaacaataaaggtatctggatcatgaagcagctgagctgtgactctctgtatttacagtctttctaaattttagggtggttatcatggtacagaatataatattcttgagatttccttaaaaataaatctaagtaaggacgcaaaaggcttagaagtaatcattcctatctttacagcaagaccaacttggagatacactcttggacccattagaaaaggcagtttgcagaaaaaaccactaccctgaaatctggagagatgggtagctccagagagccatggctgagacgygtgacctggaggagaaaccctgggggtccatacagtggtcggaacacttaatagtaaatgggatgaaccactggagttgcatgagagagggaatctcctggggacagcagtcttgggatggggggcaaacatttgtggtccttacttctgggaagctcatcaagttctcgtgatgaagatccaagatggagtctctcttggctctggcagaacaaatgcaagaataacttttgtgacgtacacttagcacattctctatggtaaaggcccaccaatcaggggagaagacttcaccagagacttaccccaaatggggaaagggcatttcttcccccttcattcccctgtagctt

SEQ ID NO: 69804 - DNA, 952 bp, Homo sapiens
attttaataagacatacaagtgctcacagtgccackctgcagagataaccacacacaccaacaattcggttctttccccaacacgcaccatctggaaattcctatggaggctttgatgtcctttaaaaacatattgttctgaaaacggatttttaatactttttaaacacatggtaagattgacttttttggtgtagagccccatatgttttagcagcgcatgctaacaaacatattcgaagcgaaagtgctacttctgaaatgacacagtggtgcctccacccttaagcacaactctcgtaactggtgcaggaacaatgcgtcagtcgggtggaaaatgaacctagattcacaccctatgcgggaagaaacttcaaatgaattagagacccaaatgtaaaaaaagaaatcgttcaagtcccagaagaaacctgggtgaattcctctttaaccatggggaaatgatgactaactaccgtcaaaatccaagggcgatgaaagaaaatatttacaaatttgcctacaaaaaaatgtttaacaccactaaaaaaacactatatacaaagttaaaaggcagttgacaaatcagaagaaaacaggcacaacacatcccacagatatggagctaataaacccaacatagcaaaaattcttaaaaatggaggctcaaagggccagaaaaaccccaacagaaccatgggagaaggcaaacaattcaccaagaagacattaaaatggtcctcagtcatatttttttttaagtatgatgacagtttctcttggtgatttgaggagagcagcactggtgggaatcggaactgggaccacccttcagccggggctttgtcaacacctgataaaactacacacacttgcttttgacccagcaaccccacttctcagaatattctggaaaacacacctccaagaacacagaaatacgcgtgcatgg

SEQ ID NO: 69805 - DNA, 555 bp, Homo sapiens
tcacagttttcttcaaggataatagatgagaaattgctttacatttatgtaacatagagaataatcctagggttttttccaaaacaaattgatttcttctaaagtttaattgctgtattcatctctagacacaaatattgctggtaattttaaaattacaatttggagcttcaaaaaaaatttgtatacaggttctggttacctggaaatgtattacagcaagagttggtgtttagttgagtgtgggatatactgtggtttaaaagtttctgacagccactggatggaatgtggtgcctataagacaatccaggacttacttccataaaatcacttgacatatatggttatggaacttagatgaaggatatgtgataatgatgataatagtgaattcatcaacacagaaatggtaactgaaactataaatgagtagacaagataatgaagagagcataggcagagttagaataaaaaacatgcaaaagactgtgtcctgagcatcacaaatgcttaaagtataagattaggagaccaatgsgccaaaaaaaaaaa

SEQ ID NO: 69806 - DNA, 843 bp, Homo sapiens
gcattttttctgcattgaaagtaatttttaaaatcscagtatccttctctcatttgttcttaaattacccagcccactaaaaatattgaaacatatgtttgacacatatatgatgcaaattttagcagcagttacctttgggacttgggaaaggtggagggagatttaagggtggagggagttggaggaggagaaactctcatattttaccctttgtattctatatagagcaaatttattattattatttattaagtatgtattataatgttagatttttaaggacaagtaaaaatcttgctacaaagaactaagaaacagaatctgcctacggatgtttattgcagctttatttataattgcccaaacttggaagcatcctagatgaccttcggtaggtgagtgaataattaaactgtagtgcatccagaccatgggaagaaatgagctatcaagccatgaagaaacatggaggaaaactaagggcacattattaagtgaagtaagacatctagaaaggcaacatactgtatgactgcaactatatgacattattgaaagggcaaaactttgcagacagtggagacagtggttgacagggcttgtggggaaggaggtatgaagaggaagaacacagatgatctttaaagcagtgaaaatattctgtatgatactataatgatggatacatgtcattatacgtttgttcaaacccatagaatgtacaacaccaacagcaaaccttaatgtaaactctggggtttgggtgataatgatatgttgatgcagctccgttgatggtggctaatgtaccactctggtgaaaggtgtcgaaaatgcaga

SEQ ID NO: 69807 - DNA, 843 bp, Homo sapiens
gcattttttctgcattgaaagtaatttttaaaatcgcagtatccttctctcatttgttcttaaattacccagcccactaaaaatattgaaacatatgtttgacacatatatgatgcaaattttagcagcagttacctttgggacttgggaaaggtggagggagatttaagggtggagggagttggaggaggagaaactctcatattttaccctttrtattctatatagagcaaatttattattattatttattaagtatgtattataatgttagatttttaaggacaagtaaaaatcttgctacaaagaactaagaaacagaatctgcctacggatgtttattgcagctttatttataattgcccaaacttggaagcatcctagatgaccttcggtaggtgagtgaataattaaactgtagtgcatccagaccatgggaagaaatgagctatcaagccatgaagaaacatggaggaaaactaagggcacattattaagtgaagtaagacatctagaaaggcaacatactgtatgactgcaactatatgacattattgaaagggcaaaactttgcagacagtggagacagtggttgacagggcttgtggggaaggaggtatgaagaggaagaacacagatgatctttaaagcagtgaaaatattctgtatgatactataatgatggatacatgtcattatacgtttgttcaaacccatagaatgtacaacaccaacagcaaaccttaatgtaaactctggggtttgggtgataatgatatgttgatgcagctccgttgatggtggctaatgtaccactctggtgaaaggtgtcgaaaatgcaga

SEQ ID NO: 69808 - DNA, 843 bp, Homo sapiens
gcattttttctgcattgaaagtaatttttaaaatcgcagtatccttctctcatttgttcttaaattacccagcccactaaaaatattgaaacatatgtttgacacatatatgatgcaaattttagcagcagttacctttgggacttgggaaaggtggagggagatttaagggtggagggagttggaggaggagaaactctcatattttaccctttgtattctatatagagyaaatttattattattatttattaagtatgtattataatgttagatttttaaggacaagtaaaaatcttgctacaaagaactaagaaacagaatctgcctacggatgtttattgcagctttatttataattgcccaaacttggaagcatcctagatgaccttcggtaggtgagtgaataattaaactgtagtgcatccagaccatgggaagaaatgagctatcaagccatgaagaaacatggaggaaaactaagggcacattattaagtgaagtaagacatctagaaaggcaacatactgtatgactgcaactatatgacattattgaaagggcaaaactttgcagacagtggagacagtggttgacagggcttgtggggaaggaggtatgaagaggaagaacacagatgatctttaaagcagtgaaaatattctgtatgatactataatgatggatacatgtcattatacgtttgttcaaacccatagaatgtacaacaccaacagcaaaccttaatgtaaactctggggtttgggtgataatgatatgttgatgcagctccgttgatggtggctaatgtaccactctggtgaaaggtgtcgaaaatgcaga

SEQ ID NO: 69809 - DNA, 885 bp, Homo sapiens
ccccttcctatctgctcatttgttagtaatggtttttatgaccacagtttgtacacatctgacaaccctcaaactcaccccatttctttaatacttatgtttccatatcaaaataaaacatactaaaacccgttttttgttaccaaatcacttgtaagttttaggtctttaaaaatataattctgaacaattgaaacacattaaaatatacctggctcaaacaaatgattgagatcacaagatcaagtcaaagccttttgtttccatcttacacttgtcaggttaggaaagaacaatgatttacactgaccagaaaaaaaaagaaaagaaaagagaagaaaaaaacacatgacttagttgttaaaaatagagtactgaattctgactattgaagtctttggaaatttcatggctgggccctgtgagttcattctggatgataccaaaagtatcaaggcgtagccacctcagaagttttgagatgagaaaaaaaatactgattttaaagagaatggtgaatttacatacatttgattagtactgatttcatttcatggaatttgcttttgctttaatatggggtacaaaagkgcaccaagagtgaggaaagagagatgagaaagctaggggccccagaaggaatagggtctaggggttctcctgcagagcttatttggtgattttgatacaataataaatcaatgccctcatattttgatattaccatgttgactgccaaatggctgcagcatattagcagcaaaattgctttattcagatgagaattttgaaccaagattgtaaaagtaggaattaagagggcaacaaagatacgggaggcattgttgagttgagagaataaacagttttagatttgatatgcac

SEQ ID NO: 69810 - DNA, 1321 bp, Homo sapiens
cataactccaacatatttcccacccccacactttagttcattcaacttgattatttaatctatcagattttttttctttyggtaggtaattaatttacactgttatttatcagatatctgtcaagtaactaacatgcaccttgtattgaaaggtgttggaatacattagagagcaaaatattgtccctgcctttatgaccaaggctgcttatattgttccttgtaatcctcatgtttgcatattacttcttcctggcaattctcagatgtgtccctcacagtgattctcaggaattgctgacctctttacaacccttcttcttagactgggatgcatgtagtctgtgctaaaacaaaggtttgatgttcctggctggaatccagacagtcaaggcagttaaaagaaatatggtttgtaaccacttttgctgttgcctgctgtctagaatgacctactcatcacctccaggtcttgttgatttttcaagtcttggtggcttgttacaatacgactggggttgatttttcaaatataacttttgttaagggttatcagacagcaaaaattgccactgcctcaagaattatagtttcagtaatctacctttcaatactcatacccaaggcaatttttcctgaagtgtgtcagtgacagacagatgggtgaatcaggagaacgtttctccaatcaacccatgctgattcctgatacagtttgttcttccaaagagtgtgataatttctatgactgaagatgcccagagaattagtctctaattcagaggtgcaagaaagaatttaccactttaagaaaactaaaaataatttgataaagctgaacatctgaaatcaacttcacctgaattttaccattctagacttcaagcatttaagcattgtttggaatattgttaataaaaccaaaatctttttcccatgggactcaattgtttgaaataaggttccgattttagctattttataatacagaagcagtaatatgctacaatgatagtaataataacattcttttagaagtttctgcatacatttatgtatacacatacatattatagtacttagtgctcttttataaacctttatagtggtgcttttcaacatactttgaaattgttgtttacttttctgcttctccctggattctaggctccttaagtataggcagggactgtagttgcccaacattttatcaccagtataaccaatttggtaaaactgtttggcagcatctactaaagttcaatatacatatactctaactcaaaagttttacccctaggtatacatccaacataattgc

SEQ ID NO: 69811 - DNA, 648 bp, Homo sapiens
agtgtgagccactgcacccagcctgaatttctccattcttcccacacaccctccccaggttctccttcctgacctctgacccttcttttttttcttcttttttttttttttttttttttttttttttgagatagcatctcackctgtcacccagactggagtgcagtagcacgatctcggctcactgcaacctcttcctcccaggctcaagtgattctcctgtcttagcctcccaagtagctgggattataggcacacaccactaccgcctggctaatttttgtacttttagtagagatggggtttcaccatgttggccaggctggtcttgaactcctgacctcaggtgatctgcccgcctcagcctcccaaagtgttggggttacaggggtgagccaccacgcctggcccccttccttcatcttagtcaatcctatgccacctcttcttcctccagtcccctcacctgatggtcccgacacttcatcatccaccacctcctggagggggtaccctgaggtgctccgctgggggctctgctcttcctggggctgcggttgatggctcatcatgatctttcccaaaatctgtcccatctcaccaaacctagtctctgttctgtccttggtcttcttctggacactgctg

SEQ ID NO: 69812 - DNA, 648 bp, Homo sapiens
agtgtgagccactgcacccagcctgaatttctccattcttcccacacaccctccccaggttctccttcctgacctctgacccttcttttttttcttcttttttttttttttttttttttttttttttgagatagcatctcacgctgtcacccagactggagtgcagtagcacgatctcggctcactgcaacctcttcctcccaggctcaagtgattctcctgtcttagcctcccaagtagctgggattataggcacacaccactaccgcctggctaatttttgtacttttagtagagatggggtttcaccatgttggccaggctggtcttgaactcctgacctcaggtgatctgcccgcctcagcctcccaaagtgttggggttacaggggtgagccaccacgcctggcccccttccttcatcttagtcaatcctatgccacctcttcttyctccagtcccctcacctgatggtcccgacacttcatcatccaccacctcctggagggggtaccctgaggtgctccgctgggggctctgctcttcctggggctgcggttgatggctcatcatgatctttcccaaaatctgtcccatctcaccaaacctagtctctgttctgtccttggtcttcttctggacactgctg

SEQ ID NO: 69813 - DNA, 648 bp, Homo sapiens
agtgtgagccactgcacccagcctgaatttctccattcttcccacacaccctccccaggttctccttcctgacctctgacccttcttttttttcttcttttttttttttttttttttttttttttttgagatagcatctcacgctgtcacccagactggagtgcagtagcacgatctcggctcactgcaacctcttcctcccaggctcaagtgattctcctgtcttagcctcccaagtagctgggattataggcacacaccactaccgcctggctaatttttgtacttttagtagagatggggtttcaccatgttggccaggctggtcttgaactcctgacctcaggtgatctgcccgcctcagcctcccaaagtgttggggttacaggggtgagccaccacgcctggcccccttccttcatcttagtcaatcctatgccacctcttcttcctccagtcccctcacctgatggtcccracacttcatcatccaccacctcctggagggggtaccctgaggtgctccgctgggggctctgctcttcctggggctgcggttgatggctcatcatgatctttcccaaaatctgtcccatctcaccaaacctagtctctgttctgtccttggtcttcttctggacactgctg

SEQ ID NO: 69814 - DNA, 925 bp, Homo sapiens
tgcatttaaaccctactgaatatatattaatattgtaaacacaaaagcattctcatttgaaaattataggaattgcatttgggagaatgcaggaaatgaagtgtcagtgtactgacgagaatagtcaaacaatattagaaacaatgaaatcaatgattaatcagtgtttattatgatgtatctaggatcccccaaagtgaccatgttctttcatccagcaacttaggtactaaagaagaaatagtttaaaaacctttgtgcaagagatgttatttctgcactttaaagaaatattggccagagaaatacttcaagttccaattgtagaaaaaggtgtcattggaattgtgatttttccaaactatgaaatattattattttgggtattgcatttattattgcagatgttgaaatgacaatcgtgaaaagcattataatatataaaataatgcttttgctagaactttaggtttraaaacataggttcataaggtaattcaacacatctagctctacgtctctatctccaaacatccagtcatttatattatttatatttgtgtgtgtgtgcatgttagcagttgcgaatctgtatgagtctgcagcaatctcaattcttgcctcctcagaaaaaagaattcaacttaaggggcataaggcagagttagagacccaggcaagttttagagcaagagtgaaagtttactaaaaagttttagagctggaacggaaggaagtacccttggaagagggccaagtggatgacttgagagatttaaaagcatggtttgacctttgacttggggtcttatatgttagcaattcttctggggttgcattacttctcccctgattcttcccctgcgtggactgtctgcacgtgcagtggcctgccagcacttgggagggggcgcatgtgcagtgt

SEQ ID NO: 69815 - DNA, 652 bp, Homo sapiens
agagctttaccaaatatctaataagaaccgaaatttccaacttacattaaaagagcaatgcttttccttgtatttttaaatatagttttaactataaagattgtcctgttcctatacctttcttgaagattatcttgttcctatacctttcttgaagattatcctgttcctatacctaaagaagatcctcgtttatattagcatctcaactgtcttcactaccttccgctagtcttccaggagctcttcaaaaagactctcagagtcacaaaatcttaaaaggaacattaagatcctctgttccaactgcttcattttattactgatgaggaaactggagcccacagtggctaagtgatttgcttatggttacagacatgattagcagcagaagaagagatccaggtctcccgattccatatgggtgctcctttcatcataccttatactatctccaaggaatcagaaagttatttgcaaggcaaagccttctcaaatgaagccatttttgtgaccatgtcagagaaaacttacctttcaggaaagccaaggcccatttatcaagactttcctgggttctccttgaaactgaaggtctctatgrcattaatagtagccattcattaaagggctactgactgccaagttataa

SEQ ID NO: 69816 - DNA, 630 bp, Homo sapiens
gttgagtgtcctgtaaatataaaatagattattcagcaagattcttgtggcatagaaaacattattaagtggttcctcgagataagtctggctgaggcrtgaggcttgggatctctaccttcctgagctcagggggatctcaccagattaagttatttccatggaagcttcccctgaaggctataataggcctgaggaggatggatccatggttgcatgtaaaatttgcaaaagtgaaaaacacgagctataatttaagttaaaggtaactgtctctttttactctgatcttttctctatcctactcccacctgctgaagacattatagtggctgtaacattttttaggttcaactaagcagaagttgggttcgaactatgccattgtaactgcaatttgcaaagagctttaaaaatgtttcaataaaaccagttagaaataacgtattccctattttctaatatgtatgaggtaacatgttcacacttatttatttattaaataaatgagaaaaactaaaaattagtgagatataagcaaagttcataaagatgaataatgaaaacaagggaaattaatctgtcattgaaagtgacttgtaacctaaaaattcaaattacatgaaaaac

SEQ ID NO: 69817 - DNA, 630 bp, Homo sapiens
gttgagtgtcctgtaaatataaaatagattattcagcaagattcttgtggcatagaaaacattattaagtggttcctcgagataagtctggctgaggcatgaggcttgggatctctaccttcctgagctcagggggatctcaccagattaagttatttccatggaagcttcccctgaaggctataataggcctgaggaggatggatccatggttgcatgtaaaatttgcaaaagtgaaaaacacgagctataatttaagttaaaggtaactgtctctttttactctgatcttttctctatcctactcccacctgctgaagacattatagtggctgtaacattttttaggttcaactaagcagaagttgggttcgaactatgccattgtaactgcaatttgcaaagagmtttaaaaatgtttcaataaaaccagttagaaataacgtattccctattttctaatatgtatgaggtaacatgttcacacttatttatttattaaataaatgagaaaaactaaaaattagtgagatataagcaaagttcataaagatgaataatgaaaacaagggaaattaatctgtcattgaaagtgacttgtaacctaaaaattcaaattacatgaaaaac

SEQ ID NO: 69818 - DNA, 529 bp, Homo sapiens
ttttggagccacttctgcagtattgggcttgcacttacaaagctatctccaatcttagggccatatctcacctttcatactttttaaaattctttaataataaaaaatgtaacacttttattttatatttctctctcccacagaggccagacataaaacactcaaactacttgactagaggtgtgaagatttcttgagaaaatctatactggttagcaatcatagtaacaaattagaattgaatgtgctaacttatctggtttaaggaatattttctgaaagattttcctcagttccttatttttctccccacacatttgaattcacatctttctggacaaggtcatttcagaacaacttctcaggaaaatgtcatttctcctctcccttaaaatctactcaatttcctgaccctgccttgaatagattaactcygtagtgaggctagagaagtaggtaggagcctggccacacatgaccttacgagctatgttaacaatttgggggccaagtgtggtggcttatgcct

SEQ ID NO: 69819 - DNA, 1835 bp, Homo sapiens
gttttgagggagggagggaactttgaccagcattggaaggaaaggaacagcttgagcaaaggccttgagcctgcaaggaagtgctgtgcttggggcctgggtgtccgcaggagctcaagctgaggaaggctggactagatagccatgagcccgcagtgccagctgccagccttaggcgtggtcccggtgcgctgtgggtaccaaaacatttctgagtggggtttcctttggcacaggggctgaagggtccacggtggagccagtaacaggccttccaggtagctccagactccctgtacctctgcctcatggcctccctgtgggaagagcaagcccagggacccctccccgcttccccctcccctgcttcctggagaggctgaaactcagggccgactcagcacaaggcaccctccccaatccctcccccaggtggctggggcccrtggtcctcctggtccccctgctccagaagctgcacggaccccgctcgccctgcatggcgcagccgcacccgcctctgcctggctaactgcaccatgggggacccattacaggagcgcccctgcaacctgccctcatgcacaggtgtgccttccagcctcaacttctgatcccagccaccaccctcagacaactcattgtaacccccaattcccaatatctaatacccctcaggtaatcattggtttctagtgttgacatctcatttcaaatcagtgtctgactccgggctctggatcctctttgccaaccccagcagatgctggggagcccaacttccagcacattccttgttctctggtgtgtgtgctgaactctccacccgccccaaggtcccgcccaaatccctccatagccctgtagtctgggattactgtccctgatgagaaaaggggatagtgaggcccagttgtcaaagccacacagcagtcagtgtcagatccagaatgagagcccagagctctggacgaggccactgctggcctgggtggtggaggtccaccgttgagctgggagcagagaggaaaggctgggcaggtgtcatgcagccgggactggctccagctccgctttgtgtcacagagctgcccgtgtgccctggccctggctgtggggctgggaactgttcctggacctcctgggccccgtgggaaccttgctcccgcagctgcggagtgggccagcagcgccgcctgcgggcataccgtccccctgggcccggcgggcactggtgccccaacatccttactgcctaccaagagcgccgcttctgcaacctgcgagcctgcccaggtgaggcggctgggggagaccagggcatgccccaggctctgcccctggaaggcccctggcatcagtgccccctcccaggcacccagcctacctgagtgtggcactttcatctctcacaccagaccctgacctgggctcgtgggataggtgggggccccctgcctgagccgacccctcaggtggccgttctctttcccacagtgcccgggggctggtcacgctggagtccctggtcctggtgtgaccgcagctgtgggggaggccaatccctgagaagccgcagctgctcaagccccccatccaagaacgggggagccccctgtgctggggagcggcaccaggcccgcctctgcaatcccatgccttgtggtatggcaatggtgacagtcctgtcctacccttattgggctccactctgcatggggcctggctgctacctcatgggccagtttggaaactgagccctctggggtggagggctgggcctggcgttgggcaaggataccctgagcatgtctgttgtctgtgccaaggcccaa

SEQ ID NO: 69820 - DNA, 1835 bp, Homo sapiens
gttttgagggagggagggaactttgaccagcattggaaggaaaggaacagcttgagcaaaggccttgagcctgcaaggaagtgctgtgcttggggcctgggtgtccgcaggagctcaagctgaggaaggctggactagatagccatgagcccgcagtgccagctgccagccttaggcgtggtcccggtgcgctgtgggtaccaaaacatttctgagtggggtttcctttggcacaggggctgaagggtccacggtggagccagtaacaggccttccaggtagctccagactccctgtacctctgcctcatggcctccctgtgggaagagcaagcccagggacccctccccgcttccccctcccctgcttcctggagaggctgaaactcagggccgactcagcacaaggcaccctccccaatccctcccccaggtggctggggcccatggtcctcctggtccccctgstccagaagctgcacggaccccgctcgccctgcatggcgcagccgcacccgcctctgcctggctaactgcaccatgggggacccattacaggagcgcccctgcaacctgccctcatgcacaggtgtgccttccagcctcaacttctgatcccagccaccaccctcagacaactcattgtaacccccaattcccaatatctaatacccctcaggtaatcattggtttctagtgttgacatctcatttcaaatcagtgtctgactccgggctctggatcctctttgccaaccccagcagatgctggggagcccaacttccagcacattccttgttctctggtgtgtgtgctgaactctccacccgccccaaggtcccgcccaaatccctccatagccctgtagtctgggattactgtccctgatgagaaaaggggatagtgaggcccagttgtcaaagccacacagcagtcagtgtcagatccagaatgagagcccagagctctggacgaggccactgctggcctgggtggtggaggtccaccgttgagctgggagcagagaggaaaggctgggcaggtgtcatgcagccgggactggctccagctccgctttgtgtcacagagctgcccgtgtgccctggccctggctgtggggctgggaactgttcctggacctcctgggccccgtgggaaccttgctcccgcagctgcggagtgggccagcagcgccgcctgcgggcataccgtccccctgggcccggcgggcactggtgccccaacatccttactgcctaccaagagcgccgcttctgcaacctgcgagcctgcccaggtgaggcggctgggggagaccagggcatgccccaggctctgcccctggaaggcccctggcatcagtgccccctcccaggcacccagcctacctgagtgtggcactttcatctctcacaccagaccctgacctgggctcgtgggataggtgggggccccctgcctgagccgacccctcaggtggccgttctctttcccacagtgcccgggggctggtcacgctggagtccctggtcctggtgtgaccgcagctgtgggggaggccaatccctgagaagccgcagctgctcaagccccccatccaagaacgggggagccccctgtgctggggagcggcaccaggcccgcctctgcaatcccatgccttgtggtatggcaatggtgacagtcctgtcctacccttattgggctccactctgcatggggcctggctgctacctcatgggccagtttggaaactgagccctctggggtggagggctgggcctggcgttgggcaaggataccctgagcatgtctgttgtctgtgccaaggcccaa

SEQ ID NO: 69821 - DNA, 1835 bp, Homo sapiens
gttttgagggagggagggaactttgaccagcattggaaggaaaggaacagcttgagcaaaggccttgagcctgcaaggaagtgctgtgcttggggcctgggtgtccgcaggagctcaagctgaggaaggctggactagatagccatgagcccgcagtgccagctgccagccttaggcgtggtcccggtgcgctgtgggtaccaaaacatttctgagtggggtttcctttggcacaggggctgaagggtccacggtggagccagtaacaggccttccaggtagctccagactccctgtacctctgcctcatggcctccctgtgggaagagcaagcccagggacccctccccgcttccccctcccctgcttcctggagaggctgaaactcagggccgactcagcacaaggcaccctccccaatccctcccccaggtggctggggcccatggtcctcctggtccccctgctccagaagctgcacggacccygctcgccctgcatggcgcagccgcacccgcctctgcctggctaactgcaccatgggggacccattacaggagcgcccctgcaacctgccctcatgcacaggtgtgccttccagcctcaacttctgatcccagccaccaccctcagacaactcattgtaacccccaattcccaatatctaatacccctcaggtaatcattggtttctagtgttgacatctcatttcaaatcagtgtctgactccgggctctggatcctctttgccaaccccagcagatgctggggagcccaacttccagcacattccttgttctctggtgtgtgtgctgaactctccacccgccccaaggtcccgcccaaatccctccatagccctgtagtctgggattactgtccctgatgagaaaaggggatagtgaggcccagttgtcaaagccacacagcagtcagtgtcagatccagaatgagagcccagagctctggacgaggccactgctggcctgggtggtggaggtccaccgttgagctgggagcagagaggaaaggctgggcaggtgtcatgcagccgggactggctccagctccgctttgtgtcacagagctgcccgtgtgccctggccctggctgtggggctgggaactgttcctggacctcctgggccccgtgggaaccttgctcccgcagctgcggagtgggccagcagcgccgcctgcgggcataccgtccccctgggcccggcgggcactggtgccccaacatccttactgcctaccaagagcgccgcttctgcaacctgcgagcctgcccaggtgaggcggctgggggagaccagggcatgccccaggctctgcccctggaaggcccctggcatcagtgccccctcccaggcacccagcctacctgagtgtggcactttcatctctcacaccagaccctgacctgggctcgtgggataggtgggggccccctgcctgagccgacccctcaggtggccgttctctttcccacagtgcccgggggctggtcacgctggagtccctggtcctggtgtgaccgcagctgtgggggaggccaatccctgagaagccgcagctgctcaagccccccatccaagaacgggggagccccctgtgctggggagcggcaccaggcccgcctctgcaatcccatgccttgtggtatggcaatggtgacagtcctgtcctacccttattgggctccactctgcatggggcctggctgctacctcatgggccagtttggaaactgagccctctggggtggagggctgggcctggcgttgggcaaggataccctgagcatgtctgttgtctgtgccaaggcccaa

SEQ ID NO: 69822 - DNA, 611 bp, Homo sapiens
tgttatgccaatcttttcagatagtttttctaggtagttttctcacaggcatgcactgatcagtatttagctgcatacttgacgacgagtctcctcatttctctagaaatctctcttcatgctgctttttttctatctgctaatattaactgactttggtctaactctaactgctttggtctccccagaccctcaattttattttctctgaaaatcttcccaacaggcaatcacagggtctcacctcatttgttttctgtctcatcaaaattacccctgtttattgcccratactcaatatcataaataatatttctcttataatttcacttttctttgttgttcagtaaaggggtaagcccaatccctgttattccatttcacctgccagcaaaagaattaaaattatttaaaaacaattttgatggtttaaataggaaaaataccaaaacaagttaatttctaaccaaccaaatcaaaaccacatttagcatttagtgaaaaaatatatatatttcaattttagagaaaaaagaacatatatttttactctcctgagaaattatgctccttatcaaggcagctgttgaaactatctgtgtatctctcca

SEQ ID NO: 69823 - DNA, 553 bp, Homo sapiens
ttcatttttttgcagagatgtgtccttgttatgttgccaaagctggtcttgaactcctgggctcaagcaatcctcctgcttcagcctcacaaggtggtggaattacaggcgtgagcccttgggcttgtcctcttttttgcttttataacaaatcacaaatgacttgctattttgttacaaaataacaaatcattggttacaatgattaataaatgttaaagaatggttargaaatagttttttcctgttagaatacatgataaaagtagttttccctgttaggatacaggaaaacgatttttactaaaaaccaaatattaaggtaatggatatggaccttattattatttttttattttattttttattttttttacaggtgttgaagaagaagaaaaagctgcagagatgcataaaatgaaatctacaacccaggcaaatcggatgagtgtagatgctgtagaaattgaaacactcagaaaaacagttgaggactatttctgcttttgctatggtaaaaacaatagatttaatttttctaaaagatacatta

SEQ ID NO: 69824 - DNA, 685 bp, Homo sapiens
cgctggattgaaattcattacactttagcaagaaccaatggttttgataaattggtgtaagaaagtgctggattgtggtttgtcatgaagtggctggaatatgagaaaatgcaatcataaaacacaagtagctcttctgagaaatctagcgtgaaggggtgggtggaaatattgcaactacttgatgtggacatgatatcaaaggaaaagcaatatatttgtgacacttttcaaggtcacaaaatctgaaagcagatggtctttgattggacccaaggctgctacttcctaattgtgtggtcttcactaagttacccatttttttctgtgtctcactttcttcatattaaaactggtaatgataatagtacttatctcattcagttttgtgaaaaaattgtattgacatatataaagtacttagatccatgcacggtatatagtaaacattacatgagggtttcttaatgttttgttygacatataagtatgtttagtacgtacaaatgtctattggaagaatccaataaaggagaatgaaaataaaatatatgtttatcattatatttaaggggagaggtactggataattctcatcctttttgctttagaataggttctattttttataagttacatgttatagcttttataatacaaatactatatattgttttagaaaata

SEQ ID NO: 69825 - DNA, 2174 bp, Homo sapiens
gctgtcctctcctgtggagctgcggacagcgttacccctctgacaatgtgcgatcatacgcacaaaacacggtcagccaggaaggttcctccacaccagggcttccctgcggctccatcccataggcagggctgactcctcacatggctgagctcagcctgcagcccatccagaggtcaagctgatatcctgcagctcaaagcccctgccctaactcacatggttagaagagttggtgtgacccgaggcccccagaaaaacaaaaacactcctgttaggacattccrggggcttagaggtcaccctcctgaaatgggggtccagggccaggcctctctttgggccaggtgaaattttttagtgcccagtgagggattcataggtgtttcctcaaggaattcacctggaggacgcccgtttcatactctgcgttgcaaagtagacctgccacaacatgtggtctggaacctgcacacatcatgcccctaatcacagggctttgaaataaatttggggagaacttcagaaacctttttgtttgtttgtttcagacagggtctggctctggggcccaggctggaatgctgtggtgtaatcatagctcactgaagccttgattgcctgggctcaagggatcctgccacctcagccttcccagtaggtgggactacaggcatgcaccaccacacccggctaattttttttttttttttttttgagatggagtctcgccctgtcacccaggctggagtgcaaatggcgcgatctcggctcactgaaacctccacctcacaggttcaaatgattctcctgcctcagcctcctgagtagctgagattacaggcacccaccaccacgcccagctaatttttgtatttttagtagagatggggtttcaccatgttggccaggctagtctcaaactcctgacctcgtgatccaccctcctcagcctcccaaagtgctgggattacaggcgtaagccactgtgcccggccaattttttgtattattttgtaaagacagggtctcactatgttgctcaggctggtcttgaactcctgggctcaagcaattagcctgcctcagcctctcaaagtgctgggattaagggcatgaaccactgcacctggccgagaaatggttttgatgggggcagggaggagggaattgagacttgcttaaaaccccaactgcttctgcctttccaagtaagaggccttgtagacttaattgagagtacagggagggggcttgtttcctgattgacagagtgagtgctggacatgttgcagttctgaaccacgtgcagctcttttaatcttcctcagagtcttctctgcttttctctgtagatccccttagaattgggaaacgggagcttcatactgctcaggaaatcacactgaaaccgaggcccagggcaacagtggaaactcaggagtgaaaagcaagaatctaagtcacgggacgttccattgccctcatgctgtaccctgggaactcactttgggtaattaccaaggaaaaatcagaatcttggatcccaggaagaaaggtgcaccatgcttggtccctggttggccccacctctctttacgaccacctacgaagaaagcatgatctgaaattccaaagctttcttcctttactatcaggctttctgccccgcccccagcaatgcagagacatgcaatgtgaaaacccaatcaacccgtcagcaagtcctggttttacaccccttcttgtcgacctggtggttggggccttctgcaggctgagtggcaggtggcttgggaaatgaaacccttaataatcacccaaagctaattctcacccacaatgaccagagtaatctttgcccaactgaggtccagacaccgtggctgtgagggttaattttagggaagttgactggactgagggatgcagagatggcaggtgacagaaagaatgtttctgggggtgtctgtgagggtgtttctgtaaccgagcctgatgtggttttgatctgtgtccccacccaaatctcatgttgaactggaatcccaagtattggaggtggggcctgctgggaggtgattggatcgtgggggtggatttcccataagtggttttgcaccaggaatcctctgggtgccgtactcccaatagtgagggagttctcttgagat

SEQ ID NO: 69826 - DNA, 2174 bp, Homo sapiens
gctgtcctctcctgtggagctgcggacagcgttacccctctgacaatgtgcgatcatacgcacaaaacacggtcagccaggaaggttcctccacaccagggcttccctgcggctccatcccataggcagggctgactcctcacatggctgagctcagcctgcagcccatccagaggtcaagctgatatcctgcagctcaaagcccctgccctaactcacatggttagaagagttggtgtgacccgaggcccccagaaaaacaaaaacactcctgttaggacattccgggggcttagaggtcaccctcctgaaatgggggtccagggccaggcctctctttgggccaggtgaaattttttagtgcccagtgagggattcataggtgtttcctcaaggaattcacctggaggacgcccgtttcatactctgcgttgcaaagtagacctgccacaacatgtggtctggaacstgcacacatcatgcccctaatcacagggctttgaaataaatttggggagaacttcagaaacctttttgtttgtttgtttcagacagggtctggctctggggcccaggctggaatgctgtggtgtaatcatagctcactgaagccttgattgcctgggctcaagggatcctgccacctcagccttcccagtaggtgggactacaggcatgcaccaccacacccggctaattttttttttttttttttttgagatggagtctcgccctgtcacccaggctggagtgcaaatggcgcgatctcggctcactgaaacctccacctcacaggttcaaatgattctcctgcctcagcctcctgagtagctgagattacaggcacccaccaccacgcccagctaatttttgtatttttagtagagatggggtttcaccatgttggccaggctagtctcaaactcctgacctcgtgatccaccctcctcagcctcccaaagtgctgggattacaggcgtaagccactgtgcccggccaattttttgtattattttgtaaagacagggtctcactatgttgctcaggctggtcttgaactcctgggctcaagcaattagcctgcctcagcctctcaaagtgctgggattaagggcatgaaccactgcacctggccgagaaatggttttgatgggggcagggaggagggaattgagacttgcttaaaaccccaactgcttctgcctttccaagtaagaggccttgtagacttaattgagagtacagggagggggcttgtttcctgattgacagagtgagtgctggacatgttgcagttctgaaccacgtgcagctcttttaatcttcctcagagtcttctctgcttttctctgtagatccccttagaattgggaaacgggagcttcatactgctcaggaaatcacactgaaaccgaggcccagggcaacagtggaaactcaggagtgaaaagcaagaatctaagtcacgggacgttccattgccctcatgctgtaccctgggaactcactttgggtaattaccaaggaaaaatcagaatcttggatcccaggaagaaaggtgcaccatgcttggtccctggttggccccacctctctttacgaccacctacgaagaaagcatgatctgaaattccaaagctttcttcctttactatcaggctttctgccccgcccccagcaatgcagagacatgcaatgtgaaaacccaatcaacccgtcagcaagtcctggttttacaccccttcttgtcgacctggtggttggggccttctgcaggctgagtggcaggtggcttgggaaatgaaacccttaataatcacccaaagctaattctcacccacaatgaccagagtaatctttgcccaactgaggtccagacaccgtggctgtgagggttaattttagggaagttgactggactgagggatgcagagatggcaggtgacagaaagaatgtttctgggggtgtctgtgagggtgtttctgtaaccgagcctgatgtggttttgatctgtgtccccacccaaatctcatgttgaactggaatcccaagtattggaggtggggcctgctgggaggtgattggatcgtgggggtggatttcccataagtggttttgcaccaggaatcctctgggtgccgtactcccaatagtgagggagttctcttgagat

SEQ ID NO: 69827 - DNA, 2174 bp, Homo sapiens
gctgtcctctcctgtggagctgcggacagcgttacccctctgacaatgtgcgatcatacgcacaaaacacggtcagccaggaaggttcctccacaccagggcttccctgcggctccatcccataggcagggctgactcctcacatggctgagctcagcctgcagcccatccagaggtcaagctgatatcctgcagctcaaagcccctgccctaactcacatggttagaagagttggtgtgacccgaggcccccagaaaaacaaaaacactcctgttaggacattccgggggcttagaggtcaccctcctgaaatgggggtccagggccaggcctctctttgggccaggtgaaattttttagtgcccagtgagggattcataggtgtttcctcaaggaattcacctggaggacgcccgtttcatactctgcgttgcaaagtagacctgccacaacatgtggtctggaacctgcacacatcatgcscctaatcacagggctttgaaataaatttggggagaacttcagaaacctttttgtttgtttgtttcagacagggtctggctctggggcccaggctggaatgctgtggtgtaatcatagctcactgaagccttgattgcctgggctcaagggatcctgccacctcagccttcccagtaggtgggactacaggcatgcaccaccacacccggctaattttttttttttttttttttgagatggagtctcgccctgtcacccaggctggagtgcaaatggcgcgatctcggctcactgaaacctccacctcacaggttcaaatgattctcctgcctcagcctcctgagtagctgagattacaggcacccaccaccacgcccagctaatttttgtatttttagtagagatggggtttcaccatgttggccaggctagtctcaaactcctgacctcgtgatccaccctcctcagcctcccaaagtgctgggattacaggcgtaagccactgtgcccggccaattttttgtattattttgtaaagacagggtctcactatgttgctcaggctggtcttgaactcctgggctcaagcaattagcctgcctcagcctctcaaagtgctgggattaagggcatgaaccactgcacctggccgagaaatggttttgatgggggcagggaggagggaattgagacttgcttaaaaccccaactgcttctgcctttccaagtaagaggccttgtagacttaattgagagtacagggagggggcttgtttcctgattgacagagtgagtgctggacatgttgcagttctgaaccacgtgcagctcttttaatcttcctcagagtcttctctgcttttctctgtagatccccttagaattgggaaacgggagcttcatactgctcaggaaatcacactgaaaccgaggcccagggcaacagtggaaactcaggagtgaaaagcaagaatctaagtcacgggacgttccattgccctcatgctgtaccctgggaactcactttgggtaattaccaaggaaaaatcagaatcttggatcccaggaagaaaggtgcaccatgcttggtccctggttggccccacctctctttacgaccacctacgaagaaagcatgatctgaaattccaaagctttcttcctttactatcaggctttctgccccgcccccagcaatgcagagacatgcaatgtgaaaacccaatcaacccgtcagcaagtcctggttttacaccccttcttgtcgacctggtggttggggccttctgcaggctgagtggcaggtggcttgggaaatgaaacccttaataatcacccaaagctaattctcacccacaatgaccagagtaatctttgcccaactgaggtccagacaccgtggctgtgagggttaattttagggaagttgactggactgagggatgcagagatggcaggtgacagaaagaatgtttctgggggtgtctgtgagggtgtttctgtaaccgagcctgatgtggttttgatctgtgtccccacccaaatctcatgttgaactggaatcccaagtattggaggtggggcctgctgggaggtgattggatcgtgggggtggatttcccataagtggttttgcaccaggaatcctctgggtgccgtactcccaatagtgagggagttctcttgagat

SEQ ID NO: 69828 - DNA, 575 bp, Homo sapiens
tttttttaccggctgcaaagttttttaaataaaatattgagagttccagattgggaacatttttctatattgtggtaaaatgtaatcacagaatttaccattgtaactattgttaagtgcacagttcagggttattaagctcatagtggctgcaccattttacatttccatcagcagtgcacgatcaactggttaattttttaaaaataagtaytgtgttttatctttaagtgaaaagatgagggaagatttcaagttactgtttggttgcaaatcttcccaaatagcacatggcagagacagtgggaataaagcctgcatttgaaaggatggaaagtcaaattagatgattctctcaatgtccttccttcttgtaacactaaattttaaaatataaagaaatgtcggcaagccattttctatacaatgactataatttagggatctagtcaagggctgccgagaatcgtctggagacaaagttgaaaaatccttatctctttttattctccattatttaacttatatttaaaattcaaagtttcatatgcttttcatctttgaacatagtctat

SEQ ID NO: 69829 - DNA, 575 bp, Homo sapiens
tttttttaccggctgcaaagttttttaaataaaatattgagagttccagattgggaacatttttctatattgtggtaaaatgtaatcacagaatttaccattgtaactattgttaagtgcacagttcagggttattaagctcatagtggctgcaccattttacatttccatcagcagtgcacgatcaactggttaattttttaaaaataagtattgtgttttatctttaagtgaaaagatgagggaagatttcaagttactgtttggttgcaaatcttcccaaatagcacatggcagagacartgggaataaagcctgcatttgaaaggatggaaagtcaaattagatgattctctcaatgtccttccttcttgtaacactaaattttaaaatataaagaaatgtcggcaagccattttctatacaatgactataatttagggatctagtcaagggctgccgagaatcgtctggagacaaagttgaaaaatccttatctctttttattctccattatttaacttatatttaaaattcaaagtttcatatgcttttcatctttgaacatagtctat

SEQ ID NO: 69830 - DNA, 735 bp, Homo sapiens
cacttcacagcatcccttatggttgtgtcagccaacttctacttaagaaaagcattcctctggaaatggatattgttaaacaataataccaatttttcacagagtacgcttcctttgttttggataacagctgaaaatataactttcttgtatagattgcataaaacatttttgcctccctaaagactgcgcatataaaatacgtgagaacccttttaggactagtttgtacaatgttcaaacaagtacatttacttttgttaygatttagtgaactaatggaacatgatttttctgtagagtagctccatcgagagaacagttgcaggtggggttaaactcatctccagcctccatcctgggatggtttgacatactctcaacaaagagaatgaatggaaacagctttggggatagggtcatcggttagcagtactatccagctgttctagtccattttgccttgctataaagaaatacttagggctgggtaatttataaagaaaagaggtttatttgactcttggctctgcaggctatatgagcatagtgctggcatcgacttctagagagggcctcagaagcttatgctcatgacggaaggtgaaggaacagcagcacatcacatggcaagagaggaagcgagagagaggaggaggaggtgccaagctctttaaaacaaccagatctcatatgaactcattaccatgggaagagcaccaagccattcatgaa

SEQ ID NO: 69831 - DNA, 517 bp, Homo sapiens
tccttctcaggatcatcaactatttctactcagttgtgtggctttcatcaaattacatagtctctctcagcgtcggtttccccatccacagataaaggaggctgaactagatggtgtctgtgactccttccagctctgaattactctggctcacggttcacasgctctccctctgggcctgtgtctttttttctgaatttcagtaaacactctcaaattctattaaatctcttccttgcttgctttttctttctttgcaccgatgtctgacttttttttttctccctcttttaactgggtgtaacatatgactgtagtctagtttgtatttgttgtgttcattaagtaaagttttgctcactcctgtaatcccagcactttgggaggccaaggcgggcagatcatctgaggtcaggagtttgagaccagcctggccagcatggtgaaatcccttctctactgaaaatacaaaattagccaggcgtggtggcatgcacctgtaatcccagctgcttgg

SEQ ID NO: 69832 - DNA, 638 bp, Homo sapiens
ctgcctcagcctcccaagcagctgggactacaggcatgagccaccacacccagctaatttttgtatttttagtagagatggggtttcaccatgttggctagaatggtctcaatctcttgacttcctgatctgcccgcctcgacctcccaaagtgctgggaatacaggtgtgagccaccacacctggcctcaggtattctttatagtggtgtgaaaaggactaatatggcagccaaaagagactagaaataaacgtgcatttttttcagaatttttgctcaatactaatcaatactacttaattaaatatatagatttgtgttaattgttaaaaggactaaattactgagttgaatggattgcttctatgggtctgtcccacattcaccatattgttattcacttgtcttttgtatgtgttttttttgtttgtttttgctgtggctgtgaaaatagccatcatcttctaaartgctattatataatcaaattatagggaagaaaacttaaaattaaaaaatatgaagaaattaagtagttaacttgttgatatgcaaattttggtaaattacaaaatttgtccctatagattatgtgttttcacaggaacagagctctaaattgattgctcttattgaa

SEQ ID NO: 69833 - DNA, 819 bp, Homo sapiens
atttaataaatgctgtcagatttgtagacccaagaaaatataaactgccaatcacggaggaaaaaaatctctcaatgatcttatctttatatgattcccttgctgcctggagattgacatttccttggggataatctggtcataggattggtgaaggtggaagggaggcaacctccgaaggtggggccctctgctcacctgggacagggrgggcctgaggtaggtgtctgtgtgggctgggcaggaggatgggagcagtgcttctagatgtttccactttctcctcattagataataatgaatgggtgatttccctagtcactgcagtgtgaggaaatctacaaaattaatttcacaatacactttacaggataggtggagaaacacatgaagcacaactgcagtgggttataaaaaatggcctttcgagttgagcagtaaattcgttcaagcagccattctgaaggacaaactggctctgtatttaacaggggcattccagcacttctctagctactgggttgacaatgactcaccaaagcctctggtagccaccacaggacgcccagagcacgttttaaagctgaacaccaaactgcggacttcgggagtaagtgaactgactggtttttattttgttttactgcttttaacattacagtgactgttacaggttccagcaggataactgggtggaaatgagtttggtttcacttagtctctctaaagagaaagcaagttggtagactaatacctaataaaagcaaagctgccaacaattgaaattgcctgggctgctctgtgtgtcccacatgcatg

SEQ ID NO: 69834 - DNA, 777 bp, Homo sapiens
tggttcttgtagagtttccattaaaagacaatttagtaaaacttttcttcccccaaattataaaatctgtaagatgatttaacaacatgtgtaaaagtcattgtgggccaggcacggtggctcataccaggtgtggtgactcatagcactctgtcacccaggctggagtgcagtggcacaatctctgctcactgcaacctctgcctcctgggtacaagcgattctcctgcctcagctttctgagtagcaaggactacaggtgcacaccatcacgcctggctaatttttgtactattagtacagacggagtttcaccatgtyggccaggctggtctcaaactcctgacctcaaatgatccgcccacctcggcctcccaaagtgctggaattacagatgtgagccacaatgcccggccttattttctacaactttggtaactttagcatataccccaaatctgtaagacataatattataattcaaatgcaactcatggcttctctttgtactctttctctagcttttgaattatttattctaataccagttttaattctgacacaaaatcatgggagttctaatcaaaatccaaccttttatcataaaaactatgaagaaattatgagtagaatttaaaaaggaaaataggcctattaattagatttgtctttgtagcatttaactctataataaataatattttatgcctatgagtccccaacaaagcctccagcttctatttagatataaactgtaaaagtcactactggatccac

SEQ ID NO: 69835 - DNA, 880 bp, Homo sapiens
gatcctcaggggcctgccaggagtccaccggggtgccaaaggcgacgctggcaaccacatctgtggtgtaattgcagtagcacctacgggagatgggagcacagagatctgaaaggactctggcaggggctacccacaatggccccctccagaggaggagggcctgaattgcttacactggcttgcccagccctgcagatgtgtctggaagaggagcttctgcagatctggggggaggtggagggagatgggctcctggatggggcactctgagcagtgacggcagagggtgggaggagacacgaagacctggcgtctaaacaaagacctgggaggagaggagggcacagcctcttccaccttcgagcctcaggcagctgtggtcaaccagaacacagccaggtactaagaaggacactttatagtttcctccctgggaaggagggcacacaggtgacccaacgcctacatgctgtacccaaagctctgcacagcccagctcaggccagaatctaatgattgactgatagacatcaaattgtccttgatgaattaacaacctaattatctagttttattaactttgtctccctcttcctcttaatgattttacagttttcttaatagcaaygaacaaaaagcaagggctcttagcactcaaataaacacaagacaaactttaaggcaggcttcatgaacatctgtatattattacagaaaacatacattgtgctttagaaacaaacagaaggaaaagtgtctggcaggagctccagaaaatttaacctcttaggctataggaaagctgccccctcaaaaggccattttaaactcaaatgattctttttgttatcttataggagtagtcagattaagttct

SEQ ID NO: 69836 - DNA, 1550 bp, Homo sapiens
gcttttattgaaaacgtttctacaactgattacacgtttccctgctagagtgaaaacaagaatgagactactgaatgtgatttcatctgatcctgaaggttgaagatttaagggtcttgagggttatttactttgcttttatagctgatgaggccaccttatctttagccaactcatgcatcctataataatcagagacaatgtggatgaaaagactgtgtaaactggtgcaataccagtgttggtgatgattatgttattattttattagcaatgataataatgaataaatttctggatgattcaccatcccactttattctttatctgctgtaagccatgatttggcataaaatgactaaagcaaaggtggctaaatcttttggcttgcctgggccacgttggaagcaggagaattgtcttggccacacataaaatacagtaacactaacgatagctgatgagaaaaaaaaaaactgcaaaaaaactcacaatgttttaagaaagtttataaatttgtgttgggccacattcaatgccatcctgggctgcttgtggccagcgggctgtgggtcggacaaacttagactaaagatgtttttttaaagcaaaaaccttttagttacaaaatgacgaaaagccagataatcagttatttaaatttggtgtccaccactaaattatagcttctgggctgaggtgcaccacaatttttcttgaagtgaaaatgcttgaactttccccccatccctgtccttaggcgcaggcctgtcctgcccattcctgggtctgtggaggtcagagggtggatccatccacaggttcgacaggacgcacgtaccctggctctgctcacatctctttcccatgttaagtgggtttcttttctttttattaatcagtccatccatgcttttatgagcttctagcgtttccacagtttgctagtcccaaggtaattgtcagcaattatggacagttacaagaagcagtgattcaaaaactcgatttctcatctgtaatgcagcagccttacctctggatgtcaaatgcgtccccagattccgcatagcgttttaaatgagccaggagaagktcgcaggcttggctgatgaggggaaccatctgataatggataacaaaggtgtaattagggcaccatgccgggagtacacctaaattggctgcagatgaagaggttatatgtagtgctttctgggaaaatgaacactgtttggaagatatttttcacacagctaagattcaagaagaagatcctaaaattcacaaatattcataaaatacaatagctctaaacgtctattttagcttaagcattttttatctttggaagcaaaaaagaagaacagatttacagtgaatacggtgaaataattatgaaaatgatcattaagtgcttagacaaaactgagaatcagtactcagtttcatgacatttggttagcattagcaagtaaataaagcctaatccatatgcacaatccctggaattaacccaagtctatgcttgtgtattccgattgtatttt

SEQ ID NO: 69837 - DNA, 1550 bp, Homo sapiens
gcttttattgaaaacgtttctacaactgattacacgtttccctgctagagtgaaaacaagaatgagactactgaatgtgatttcatctgatcctgaaggttgaagatttaagggtcttgagggttatttactttgcttttatagctgatgaggccaccttatctttagccaactcatgcatcctataataatcagagacaatgtggatgaaaagactgtgtaaactggtgcaataccagtgttggtgatgattatgttattattttattagcaatgataataatgaataaatttctggatgattcaccatcccactttattctttatctgctgtaagccatgatttggcataaaatgactaaagcaaaggtggctaaatcttttggcttgcctgggccacgttggaagcaggagaattgtcttggccacacataaaatacagtaacactaacgatagctgatgagaaaaaaaaaaactgcaaaaaaactcacaatgttttaagaaagtttataaatttgtgttgggccacattcaatgccatcctgggctgcttgtggccagcgggctgtgggtcggacaaacttagactaaagatgtttttttaaagcaaaaaccttttagttacaaaatgacgaaaagccagataatcagttatttaaatttggtgtccaccactaaattatagcttctgggctgaggtgcaccacaatttttcttgaagtgaaaatgcttgaactttccccccatccctgtccttaggcgcaggcctgtcctgcccattcctgggtctgtggaggtcagagggtggatccatccacaggttcgacaggacgcacgtaccctggctctgctcacatctctttcccatgttaagtgggtttcttttctttttattaatcagtccatccatgcttttatgagcttctagcgtttccacagtttgctagtcccaaggtaattgtcagcaattatggacagttacaagaagcagtgattcaaaaactcgatttctcatctgtaatgcagcagccttacctctggatgtcaaatgcgtccccagattccgcatagcgttttaaatgagccaggagaagttcgcaggcttggctgatgaggggaaccatctgataatggataacaaaggtgtaattagggcaccatgccgggagtacacctaaattggctgcagatgaagaggttatatgtagtgctttctgggaaaatgaacactgtttggaagatatttttcacacagctaagattcaagaagaagatcctaaaattcacaaatattcataaaatacaatagctctaaacgtctattttagcttaagcattttttatctttggaagcaaaaaagaagaacagatttacagtgaatacggtgaaataattatgaaaatgatcattaagtgcttagacaaaactgagaatcagtactcagtttcatgacatttggttagcattagcragtaaataaagcctaatccatatgcacaatccctggaattaacccaagtctatgcttgtgtattccgattgtatttt

SEQ ID NO: 69838 - DNA, 970 bp, Homo sapiens
tttttttttttttttttttttttagtagagacgggattccaccatgttgatcaggctgatctagaactcctgacctcgtgatccacccactttggcctcccaaagtgctgggattacaggcgtgaactactgtgcctggctgcccccatcctttcaatgggggactgaaccatatggcttgcatacacccctcctgccttattgctctcatctttatcagggtcactcctaaaggtggcctcataagtggaatacagtatttcaggtgtggattggtgtatggtaaatgaatcacttcctgagatctgtaccctacacgtcaatcgcaaagccagttttatgttgacttttctagaagacaaacagtgcaggcaaatattgaggttcaggttaatgaaaaccacgaggtctttttccatggatgataaccaggtacaattgctatttcgatttttttagggaccattcattagaaaggcactagttgtcctgccgtgtgttctgagcagaacgatctcttatcttctctggaatattcagttggttggagacacctggtagagtgggacagctggccggctattgacaggatgttgggaggacatgaaattttataggacccctctcctctgcagtttcctccgagtcagtccyacgtgctctgggtgtaaggaaagaattgtgttaccaggggcccaactcctctgctgaaggagtgggtcctgtagatggagggcgagggggtcccgtagatggagggcgagggggtcccgtagatggagggcgagggggtcccgtagatggaaggcgagggggtcccgtagatggagggcgagggggtcccgtagatggagggcgagggggtcccgtagatggagggcgagggggtcccgtagatggagggcgagggggtcccgtagatggagggcgagggggtcccgtagatggagggtgagggagtcctgtagat

SEQ ID NO: 69839 - DNA, 970 bp, Homo sapiens
tttttttttttttttttttttttagtagagacgggattccaccatgttgatcaggctgatctagaactcctgacctcgtgatccacccactttggcctcccaaagtgctgggattacaggcgtgaactactgtgcctggctgcccccatcctttcaatgggggactgaaccatatggcttgcatacacccctcctgccttattgctctcatctttatcagggtcactcctaaaggtggcctcataagtggaatacagtatttcaggtgtggattggtgtatggtaaatgaatcacttcctgagatctgtaccctacacgtcaatcgcaaagccagttttatgttgacttttctagaagacaaacagtgcaggcaaatattgaggttcaggttaatgaaaaccacgaggtctttttccatggatgataaccaggtacaattgctatttcgatttttttagggaccattcattagaaaggcactagttgtcctgccgtgtgttctgagcagaacgatctcttatcttctctggaatattcagttggttggagacacctggtagagtgggacagctggccggctattgacaggatgttgggaggacatgaaattttataggacccctctcctctgcagtttcctccgagtcagtcctacgtgctctgggtgtaaggaaagaattgtgttaccaggggcccaactcctctgctgaaggagtgggtccygtagatggagggcgagggggtcccgtagatggagggcgagggggtcccgtagatggagggcgagggggtcccgtagatggaaggcgagggggtcccgtagatggagggcgagggggtcccgtagatggagggcgagggggtcccgtagatggagggcgagggggtcccgtagatggagggcgagggggtcccgtagatggagggcgagggggtcccgtagatggagggtgagggagtcctgtagat

SEQ ID NO: 69840 - DNA, 970 bp, Homo sapiens
tttttttttttttttttttttttagtagagacgggattccaccatgttgatcaggctgatctagaactcctgacctcgtgatccacccactttggcctcccaaagtgctgggattacaggcgtgaactactgtgcctggctgcccccatcctttcaatgggggactgaaccatatggcttgcatacacccctcctgccttattgctctcatctttatcagggtcactcctaaaggtggcctcataagtggaatacagtatttcaggtgtggattggtgtatggtaaatgaatcacttcctgagatctgtaccctacacgtcaatcgcaaagccagttttatgttgacttttctagaagacaaacagtgcaggcaaatattgaggttcaggttaatgaaaaccacgaggtctttttccatggatgataaccaggtacaattgctatttcgatttttttagggaccattcattagaaaggcactagttgtcctgccgtgtgttctgagcagaacgatctcttatcttctctggaatattcagttggttggagacacctggtagagtgggacagctggccggctattgacaggatgttgggaggacatgaaattttataggacccctctcctctgcagtttcctccgagtcagtcctacgtgctctgggtgtaaggaaagaattgtgttaccaggggcccaactcctctgctgaaggagtgggtcctgtagatggagggcgagggggtcccgtagatggagggcgagggggtcccgtagatggagggcgagggggtcccgtagatggarggcgagggggtcccgtagatggagggcgagggggtcccgtagatggagggcgagggggtcccgtagatggagggcgagggggtcccgtagatggagggcgagggggtcccgtagatggagggcgagggggtcccgtagatggagggtgagggagtcctgtagat

SEQ ID NO: 69841 - DNA, 970 bp, Homo sapiens
tttttttttttttttttttttttagtagagacgggattccaccatgttgatcaggctgatctagaactcctgacctcgtgatccacccactttggcctcccaaagtgctgggattacaggcgtgaactactgtgcctggctgcccccatcctttcaatgggggactgaaccatatggcttgcatacacccctcctgccttattgctctcatctttatcagggtcactcctaaaggtggcctcataagtggaatacagtatttcaggtgtggattggtgtatggtaaatgaatcacttcctgagatctgtaccctacacgtcaatcgcaaagccagttttatgttgacttttctagaagacaaacagtgcaggcaaatattgaggttcaggttaatgaaaaccacgaggtctttttccatggatgataaccaggtacaattgctatttcgatttttttagggaccattcattagaaaggcactagttgtcctgccgtgtgttctgagcagaacgatctcttatcttctctggaatattcagttggttggagacacctggtagagtgggacagctggccggctattgacaggatgttgggaggacatgaaattttataggacccctctcctctgcagtttcctccgagtcagtcctacgtgctctgggtgtaaggaaagaattgtgttaccaggggcccaactcctctgctgaaggagtgggtcctgtagatggagggcgagggggtcccgtagatggagggcgagggggtcccgtagatggagggcgagggggtcccgtagatggaaggcgagggggtcccgtagatggagggcgagggggtcccgtagatggagggcgagggggtcccgtagatggagggcgagggggtcccgtagatggagggcgagggggtcccgtagatggagggcgagggggtcccgtagatggagggygagggagtcctgtagat

SEQ ID NO: 69842 - DNA, 828 bp, Homo sapiens
tttttctaggcctaggaatggatacataagtgaacaaagcaaagattctggttcttgtagagtttccattaaaagaccatttagtaaaacttttcttcccccaaattataaaatctgtaagatgatttaacaacatgtgtaaaagtcattgtgggccaggcacggtggctcataccaggtgtggtgactcatagcactctgtcacccaggctggagtgcagtggcacaatctctgctcactgcaacctctgcctcctgggtacaagcgattctcctgcctcagctttctgagtagcaaggactacagatgcacaccatcacgcctsgctaatttttgtactattagtacagacggagtttcaccatgttggccaggctggtctcgaactcctgacctcaaatgatccgcccacctcggcctcccaaagtgctggaattacagatgtgagccacaatgcccggccttattttctacaactttggtaactttagcatataccccaaatctgtaagacataatattataattcaaatgcaactcatggcttctcattgtactctttctctagcttttgaattatttattctaataccagttttaattctgacacaaaagcatgggagttctaatcaaaatccaaccttttatcataaaaactatgaagaaattatgagtagaatttaaaaaggaaaataggcctattaattagatttgtctttgtagcatttaactctataataaataacataatattttatgcctatgagtccccaacaaagcctccagcttctatttagatataaaatgtaaaagtcactactggatcc

SEQ ID NO: 69843 - DNA, 828 bp, Homo sapiens
tttttctaggcctaggaatggatacataagtgaacaaagcaaagattctggttcttgtagagtttccattaaaagaccatttagtaaaacttttcttcccccaaattataaaatctgtaagatgatttaacaacatgtgtaaaagtcattgtgggccaggcacggtggctcataccaggtgtggtgactcatagcactctgtcacccaggctggagtgcagtggcacaatctctgctcactgcaacctctgcctcctgggtacaagcgattctcctgcctcagctttctgagtagcaaggactacagatgcacaccatcacgcctggctaatttttgtactattagtacagacggagtttcaccatgttggccaggctggtctcraactcctgacctcaaatgatccgcccacctcggcctcccaaagtgctggaattacagatgtgagccacaatgcccggccttattttctacaactttggtaactttagcatataccccaaatctgtaagacataatattataattcaaatgcaactcatggcttctcattgtactctttctctagcttttgaattatttattctaataccagttttaattctgacacaaaagcatgggagttctaatcaaaatccaaccttttatcataaaaactatgaagaaattatgagtagaatttaaaaaggaaaataggcctattaattagatttgtctttgtagcatttaactctataataaataacataatattttatgcctatgagtccccaacaaagcctccagcttctatttagatataaaatgtaaaagtcactactggatcc

SEQ ID NO: 69844 - DNA, 828 bp, Homo sapiens
tttttctaggcctaggaatggatacataagtgaacaaagcaaagattctggttcttgtagagtttccattaaaagaccatttagtaaaacttttcttcccccaaattataaaatctgtaagatgatttaacaacatgtgtaaaagtcattgtgggccaggcacggtggctcataccaggtgtggtgactcatagcactctgtcacccaggctggagtgcagtggcacaatctctgctcactgcaacctctgcctcctgggtacaagcgattctcctgcctcagctttctgagtagcaaggactacagatgcacaccatcacgcctggctaatttttgtactattagtacagacggagtttcaccatgttggccaggctggtctcgaactcctgacctcaaatgatccgcccacctcggcctcccaaagtgctggaattacagatgtgagccacaatgcccggccttattttctacaactttggtaactttagcatataccccaaatctgtaagacataatattataattcaaatgcaaytcatggcttctcattgtactctttctctagcttttgaattatttattctaataccagttttaattctgacacaaaagcatgggagttctaatcaaaatccaaccttttatcataaaaactatgaagaaattatgagtagaatttaaaaaggaaaataggcctattaattagatttgtctttgtagcatttaactctataataaataacataatattttatgcctatgagtccccaacaaagcctccagcttctatttagatataaaatgtaaaagtcactactggatcc

SEQ ID NO: 69845 - DNA, 828 bp, Homo sapiens
tttttctaggcctaggaatggatacataagtgaacaaagcaaagattctggttcttgtagagtttccattaaaagaccatttagtaaaacttttcttcccccaaattataaaatctgtaagatgatttaacaacatgtgtaaaagtcattgtgggccaggcacggtggctcataccaggtgtggtgactcatagcactctgtcacccaggctggagtgcagtggcacaatctctgctcactgcaacctctgcctcctgggtacaagcgattctcctgcctcagctttctgagtagcaaggactacagatgcacaccatcacgcctggctaatttttgtactattagtacagacggagtttcaccatgttggccaggctggtctcgaactcctgacctcaaatgatccgcccacctcggcctcccaaagtgctggaattacagatgtgagccacaatgcccggccttattttctacaactttggtaactttagcatataccccaaatctgtaagacataatattataattcaaatgcaackcatggcttctcattgtactctttctctagcttttgaattatttattctaataccagttttaattctgacacaaaagcatgggagttctaatcaaaatccaaccttttatcataaaaactatgaagaaattatgagtagaatttaaaaaggaaaataggcctattaattagatttgtctttgtagcatttaactctataataaataacataatattttatgcctatgagtccccaacaaagcctccagcttctatttagatataaaatgtaaaagtcactactggatcc

SEQ ID NO: 69846 - DNA, 828 bp, Homo sapiens
tttttctaggcctaggaatggatacataagtgaacaaagcaaagattctggttcttgtagagtttccattaaaagaccatttagtaaaacttttcttcccccaaattataaaatctgtaagatgatttaacaacatgtgtaaaagtcattgtgggccaggcacggtggctcataccaggtgtggtgactcatagcactctgtcacccaggctggagtgcagtggcacaatctctgctcactgcaacctctgcctcctgggtacaagcgattctcctgcctcagctttctgagtagcaaggactacagatgcacaccatcacgcctggctaatttttgtactattagtacagacggagtttcaccatgttggccaggctggtctcgaactcctgacctcaaatgatccgcccacctcggcctcccaaagtgctggaattacagatgtgagccacaatgcccggccttattttctacaactttggtaactttagcatataccccaaatctgtaagacataatattataattcaaatgcaactcatggcttctcattgtactctttctctagcttttgaattatttattctaataccagttttaattctgacacaaaagcatgggagttctaatcaaaatccaaccttttatcataaaaactatgaagaaattatgagtagaatttaaaaaggaaaataggcctattaattrgatttgtctttgtagcatttaactctataataaataacataatattttatgcctatgagtccccaacaaagcctccagcttctatttagatataaaatgtaaaagtcactactggatcc

SEQ ID NO: 69847 - DNA, 642 bp, Homo sapiens
actcctgaccttaagtgatccttccaccttggcctcccaaagcattggtattacaggcgtgagccactgcgcctggcctcatttatgatttttaaaggttcttagcaaactaagaaccaaagggcgcctctgtggccggaaacggtgtttgggcgtcaggcttcatgctgaaatgttgaaagcattcctctgaagatgaagagcaagaccaggatggcggctgccacctttatgcaaaccggggtgatgcaggctggtttttttgttagtttgtttttagatggtctcagtctgtcacccaggctgatgtgtggtggtgtgtccgtggctcactgcaaccaccacctcccaggcctgtgccatttgctgagtgtggagcgagttccatggattctggataggccatctgtgccccggcacaactcacagctgtgtggggaagaacgtgcttcctccatctttgggtctttgcttggtccggtgcagccacaaacgcgcatgcacatgcagcccctgctgagcttatccacccactsctgggctctgcttgtccactgagcacacctggggcgcgactcggcatggattcacatagggtggctggctgctcatggaccacgtgacatgccacagagcgtgtgg

SEQ ID NO: 69848 - DNA, 642 bp, Homo sapiens
actcctgaccttaagtgatccttccaccttggcctcccaaagcattggtattacaggcgtgagccactgcgcctggcctcatttatgatttttaaaggttcttagcaaactaagaaccaaagggcgcctctgtggccggaaacggtgtttgggcgtcaggcttcatgctgaaatgttgaaagcattcctctgaagatgaagagcaagaccaggatggcggctgccacctttatgcaaaccggggtgatgcaggctggtttttttgttagtttgtttttagatggtctcagtctgtcacccaggctgatgtgtggtggtgtgtccgtggctcactgcaaccaccacctcccaggcctgtgccatttgctgagtgtggagcgagttccatggattctggataggccatctgtgccccggcacaactcacagctgtgtggggaagaacgtgcttcctccatctttgggtctttgcttggtccggtgcagccacaaacgcgcatgcacatgcagcccctgctgagcttatccacccactgctgggctctgcttgtccactgagcacacctggggcgcgactcggcatggattcacatagggtggctggctgctcatggaccacgtgacaygccacagagcgtgtgg

SEQ ID NO: 69849 - DNA, 646 bp, Homo sapiens
ttgttaatttgttgtaacatctgccttggccccttgtcttcactacttttggcatctgacaatctcaaaacaatgaagctgggattaggtctcgttggatagctgtgaaacaaatgttcccagcatcatcaaattgcaattcttttctttcctttttttgagacagagtctcgctgtgttgtccaggctggagtgcaayggcgtgatctcggctcactgcaacctcctcctcccaggttcaagtgattctcctgcctcagcctcctgagtagctgggattgcaggcacgtgccatcacacccagctaatttttgtatttttagtagaggtggggtttcactatgttgttcaggctggtctccaactcatggccttgtgatccgcctgcctcagcctcccaaagtgctgggattacaggcgtgagccaccgcgcctggcaatcaaattgcatttcttagttaagcacccaccctagagttagttaatcatagctggagatattttctggccgtttggtatagccagcagattttgcagataaaatgcacagggcataatatggcatcatagcaaggccaactgtcttcacacccaaaggatatgggattttacaatatattttcactctgaatggaggttttgggat

SEQ ID NO: 69850 - DNA, 646 bp, Homo sapiens
ttgttaatttgttgtaacatctgccttggccccttgtcttcactacttttggcatctgacaatctcaaaacaatgaagctgggattaggtctcgttggatagctgtgaaacaaatgttcccagcatcatcaaattgcaattcttttctttcctttttttgagacagagtctcgctgtgttgtccaggctggagtgcaatggcgtgatctcggctcactgcaacctcctcctcccaggttcaagtgattctcctgcctcagcctcctgagtagctgggattgcaggcacgtgccatcacacccagctaatttttgtatttttagtagaggtggkgtttcactatgttgttcaggctggtctccaactcatggccttgtgatccgcctgcctcagcctcccaaagtgctgggattacaggcgtgagccaccgcgcctggcaatcaaattgcatttcttagttaagcacccaccctagagttagttaatcatagctggagatattttctggccgtttggtatagccagcagattttgcagataaaatgcacagggcataatatggcatcatagcaaggccaactgtcttcacacccaaaggatatgggattttacaatatattttcactctgaatggaggttttgggat

SEQ ID NO: 69851 - DNA, 441 bp, Homo sapiens
cgtctccccacaaaccagtatctctccgaggaggaggcgaaggagtgggaggaggcaacgagccgagagtcgagcttcgcgggcgcgcgcagcggctggagcgcgggggcgaggccgggccacctccccttcccggccgcgcactgcctggcccgcggcggttccaggcaccacccttcccgtccgggctgagcccgctgtggcagtgactagctcccgcggctagcggcactgtccaccgacgagcggcgccctcttctcccccttctccccacgatttccttctctgcggcggcacgccgtccagcagccygcttcgccccgtcgtcaactttgagctggaggagaagcaactttggcagtggccgcggggttggaatcccgcttctcctcggcagcagtaggctcgcaagtcgctggggttaggtggggcaagagttt

SEQ ID NO: 69852 - DNA, 1573 bp, Homo sapiens
caaagggcccgaccaacccctttccttccacatctcagtgatgagcgtggtgtgactgagcgcctactgcacaccgatgcccataagatgtggtcttcagcataggactccttgaacaggtaaaccagggtacggctacacgctccgctggagaatttctcactttacgaaaggagctgtgtgctcaggttcctacaccagtaagtacagggaatatgattgtgttttcagcttcatttcgactgactctaaacaatgtaaatctatgagctacaaaattccacctgtcaaaaattgcatttacatgcagtttttcaggaaggtgtctgttctataaattgaggtgtaccagtgctatgtgctaaggagtaaagaagagcaagaaaagaaagcgggtcctgacttctgcccgcagcactcccaggttaagggagaggtgcaggtaaggccatgggctcggtgggaatctgcacccctacagagcggtacagggagggtggcagggtgctaagcgcttctcggcaacaggactgtgcacaaggcctctgcctcttgtcttagctgctgtccagccttccagctctgtggctgggactcaagtacctgaacagygaatgggtgtgggggtgagccatgggcggaggcaggcgctgggagattgtgtcattagcaactgagtcaggaacagagggccagggagacagtgatagcatgggggtgcatctgaaatgctgacagaggcaaattccctcttctcttctacttaaaaggggtcggatccttcctccaaacaggcaattctcccttacctacttgctagctgccacagctcaaatgctaattattacataagggtcaaatggcagcccgacaacacctcttgaaaaacaaaatgccagggttataaaatatacaatatattttctcccctttggctgttttttttttttaataccttgaccagcacttctaattatttgagagaggagagggaagaaaggaaatcaaaagatctgcttcagaacgcagctctctcttcctctcctggggtgagcttgtctcctgtgagataacaagcatgaagagcatggcaggccgcacgcactccccagacaatggccaggcacaaaaaggaagcggctgcacgcaggaggcaggcaacctgctggcagcaaagggttaaagtccacagcatcctcccgcgccccgtctgcctttccgtgaaggatacaaagctcagtggggcagggaggaaactcccaccgggcccctattaaaacagatcaagtcacacatgtcgatagccccatttcatagatgctctaatttgtttgacaggagtgaatcctgctgatccaagtccggcaaggggatggggagggggggaaggtctgctggaaagggagacccagggagagcctggtggctttctgtatctggcctttataaaaaattcagccatgctttgaaaacagggtgtgtcccaagtagaatatcatccttaggcacatacgtatggtgtgtatgtacatacacagtgtattgttctgatctaactgtgagatgttaaaaa

SEQ ID NO: 69853 - DNA, 1586 bp, Homo sapiens
tggatcyatttttccctaagttgaaagagcacacccattacatataatgtttagcaatatgagttaagttttgtcataattcattaaagctgatttcaggggaaaaatacaagccttttttaagtcttatatttaataacaaatataacttcggattgctaaagaacattcttggcaagaggaaatgaaggagttatggaatagaagcccagtgatccaactggaggaagttttgattctaagaaagtctgggggttagcgggagtgcaggacaaccaagggcctgggtagcaacggtggggatgacgggagctatggaacctggctgaacaccgtgttctgctcagcaagaatgtgctgcttaaagaacatccagagcactgaccaaaacagatgccaggtctagacggcaggatgaggtgaaagtccaggaacagaggacaacggcaggcccctcaggcaggagagaatataagtcaaagatgcatttttaagagaacttggagaaagggggttttgtaagagacgacagagaaatgaagttgccaggacatctccgctccaagaatagccagaggaacttggtctgaacatgcccttaagaatgactatgctagccaggcgcaatggctcacacctgtaatcccagcactttgggaggacgaggcgggcagatcacctgaagtcaggagtttgagagcaccgtgcccaacagggtctctactaaaaaatacaccaattagccgggtgtcgtgacgcacacctgtagtcccagttactcgcgaggctgaggcaggagaactgcttaaacccaggaggtggaagttgcagtgagctgagattgcaccactgcactccagcttgggcgacagagactccatttctccaaaaaaaaaaaaaaaaaaaaaaaaaaagagaatgactatgcactaacgtaagcctgcctagctgtagcgtcccagaacagctagcaaagttcagcactggtccactgtgtttgctatagtttgtactaggcctttttccttaatctttgcttttgctctgatctaattcagacatgatcatcagtttaaaaataagtggagctgaatttttgtaggtttctgtttctcaatctaatatcctgcatgaggagtggttccttacctcctaccctcccacccctcaaagatctgacctaaggtgggacatgaaatcagaaaaactaaaatgtctgtgacttttgaggatggaaaagattgtactggggattaatccagagaaacctacacatgaggcgaaagttgctggaaataatttggaaagaactgggcttagtactcaggagaggatttaaaaatggttcaggtggcaagagatctcctgcatgttgtaatcattttgcagcgaccaaatgactaggacatgggagaaaaaaaggggagaaccccccaccctgcccccacagtgaatacagtttgagtctgtaatcctggacctgaaaggccaggagaaggagctacccaggcagcacagaagcctggaatgtgtgcccccactcccggcagaagccacactgtggggcagaaacactcaacccttcc

SEQ ID NO: 69854 - DNA, 1586 bp, Homo sapiens
tggatccatttttccctaagttgaaagagcacacccattacatataatgtttagcaatatgagttaagttttgtcataattcattaaagctgatttcaggggaaaaatacaagccttttttaagtcttatatttaataacaaatataacttcggattgctaaagaacrttcttggcaagaggaaatgaaggagttatggaatagaagcccagtgatccaactggaggaagttttgattctaagaaagtctgggggttagcgggagtgcaggacaaccaagggcctgggtagcaacggtggggatgacgggagctatggaacctggctgaacaccgtgttctgctcagcaagaatgtgctgcttaaagaacatccagagcactgaccaaaacagatgccaggtctagacggcaggatgaggtgaaagtccaggaacagaggacaacggcaggcccctcaggcaggagagaatataagtcaaagatgcatttttaagagaacttggagaaagggggttttgtaagagacgacagagaaatgaagttgccaggacatctccgctccaagaatagccagaggaacttggtctgaacatgcccttaagaatgactatgctagccaggcgcaatggctcacacctgtaatcccagcactttgggaggacgaggcgggcagatcacctgaagtcaggagtttgagagcaccgtgcccaacagggtctctactaaaaaatacaccaattagccgggtgtcgtgacgcacacctgtagtcccagttactcgcgaggctgaggcaggagaactgcttaaacccaggaggtggaagttgcagtgagctgagattgcaccactgcactccagcttgggcgacagagactccatttctccaaaaaaaaaaaaaaaaaaaaaaaaaaagagaatgactatgcactaacgtaagcctgcctagctgtagcgtcccagaacagctagcaaagttcagcactggtccactgtgtttgctatagtttgtactaggcctttttccttaatctttgcttttgctctgatctaattcagacatgatcatcagtttaaaaataagtggagctgaatttttgtaggtttctgtttctcaatctaatatcctgcatgaggagtggttccttacctcctaccctcccacccctcaaagatctgacctaaggtgggacatgaaatcagaaaaactaaaatgtctgtgacttttgaggatggaaaagattgtactggggattaatccagagaaacctacacatgaggcgaaagttgctggaaataatttggaaagaactgggcttagtactcaggagaggatttaaaaatggttcaggtggcaagagatctcctgcatgttgtaatcattttgcagcgaccaaatgactaggacatgggagaaaaaaaggggagaaccccccaccctgcccccacagtgaatacagtttgagtctgtaatcctggacctgaaaggccaggagaaggagctacccaggcagcacagaagcctggaatgtgtgcccccactcccggcagaagccacactgtggggcagaaacactcaacccttcc

SEQ ID NO: 69855 - DNA, 1586 bp, Homo sapiens
tggatccatttttccctaagttgaaagagcacacccattacatataatgtttagcaatatgagttaagttttgtcataattcattaaagctgatttcaggggaaaaatacaagccttttttaagtcttatatttaataacaaatataacttcggattgctaaagaacattcttggcaagaggaaatgaaggagttatggaatagaagcccagtgatccaactggaggaagttttgattctaagaaagtctgggggttagcgggagtgcaggacaaccaagggcctgggtagcaacggtggggatgacgggagctatggaacctggctgaacaccgtgttctgctcagcaagaatgtgctgcttaaagaacatccagagcactgaccaaaacagatgccaggtctagacggcaggatgaggtgaaagtccaggaacagaggacaacggcaggcccctcaggcaggagagaatataagtcaaagatgcatttttaagagaacttggagaaagggggttttgtaagagacsacagagaaatgaagttgccaggacatctccgctccaagaatagccagaggaacttggtctgaacatgcccttaagaatgactatgctagccaggcgcaatggctcacacctgtaatcccagcactttgggaggacgaggcgggcagatcacctgaagtcaggagtttgagagcaccgtgcccaacagggtctctactaaaaaatacaccaattagccgggtgtcgtgacgcacacctgtagtcccagttactcgcgaggctgaggcaggagaactgcttaaacccaggaggtggaagttgcagtgagctgagattgcaccactgcactccagcttgggcgacagagactccatttctccaaaaaaaaaaaaaaaaaaaaaaaaaaagagaatgactatgcactaacgtaagcctgcctagctgtagcgtcccagaacagctagcaaagttcagcactggtccactgtgtttgctatagtttgtactaggcctttttccttaatctttgcttttgctctgatctaattcagacatgatcatcagtttaaaaataagtggagctgaatttttgtaggtttctgtttctcaatctaatatcctgcatgaggagtggttccttacctcctaccctcccacccctcaaagatctgacctaaggtgggacatgaaatcagaaaaactaaaatgtctgtgacttttgaggatggaaaagattgtactggggattaatccagagaaacctacacatgaggcgaaagttgctggaaataatttggaaagaactgggcttagtactcaggagaggatttaaaaatggttcaggtggcaagagatctcctgcatgttgtaatcattttgcagcgaccaaatgactaggacatgggagaaaaaaaggggagaaccccccaccctgcccccacagtgaatacagtttgagtctgtaatcctggacctgaaaggccaggagaaggagctacccaggcagcacagaagcctggaatgtgtgcccccactcccggcagaagccacactgtggggcagaaacactcaacccttcc

SEQ ID NO: 69856 - DNA, 1003 bp, Homo sapiens
aaagttgagccaacacctgtgactgaggtgacctctggggaagcagaaacatgactcaggatttctgagccttgtgagttcaaaggctgtgtctttctacaggcctcagtgtctggcccgtctcaccttggttcctctttctgtctcctgaagctcaggaaatccctcacacctggaggctcaggcccattttccatcctgagctaattctggagcgctttacatattcagtcatcatctgtttatatattcattcactcagcacattggtgccataccatttgttaagtattttggatattgccttgtatttaatcaccaaaaaatcctatgatagaggtattatctgtaaaatgtccccattttacagaaaggaaactgaggcataaagaggtaagataacttgctcaaggtcatacaggtaataagtagtgtgggattcagacctgggttatctgagtccagctcctgctcttaagctccaggctgtggcaccccatcttgtgaactgcctggagaaggactggcctttcaggtgggkggaaccttgcagaaattgagatgtttttcagtttgtttcccacctggacctactctttaagagtccattgttgagaatacaccccattcacggccactggtgggattttgttccatgcacacacttcttaagtgcatgcagttcttccttgtgtgactcccctctattgagaagttaagaacacagttacagcctgggtgagacttagcatctggaggtagccaacaccaagcacacatccctgatgatctctagaattgaccaaggaagcttaactgatcatcagtatggtggctgccatgctttaggatttaacatcctgtaaaattgggcataccttcccaagatgccaatggcctttctcaaagcagattgcccctcacaggcatgggcatcgttttcctaacgtgtcaacacctgtgtgcacagtaggacttcaagtgacatttgttgggtgtcatg

SEQ ID NO: 69857 - DNA, 1414 bp, Homo sapiens
tgcatctatctgtccatccatccatctatccatccatctagtaagattgagtgcctcctatatgcctgacactgtgctgggcttgaagttacagagatgaataagacacagtatctaccttccagatgtcacaatgaaccgaaaaaacacaagaaaaccagttgattacattgtagagctctgtcttctagtgtcctttcattcaggcccagctgaactcttccttccttcaccaatgaggccttctttgaccatcccatcgagaaaagccctctccatgcctttctaatccttgaccagggttaatttcactctatggtatatatcactcctggcatcgtaacatgtttatttgtattttatcttcccccactagaatgtaaggtctgagaggagggacattgttttgttcagggctgtatcattattgtccgaaacgatacctagtatggagaagataattaatatttgttgaaaacatgaataaataaatgaagtgctataaaagagggatatattaaatatggtgctgctgaccttgtatctcctaacatagcagtgagcagaaaaagcaatattcacatagaatctcctgggaacagtgtaagggagatgattaaagtaatgttattatagtaagaaaatgtaatatatgtttaccaggttaaattttttaattttaaattacaaaatatttcagacaaacagaaaagtgcatcaaatggtcatatatacctttaacgtgtatttttgttttctttttcttacatacacacacacaaaacaaaagacttccctgaaggttttatagtgcttgattcccgtgattcaaagcagcaatacttagtaacaagcagcccttgatcacttaaaaactatagaagtcgtgtctaaagagtcaaagaataacccctatccctggcttggtgaaactgtacctggggccctcctagaacacatgacttgctcatcctctggcattcttattagcaaatattacctccatatggatgatggatggagtgctgtgcagcaggaagtgatgttagcagtgtgacaactaaaactcagtgtctttggaactgatctcctctgaagcactgatctcctttgatgtagaaagccaaggaagagtgtctcacctattccttttccaaagatagtccatctttagcttttgctgcaaatgacccccaaactcycgtgacataaagtaacaattatgtatttagaccaaaagtttctgagttggcagtgtgatctgggctcagctgggcagtccttctcatctccaagaggtcactcatgcatttacagtcagctgaagttggctgagggcaggctggcctagaatggccttagccggaacggctggtcactgcctctagcaggccagtccaggcttgtttacatg

SEQ ID NO: 69858 - DNA, 545 bp, Homo sapiens
tatatttccttcagtaggaaaaatagacactagcattatgaaacattatgaaataagttgtttttgatactttgagctgaagttttattatatagatgtgttgactgaaatggcctttatagtataattcttcaaaatccaggaaacattgtgaaatttcaatatactgaaatttgttcaatatatattggacactggcctaaataatgaattctgtttgcattccagaagatctaaaaataaagaaaaataagcctcacattgaaggaacttaatttttctggtaggttaaaaaaaacagtaacagtaactaaggaatcatatttcttgatgatttaattaatagaatttctcagttaatgttawctctgtcaatattgtattaacatgtatttttttttccttgagttggttattctgaggaaaattctacaaaagacttcataaatccaggaaaaatccactcactctgaaagtgcccattccttcaggtttcctttactgttagtgccacttgagctgtgcaggtgcttttaggaagtatt

SEQ ID NO: 69859 - DNA, 785 bp, Homo sapiens
acagaatactactcagcaacaaaaagaaatgatcatacatgcaacaacatagatggctttttaagtagttatactaagtaaaagacaccagatttgaaaacagaatacatactgcataattccatttatatacaaatctagaaaatgcaaactaatctatataatcaatagcaacagaaagcaaatcaatggctgcctgggacagactggggatagcatgaagaggcaggaagaaggagttacaacagagaacgaagaaatttttgagggtaatggttcattatgttgattatggtgatgggttcacaggctcaaatgtcacacttagccagttgaatatttgaacatgtacagttttttctacgtcatttatatcttaataaagctgtttttaaatgttcttctgtttattcctatgatgacatttttattttaataagtgtaaacaaatgctacttcactatgcagaatcattgatttacttctctatttctctcaccatattctaggttccttgagggcaacaacctccatgaagtctttcctgggcacatgctttctccactcttgtaccccatctccttgctctggagtagggcatgactccattctctgtgctcctgtttccaggtaggtcatggagtggagtggaaarcacaaaggcttggaggtcaaaatgatgcaggtttcaccctccgctctgctgctgttcagttgtgtgtccttgggcgtggcatataatttttctgaacccactttgctagggcataaaagagggaagctat

SEQ ID NO: 69860 - DNA, 1095 bp, Homo sapiens
attagacctggacatttaaattcatccccaaaaggatatagcttatgctctgatactctactcccaccaaccattatcagtaattttcaaattatggactgctctctatcagtagataataaaatcagcttactgggttatagccaacaattttatgttaataaaatagaataggaaaattagacttaatcagtggtagtaagatgagagactgtgtgtgtgtgtgtgtgtgtgtgtgtgtgtttgcacgcataatgtaaagtgtatttttttactgtgtgtcacagtcaaaccagcatacagcacctggatatcaaccccttactggaaagagcagagagacaacatgagcaaagaactggaaaaacaggtttccttcatgarcttctaaaagcaaaatgaggaagaaattaagccctcttgtggcccaacagatgggctggagcttctggttaccctctcccctactcacatcccccactccccctacccattatggctcaatcagaagccacatcccataaatctcacaagaatgaagaaaagctgatttgtgctgcacagatttgtgcctcggacaaagatgccaatctggtggatggattccccttagcagtgaaaaaagaggctgagcgatttggagatcctattccttggcacagttttcactgaggtccccattctctacaaaaattattttccttttctccccaaggtgtgttcatggtagctcccagtcatgcttggcttcaaatgcacaaaaaatctaaacaggaattaaccaaacctccaaacagtactgatgtgaactttaatgtaaacactaagtcataatcccacctttgtcactatatcccaatacctccaaagttaaatacagaggcaaggtagcataagagttaagagattggggccaaaagtcaaattgacctcaattgaaccaagccccatcatttcctgaccttggaaagttacttatgattatctaagactcagttttctcacccataaaatggaggcaataatattatagcacctatcccagaggagttaataaaaattaaataagtgtgtaaagcatttatctcagtgcca

SEQ ID NO: 69861 - DNA, 1201 bp, Homo sapiens
cttaaattgcaaatattgatattctataggtctaattcattgactaaaaatttaacaaaattttaaactaacaaatgagagttcaaaatatgtctagcctaaatattctaaaacacactttaaattattcttgggtttgaagaagaaatcagaaagaaattaccaagtgctttgagtgaaatgacaatgatagttctaaatattaaacctgtgtgargaagtcaaagtagctttctgataaataaattgaattttttgaaatgattgcaaatatttgaacaaaagcttctatccagaattagccaaactcaaactcaagggtaagggtgcagtcctctagaatgccaattttccccatgattttcactccagctgtaaggaattaaagtcaaacagaaagtgagaggcaagagtccatacaagattaccctcacatcagatgccaaatgcaaattcagggtttctccaaatcaccctccgttttgatgattcactaaaaagactcacagaacttagtgaaagctaatgtcacacctactgtagaggagtgaaagtacaaattgtttctcacaaggaatgagtgccactcttcagtttttaagcagagaaggaacatgctggatctgtattttggacaggtaactgtgtcatacatagagtttggactggggagggaagatgaaagcaggaagacaagttgattagagtctgaactagtggagataaaacaggaatatttgcttgcttacttttaaacatgtgatggtatttaaatgtagtttatctgagttaatttctctgcttttaaaattaattttagttatcctgcattttcctattagcataatttgatctaattgcatgtttaatgtaaatagctttaatcacataattggtatgtgttaatgacataattttactgatgtaataaaatctttaaaaggcatggctaaacataagcctatcacacagcagggatgtgctccttgaggtcagagactgtgggaaatggaaggaagcatatattatccagttcaacccactcattttaacaagtgacattttaccaaatattacagaatggtcatttgtgtaccatctgctaaatccattaaaaaaatctcaatacacaaagtaggattaatttgttaaaagacaaaaggaacaaggcctttaaggaatgtactaggtgaggaagatt

SEQ ID NO: 69862 - DNA, 1201 bp, Homo sapiens
cttaaattgcaaatattgatattctataggtctaattcattgactaaaaatttaacaaaattttaaactaacaaatgagagttcaaaatatgtctagcctaaatattctaaaacacactttaaattattcttgggtttgaagaagaaatcagaaagaaattaccaagtgctttgagtgaaatgacaatgatagttctaaatattaaacctgtgtgaggaagtcaaagtagctttctgataaataaattgaattttttgaaatgattgcaaatatttgaacaaaagcttctatccagaattagccaaactcaaactcaagggtaagggtgcagtcctctagaatgccaattttccccatgattttcactccagctgtaaggaattaaagtcaaacagaaagtgagaggcaagagtccatacaagattaccctcacatcagatgccaaatgcaaattcagggtttctccaaatcaccctccgttttgatgattcactaaaaagactcacagaacttagtgaaagctaatgtcacacctactgtagaggagtgaaagtacaaattgtttctcacaaggaatgagtgccactcttcagtttttaagcagagaaggaacatgctggatctgtattttggacaggtaactgtgtcatacrtagagtttggactggggagggaagatgaaagcaggaagacaagttgattagagtctgaactagtggagataaaacaggaatatttgcttgcttacttttaaacatgtgatggtatttaaatgtagtttatctgagttaatttctctgcttttaaaattaattttagttatcctgcattttcctattagcataatttgatctaattgcatgtttaatgtaaatagctttaatcacataattggtatgtgttaatgacataattttactgatgtaataaaatctttaaaaggcatggctaaacataagcctatcacacagcagggatgtgctccttgaggtcagagactgtgggaaatggaaggaagcatatattatccagttcaacccactcattttaacaagtgacattttaccaaatattacagaatggtcatttgtgtaccatctgctaaatccattaaaaaaatctcaatacacaaagtaggattaatttgttaaaagacaaaaggaacaaggcctttaaggaatgtactaggtgaggaagatt

SEQ ID NO: 69863 - DNA, 1201 bp, Homo sapiens
cttaaattgcaaatattgatattctataggtctaattcattgactaaaaatttaacaaaattttaaactaacaaatgagagttcaaaatatgtctagcctaaatattctaaaacacactttaaattattcttgggtttgaagaagaaatcagaaagaaattaccaagtgctttgagtgaaatgacaatgatagttctaaatattaaacctgtgtgaggaagtcaaagtagctttctgataaataaattgaattttttgaaatgattgcaaatatttgaacaaaagcttctatccagaattagccaaactcaaactcaagggtaagggtgcagtcctctagaatgccaattttccccatgattttcactccagctgtaaggaattaaagtcaaacagaaagtgagaggcaagagtccatacaagattaccctcacatcagatgccaaatgcaaattcagggtttctccaaatcaccctccgttttgatgattcactaaaaagactcacagaacttagtgaaagctaatgtcacacctactgtagaggagtgaaagtacaaattgtttctcacaaggaatgagtgccactcttcagtttttaagcagagaaggaacatgctggatctgtattttggacaggtaactgtgtcatacatagagtttggactggggagggaagatgaaagcaggaagacaagttgattagagtctgaactagtggagataaaacaggaatatttgcttgcttacttttaaacatgtgatggtatttaaatgtagtttatctgagttaatttctctgcttttaaaattaattttagttatcctgcattttcctattagcataatttgatctaattgcatgtttaatgtaaatagctttaatcacataattggtatgtgttaatgacataattttactgatgtaataaaatctttaaaaggcatggstaaacataagcctatcacacagcagggatgtgctccttgaggtcagagactgtgggaaatggaaggaagcatatattatccagttcaacccactcattttaacaagtgacattttaccaaatattacagaatggtcatttgtgtaccatctgctaaatccattaaaaaaatctcaatacacaaagtaggattaatttgttaaaagacaaaaggaacaaggcctttaaggaatgtactaggtgaggaagatt

SEQ ID NO: 69864 - DNA, 1686 bp, Homo sapiens
tgtttacacttctagtgtccatctcatgaggtgagaaactcatcagcttctgcttagtttgttgaagtaggtatgttttaactttatcattatctttttctgttaatatactatgtagcaataactttgcacatggtgatctaaaaaaactagagaaaattttagtcacacaatacctttacaagtcacagggtcttaagttttataattagagatgtagccctttggatcttgaagcttttgagatgtctaaaagttttggctgacctgttttgatgtcctaatcacctctggtttcctgaccattcttcatacagctgtcagggtgatctctctttaatttgcatatttgatcatttcttttccagtttaagactctttggtcactcttcctttgaagaataaaattaaaactccattgtaatatccgcaacattttcatgttcttaccccaacttctttcgacatatttacctccatgtaccttatattctctccccattcatatatgtgtcctctgtcatctgccctaaatttcttctttattcattgatgtctttagaactggatctaagtgtcacaaattctggccagttgtgtagaggctgctcttctattacttttccactgtaatctgtctctattggtaagatacgctcattgaactattcagattccaaaatgggtctttaggagcttctgaagaagtagagaaagcttccaggccaatatatggttatactcatccatcttctctgaagtgtgcacacattggaatttattgatgttatctgattaaatattggagatcttacatatcaagtggacattatttaaactgtattcatttttatcaggggcttattatcatccttctttttgaagagaagagtattagtgtggaattaaaattaattgtctttccaaactaggtaatttggagagggtaggagctagtgcagtataaaataagtaaaacgaagtaatagaactatcatttgaatattataacatattagtttatacaaaacattaattttgtttatattttatttataatatagtgaaccacaaccataatgcattctttctctaatataattactataaaaaaacttaaattggtaatagaaggccaactacttgggacaatatcctactgatggatgagtaggagatgatgataaatgaatctcattctgaattctgtcaacgaaataaatcacttatgtcatyaatgttattaatatattaacattccactcaatcgatatacctctgacttgtcttcttgacttttacagggatgcctgttcattttattcatatttgttttgagctttatagggctgtaaaactattattaatcgtggtcacactctacatgggaaagttctttagctggcatcacttgttggggattggtctttgttttttgactgcatggtcagtcatccttgaggtgatgaaaacatatcgtctctgcaaaatggacacagttgctggaaaatatttgccacattgaacagtttctatttcttgatagtgtgtctgtaatatagacatgggaaatagttggcttacatagcagtagaaatagtcacatgtgaacagttgttgtatgaaagcaaaatggaggatactgaaaggtggatgttcccttcataacctacatctggaatggaa

SEQ ID NO: 69865 - DNA, 582 bp, Homo sapiens
ataaaataatagccagttaaatcaaaygatatgtaaaattgataatatgctaagtagagtttattccaggaataaaaggttggtttaagatttgaaaactaatataatttaataaattaataacataaagtataaaaataatattatatctcattaaatgaagaaaaatttttgacaaaattgaatttattcatgataaaaactccccacaaactaggaatataagaaaacttcttcaacccaatgagtggcatttataaagcatctacggttaaagtgagttattaaacacttttatttaaaaatggcaaatagttcaagaataacccttcttatcacttctacacaacaatatactggatggcatccccagtgaagtaaggcaagaaaagtgttatgtacacctgaaaggagacataaaaatgtctgtatttaagggtgacataaattttttagaagatgataaagaatctacaagtaaatttctagagctaactgtgtaaatacccaaggcttattcatatttgtttatgctggtagcaaatgaaaaataaaataaaatttacagaaaattgcatgaag

SEQ ID NO: 69866 - DNA, 926 bp, Homo sapiens
ctgagaatacaggaatttaaaatgtttagtaagaatgattatattatagttagaaaggaaaacctgttaagtgtaatgaaaagttgaactaaaaatttgtgcttaaattttgcattttgattttcagcctcttatgtgtgccgaagactcaagcataggtttattgtattataaacaaaacgaaatcaacctggaaaagattaatatctatgtgctgggaatattccctcctaaccarggtgtctagaagctgtatcaactgggagaatccagtgagtagatagtttgattacctagtttcggaagattaaatttaatagttctgctacgagaatatcatggaaaggcttcagagctttcttattttctttcttgatcaggtcattgcatctttattccctcatgatcttttttttaatcttcaattctttttcatcttgccgtccattttagcttcaaaggctgattcttatcttattccaaatatatttaccaagtaccattcatcaaaacaatgactacaaacctttcccatgtaagcgattatatagcttaaccaagaagacaaacagtaaaatgattatttgcttaaagttattttgaaagacacttaccttgtctcagctgagcacatttgctgatgcatgaggctggcagaggctgcggtgtgtggttctatcagcagcagcacccattctaagccaatagtctgtgtctttgatcatttgctgcaagttttggagtatcattgaagactgccttgaggtatgctctttggattatagtgccagcatgaaaagaatattttggtttgcctgtcaattggtggggcttctcccctccccataataagctgggactatgacaaattcctaccctgagtcaaacatccaaatctctacattctttgtagtgaacctcagaga

SEQ ID NO: 69867 - DNA, 926 bp, Homo sapiens
ctgagaatacaggaatttaaaatgtttagtaagaatgattatattatagttagaaaggaaaacctgttaagtgtaatgaaaagttgaactaaaaatttgtgcttaaattttgcattttgattttcagcctcttatgtgtgccgaagactcaagcataggtttattgtattataaacaaaacgaaatcaacctggaaaagattaatatctatgtgctgggaatattccctcctaaccagggtgtctagaagctgtatcaactgggagaatccagtgagtagatagtttgattacctagtttcggaagattaaatttaatagttctgctacgagaatatcatggaarggcttcagagctttcttattttctttcttgatcaggtcattgcatctttattccctcatgatcttttttttaatcttcaattctttttcatcttgccgtccattttagcttcaaaggctgattcttatcttattccaaatatatttaccaagtaccattcatcaaaacaatgactacaaacctttcccatgtaagcgattatatagcttaaccaagaagacaaacagtaaaatgattatttgcttaaagttattttgaaagacacttaccttgtctcagctgagcacatttgctgatgcatgaggctggcagaggctgcggtgtgtggttctatcagcagcagcacccattctaagccaatagtctgtgtctttgatcatttgctgcaagttttggagtatcattgaagactgccttgaggtatgctctttggattatagtgccagcatgaaaagaatattttggtttgcctgtcaattggtggggcttctcccctccccataataagctgggactatgacaaattcctaccctgagtcaaacatccaaatctctacattctttgtagtgaacctcagaga

SEQ ID NO: 69868 - DNA, 926 bp, Homo sapiens
ctgagaatacaggaatttaaaatgtttagtaagaatgattatattatagttagaaaggaaaacctgttaagtgtaatgaaaagttgaactaaaaatttgtgcttaaattttgcattttgattttcagcctcttatgtgtgccgaagactcaagcataggtttattgtattataaacaaaacgaaatcaacctggaaaagattaatatctatgtgctgggaatattccctcctaaccagggtgtctagaagctgtatcaactgggagaatccagtgagtagatagtttgattacctagtttcggaagattaaatttaatagttctgctacgagaatatcatggaaaggcttcagagctttcttattttctttcttgatcaggtcattgcatctttattccctcmtgatcttttttttaatcttcaattctttttcatcttgccgtccattttagcttcaaaggctgattcttatcttattccaaatatatttaccaagtaccattcatcaaaacaatgactacaaacctttcccatgtaagcgattatatagcttaaccaagaagacaaacagtaaaatgattatttgcttaaagttattttgaaagacacttaccttgtctcagctgagcacatttgctgatgcatgaggctggcagaggctgcggtgtgtggttctatcagcagcagcacccattctaagccaatagtctgtgtctttgatcatttgctgcaagttttggagtatcattgaagactgccttgaggtatgctctttggattatagtgccagcatgaaaagaatattttggtttgcctgtcaattggtggggcttctcccctccccataataagctgggactatgacaaattcctaccctgagtcaaacatccaaatctctacattctttgtagtgaacctcagaga

SEQ ID NO: 69869 - DNA, 1742 bp, Homo sapiens
atactgggagatgtgcatcactgggggtccatctgtaatatggctgccacacaaggaaatggacactaaatggtaaagttctgactcataacgtgtaaagttctgagactccctgccaagcaagccactcagaccagccaacaggatggccaagggtagaacaaatgtaaaatgggtgatgaaggagaaaggtgttgaatatcagtctcggtttgggcactagtcacagaagtgggtgcctttgtttgtttcacttaaccatcttcccttaaagccgtttagtgcttgaatctggcaaccattatgaggctgactctgactgattggtcttttacatcctttcttggggaaaaaatgaagagatgctataataaagaccattttcctgaatcactgtaaaataaaactggaaatgaattrttaatataacaatgtatatagagagtaataaatgtaaaaataatttaaatgataaaatttggcaatggaaattatgaaatatttagaaaggaataactgaaggcaccacatatcaaatcttgtggggtgcacttaaatggattaattagagacacatcatcttaattgcatttattaaattataagacagattttaaattaatgaactcaaatctaggataaaatagaacaagcctcaagaaaatagaagaaagtaaaaaagtgagcatgaatacaaacaaaacaaaaaaacaatagatatagttaataaaataaccatcacaaaattttttgagaaacataaattaagtagacaaacttcaataatttttataaagttgtaaaggtacaaataaacattagaacacaaaagatgatatctctgtaattactgtaaagatttacacaaataaaatatcacacataatattttgctaataatttgaaagcagataaaatgggcaaaatcctacaaaattatatactagtaaaaccaattcaaggagaaatagaaaatcttaatatacttaaaacagtttaataaattgactttttaaagtcaaaactcttagccttcaatgaagaaagtcaatacagatttctccccacacctccttccttacaaagatttcaaatacacaaaatgaaatcaaatacatttcttgatgcttaccttgctaaattccatgtcatatacaaggtcttttattgtcctcatgttcatttctttaaaattacttttcttttgtatgcctattcaatttccatcttcttcccatttacatgcatctagtattttgtgtttaatgtgtgtcctctcttttgatctttaatcatgtcttctgctgagtccatttgatttatcttaaatgttctaataatctatacatatgtataaaaatgtataaactactctttctaatatttttgtcaatttttcccccatgttacacactgttatcccaaaggtcttacctgataactccaatatctggataatcttgagttctacttctctcgactatttttaaacactcttcctcttacattttcttatttctttgcatatctggacattgtatataatttatatggaggttctattaactttgccaaaacatgagttttgtcctggcaggcagttaaattacctgtgaagcccttgaatctttaaaacttgctgttagattttgttaggactgatctatttcaattgtatttctacttctaggatatagccgctattcctagaatatgttcttaatcttagatgtggactttct

SEQ ID NO: 69870 - DNA, 1531 bp, Homo sapiens
gaatagcacttgtgacaacagcatagacggcttcattttgaggagtaaattacaattgaacatgaccaaatatacatagagaaggcgtggaccacacaaatgtgattgaaagctggcgtggagtcatcttaaattgactttttcccaaagggcccctaaaagagggtagaatcccaacagatagagtctatggagagatagactgctgagacccatattatggtcagtgaagtgcaggcaaggaagggatccttagcaaaatggggagaggaatggatggtctgaaaaaccctgaaggaactgaaacactctgcaaaggaaagaagaacaagtatcagctttgacccctgccagacctaggcagcaacaacggcagctcacaaagcaccagaacaaacgcgctttcttgtgcccctacatgtcttcccttcaccgtcttgaaccctggtgtcatcataaactgtgtaagttaacaactgaggaggggaagaatgataaattgggaaaatagaaaagtgtctgggccctactttcataccgtaggccagccttctgtagcatggcagattaggcaagtgcagaagccttaattttgaatgaaagttggagtttttgttctgctctggctgtacctatcagtttcaaaactggaatagtttaaatgactaaagtactaggaagattttattacttaatataactatggagaactgaccaagattttatctagggggaggagtatcaccctacagagcagactttaagggacattatgagagaaaacagttacttagtgatttaatgttgccaattctgttctttagaataccatcatgtatttatatccctatatatcacataactaaaatatacatttatctgtacgcgtgtgtatcatatggagcacattttcttttgcagggtttctttgttttaaatgtctatttggttattttcttgattgaatttctgtgtatgcttttttcctcaatgctttagctgtaagcgaataaggtaaggactttgtatgcaatattctacatgttttgttttataattagagaatatcttattttatctaaacctcgtgtatcacgtgatatatttgacaccctgtcatatatcatacttggatgcaaatgtttatgaaacacaaatcatctcaaatcaacaggatcaaaattatatttgaaaaatgtattcaataatatgtgtaagacaagataaaattaattctaattgaattcacacagcgtttgaaattggatgtaaatctgtaatatcaaattacattacatatgaattattattatatttgcattcaggaaattgtactgtgttcacttctgagtatcacttagaaagaacattagaacagataccctattttcactttctcttctcttttcctgctccttttcttcctcttttcaataacctgtcattgaaaaatctctccatcttaattatcaatatgaaagactgattctgagaaatgtagagaacctaagatttgcattttrgtggaata

SEQ ID NO: 69871 - DNA, 1531 bp, Homo sapiens
gaatagcacttgtgacaacagcatagacggcttcattttgaggagtaaattacaattgaacatgaccaaatatacatagagaaggcgtggaccacacaaatgtgattgaaagctggcgtggagtcatcttaaattgactttttcccaaagggcccctaaaagagggtagaatcccaacagatagagtctatggagagatagactgctgagacccatattatggtcagtgaagtgcaggcaaggaagggatccttagcaaaatggggagaggaatggatggtctgaaaaaccctgaaggaactgaaacactctgcaaaggaaagaagaacaagtatcagctttgacccctgccagacctaggcagcaacaacggcagctcacaaagcaccagaacaaacgcgctttcttgtgcccctacatgtcttcccttcaccgtcttgaaccctggtgtcatcataaactgtgtaagttaacaactgaggaggggaagaatgataaattgggaaaatagaaaagtgtctgggccctactttcataccgtaggccagccttctgtagcatggcagattaggcaagtgcagaagccttaattttgaatgaaagttggagtttttgttctgctctggctgtacctatcagtttcaaaactggaatagtttaaatgactaaagtactaggaagattttattacttaatataactatggagaactgaccaagattttatctagggggaggagtatcaccctacagagcagactttaagggacattatgagagaaaacagttacttagtgatttaatgttgccaattctgttctttagaataccatcatgtatttatatccctatatatcacataactaaaatatacatttatctgtacgcgtgtgtatcatatggagcacattttcttttgcagggtttctttgttttaaatgtctatttggttattttcttgattgaatttctgtgtatgcttttttcctcaatgctttagctgtaagcgaataaggtaaggactttgtatgcaatattctacatgttttgttttataattagagaatatcttattttatctaaacctcgtgtatcacgtgatatatttgacaccctgtcatatatcatacttggatgcaaatgtttatgaaacacaaatcatctcaaatcaacaggatcaaaattatatttgaaaaatgtattcaataatatgtgtaagacaagataaaattaattctaattgaattcacacagcgtttgaaattggatgtaaatctgtaatatcaaattacattacatatgaattattattatatttgcattcaggaaattgtactgtgttcacttctgagtatcacttagaaagaacattagaacagataccctattttcactttctcttctcttttcctgctccttttcttcctcttttcaataacctgtcattgaaaaatctctccatcttaattatcaatatgaaagactgattctgagaaatgtagagaacctaagatttgcattttggkggaata

SEQ ID NO: 69872 - DNA, 560 bp, Homo sapiens
gactgcttatttgcatggtgttttggtgtcaaaggagtgttgaatgtgttctccacacacccagctttattccactctaggagtttaacttcttcagcattgttatgaggtccccggtgacctcagtttctcctctccgcgtcatccaggacttcacctgaagcttgagctacacgtaagacttcatctaccttgcacagggcaatggagagaggtaagtttctgggaccagaggggtgttgtcttatcctcggtaragggagtgcagaggagggatggaaaggacaggagaggactgacttcagaaggggtcaactgggatcgttccaggcaaactagatttgtgtcactctgcttagctcccttcttacaaacggatgtgagaatacatcttcgccatcccttggcctgtgaggctggccccattactgaatgtgtggaactgagaggtgcactgagtagaagcagtaacaggcagcaggtgcttaactgttggctggctttttcttggctttttcctctcactcgttgaaggtgcaatgcctcatcttgatactgga

SEQ ID NO: 69873 - DNA, 560 bp, Homo sapiens
gactgcttatttgcatggtgttttggtgtcaaaggagtgttgaatgtgttctccacacacccagctttattccactctaggagtttaacttcttcagcattgttatgaggtccccggtgacctcagtttctcctctccgcgtcatccaggacttcacctgaagcttgagctacacgtaagacttcatctaccttgcacagggcaatggagagaggtaagtttctgggaccagaggggtgttgtcttatcctcggtagagggagtgcagaggagggatggaaaggacaggagaggactgacttcagaaggggtcractgggatcgttccaggcaaactagatttgtgtcactctgcttagctcccttcttacaaacggatgtgagaatacatcttcgccatcccttggcctgtgaggctggccccattactgaatgtgtggaactgagaggtgcactgagtagaagcagtaacaggcagcaggtgcttaactgttggctggctttttcttggctttttcctctcactcgttgaaggtgcaatgcctcatcttgatactgga

SEQ ID NO: 69874 - DNA, 2199 bp, Homo sapiens
tgcatactcatgaagtgaaattgctgaatcatatggtaatagaatcatagaatctatagaatcatttggtaaatgaatttaaagtaattttaatttttaatttttgagtaaccacccactgttttccataatagctacaccattttacattcccaccaacagtgctcaagggctccaatttccccacacccttgctgacactagcaattttttggtttttgggtcatagtcatcctaatgggtgtgaggtgatatctcactgtggttttgatatgaattttcctaacctagaaccagtcctgtagaggaagtggaagtacctctgcaaggtagagccaggcccagaggccaagatgaaggaattgagttcaagtcatagctttgaggttgactcctaacctgacacaaccccatcaacgtctcacttttctcaaccatgcaatcaaggatgctaacaccatcctacctctgttttctgtatcactactaagcagcattgcactaatttccaaggaaaacaaagctaataactttgttcccaagagccagagccatatgtaaacatgaggcactctgggcaacttgtcaaggatctacctaaacacccacagaacaaggcaggaccctgaagtcacatcccagctaacattatcagcagctcactctaaatctttcagtgacatctatattaaaatataatccactctgaacccagtacttaacagtttatctgcaccatgagcccaaccatatgtctccactttttgcctcttcaatggcttcaaacaaattcagaattttgagtttccactgtttcgttcttgtagctactaagacaataacagattaaataggatgaaccaagcagccatacttcttgtaaagttatccccagagataaatgtacaatgttgtttcagaggctgtggtggtgtctgcagtgtaactaaggttgacagactgcctgcatgtgggtggctgtctcctttccagctgtgaccagctgaattatatcacctgtcccatttgatgtattaggatatgcccaagctcaagatgcatgttgctgcaatagggaaattaatgtccaccactggaggcaattaataatgattaggagcaaaacagcagggttaaatctgtgcatttaagagagtgttcatacacttttatactatatttcagtctagttgctcaaaggaaaacagaaaatccttttgggggactagaacaatcttatcttaattaacatgtaaacttagatgaaatgtcaaaatcgcttcaatgagacatgcttattcattatttacttaatcctcccttcctggggttagagaaaaacattgcacaaaagtagcatagtgtggggagaaatgttaagactgagtcgagacgcttgtagaactcttgcacttattgaattgctgcattcagtccacggattgaggtgagtgagaaattcttgcctcttttattttactattctgcagttactatattataaaaaagcaggaaattggcaaaccatagatttgcaatgctcagtttagtgcaactccataaaatctgcctgtaaaatgcttagtggtaggtaactaacttacatttggcgactaaaatctggatgtaaatttgaataacagaaacctaagctgaacaagggattttccttcaaaggttcagaaaatattgaaaactgataggttataaatctgtcagtttaatgtacataaacatacacgcacctctcactaggcatttatgtcaccacgtgttagtgcagagcatatacaatacaaatatttattgatcagttattttattaggaaatttcattgaacagattcaaatataactggctgccagctggactttatagctcagagcagattatatacttaacctaagagataatgcaattctcattaattaaaaactatgagataaaggtcttggaaaacttcgaaccctattttattaygatggaatcaaaaagtaattccttctctgtgaatctgcaatggctactgtgactttgaagttctgttggcaacctgggctcatgagtccaaggccacctaagggcgtggcttccccttgcatttcccttccgttgtgctttcaagagtgtctcagtctgcatgaccctccaacagactcaattaaaagcgaaaaatgcagtcaattatcagttatttg

SEQ ID NO: 69875 - DNA, 2156 bp, Homo sapiens
taaaatcaaaataacgaaatattcctgatagagggaatctctttggtgcagttcattcttctagaccaggcaatgacataggctcctgacaagcctactgattggctgtcacggccatcgctgggtcatgtgatacccccttccaatcagggtgggacaggagcatatggaactaaacgaggctggaagtgggctgtggtaagggcagcttctcttggaagggtttttaggaatgtagacatcatcatggaaatgcctagttctttccacctcagccaaggacacaaatgtgggaaatgtctacttttcagggacacataggcaagagaggatttgagggaggtcaaaagagaactaaaataacaygatgctgagagggaaaggagacagtagagggaagaaattaaatatgaagagagatgagcaagttatctattgaataagcatttacccaatgactattattgcaggtgttgctctagtgctggggctacagcagtcaacaaggcaggtgggaccctgactttacagagctcatgctctgtgaggtgggaggcacggccaaggacgggcagagggagggacaggcattagtaagagttggtttagttgcaaatgataaaagacccaacataacaacagcttaaacaagttagactctcatctctttctaccataaaagaagtccagaaagacgtgagccagggctttcaggatccttactgtctgtgccctgctctcctgcgcatgaggctttcacctcagagtccaacatggctgcttcagttccagcaatcacattcatgttccagctgacagggaggagcgaaggggatagaatgagcgtgcctcctccttccaagcatgcttccacttatatccgataagccagagctgagtcatgtggccacacctcaggtcagggaggctgggacatgctgtcttgttctgggtgaacacatgcctggccaaaatccagggctctgcgaccagggaagaaggagaggatggctagcaggagacaccgggctgtctcaccacaggaagaagtcagaaaataagcaaaagaaagtggcatggagtaataagtggtttgctgaataaactccaatgtgaaagaaagtaacataagatgcagctcctccagatggagcgagtggttgggaacagcttctccactgaggtgagattttagctgagacctgaacaacaagaaggagccagccacagaaagatctggaggaagaacgttccaggcagaaaagaagtagtgtggaagccccgaggcaggagcaaaccggacttaggattgaaaggccgtcaccgctgtgcacggggaggaacagccgcaaagccatgtcctggggggtccaggaaggcaggagcatgggtggggcttattagtgctcctccttagagacatgcatgtgtgagtgtgcgtatgtgtgtgtgtgcgtgtgtgtaggaagcgacagacagaggcctcagtctcgctcaggtgtgttcatgtgttccaaacattccagatatagggtaccaaacagatgaacagagtagagagtcagggacagcactgtcatccacctgtcatgactatcattgtagtaaagatttctgtgactcggacctttgttccctctccccaccaacacccgctggagccccgtggtacctttgctgggggctccggccgttgggtggtggcggcactgcagcatctccatgcaatccttgtgggttctgattacagccttgctgtggcctcctggccttgtcctcatgctgttttaggctggaaactgggacttagatgattgttctggtcccaaggcagcttggccagagatggaggccattaagaagtgcacaatcatttcactcaggttcaggtggtgtccaactccaagaaagccaaattattttgcagctactatgtaatttaattctcacagcatcctaggaattgaacaaataggtattattcccaccgtacaggtggcaaaaagaattgaaacacagagaaagtaattgactgacctagggttaagaagcaagttgacagcatcacaggcctcgcttccactgtaagtgcttcgcctgctcggccatgcagcctcccaagtgagccgctcaggttgctaaagaaacagccaggg

SEQ ID NO: 69876 - DNA, 2156 bp, Homo sapiens
taaaatcaaaataacgaaatattcctgatagagggaatctctttggtgcagttcattcttctagaccaggcaatgacataggctcctgacaagcctactgattggctgtcacggccatcgctgggtcatgtgatacccccttccaatcagggtgggacaggagcatatggaactaaacgaggctggaagtgggctgtggtaagggcagcttctcttggaagggtttttaggaatgtagacatcatcatggaaatgcctagttctttccacctcagccaaggacacaaatgtgggaaatgtctacttttcagggacacataggcaagagaggatttgagggaggtcaaaagagaactaaaataacacgatgctgagagggaaaggagacagtagagggaagaaattaaatatgaagagagatgagcaagttatctattgaataagcatttacccaatgactattattgcaggtgttgctctagtgctsgggctacagcagtcaacaaggcaggtgggaccctgactttacagagctcatgctctgtgaggtgggaggcacggccaaggacgggcagagggagggacaggcattagtaagagttggtttagttgcaaatgataaaagacccaacataacaacagcttaaacaagttagactctcatctctttctaccataaaagaagtccagaaagacgtgagccagggctttcaggatccttactgtctgtgccctgctctcctgcgcatgaggctttcacctcagagtccaacatggctgcttcagttccagcaatcacattcatgttccagctgacagggaggagcgaaggggatagaatgagcgtgcctcctccttccaagcatgcttccacttatatccgataagccagagctgagtcatgtggccacacctcaggtcagggaggctgggacatgctgtcttgttctgggtgaacacatgcctggccaaaatccagggctctgcgaccagggaagaaggagaggatggctagcaggagacaccgggctgtctcaccacaggaagaagtcagaaaataagcaaaagaaagtggcatggagtaataagtggtttgctgaataaactccaatgtgaaagaaagtaacataagatgcagctcctccagatggagcgagtggttgggaacagcttctccactgaggtgagattttagctgagacctgaacaacaagaaggagccagccacagaaagatctggaggaagaacgttccaggcagaaaagaagtagtgtggaagccccgaggcaggagcaaaccggacttaggattgaaaggccgtcaccgctgtgcacggggaggaacagccgcaaagccatgtcctggggggtccaggaaggcaggagcatgggtggggcttattagtgctcctccttagagacatgcatgtgtgagtgtgcgtatgtgtgtgtgtgcgtgtgtgtaggaagcgacagacagaggcctcagtctcgctcaggtgtgttcatgtgttccaaacattccagatatagggtaccaaacagatgaacagagtagagagtcagggacagcactgtcatccacctgtcatgactatcattgtagtaaagatttctgtgactcggacctttgttccctctccccaccaacacccgctggagccccgtggtacctttgctgggggctccggccgttgggtggtggcggcactgcagcatctccatgcaatccttgtgggttctgattacagccttgctgtggcctcctggccttgtcctcatgctgttttaggctggaaactgggacttagatgattgttctggtcccaaggcagcttggccagagatggaggccattaagaagtgcacaatcatttcactcaggttcaggtggtgtccaactccaagaaagccaaattattttgcagctactatgtaatttaattctcacagcatcctaggaattgaacaaataggtattattcccaccgtacaggtggcaaaaagaattgaaacacagagaaagtaattgactgacctagggttaagaagcaagttgacagcatcacaggcctcgcttccactgtaagtgcttcgcctgctcggccatgcagcctcccaagtgagccgctcaggttgctaaagaaacagccaggg

SEQ ID NO: 69877 - DNA, 2156 bp, Homo sapiens
taaaatcaaaataacgaaatattcctgatagagggaatctctttggtgcagttcattcttctagaccaggcaatgacataggctcctgacaagcctactgattggctgtcacggccatcgctgggtcatgtgatacccccttccaatcagggtgggacaggagcatatggaactaaacgaggctggaagtgggctgtggtaagggcagcttctcttggaagggtttttaggaatgtagacatcatcatggaaatgcctagttctttccacctcagccaaggacacaaatgtgggaaatgtctacttttcagggacacataggcaagagaggatttgagggaggtcaaaagagaactaaaataacacgatgctgagagggaaaggagacagtagagggaagaaattaaatatgaagagagatgagcaagttatctattgaataagcatttacccaatgactattattgcaggtgttgctctagtgctggggctacagcagtcaacaaggcaggtgggaccctgactttacagagctcatgytctgtgaggtgggaggcacggccaaggacgggcagagggagggacaggcattagtaagagttggtttagttgcaaatgataaaagacccaacataacaacagcttaaacaagttagactctcatctctttctaccataaaagaagtccagaaagacgtgagccagggctttcaggatccttactgtctgtgccctgctctcctgcgcatgaggctttcacctcagagtccaacatggctgcttcagttccagcaatcacattcatgttccagctgacagggaggagcgaaggggatagaatgagcgtgcctcctccttccaagcatgcttccacttatatccgataagccagagctgagtcatgtggccacacctcaggtcagggaggctgggacatgctgtcttgttctgggtgaacacatgcctggccaaaatccagggctctgcgaccagggaagaaggagaggatggctagcaggagacaccgggctgtctcaccacaggaagaagtcagaaaataagcaaaagaaagtggcatggagtaataagtggtttgctgaataaactccaatgtgaaagaaagtaacataagatgcagctcctccagatggagcgagtggttgggaacagcttctccactgaggtgagattttagctgagacctgaacaacaagaaggagccagccacagaaagatctggaggaagaacgttccaggcagaaaagaagtagtgtggaagccccgaggcaggagcaaaccggacttaggattgaaaggccgtcaccgctgtgcacggggaggaacagccgcaaagccatgtcctggggggtccaggaaggcaggagcatgggtggggcttattagtgctcctccttagagacatgcatgtgtgagtgtgcgtatgtgtgtgtgtgcgtgtgtgtaggaagcgacagacagaggcctcagtctcgctcaggtgtgttcatgtgttccaaacattccagatatagggtaccaaacagatgaacagagtagagagtcagggacagcactgtcatccacctgtcatgactatcattgtagtaaagatttctgtgactcggacctttgttccctctccccaccaacacccgctggagccccgtggtacctttgctgggggctccggccgttgggtggtggcggcactgcagcatctccatgcaatccttgtgggttctgattacagccttgctgtggcctcctggccttgtcctcatgctgttttaggctggaaactgggacttagatgattgttctggtcccaaggcagcttggccagagatggaggccattaagaagtgcacaatcatttcactcaggttcaggtggtgtccaactccaagaaagccaaattattttgcagctactatgtaatttaattctcacagcatcctaggaattgaacaaataggtattattcccaccgtacaggtggcaaaaagaattgaaacacagagaaagtaattgactgacctagggttaagaagcaagttgacagcatcacaggcctcgcttccactgtaagtgcttcgcctgctcggccatgcagcctcccaagtgagccgctcaggttgctaaagaaacagccaggg

SEQ ID NO: 69878 - DNA, 2156 bp, Homo sapiens
taaaatcaaaataacgaaatattcctgatagagggaatctctttggtgcagttcattcttctagaccaggcaatgacataggctcctgacaagcctactgattggctgtcacggccatcgctgggtcatgtgatacccccttccaatcagggtgggacaggagcatatggaactaaacgaggctggaagtgggctgtggtaagggcagcttctcttggaagggtttttaggaatgtagacatcatcatggaaatgcctagttctttccacctcagccaaggacacaaatgtgggaaatgtctacttttcagggacacataggcaagagaggatttgagggaggtcaaaagagaactaaaataacacgatgctgagagggaaaggagacagtagagggaagaaattaaatatgaagagagatgagcaagttatctattgaataagcatttacccaatgactattattgcaggtgttgctctagtgctggggctacagcagtcaacaaggcaggtgggaccctgactttacagagctcatgctctgtgaggtgggaggcacggccaaggacgggcagagggagggacaggcattagyaagagttggtttagttgcaaatgataaaagacccaacataacaacagcttaaacaagttagactctcatctctttctaccataaaagaagtccagaaagacgtgagccagggctttcaggatccttactgtctgtgccctgctctcctgcgcatgaggctttcacctcagagtccaacatggctgcttcagttccagcaatcacattcatgttccagctgacagggaggagcgaaggggatagaatgagcgtgcctcctccttccaagcatgcttccacttatatccgataagccagagctgagtcatgtggccacacctcaggtcagggaggctgggacatgctgtcttgttctgggtgaacacatgcctggccaaaatccagggctctgcgaccagggaagaaggagaggatggctagcaggagacaccgggctgtctcaccacaggaagaagtcagaaaataagcaaaagaaagtggcatggagtaataagtggtttgctgaataaactccaatgtgaaagaaagtaacataagatgcagctcctccagatggagcgagtggttgggaacagcttctccactgaggtgagattttagctgagacctgaacaacaagaaggagccagccacagaaagatctggaggaagaacgttccaggcagaaaagaagtagtgtggaagccccgaggcaggagcaaaccggacttaggattgaaaggccgtcaccgctgtgcacggggaggaacagccgcaaagccatgtcctggggggtccaggaaggcaggagcatgggtggggcttattagtgctcctccttagagacatgcatgtgtgagtgtgcgtatgtgtgtgtgtgcgtgtgtgtaggaagcgacagacagaggcctcagtctcgctcaggtgtgttcatgtgttccaaacattccagatatagggtaccaaacagatgaacagagtagagagtcagggacagcactgtcatccacctgtcatgactatcattgtagtaaagatttctgtgactcggacctttgttccctctccccaccaacacccgctggagccccgtggtacctttgctgggggctccggccgttgggtggtggcggcactgcagcatctccatgcaatccttgtgggttctgattacagccttgctgtggcctcctggccttgtcctcatgctgttttaggctggaaactgggacttagatgattgttctggtcccaaggcagcttggccagagatggaggccattaagaagtgcacaatcatttcactcaggttcaggtggtgtccaactccaagaaagccaaattattttgcagctactatgtaatttaattctcacagcatcctaggaattgaacaaataggtattattcccaccgtacaggtggcaaaaagaattgaaacacagagaaagtaattgactgacctagggttaagaagcaagttgacagcatcacaggcctcgcttccactgtaagtgcttcgcctgctcggccatgcagcctcccaagtgagccgctcaggttgctaaagaaacagccaggg

SEQ ID NO: 69879 - DNA, 2156 bp, Homo sapiens
taaaatcaaaataacgaaatattcctgatagagggaatctctttggtgcagttcattcttctagaccaggcaatgacataggctcctgacaagcctactgattggctgtcacggccatcgctgggtcatgtgatacccccttccaatcagggtgggacaggagcatatggaactaaacgaggctggaagtgggctgtggtaagggcagcttctcttggaagggtttttaggaatgtagacatcatcatggaaatgcctagttctttccacctcagccaaggacacaaatgtgggaaatgtctacttttcagggacacataggcaagagaggatttgagggaggtcaaaagagaactaaaataacacgatgctgagagggaaaggagacagtagagggaagaaattaaatatgaagagagatgagcaagttatctattgaataagcatttacccaatgactattattgcaggtgttgctctagtgctggggctacagcagtcaacaaggcaggtgggaccctgactttacagagctcatgctctgtgaggtgggaggcacggccaaggacgggcagagggagggacaggcattagtaagagttggtttagttgcaaatgataaaagacccaacataacaacagcttaaacaagttagactctcatctctttctaccataaaagaagtccagaaagacrtgagccagggctttcaggatccttactgtctgtgccctgctctcctgcgcatgaggctttcacctcagagtccaacatggctgcttcagttccagcaatcacattcatgttccagctgacagggaggagcgaaggggatagaatgagcgtgcctcctccttccaagcatgcttccacttatatccgataagccagagctgagtcatgtggccacacctcaggtcagggaggctgggacatgctgtcttgttctgggtgaacacatgcctggccaaaatccagggctctgcgaccagggaagaaggagaggatggctagcaggagacaccgggctgtctcaccacaggaagaagtcagaaaataagcaaaagaaagtggcatggagtaataagtggtttgctgaataaactccaatgtgaaagaaagtaacataagatgcagctcctccagatggagcgagtggttgggaacagcttctccactgaggtgagattttagctgagacctgaacaacaagaaggagccagccacagaaagatctggaggaagaacgttccaggcagaaaagaagtagtgtggaagccccgaggcaggagcaaaccggacttaggattgaaaggccgtcaccgctgtgcacggggaggaacagccgcaaagccatgtcctggggggtccaggaaggcaggagcatgggtggggcttattagtgctcctccttagagacatgcatgtgtgagtgtgcgtatgtgtgtgtgtgcgtgtgtgtaggaagcgacagacagaggcctcagtctcgctcaggtgtgttcatgtgttccaaacattccagatatagggtaccaaacagatgaacagagtagagagtcagggacagcactgtcatccacctgtcatgactatcattgtagtaaagatttctgtgactcggacctttgttccctctccccaccaacacccgctggagccccgtggtacctttgctgggggctccggccgttgggtggtggcggcactgcagcatctccatgcaatccttgtgggttctgattacagccttgctgtggcctcctggccttgtcctcatgctgttttaggctggaaactgggacttagatgattgttctggtcccaaggcagcttggccagagatggaggccattaagaagtgcacaatcatttcactcaggttcaggtggtgtccaactccaagaaagccaaattattttgcagctactatgtaatttaattctcacagcatcctaggaattgaacaaataggtattattcccaccgtacaggtggcaaaaagaattgaaacacagagaaagtaattgactgacctagggttaagaagcaagttgacagcatcacaggcctcgcttccactgtaagtgcttcgcctgctcggccatgcagcctcccaagtgagccgctcaggttgctaaagaaacagccaggg

SEQ ID NO: 69880 - DNA, 2156 bp, Homo sapiens
taaaatcaaaataacgaaatattcctgatagagggaatctctttggtgcagttcattcttctagaccaggcaatgacataggctcctgacaagcctactgattggctgtcacggccatcgctgggtcatgtgatacccccttccaatcagggtgggacaggagcatatggaactaaacgaggctggaagtgggctgtggtaagggcagcttctcttggaagggtttttaggaatgtagacatcatcatggaaatgcctagttctttccacctcagccaaggacacaaatgtgggaaatgtctacttttcagggacacataggcaagagaggatttgagggaggtcaaaagagaactaaaataacacgatgctgagagggaaaggagacagtagagggaagaaattaaatatgaagagagatgagcaagttatctattgaataagcatttacccaatgactattattgcaggtgttgctctagtgctggggctacagcagtcaacaaggcaggtgggaccctgactttacagagctcatgctctgtgaggtgggaggcacggccaaggacgggcagagggagggacaggcattagtaagagttggtttagttgcaaatgataaaagacccaacataacaacagcttaaacaagttagactctcatctctttctaccataaaagaagtccagaaagacgtgagccagggctttcaggatccttactgtctgtgccctgctctcctgcgcatgaggctttcacctcagagtccaacatggctgcttcagttccagcaatcacattcatgttccagctgacagggaggagcgaaggggatagaatgagcgtgcctcctccttccaagcatgcttccacttatatccgataagccagagctgagtcatgtggccacacctcaggycagggaggctgggacatgctgtcttgttctgggtgaacacatgcctggccaaaatccagggctctgcgaccagggaagaaggagaggatggctagcaggagacaccgggctgtctcaccacaggaagaagtcagaaaataagcaaaagaaagtggcatggagtaataagtggtttgctgaataaactccaatgtgaaagaaagtaacataagatgcagctcctccagatggagcgagtggttgggaacagcttctccactgaggtgagattttagctgagacctgaacaacaagaaggagccagccacagaaagatctggaggaagaacgttccaggcagaaaagaagtagtgtggaagccccgaggcaggagcaaaccggacttaggattgaaaggccgtcaccgctgtgcacggggaggaacagccgcaaagccatgtcctggggggtccaggaaggcaggagcatgggtggggcttattagtgctcctccttagagacatgcatgtgtgagtgtgcgtatgtgtgtgtgtgcgtgtgtgtaggaagcgacagacagaggcctcagtctcgctcaggtgtgttcatgtgttccaaacattccagatatagggtaccaaacagatgaacagagtagagagtcagggacagcactgtcatccacctgtcatgactatcattgtagtaaagatttctgtgactcggacctttgttccctctccccaccaacacccgctggagccccgtggtacctttgctgggggctccggccgttgggtggtggcggcactgcagcatctccatgcaatccttgtgggttctgattacagccttgctgtggcctcctggccttgtcctcatgctgttttaggctggaaactgggacttagatgattgttctggtcccaaggcagcttggccagagatggaggccattaagaagtgcacaatcatttcactcaggttcaggtggtgtccaactccaagaaagccaaattattttgcagctactatgtaatttaattctcacagcatcctaggaattgaacaaataggtattattcccaccgtacaggtggcaaaaagaattgaaacacagagaaagtaattgactgacctagggttaagaagcaagttgacagcatcacaggcctcgcttccactgtaagtgcttcgcctgctcggccatgcagcctcccaagtgagccgctcaggttgctaaagaaacagccaggg

SEQ ID NO: 69881 - DNA, 2156 bp, Homo sapiens
taaaatcaaaataacgaaatattcctgatagagggaatctctttggtgcagttcattcttctagaccaggcaatgacataggctcctgacaagcctactgattggctgtcacggccatcgctgggtcatgtgatacccccttccaatcagggtgggacaggagcatatggaactaaacgaggctggaagtgggctgtggtaagggcagcttctcttggaagggtttttaggaatgtagacatcatcatggaaatgcctagttctttccacctcagccaaggacacaaatgtgggaaatgtctacttttcagggacacataggcaagagaggatttgagggaggtcaaaagagaactaaaataacacgatgctgagagggaaaggagacagtagagggaagaaattaaatatgaagagagatgagcaagttatctattgaataagcatttacccaatgactattattgcaggtgttgctctagtgctggggctacagcagtcaacaaggcaggtgggaccctgactttacagagctcatgctctgtgaggtgggaggcacggccaaggacgggcagagggagggacaggcattagtaagagttggtttagttgcaaatgataaaagacccaacataacaacagcttaaacaagttagactctcatctctttctaccataaaagaagtccagaaagacgtgagccagggctttcaggatccttactgtctgtgccctgctctcctgcgcatgaggctttcacctcagagtccaacatggctgcttcagttccagcaatcacattcatgttccagctgacagggaggagcgaaggggatagaatgagcgtgcctcctccttccaagcatgcttccacttatatccgataagccagagctgagtcatgtggccacacctcaggtcagggaggctgggacatgctgtcttgttctgggtgaacacatgcctggccaaaatccagggctctgcgaccagggaagaaggagaggatggctagcaggagacaccgggctgtctcaccacaggaagaagtcagaaaataagcaaaagaaagtggcatggagtaataagtggtttgctgaataaactccaatgtgaaagaaagtaacataagatgcagctcctccagatggagcgagtggttgggaacagcttctccactgaggtgagattttagctgagacctgaacaacaagaaggagccagccacagaaagatctggaggaagaacgttccaggcagaaaagaagtagtgtggaagccccgaggcaggagcaaaccggacttaggattgaaaggccgtcaccgctgtgcacggggaggaacagccgcaaagccatgtcctggggggtccaggaaggcaggagcatgggtggggcttattagtgctcctccttagagacatgcatgtgtgagtgtgcgtatgtgtgtgtgtgcgtgtgtgtaggaagcgacagacagaggcctcagtctcgctcaggtgtgttcatgtgttccaaacattccagatatagggtaccaaacagatgaacagagtagagagtcagggacagcactgtcatccacctgtcatgactatcattgtagtaaagatttctgtgactcggacctttgttccctctccccaccaacacccgctggagccccgtggtacctttgctgggggctccggccgttgggtggtggcggcactgcagcatctccatgcaatccttgtgggttctgattacagccttgctgtggcctcctggccttgtcctcatgctgttttaggctggaaactgggacttagatgattgttctggtcccaaggcagcttggccagagatggaggccattaagamgtgcacaatcatttcactcaggttcaggtggtgtccaactccaagaaagccaaattattttgcagctactatgtaatttaattctcacagcatcctaggaattgaacaaataggtattattcccaccgtacaggtggcaaaaagaattgaaacacagagaaagtaattgactgacctagggttaagaagcaagttgacagcatcacaggcctcgcttccactgtaagtgcttcgcctgctcggccatgcagcctcccaagtgagccgctcaggttgctaaagaaacagccaggg

SEQ ID NO: 69882 - DNA, 561 bp, Homo sapiens
tgaaatgagttttggagatggatggtggtgatagttgcacataattatgaatgtatttaatatcattgaattgtatgcttaaaaaaggttaagttggtaaattttatattatacgtattttgccacaataaaaaattgggaaaaaatgcaggcttatcacaagaaaaaaaaattacataaagtataaagtggaagtaaatatcttcttagcagtttgccccattatcttcctgytctatgtgtcacctccctaaacgccaactctcactttctaggaaaagctgctttaaagtctgtacacatgtaaggaaatgttctttacataaaccacatctggctgtgtttgtctgcgttcatctttgcctctctctctttgcctggataagatcatactgcataaactctcctctaatggttttttcctatctaaaatatgtattttgaagagtttcccttattagcctatatatatctaatttttaaaaactgactgaatggtgtgtgattagatgtctatatctcccattgatagaaatgtagggtatttccattcgtttttac

SEQ ID NO: 69883 - DNA, 1036 bp, Homo sapiens
caactgatctcctattcctacagatttataaaatagcctagtcaaaacaagcaaaggtgggaataacctgaatgggtgagctagccaggaaatctactgaattctaaagtattaaacaatttttccttctactgattagatttaggctattaattcctaacctaggtctaaaacactttgccacctgaaggccaagtccagttttagaggatttctaccatctgcacagtatttgtaaacatcgtgaatttcttgctattatttaaaacctagatttttacataatagctggatttccagtttgtcttggaaaatcagattgaaatggaatttactattattttcttctcttaagataaagtcccctacttttccttttcttattcataataccacttttccatatcatttctgtacatcccttcttttctcattcaaacttcacccatcttaatccagtcccgtttcagtacaactgtcttaacttcttgrctccaggctcttctcagtctctctagcatgctattttacatttaatctctcttaaatactttgctcaagactccagactgcccagtaatgtccaacaaatcctgttttgccactctgaatatgctgacactttcctgacgcttacaactcttcagtaatttatttcttcccttcttttgcagtcttgatttctgttgcttatctacatggttccttcctctagtgaggttaatctctttgctttcctctatacccactatgctttttgttcatgttgatccttcctacaggaaaggccttccttctcttctttgtttatacacatcagatgaagttaaactcaaggctacctagtctgcgcagcctaccagagttctaattcacattgatctttctggaatgttttatgctttctagcgttgttttaggttgtgtattcttatcactcaagattaaagctaccaaaagcatggcctaccttcctctgtactgtattggtatctctgaggagaaattagtaaacttgttgtctaaatttttatat

SEQ ID NO: 69884 - DNA, 1036 bp, Homo sapiens
caactgatctcctattcctacagatttataaaatagcctagtcaaaacaagcaaaggtgggaataacctgaatgggtgagctagccaggaaatctactgaattctaaagtattaaacaatttttccttctactgattagatttaggctattaattcctaacctaggtctaaaacactttgccacctgaaggccaagtccagttttagaggatttctaccatctgcacagtatttgtaaacatcgtgaatttcttgctattatttaaaacctagatttttacataatagctggatttccagtttgtcttggaaaatcagattgaaatggaatttactattattttcttctcttaagataaagtcccctacttttccttttcttattcataataccacttttccatatcatttctgtacatcccttcttttctcattcaaacttcacccatcttaatccagtcccgtttcagtacaactgtcttaacttcttggctccaggctcttctcagtctctctagcatgctattttacatttaatctctcttaaatactttgctcaagactccagacygcccagtaatgtccaacaaatcctgttttgccactctgaatatgctgacactttcctgacgcttacaactcttcagtaatttatttcttcccttcttttgcagtcttgatttctgttgcttatctacatggttccttcctctagtgaggttaatctctttgctttcctctatacccactatgctttttgttcatgttgatccttcctacaggaaaggccttccttctcttctttgtttatacacatcagatgaagttaaactcaaggctacctagtctgcgcagcctaccagagttctaattcacattgatctttctggaatgttttatgctttctagcgttgttttaggttgtgtattcttatcactcaagattaaagctaccaaaagcatggcctaccttcctctgtactgtattggtatctctgaggagaaattagtaaacttgttgtctaaatttttatat

SEQ ID NO: 69885 - DNA, 2499 bp, Homo sapiens
agtgatgccaagcattaatcaaaggacctttaaaaccaattattaaaacatgctaggttattagtagaattatcataaactctataacctgaaagtttaaagagaactgtttttttatatatgtgattttaataaaatgaattttaattttttaaataaaagtaaatgtacaaatagattttcttttctggacacaaaaatgcccttatgctcaccaagaaattcgtatttaacagcaaggacttatttacaagttcattcctaaccggtcactgcaaatgtaatgtgtccacaatgattaatttagacctattatttcaccacagggacctgaggaggggcctcccttaatctcctggtatcctagctcatgttaacaaaatcagcccatccatcatacacagaacttcacatgatgtttgctaaaaaataaagaactcttttaacaaagacattcataatttttatttcctgggaggaatactgccatctctttgtaaatctacaatatttttactcttctagacaaatgcaaccccttgataatttctgcacgcttgagtggataaatactatgactttcaaatttgttttatacgtatcctttcaaatagctgttttgaagtttctttatttatatcttaaaggtttcttttccccaacctgctgaacatcctgaggtttcatcttccctacctgattgtcacaaggatactgcttcccttctgaccacatgaaacttatgaaaggtgccttgggaatatgtcagtataaaagacaggctataattgggataccttcaggaactggggtgtgggtgttctcagtccttgtccggtgaactctttccctcttcttttctgaaatgtgtttcttatgaacagcaaagtcttacttctaaattctgagtctgtcgtctaattgcaacacaattaaattcagagttctgctggaaagaaataaaggagggtgtggggaagatgatggctggttaggtagccacagtgtctgccataatctttcaaatggataaaactttgatcttctgacactgttcctttggctgcaagtatataagatattgatgatatcctttgattaatataaatggttgaggtggttaaatttctgtttccttacagaggtgctaaatgatgttttataataaacacatatgttttaagaataaagctcttgagacatttaattattttaatgggggaactaggccagacagtccattccagggaacagagatgctcaagtatttattagtagaaacactcagatatgatgaatgtgaaatatattaaaaagaaacacagaatggcaagagtttaacagtctcaattaatgatgtaattaggctagaataatctatttcctttggattatccaatcattaatctaataaatttttttcttgaatgcctgcatctacaaagcacaaaaagatcatagttaacaattttatgatctaggtgggacacaatctgtgaacttgaaaagataattaacaatatgatattgaatttgatcattggcagataagctgtctaggcacatgatgtataggaatttggggggagaaaaacagtttcagctgaagtgatatgggatggcttacaatctaaacctcttttctgagatcttggtcatttggatctggcagttgtttaaccactggctcaaacttctgtctaacagtcaacccagtcacttaaacaatacacgtttaattatcactcatgcatgtagtgcttggtttccatttgagcttttacaggagatcacaggcttagaagacagccttagcttgaatacaatctcatgagaaatcttgagccagaggcacccagctaagccacacccagattcctgatacagcataactgtaagataatgcctgtttgttgttttaagttgctaagttttggggtaactggttttattgtaatttacaacaaatgcaggagtttattcaaatgatactgttaatttgagattgagtgtattcataggcttgaaattatatgccttgaggggatagttgaagccttcataatgtgaatatatacatatatattatgactgagccacagggatactctatttaaggtgaaatctaaggaaaagtgaagtttcaagaaggatatagtaaacaatgccaagtaataagaataaatcaaaagtaattaaaaaattattttttccttcaaaatttccaaataatacatttatggggattactctggcaactgaacaagcaattctctaatcaattaccatgcatagtttcattaaaaaatattagcaaactaacatggatgtaaatattactttcatgacaaacttgcataattcatataatttagattgctagttccattaaactatattagtgatataaaacaaaaaraaacatggtgaagattatagatttattgaaatcttgtagtggtattattcaccaagtgccagaagatatgacctaatgtg

SEQ ID NO: 69886 - DNA, 612 bp, Homo sapiens
acccttctcagcctcccaaagtgctgggattacaggcaygagccaccacgcctggcctttggtaatcatttttctacgcatatgagtactcaacaaacccggatttccacactcagtacgagtttttcattctgcgatttctgcacaacataacaaaagcatgttttccctttagaagcatgaattttaatgactgtttaatagtgcactgcgtggcagtgccgctggacccaagtaggaaggggggagtttgcagtggggtcgccctcccctcccctgacctttaggatgcaggcctggcaaagccccagtgagataatgtatgcagattgcaaagcacgacggcatccctgctaattgcagaaatctgggttcttcttctctctctgatctggttccctaggcactggaagaaaactccttggcctgtgtgttctatttgtaccttcctattatttgccctaaaataaagataatatcagctggtcgccacaccacggtctgctgaacataaagatgaatgcctatagctcaccttgacacgtttaaaaagtcctagactcgatggacaatagaagacagctttttttctgtacataaatggcacaaagg

SEQ ID NO: 69887 - DNA, 564 bp, Homo sapiens
ttaaattcctaaactatgagcctgggaatcctcattctaaatgggagggttcttggcagacttcttaccattttcaagtttgtgaggatttgcagttactggacttctggagacttgacagagctaagggactatcaaatccaccagaaacattgctttttctagccaaggaacaaaggatgtgaggaggcaaattcatagttcctgaaattttctatattctttatttaatcttgttttatttatatgtttttacaactcacaatagtgaatatagcaaaattatggaaaatggcaagtgtaaaggacagatgaagtatgytgcccaatgctttaatctagtcctgaatgaagggactagaagggagaaacatctctagaatgaacctagtctcctcatgctgcaactccaaaacagaattatgccttgcatactgagtaagtgatgacattcagcagaacacccactatggagagcaccagattatagctgtccttaaactgcttgtttgctttgccctgataaaagaaaaaatgttcatagagttttctaagtctcttttg

SEQ ID NO: 69888 - DNA, 815 bp, Homo sapiens
cttgagcctaggagttygaaaagaacctgggaaaggtgtacagcaagactccatctacacacaaattttttttttaattagccaggcatggtggcccacacctacagtcccagctacttggggggggctgaggcaggaggatcacttgaccctaggagtttgaggttaccacgagctatgatcacaccatggcactcctgcatgggtaacagagcaagaccctgtctctaaaattaaaaaacgagtggcagtggggcatgtgttctggtcccaccttggctctgagcagatcccccagctaagccaccaccctctatatgtcctgctcactctcagaacccctcctgccttcggtcctttcttgagccttcacccccacattgcctagcactccttccctcctagcgaattctccatccctttcctcctggcaaaccatttccaggtagcctctgagaccttcccacagcaggtaacttctctgaggctttagccttttctcagtaacctccccctaccatatctgcttcacctgaaacctgaccctccccatagaagcagacatccccccacccacagccctcccttgagatggaccccagtcctgagtccataggactcaggatgtcctgaggacattcttcagccctcaacccatctgcacaatattcctccctcctctgcccttatgcaggattttccttttggaacatacacacactggttgtctaaacaggcagaagcccttccattcactcattcaacaaatacggaatgggcatctgctatgtgcctgacacagtgctaaatgctgg

SEQ ID NO: 69889 - DNA, 847 bp, Homo sapiens
ttccttcactgctgttccttcattctgctgtgtaaattcgattacttcttctcccaccaggctaaaaggttcccatctggttgcatctcaaaccccagatgtttgctaaactgcactggaaataaggtgggctgcagagtggctctcgtcgtcaggaggcacaaacctgccagtcgtcattaggatgaacatgcttttgtctgagctttttcgttcacaaaagaaagcatcacactgaatgggttttgggatttcatgcagcgtccttaagcatgtggatgcttgtaggatttgtccccatgaaagcaagattcagggatggcacaggagcccaagggggtggcgttgtcattgatcagcaaggagaggcttggagaacattgaggaagaaagagttaacacatagaagcaacctgtgacctgggccctagtagggatgagagggaatcggattytttccagaagagaattgtctccagcaggtgagctcatcttcatcccacgacactaacctgaaatctatgggtcactttttctatttccaaatgaattttcaaaacatcaagtagaaaaccataaattgttcccacactgggaggtggttaggtcaaaatggatttttctgatatctggaaatatatatcattgtctcccaaattcaaaaccaacacgattttccagcgttaaggaaacaggggcacgttgctactgcagtagacttcagagagggctcaattcagtgatatgatcacaaaggaaaaagtgagaggtgtcagagataacaaataataagggatgatgcctttctacatgatgctcattagagctggatggagaagccgcccat

SEQ ID NO: 69890 - DNA, 952 bp, Homo sapiens
ctatctagtctcctggagagaccactacaatctctgggcatctgtggttctcatctgtccagcatcccattctcctcctcatggaaaccaatcccctcttctctgtgtgaaccccaacccatggggatcagggtgaccctactacttcctccaagtgggcatgtgatgcagaccagcccagtcaccaactgtaggcccccatcccctgggatgggttcagacaggcatgtgcctcaaaccaaaccagagactttcctaggacatctctaagggaactgtcaaggaaaaccctctttctccaggggtgaaaatctactgctgtcttatctatcacactggagacagcctgtctacaggacagactggagggcagagtcccaytgcttaaactcctgagtgtggccttatctaaagccagaggcaactctgaacttctcagttataagcgctaataaatttctgcgtcttcccttctgtgcttcagctaggttaaacgggttttctgtcacttgcaaccaagagggtcttcataggtcaatgtcctaatcttgatctttttcacgcctaccctcatcccctgattcctctcttggtgaaggtggaaagtagaggtaggatggcatagtgacataatcccctatgccacaaatgagccacgtgaccacagaggaagctccttagcacttcttgaagcctcagtttccaacgcagtcagatggggacaatcacacttactgcacagggaaaccatgaagatgaaaggacagaacatacaccaaaggcctcacactgagcccagaatgaataaagtcccttgtgcccatctcattatcctggactctggtcccctgtctcttccacaacctcagagacctccctccctccaatactccctctctctctgatccaaaggcaaaaagctcacaatggggcagaaaatgctactctatac

SEQ ID NO: 69891 - DNA, 605 bp, Homo sapiens
ccctaggacaggagaagccacactctaagctagaacccatcctcacaccacagcccttgaattctccttctgtcctttccctctgcccgaatggggtcagtggagggaatggactctgggtgaaatcacacccattcagagcctttgggacaaatatttgagagtcaccaattacctgatcatcaaagacatgcctttaacttcctgactgtcccggttgtttggggcggccaggaggccccctggaatccctactgtcactggcatattgcaagcacatgttttctgcacacagagctgctcacaataaaccaacgctgaaaagcacattaaaatgaatyggagaagagagagtcactttgtaacatgctttattttattttgtttttgccttggaaaggagcatgttttggctgccaatgaaagagctggtgggggcctcttagcagaaaccaaacgggtccagattagacctacccagcccaccccctgggacagtggctctggctccagggagctgagaggggccccgagaccaggggtgagctgcagggctggtctagaaactggagatcccgggtaccagccctgagctctgggacact

SEQ ID NO: 69892 - DNA, 605 bp, Homo sapiens
ccctaggacaggagaagccacactctaagctagaacccatcctcacaccacagcccttgaattctccttctgtcctttccctctgcccgaatggggtcagtggagggaatggactctgggtgaaatcacacccattcagagcctttgggacaaatatttgagagtcaccaattacctgatcatcaaagacatgcctttaacttcctgactgtcccggttgtttggggcggccaggaggccccctggaatccctactgtcactggcatattgcaagcacatgttttctgcacacagagctgctcacaataaaccaacgctgaaaagcacattaaaatgaatcggagaagagagagtcactttgtaacatgctttattttattttgtttttgccttggaaaggagcatgttttggctgccaatsaaagagctggtgggggcctcttagcagaaaccaaacgggtccagattagacctacccagcccaccccctgggacagtggctctggctccagggagctgagaggggccccgagaccaggggtgagctgcagggctggtctagaaactggagatcccgggtaccagccctgagctctgggacact

SEQ ID NO: 69893 - DNA, 713 bp, Homo sapiens
attccgccatggaggggttgtgctaagcatgtatggactgaggccatcctggtaggtgaggaccatgtagctcaggtcatgcacattgcgcctcgggaaaatgcctcccaggagagcatggagcagctgggatgaggacagcccttccctcagccaactgttccaccatcaaatcgcatttacgaagtgcccacatgctcttaggagcccataaacaccscaatctgtggctctaaccctcactccttccagtcgaagtgttgtggggccccaggggacctccggatctgcagagggggtgcacttgtctctgggtctcctgttcccacaagaaccacctaaagcattgcctgcgtttccccgacatggcgttggaatgttccagaatccctgagccttgctgtgcctttgtagttatttattgcctgggcctctcattcagtgcttctcttacaggcttggagttttcttctttttttctcaattgcctatatgtttatcttcccaactggtttatgagctgactatgggttgcatctttttttttttctttttttttgacacggagtctcactctgtcgcccaggctggagtgcagtggcacaatctctgctcactgcaagctccacctcctgggttcacgccattcttccgcctcagcctcccgagtagctgggactacaggcgcccgccaccacgcctggctaattttt

SEQ ID NO: 69894 - DNA, 711 bp, Homo sapiens
ggcaccatcctctctgaggaggaaatgaatgaatcaacaattacaatacagggttgggctgggtgtgatagcttatgcctgtaatcccagcactttgggaggtcgaggtaggaggatcacttgagcccaggaagtcgagaccagcctgggcaatatagcaagaccccatctctaaaaaaaaaaattagccaggtatggtgtcacacacctgtagactcagctactcagggggctgaggtgggaggatcgcttgagcccagaagtttgaagctgcattgagctatgatccygccactgcactccagcctgggtgacagagccagaccctgtctcaaaaaataaatgaataaaataaaataaaatacagggttgcactgtgtctggggctatggtgaaaggcctctgcatgatggtagagggaagaaaagatttctattctcatccattgctaagtccatagttaatacccctgtgacacaagatagattaacaagagaaaaacatgcacatttgtttaagttttatgtgacataggaaacttcagacatgaagacccaaagaaacagggagacctgtgtatttttatgctaaatttgataaaaaagcggacagctgtggagaagtgtgattgcacaaaaagagtatgatctcaggccaggcgcagtggctcacgcctgtaatcccagcactctgggaggccaaggcgggtgg

SEQ ID NO: 69895 - DNA, 711 bp, Homo sapiens
ggcaccatcctctctgaggaggaaatgaatgaatcaacaattacaatacagggttgggctgggtgtgatagcttatgcctgtaatcccagcactttgggaggtcgaggtaggaggatcacttgagcccaggaagtcgagaccagcctgggcaatatagcaagaccccatctctaaaaaaaaaaattagccaggtatggtgtcacacacctgtagactcagctactcagggggctgaggtgggaggatcgcttgagcccagaagtttgaagctgcattgagctatgatcccgccactgcactccagcctgggtgacagagccagaccctgtctcaaaaaataaatgaataaaataaaataaaatacagggttgcactgtgtctggggctatggtgaaaggcctctgcatgatggtagagggaagaaaagatttctattctcatccattgctaagtccatagttaatacccctgtgacacaagatagattaacaagagaaaaacatgcacatttgtttaagttttatgtgacataggaaacttcagacatgaagacccaaagaaacagggagacctgtgtatttttatgctaaatttgataaaaaagcggacagctgtggagaagtgtgattgcacaaaaagagtatgatctcakgccaggcgcagtggctcacgcctgtaatcccagcactctgggaggccaaggcgggtgg

SEQ ID NO: 69896 - DNA, 789 bp, Homo sapiens
atatatatatataattgaaacagggactcactgtcaccccggctggagtgcatggcacggtcatagctcactgccatctcaaactcctgtgctcaagcgatcctccctgctcagcctcctaagtagctgggactacaggagcataccaccacacccagctgatttttaaatattttgtagaaacggggtcacgctatgttgcgcaggcttgacttgacctcctggcctcaagcaatcctcctgcctcagtctcccaaagtgctgggattacatgcatgagccaccccacccggccaatttttggtatattttgtccagcattccaaagtgtttgtagcagaggtttttctggttatcttacacaccatcctgttaaagaggtatctttttaaccttcttaagtttcaatttctttatttagacagtgggaatattgtcctttctacaaagaattatcgggactaggtaaggatttaagtaaacaatctaaccatgtggtaagtgcaccataaatgctaacaataatgattattattacactaatatcatatgtactctttttcctttttttttttttcctagaccaagtctcactctgtcacccaggctggagtgcagtggcatgatctcrgctcactgcaacctctgcctcccgggtttaagcagttctcctcccgagtagctgagattacaggtgcctgccactatacctagctaatttttgtattttttagtagagacggggttttgccatgctggccaggctggtctctaactactgacctcaag

SEQ ID NO: 69897 - DNA, 1339 bp, Homo sapiens
tgggccctgtgtatacatgggctgtgtgtgtgcatagtgagtacatgtacatgggctgcgtgtgcagctccaaaatcttccgccctttcttccggattcaccagacacctcctccaggaagcgttccctggtctttccagagatggaagccaggctccctagaaaaatctagttcaaaactatgcttgaagrccgggtgcggtggctgacgcctataatcccagcactttgggaggctggggcaggcagatcacctgagttgaagaccagcctggccaacaggacgaaaccttgtctctactaaaattacaaaaattatctgagcatggtgccacatgcctgtaatcccagctactcaggaggctgaggcgggggaatcacttgaatctgggaggcgaaagttgcagtgagccgagatcgcaccactgcactccagcctgggcgacagagcaagactcagtctcaaacaacaacaacaacaaacaacaacaacaacaaaaaccagctatgctcaagaaaaatacacacggaatatattgccccttccaaagcctttgaggtcatttggcccaatcccctcttgttctaatggggaaactgaggttccaagaagggattgggctttctatactaacaggtcccagactcagaaactcctgccaagctggaggctaaggcccctcagggactggcaggtgctgtggagaacacaggaccggggccggagttgggctggagctgggctggagccccactgtcaggggggacccaggaaaggggctgttccactgcagcctgggagggtggctggattgggagccccctcatctgacccagtgtgggtgggtggctcagcccatgggagtctcagctcacagggtctagggacgcatgcccccctcttgttgccatgctccccaagcggctgtccaatctcttcttgggcacttacaggaacgggcactccctccttcccggggctgcctggctctgtgctgaaagctcattctctaaggggcgggagctgctctacatggtgtccgcccagtgactttgggtcccaaggtggggcccatctgctgcctcctccttctcagggtgagctgcccagtccctctgtggctccccagggcccagcctgcctgctgcccccagaaccttctccagctcatctaccattgtgaagaatagagcctgggcctcatatacgcagttactcctgttacatgcctttgttgtgatttcttctctcatcagtgatgcaccttcctcccaggccccagaactgggtgttggggcaaggtctgtggggtcccctctcgcctctgttctctaacaa

SEQ ID NO: 69898 - DNA, 563 bp, Homo sapiens
tccagcctcagcctcccaggtagctgagactacaggtgtacatcaccacacctggctaatgttcgtatttttttagaagcagggtcttgctatgttgtccaggctagtcttgacctcccrgcctctggtgatcatcccgcctcagcctcccaaagtgctgggattacaggcgtgagccactgtgcccagctaagggtctgcatggctcacaaagccccagcacttgcggacagggggtctgaaccacacaagattgcctcaagggaaggtgctggaacttttgtttcagtcctgaagtcacaggcactggtcaggtttgtgagcagggaggtgacacctccaagggacatgagtagggagcaatggccattctcctccttggagagtcccttgttagaacctaggcctgccacttcctgtttcacagtagttcagtatttacagtaacttccaggaaggggaccatgtgtcacgcctgagctgaccctttctctctgctgcgagctcaggatgtgggcaggcgaccctgagcccagcagggccctccatctgcaggtgtcccc

SEQ ID NO: 69899 - DNA, 563 bp, Homo sapiens
tccagcctcagcctcccaggtagctgagactacaggtgtacatcaccacacctggctaatgttcgtatttttttagaagcagggtcttgctatgttgtccaggctagtcttgacctcccggcctctggtgawcatcccgcctcagcctcccaaagtgctgggattacaggcgtgagccactgtgcccagctaagggtctgcatggctcacaaagccccagcacttgcggacagggggtctgaaccacacaagattgcctcaagggaaggtgctggaacttttgtttcagtcctgaagtcacaggcactggtcaggtttgtgagcagggaggtgacacctccaagggacatgagtagggagcaatggccattctcctccttggagagtcccttgttagaacctaggcctgccacttcctgtttcacagtagttcagtatttacagtaacttccaggaaggggaccatgtgtcacgcctgagctgaccctttctctctgctgcgagctcaggatgtgggcaggcgaccctgagcccagcagggccctccatctgcaggtgtcccc

SEQ ID NO: 69900 - DNA, 563 bp, Homo sapiens
tccagcctcagcctcccaggtagctgagactacaggtgtacatcaccacacctggctaatgttcgtatttttttagaagcagggtcttgctatgttgtccaggctagtcttgacctcccggcctctggtgatcatcccgcctcrgcctcccaaagtgctgggattacaggcgtgagccactgtgcccagctaagggtctgcatggctcacaaagccccagcacttgcggacagggggtctgaaccacacaagattgcctcaagggaaggtgctggaacttttgtttcagtcctgaagtcacaggcactggtcaggtttgtgagcagggaggtgacacctccaagggacatgagtagggagcaatggccattctcctccttggagagtcccttgttagaacctaggcctgccacttcctgtttcacagtagttcagtatttacagtaacttccaggaaggggaccatgtgtcacgcctgagctgaccctttctctctgctgcgagctcaggatgtgggcaggcgaccctgagcccagcagggccctccatctgcaggtgtcccc

SEQ ID NO: 69901 - DNA, 563 bp, Homo sapiens
tccagcctcagcctcccaggtagctgagactacaggtgtacatcaccacacctggctaatgttcgtatttttttagaagcagggtcttgctatgttgtccaggctagtcttgacctcccggcctctggtgatcatcccgcctcagcctcccaaagtgctgggattacaggcgtgagccactgtgcccagctaagggtctgcatggctcacaaagccccagcacytgcggacagggggtctgaaccacacaagattgcctcaagggaaggtgctggaacttttgtttcagtcctgaagtcacaggcactggtcaggtttgtgagcagggaggtgacacctccaagggacatgagtagggagcaatggccattctcctccttggagagtcccttgttagaacctaggcctgccacttcctgtttcacagtagttcagtatttacagtaacttccaggaaggggaccatgtgtcacgcctgagctgaccctttctctctgctgcgagctcaggatgtgggcaggcgaccctgagcccagcagggccctccatctgcaggtgtcccc

SEQ ID NO: 69902 - DNA, 513 bp, Homo sapiens
cctacttcgttggattactatgggcatgaaatttggggcagttgcaatagcagttggcaactgaccacctcatatctatttcttcttcttaacactatcctggctgggtgcagtgattcatgcctgtaatcccagcactctgggaggctgaagtgggaggactgctggaggccaggaattcaagaccagcttggacagcatagcaagaccccatctctgcaaaaaatttaaaaactatgttcacaccactgcactccagagccyaggtaacacagcatgaccctgtctaatatatatatgacatactatgtatatacacatatatatttatatatatgacatattatatatacatatgtgtatgtctatttatatatgtgtgtatataaatatatacatatataatatgccttatatataacatatataatatgccttatatataacatatataagatatataaaacatatatgtctaatatatataatatgtgtgtatataaattttttttt

SEQ ID NO: 69903 - DNA, 1426 bp, Homo sapiens
taaaagacagcaaaactgtctttagaatcacttttttaattacttgtcaattatgttagtaacccgtctctataggacttgagcattttcaggctgcttgtgtatgcaatatctcatttaattgtcttggcaaatcattcttaaatgctggtgttattaagttagatttaatccctgaaaacagttgtggactgacagaagacctaaggtatgcacacttgttaataaacttaccttactgaggtttttctactctgtcaatccacttaaagttttaaaaatatgtatggacatacacacgtatatatgtgtatttgcatatacataaaatactatctattaaatagaatactatatagtgacacaaactaggaaagttatctaattatacgatgttaatattttggactctcaaggaaaaggtagtaacatagtattttttcacaaagtgctgccacttttacttaattgacattgaggtcaattgcctttttctttcaactctgtaaacaacactacgcaatcgtttacatgtttcagtgcacatacaaaaaaatgaatcctgtgtaagctacatggttggccatcacagcccattcctagtttactggaaagcaactgtatgaaagccttgggaacagtcgtggtactgctcacagatagttcatgaaaagaaagactggttgacacagttagtgacacagtgcttgatgcacactgtaagccttaagtaaatgtggaggcgatataatagaacaaagtttgttccccatggaaagcagctgacctgctttttgaaacactaccacagacagctcttttaatagaaataatggaccgttgtcattttaataacaataaaatgttacttttttgaaatactgaaattctgatttttttcccaaaatgttatgtatacttacgttagaaatgcttatgtccatacatataagacattaaatgagatcaacaaattgcatgatttgcctaagatatgtttcattttacccatttaaatctccaatttaaagttataaatagcttgaagacatgtgctaggaaattcttggaaacttgcatctatattgagaaatagggaaatcaagagaaaccttaagaggtgctttatataatgatactccagagaatatgtaaattatatagtttgttatgagcactattgtaaaaattatttgtaaaatttctcaatgcattattgtttatgaatatatactcctatatatactaaattttagcacaataataatttccatatgwtatgtttttgtaaaaatttactatgtgtaaaccctagaaagaagagtattttattgttagttttatcaatgttggagaaataacagaaagatgtctacacagtcagtttgttgtgaagaaaacaactgtaaagctcttatctattgtc

SEQ ID NO: 69904 - DNA, 712 bp, Homo sapiens
ccagtgataaaaatagccaacaatagtactcgactcgactctatggcgacagtgcagtacctcccaacaaggtttacttttgcagaacttacattttctatggtcacgcttcttttttcctagttgatatgtgttatctgcaaataaatatgtacaatgtaccatatattcttaaaccaatatgctaataattataaacatgttaaattggtctattcatcctatcattttaaaactgattaactggtattrcttttttagttcttttctcatttaaaccatagacattttctgaaaatctagatataatttttaaaatttgagtgtattagggtaagttgctcattaaaggaatctttcagatgaagaatccttttgtaaagcaagttttaaaagtcatgctgagaggtgaagctggctgggcttctgggttgggtggagacttggagaacttttctttctagctaaaggattgtaaatgcaccaatcagcgctctgtgtctagctaaaggtttgtaaatgcaccaatcagcactcagtaaaaatgcaccaatcagcactctgtgtctagctaaaggtttgtaaatgcaccaatcagcactctctaaaaacgcgccagtcagcactctgtgtctggctaaagatttgtaaatgcaccaatcagcattctgtaaaaacggaccaatcagcgctctgtaaaatggaccaatca

SEQ ID NO: 69905 - DNA, 1053 bp, Homo sapiens
cctggcacataataggtcttcaataaatgtttcatgattaaattcctcaaaggccgcatcatgctctctaaatgttttttcaatgtgcatctcttagaatggtctactgtcatctattctgtgatggaagaggcagtgtcactttttttggctaataattgtcaactcagcattcaaagccctgcaatttgactccagtctatctttcttgcctcattttccacttccccttaccacttgcactacacttcaacccgtcttggccataagctctttcttcatcatgttccacattttttccattgttggctatgaataagtgggcaaatgtgcagaggtctacttccttttggatatttttcttgattcctcctaaccatctaagataattgttgtttctggtaaacgcttttacaccattttgtactttggcactcaccttattctatcatgtaattcattcatatgtaaactccttctaccttagttctcagattgtaagctgctgtaaggagtgcttcatgttcatatttacactccctgaagtcctcagaagaacatctgtagcttagtagatcctcaagtatatgttaaactgccttaaattgattaaaaactaacttaagtcatctccccttatggatattaagtatattgactttaaagggttttcttgctgctacaagtcataacagtaaatagatgtagagagaaatgtttacaaggactataattaagcaaaataggctttctctgacttttgcaagcaaactaatttgtgtgtatatcatttagaattgattaaaattttaaatttaatatctgaaattatttgattattttggttcttgtgttatagttatttcttctgatatctgatctgctatgatgatgtaggwtaatctcttccaacttgatttacaaaacttgttttcaattgctgtaccactcacttcctcaaaggttgcctctcatatctcctcatcatatatacctcttcaaattcaatcgagatttcaattcttctcacttctccccaacctgtgagtacca

SEQ ID NO: 69906 - DNA, 744 bp, Homo sapiens
tgcactctttgtcgttccttcagttgtatgttgtcatcgatagatctcattgctaaactatgtgtcactagtactgtaggtcaccttacaccttgcgtgacaaataggtaaagtctcaggcatatagatgacatagtcaaatgtctacttatatttaatgtttaaatttagttacccatgtttaaggtaatataataattcagaaatrtcctttagcctaatatttggggaatagttgtagtcaaactctgccattgcagttttgaaagcagctcctttgccatcatgacagtggcattttgaaccgtctaacacaattgtttccatgccactttatctagctgtctagagtgagttactgcaattctaatatctgtatatggagctgttattggaaattttttatcaagctccagctttaggacatttgggttttaattcattctgagtgtatatttatgtgatctctattgctttccaacagatctttaaaagccttgtttaaaatgacaactgcagtagaaacagctaggttccacaaacaattgtgtgctatcttacactgtttagaatctttactagaaagtagcttcctagccaaattacattttccaagcccattccaactagttggtcctaggtgactagttctgccagtgaaatattagcagaagcaaagcgcatcgcttctgggataggactcagagaggatctgcctttagcacattatctttccccacttgt

SEQ ID NO: 69907 - DNA, 744 bp, Homo sapiens
tgcactctttgtcgttccttcagttgtatgttgtcatcgatagatctcattgctaaactatgtgtcactagtactgtaggtcaccttacaccttgcgtgacaaataggtaaagtctcaggcatatagatgacatagtcaaatgtctacttatatttaatgtttaaatttagttacccatgtttaaggtaatataataattcagaaatgtcctttagcctaatatttggggaatagttgtagtcaaactctgccattgcagttttgaaagcagctcctttgccatcatgacagtggcattttgaaccrtctaacacaattgtttccatgccactttatctagctgtctagagtgagttactgcaattctaatatctgtatatggagctgttattggaaattttttatcaagctccagctttaggacatttgggttttaattcattctgagtgtatatttatgtgatctctattgctttccaacagatctttaaaagccttgtttaaaatgacaactgcagtagaaacagctaggttccacaaacaattgtgtgctatcttacactgtttagaatctttactagaaagtagcttcctagccaaattacattttccaagcccattccaactagttggtcctaggtgactagttctgccagtgaaatattagcagaagcaaagcgcatcgcttctgggataggactcagagaggatctgcctttagcacattatctttccccacttgt

SEQ ID NO: 69908 - DNA, 744 bp, Homo sapiens
tgcactctttgtcgttccttcagttgtatgttgtcatcgatagatctcattgctaaactatgtgtcactagtactgtaggtcaccttacaccttgcgtgacaaataggtaaagtctcaggcatatagatgacatagtcaaatgtctacttatatttaatgtttaaatttagttacccatgtttaaggtaatataataattcagaaatgtcctttagcctaatatttggggaatagttgtagtcaaactctgccattgcagttttgaaagcagctcctttgccatcatgacagtggcattttgaaccgtctaacacaattgtttccatgccactttatctagctgtctagagtgagttactgcaattytaatatctgtatatggagctgttattggaaattttttatcaagctccagctttaggacatttgggttttaattcattctgagtgtatatttatgtgatctctattgctttccaacagatctttaaaagccttgtttaaaatgacaactgcagtagaaacagctaggttccacaaacaattgtgtgctatcttacactgtttagaatctttactagaaagtagcttcctagccaaattacattttccaagcccattccaactagttggtcctaggtgactagttctgccagtgaaatattagcagaagcaaagcgcatcgcttctgggataggactcagagaggatctgcctttagcacattatctttccccacttgt

SEQ ID NO: 69909 - DNA, 744 bp, Homo sapiens
tgcactctttgtcgttccttcagttgtatgttgtcatcgatagatctcattgctaaactatgtgtcactagtactgtaggtcaccttacaccttgcgtgacaaataggtaaagtctcaggcatatagatgacatagtcaaatgtctacttatatttaatgtttaaatttagttacccatgtttaaggtaatataataattcagaaatgtcctttagcctaatatttggggaatagttgtagtcaaactctgccattgcagttttgaaagcagctcctttgccatcatgacagtggcattttgaaccgtctaacacaattgtttccatgccactttatctagctgtctagagtgagttactgcaattctaatatctgtatatggagctgttattggaaattttttatcaagctccagctttaggacatttgggttttaattcattctgagtgtatatttatgtgatctctattgctttccaacagatctttaaaagccttgtttaaaatgacaactgcagtagaaacagctaggttccacaaacaattgtgtgctatcttacactgtttagaatytttactagaaagtagcttcctagccaaattacattttccaagcccattccaactagttggtcctaggtgactagttctgccagtgaaatattagcagaagcaaagcgcatcgcttctgggataggactcagagaggatctgcctttagcacattatctttccccacttgt

SEQ ID NO: 69910 - DNA, 744 bp, Homo sapiens
tgcactctttgtcgttccttcagttgtatgttgtcatcgatagatctcattgctaaactatgtgtcactagtactgtaggtcaccttacaccttgcgtgacaaataggtaaagtctcaggcatatagatgacatagtcaaatgtctacttatatttaatgtttaaatttagttacccatgtttaaggtaatataataattcagaaatgtcctttagcctaatatttggggaatagttgtagtcaaactctgccattgcagttttgaaagcagctcctttgccatcatgacagtggcattttgaaccgtctaacacaattgtttccatgccactttatctagctgtctagagtgagttactgcaattctaatatctgtatatggagctgttattggaaattttttatcaagctccagctttaggacatttgggttttaattcattctgagtgtatatttatgtgatctctattgctttccaacagatctttaaaagccttgtttaaaatgacaactgcagtagaaacagctaggttccacaaacaattgtgtgctatcttacactgtttagaatctttactagaaagtagcttcctagccaaaytacattttccaagcccattccaactagttggtcctaggtgactagttctgccagtgaaatattagcagaagcaaagcgcatcgcttctgggataggactcagagaggatctgcctttagcacattatctttccccacttgt

SEQ ID NO: 69911 - DNA, 669 bp, Homo sapiens
tttctgagtaatggaactgtcccgtttcttgattgctgtgttggttgtatgagtacatatattcatcaaaactcaccaagctgcactctcaagatttatgctttttagcatatgtaaayattacttgataaaagtgtattacacaaagaacatgaataatttagacaatttttcccttataactatgaactgaacacatcgtagatacgcataaaatcttgtacagatgatcattttcaagtctgattcagttacggtattctagatttgttcttttctcctaaaatgaatttcattgcttattctttcgttatgttgctactttcatttatgattagattaactggttcccaataaaatctaaaaactgcatcttatttgtttaagacattaattttcattatttgaaatgcatcattttataatacatattaaatatgtatacatttcactatttttattaaaaatctgtatttgtaaagtgttttccaaatcatgtaaaaatgtgcagtacattttcagtattctgcaaatcattgaccaatatgcaattatataaaatttacagatctgatgttaaggaaagaaggtagctgaaatgaacgcattagttaaggactataatcttcaaatcaaagagtcactgaggggataaaaatgactaggaaa

SEQ ID NO: 69912 - DNA, 669 bp, Homo sapiens
tttctgagtaatggaactgtcccgtttcttgattgctgtgttggttgtatgagtacatatattcatcaaaactcaccaagctgcactctcaagatttatgctttttagcatatgtaaacattacttgataaaagtgtattacacaaagaacatgaataatttagacaatttttcccttataactatgaactkaacacatcgtagatacgcataaaatcttgtacagatgatcattttcaagtctgattcagttacggtattctagatttgttcttttctcctaaaatgaatttcattgcttattctttcgttatgttgctactttcatttatgattagattaactggttcccaataaaatctaaaaactgcatcttatttgtttaagacattaattttcattatttgaaatgcatcattttataatacatattaaatatgtatacatttcactatttttattaaaaatctgtatttgtaaagtgttttccaaatcatgtaaaaatgtgcagtacattttcagtattctgcaaatcattgaccaatatgcaattatataaaatttacagatctgatgttaaggaaagaaggtagctgaaatgaacgcattagttaaggactataatcttcaaatcaaagagtcactgaggggataaaaatgactaggaaa

SEQ ID NO: 69913 - DNA, 669 bp, Homo sapiens
tttctgagtaatggaactgtcccgtttcttgattgctgtgttggttgtatgagtacatatattcatcaaaactcaccaagctgcactctcaagatttatgctttttagcatatgtaaacattacttgataaaagtgtattacacaaagaacatgaataatttagacaatttttcccttataactatgaactgaacacatcgtagatacgcataaaatcttgtacagatgatcattttcaagtctgattcagttacggtattctagatttgttcttttctcctaaaatgaatttcattgcttattctttcgttatgttgctactttcatttatgattagattaactggttcccaataaaatctaaaaactgcatcttatttgtttaagacattaattttcattatttgaaatgcatcattttataatacatattaaatatgtatacatttcactatttttattaaaaatctgtatttgtaaagtgttttccaaatcatgtaaaaatgtgcagtacattttcagtattctgcaaatcattgacmaatatgcaattatataaaatttacagatctgatgttaaggaaagaaggtagctgaaatgaacgcattagttaaggactataatcttcaaatcaaagagtcactgaggggataaaaatgactaggaaa

SEQ ID NO: 69914 - DNA, 705 bp, Homo sapiens
ctcttctggaggagattaggatatttgcaatgggatgtagaggtgaaggaatccataggtaattttacctttctctctctcttcccttcacacaaagtaagcagctctcatcacactgtcgatagggttgtttggaatggggccacaacagaccttccactgctgaactaactacagatcaacacccaggagaatttcatactccaaactaaatcattttcttgcagcaaatcccgattccctacttgtagcattgtacacctaggcgaaatgaaatgcacgtttgaaattctatcacaacagcagcacaaggtttattggaaagcctcccccgcagttgcatgaacttgttggctcgctgtgaggggcactgcctgctgcatcagcttcgcttccagccgcgacacagctgctgtgtccttccaacttccacacttyggcgtctggcagcctgcagtgtgggaagttgacttgagttttaggctgttactgtgggtagtttctagtaactattcaactcgagagactgagatctttgtgataccattagacaacaaagcatccctaaccttctgtttccttaatgatgtgaactttcctgcaaaaaggtgtatactctcagggccatgatgagtagtagtgatactttttcctatatttgtataatacatgatgaaacactttcacatggattatcacttttgg

SEQ ID NO: 69915 - DNA, 1126 bp, Homo sapiens
tgaattaatacaccttaacactatatgcttggcacataatataccagacacatatgattaaggtgtatttaattgatgttaattattatttttttcctcctgtaaaaaagggatatgtcacaatcctgtaaataatagtggttgttaacaggtttgggggaagacaatgtctaacaatccagaaagggagcaagcatacgttgaattccacctcctcaggtggtttggataaaactctcataaacgcaaagaagaatcacccactcagttgctgacctagacttttgcatattctttgcttcctcaaccatagcttccagcctgtccctatatttagttactaccctcaaagtaataatatagaccttgtataggctgccttaggaaacataaccctatcacctcaaagggtcctaagcaggcactgtgttcacgcagtcaacacaggccacaaaccttgtcattcttatgcctatgtgtggagaaggcaggagcacctcaaggtgctcactaagtgttaggagtattagcataaaactttccagactagggaagaagagatagagacaaacaggaaatagtaagtctgtagaagaggttggaactcactacaaaatttcatggaaagtgggaataaataggaygtgatttcacaaatcagttttgctgatgaaaaatttagttgaggggacattagaaggaaaggaagaggactcactcaagatattttttcagagcaatatggaagtctcaaatacatccggaaattctccatgtcccttatctaggcatagcctgtgagtataggtggaccaggattgacaacccacaggtttgtttcctgtttctgccacacctttgatatgtgactttgggacagcctcttaccctctcagtggcccttataattatagttcctgatataggaagaaccattgctatggtatgtatgtttgccctccccccaatctacctgtccacaattcatttattaaaatctaatccacaatagtaggggcctcttggaaggcaattaagtcatgagggctctgtcctcataaataatattaattcccatacaaaatatgcccaaaagagctcattcccctcttctgccacatgagga

SEQ ID NO: 69916 - DNA, 543 bp, Homo sapiens
gactgaggcaggatgaccacttgmgcctgggaggttgaggctgtaaagaggtgtgattgagccactgcactccagcctgggtgacaaagcgagaccctgtttcaaaaaaaaaaaccggctgccacgcacggtggcttacacctgtaatcttagtactttgggaggtcgaggcaggtggatcacctgagttcaggagttcaagaccagcctgggcaacacagtgaaaccctgtctctactaaaaatacaaaaattggctgggcgtggtggtgtgtccctgtagtcccagctacttgggaggctgaggtaggagaatcacttgaacctgggaggtggaggttgcagtgagccgagattgtgcccctcactccagcctgggggacagagcaagactccgtctcaaaaataataataattataaaataataatgatttgcaaagcctgtttgaagtgcctgaatgtcactgattcctgaactccagttctctagctacatcagagtatccaaaccccatcctagaagagtctgattcaccgtaagtt

SEQ ID NO: 69917 - DNA, 1414 bp, Homo sapiens
gcctccaggaggaacagtaaggagtggatgggatgaagccctccaccctggccacaggtggtgtctgtgggtggcagagctgagattcccccaccttggaccccagtgccgacacttgccattgtaccatgccacctccctgccccctgagactgggcctgaggaagccacagcccctcccatgtgccctggcccctctgggctcccatggaggatggtgctgctgggtcacctgctttgggctctgccctcagactcccttcaccccaaggtgtgccatcctctccattccaccaaggcctgtccaggcctcgcttgcttaatccatagtcttcagagccacctgtcattaggcagggcaagtgggagccgcttcatggtgatcttggagacagattttcaccatcaaccactccccatcagctcagctctgagaaggtacaaggtgttttcgttttgtataattactattgtgggccaagtgtggtggttcatgcctgtaatctgagcactttgggaggctgaggcaggggatcacttgaggtcaggagtttgagactagccgggccaacatggcaaaactccatctctactaaaaatacaaaaattagctgtaaatggtggtgggcacctgtagttccagctactttggaagctgagacagaagaattgattgaacctgggagttggaggttgcagtgagccaagattgtgccattgcattccagcttgggtgacagagtaagactctatcttaaaaataaaataaaatttatttatttttatttattttttttttgctttaaaaattctttaatttgatacagtcaagacttcatatataacttctagtttacaggaaatacaggtgatatacaggttatacactggagaaatacagggaaatacaacacgaagaaaaaaatcagataaacccagaagaagagttctaaagaaaaattgacctggtctatcaacatgacaatgtcaaaaatgggggaggggagacaggagatggcatctatgctaatttacagagattaagaaacataacaaaggccgtggttttttttttgtttktttgtttgtttttttttttttttattgatcattcttgggtgtttctcgcagagggggatttcgcagggtcataggacaatagtggaaggaaggtcagcagataaacaagtgaacaaaggtctctggttttcctaggcagaggaccctgcggccttccgcagtgtttgtgtccctgggtacttgagattagggagtggtgatgacacgagcatgctgccttcaagcatctgtttaacaaagcacatcttgcaccgcccttaatccatttaaccctgagtggacacagcacatgtttcagagagcacagggttgggggtaaggtcacagatcaaca

SEQ ID NO: 69918 - DNA, 1414 bp, Homo sapiens
gcctccaggaggaacagtaaggagtggatgggatgaagccctccaccctggccacaggtggtgtctgtgggtggcagagctgagattcccccaccttggaccccagtgccgacacttgccattgtaccatgccacctccctgccccctgagactgggcctgaggaagccacagcccctcccatgtgccctggcccctctgggctcccatggaggatggtgctgctgggtcacctgctttgggctctgccctcagactcccttcaccccaaggtgtgccatcctctccattccaccaaggcctgtccaggcctcgcttgcttaatccatagtcttcagagccacctgtcattaggcagggcaagtgggagccgcttcatggtgatcttggagacagattttcaccatcaaccactccccatcagctcagctctgagaaggtacaaggtgttttcgttttgtataattactattgtgggccaagtgtggtggttcatgcctgtaatctgagcactttgggaggctgaggcaggggatcacttgaggtcaggagtttgagactagccgggccaacatggcaaaactccatctctactaaaaatacaaaaattagctgtaaatggtggtgggcacctgtagttccagctactttggaagctgagacagaagaattgattgaacctgggagttggaggttgcagtgagccaagattgtgccattgcattccagcttgggtgacagagtaagactctatcttaaaaataaaataaaatttatttatttttatttattttttttttgctttaaaaattctttaatttgatacagtcaagacttcatatataacttctagtttacaggaaatacaggtgatatacaggttatacactggagaaatacagggaaatacaacacgaagaaaaaaatcagataaacccagaagaagagttctaaagaaaaattgacctggtctatcaacatgacaatgtcaaaaatgggggaggggagacaggagatggcatctatgctaatttacagagattaagaaacataacaaaggccgtggttttttttttgtttgtttktttgtttttttttttttttattgatcattcttgggtgtttctcgcagagggggatttcgcagggtcataggacaatagtggaaggaaggtcagcagataaacaagtgaacaaaggtctctggttttcctaggcagaggaccctgcggccttccgcagtgtttgtgtccctgggtacttgagattagggagtggtgatgacacgagcatgctgccttcaagcatctgtttaacaaagcacatcttgcaccgcccttaatccatttaaccctgagtggacacagcacatgtttcagagagcacagggttgggggtaaggtcacagatcaaca

SEQ ID NO: 69919 - DNA, 1414 bp, Homo sapiens
gcctccaggaggaacagtaaggagtggatgggatgaagccctccaccctggccacaggtggtgtctgtgggtggcagagctgagattcccccaccttggaccccagtgccgacacttgccattgtaccatgccacctccctgccccctgagactgggcctgaggaagccacagcccctcccatgtgccctggcccctctgggctcccatggaggatggtgctgctgggtcacctgctttgggctctgccctcagactcccttcaccccaaggtgtgccatcctctccattccaccaaggcctgtccaggcctcgcttgcttaatccatagtcttcagagccacctgtcattaggcagggcaagtgggagccgcttcatggtgatcttggagacagattttcaccatcaaccactccccatcagctcagctctgagaaggtacaaggtgttttcgttttgtataattactattgtgggccaagtgtggtggttcatgcctgtaatctgagcactttgggaggctgaggcaggggatcacttgaggtcaggagtttgagactagccgggccaacatggcaaaactccatctctactaaaaatacaaaaattagctgtaaatggtggtgggcacctgtagttccagctactttggaagctgagacagaagaattgattgaacctgggagttggaggttgcagtgagccaagattgtgccattgcattccagcttgggtgacagagtaagactctatcttaaaaataaaataaaatttatttatttttatttattttttttttgctttaaaaattctttaatttgatacagtcaagacttcatatataacttctagtttacaggaaatacaggtgatatacaggttatacactggagaaatacagggaaatacaacacgaagaaaaaaatcagataaacccagaagaagagttctaaagaaaaattgacctggtctatcaacatgacaatgtcaaaaatgggggaggggagacaggagatggcatctatgctaatttacagagattaagaaacataacaaaggccgtggttttttttttgtttgtttgtttgtttttttttttttttattgatcattcttgggtgtttctcgcagagggggatttcgcagggtcataggacaatagtggaaggaaggtcagcagataaacaagtgaacaaaggtctstggttttcctaggcagaggaccctgcggccttccgcagtgtttgtgtccctgggtacttgagattagggagtggtgatgacacgagcatgctgccttcaagcatctgtttaacaaagcacatcttgcaccgcccttaatccatttaaccctgagtggacacagcacatgtttcagagagcacagggttgggggtaaggtcacagatcaaca

SEQ ID NO: 69920 - DNA, 402 bp, Homo sapiens
tagaccaaaggggcgtggctgggtttgggtctatcctcccacacctgccctgggagcctcggtttccagtctgcaggaggaggaggagctcccagctgcttcgcaggagcaggaggtgtgggccatcgctgttggctgcatgtgaaggaggggccttctccactgagagctctctctgcccctggagtgctgggcacgctgtccccatctctgcttcccaacataccatgggctatacacctgatgaacatgttagtgattatctgacgagatcartggttcatcagctatcgatggggtgtccacaatggctgaggagaagaacagctgcaggcccccaccccggagctcatggttcacagagggaagaagatgggaaaacgctggggcacacggagggga

SEQ ID NO: 69921 - DNA, 439 bp, Homo sapiens
gggggagacccccgttcattcatttagcgtctgaggcgggggagactctgagtgaaggggaagcccccgttcatttagtgtctgaggcgggggagactctgagtgaggggagaccagcgtccgtttggcgtctgaggtggggagaccggcattcatttagcgtctgaggcgggaggagagaccggcgttcatttagcgtctgcggggtgcccaggttygacagcatctcaccgcatgttcatagaagcccttgaagctagcagcactgtcactgcttttatcctgatcaggacacggagcctctgattgttgaagcaaaccttgtttttctctgacttcagctctttgtgttctcttactgtgaaggttaatgtggtaacagtttccacggggctcaccagggcaggcatagtacatagcacaggtgtgaatgcaatgg

SEQ ID NO: 69922 - DNA, 1646 bp, Homo sapiens
agaacccaaatgaggaagcagtgctgaaaaatagatgtactcttgtgatcaactcacatgactggaatgaattctgcaaaaatagcagccggattattcaaagctcgtatcaggcagccagttggatggaggttctcctcctgtgtgagatactctcccatggcactcagaggacaccagcatgaaggtccttgtgaactaaagcgggctccacatgggtgaaggaacacagaatgagcctgcagctatttctctctttcacgcaagttgagagacctctagaaattcagctagtcttaagctgatggtttggcatacgtaagaaagtcacagcaaaagggggtcccttctgtagtctgcatctaactcttcaatctaaagacaacagagacttattaagacgtgcgtatcaagggcccactatgagccaagccccttgttacacatttttctcatttttctttggccagagcatactgatattggcatatggggtggttgtgatttccaaatgaaataataaaatgaaaatgttcaattgtgtatagctgcccaatggaatgttaccctgtcatagaaaggaaggaaattctacacatcctacgacttgggtgaaccctgaggacactatgctgagtgaaataagccatcacaaaaggacaaggacggtgtgattaccctaacatgtggcacttggaggagtcagatgcacagacagaaggccggataggacaaggatggtgtgatccccttacacacagcacctggaggagtcagatgcacagacagaaggccggataggacaaggatggtgtgatccccttacacgcagcacctggagaagtcagatgcacagacagaaggccgaataggacaaggacagtatgatccccttatacgcagcacctggaggagttggatacacagacaggtcagagggaggctgccagcagctggggagggagaatgaggagggctgtttaatggggcagagcttcagtttgggaagatcgagaagttctggagatattggcagtgatggctgcacaacaatgagaaagtgcttaatgccactgaaatagacaaaaatgcccatgatggtgaatcttatgtgtagctgatctcaatttaaacatttaaaaaattttttgcacttagtttttagtaaacttgtatagtattttgccaactaaggtagtttttaaaattatatttcagcactgggtgatataaggatttttaaatttataaattatgcctaactccatagcctcagtcatgataacattatgaattcaatcttttaactcgtttcaatgatagtgaaaatatctgtctgtattttaaagaatataaaagacttagccatgcccatggtaaatggggggttcataaaagcmtgtgcttgatctgtcagaaggggacctggtgttaacatctagcatcttccccgggaggccagccaggtacaacattagctttgctactcgacagcatcgcccatggtaccagggacccatcaggaacctggtacctgtttaagaaagaaagaagtgtctgatgggaacactgtgcttgggtcttccctgaggacagacatggacagctgagtgcatccctgcaggggccccagaaggcgttcctct

SEQ ID NO: 69923 - DNA, 1646 bp, Homo sapiens
agaacccaaatgaggaagcagtgctgaaaaatagatgtactcttgtgatcaactcacatgactggaatgaattctgcaaaaatagcagccggattattcaaagctcgtatcaggcagccagttggatggaggttctcctcctgtgtgagatactctcccatggcactcagaggacaccagcatgaaggtccttgtgaactaaagcgggctccacatgggtgaaggaacacagaatgagcctgcagctatttctctctttcacgcaagttgagagacctctagaaattcagctagtcttaagctgatggtttggcatacgtaagaaagtcacagcaaaagggggtcccttctgtagtctgcatctaactcttcaatctaaagacaacagagacttattaagacgtgcgtatcaagggcccactatgagccaagccccttgttacacatttttctcatttttctttggccagagcatactgatattggcatatggggtggttgtgatttccaaatgaaataataaaatgaaaatgttcaattgtgtatagctgcccaatggaatgttaccctgtcatagaaaggaaggaaattctacacatcctacgacttgggtgaaccctgaggacactatgctgagtgaaataagccatcacaaaaggacaaggacggtgtgattaccctaacatgtggcacttggaggagtcagatgcacagacagaaggccggataggacaaggatggtgtgatccccttacacacagcacctggaggagtcagatgcacagacagaaggccggataggacaaggatggtgtgatccccttacacgcagcacctggagaagtcagatgcacagacagaaggccgaataggacaaggacagtatgatccccttatacgcagcacctggaggagttggatacacagacaggtcagagggaggctgccagcagctggggagggagaatgaggagggctgtttaatggggcagagcttcagtttgggaagatcgagaagttctggagatattggcagtgatggctgcacaacaatgagaaagtgcttaatgccactgaaatagacaaaaatgcccatgatggtgaatcttatgtgtagctgatctcaatttaaacatttaaaaaattttttgcacttagtttttagtaaacttgtatagtattttgccaactaaggtagtttttaaaattatatttcagcactgggtgatataaggatttttaaatttataaattatgcctaactccatagcctcagtcatgataacattatgaattcaatcttttaactcgtttcaatgatagtgaaaatatctgtctgtattttaaagaatataaaagacttagccatgcccatggtaaatggggggttcataaaagcatgtgcttgatctgtcagaaggggacctggtgttaacatctagcatcttccccgggaggccagccaggtacaacattagctttgctactcgacagcatcgcccatggtaccagggacccatcaggaacctggtacctgtttaagaragaaagaagtgtctgatgggaacactgtgcttgggtcttccctgaggacagacatggacagctgagtgcatccctgcaggggccccagaaggcgttcctct

SEQ ID NO: 69924 - DNA, 946 bp, Homo sapiens
ctcttgaaattttgtacagatacactgtgtattatgtactgtagccctagaagagccgcaagccattgtaatatctaacattggctaatgttattttgttccctaagaagccattttcaccccattgtgggtgatactgtcwctcttgagaatgtatagtttagttcaagactgtttggccatccagccccacctgtgactagtggaggtgatttggggtgagcagagagttactgcacaaatgtaacaagcatgtctatccaagacgtggagccacgtggagttagctttcagaggtgtcaaattctaggtagactgggccattctcctttccctctagctttctacttttcacttttacaaataccagttgagtatctatctgtaggcaaatatcttgttctatattcaagataaatgttgttttattttttctctaaaaatgaagttattaaggtcaggtatggtggctcatgcctgtaatcccagcactttgggaggctgaggaaggaggatcacttgagcccaggagatcaagaccagcctgggcaacatagcaagaccccctctctattttttttttccccagacagagtcttgctctgtcgcccaggctggagtgcagtggtcttaccttggctcactgcaacctctgcctcctgggttcagcgattctcctgcctcagcctcccgaatcgctgggattacaggcacctgccaccagacccagctaattattgtattttttgtagagatggggtttcaccatgttggccagactggtctcgaactcctgacctcaggtgatccacctgcctcggcctcccaaagtgttgggattacaggtgtgagccacctcacccaacccccctctattttgttaagtgcattgttagatccaaaggaaacagcactttacaggatcttgattggtacttcctgtcta

SEQ ID NO: 69925 - DNA, 1217 bp, Homo sapiens
tgttggaaaaaaaatgtttttgggggtggcttttttattaaaagaaaaagccttactgaggactgttttaccctatctgcctaaaataatttcttaatagctcctgtaataaaagtgctaaaaacgtaaggggtcttgtcaaaaggacaaaagagccaacttaaaggggctcctcataaccaaagctggaatgatccgagggccaaaataaataacgatagtattggactgcaacccatgaaataaaataaatatccataaacctataatgctataaataagcaaccaaataaataaatggggagaaataacatctctttcatatagaagagtgtcttaatgaaactctttttactatatttgaaacttttatgagagtctaaaattagttagaaatagaaagttaaaaaaaattaataggtatgccaagaagtagaaacaaatgaccaagaatgtaaagcaaaaatacaatcacagggatcctgatacggaggtcatcaggcaaagaccttaaaatgtctattaccattaatattctcaagaaaatgtgaaaattaaaccaaacaagtagaatatattcytaaaagcttaaatagaggaggcagaacaagatggccaattagaaatccctagcactttatctccctgacaaacagccaaactagcaaacaaccacacatcgatgaaaataactaaaggagagtgccagagcacatcaaagaaatagcagaaccggtagagcacagaaacccagtatggtcacatagagaacaaaaggaaacaccttgcctctgccacccatcccccggtcgagatcagcttggaaccaggagggacttccctgcagggaaaaggaaaacagaaggaccctgacaacccccatcaccaccttgaacaactacagtcttcactactggggactcctgcagtattcacaggtgctatgtccagctgcaggagctgtccagaatccatactgctgcatgccttgaccactcagagtaggagctgacactgtgccttgcctccccatggcccacactgacactgcactgagctaccttgaaaccagagccactgctggaatgtgtcgcgttctgggggccagtagtcactgcaccccttcatccctcaggctttgtcaccactgaaccacctctgcctggtggcccacaattcctgagctgaactgctgctacatcctatcctgtggaacc

SEQ ID NO: 69926 - DNA, 1217 bp, Homo sapiens
tgttggaaaaaaaatgtttttgggggtggcttttttattaaaagaaaaagccttactgaggactgttttaccctatctgcctaaaataatttcttaatagctcctgtaataaaagtgctaaaaacgtaaggggtcttgtcaaaaggacaaaagagccaacttaaaggggctcctcataaccaaagctggaatgatccgagggccaaaataaataacgatagtattggactgcaacccatgaaataaaataaatatccataaacctataatgctataaataagcaaccaaataaataaatggggagaaataacatctctttcatatagaagagtgtcttaatgaaactctttttactatatttgaaacttttatgagagtctaaaattagttagaaatagaaagttaaaaaaaattaataggtatgccaagaagtagaaacaaatgaccaagaatgtaaagcaaaaatacaatcacagggatcctgatacggaggtcatcaggcaaagaccttaaaatgtctattaccattaatattctcaagaaaatgtgaaaattaaaccaaacaagtagaatatattcttaaaagcttaaatagaggaggcagaacaagatggccaattagaaatccctagcactttatctccctgacaaacagccaaactarcaaacaaccacacatcgatgaaaataactaaaggagagtgccagagcacatcaaagaaatagcagaaccggtagagcacagaaacccagtatggtcacatagagaacaaaaggaaacaccttgcctctgccacccatcccccggtcgagatcagcttggaaccaggagggacttccctgcagggaaaaggaaaacagaaggaccctgacaacccccatcaccaccttgaacaactacagtcttcactactggggactcctgcagtattcacaggtgctatgtccagctgcaggagctgtccagaatccatactgctgcatgccttgaccactcagagtaggagctgacactgtgccttgcctccccatggcccacactgacactgcactgagctaccttgaaaccagagccactgctggaatgtgtcgcgttctgggggccagtagtcactgcaccccttcatccctcaggctttgtcaccactgaaccacctctgcctggtggcccacaattcctgagctgaactgctgctacatcctatcctgtggaacc

SEQ ID NO: 69927 - DNA, 635 bp, Homo sapiens
agtttttataatttcactaatatttttaaaaatcaactttaggctttgtcaatttccacttttgaatatttatctcattgattttggcttttacttttgttgttttcttcatcctaatttattgtaaactttctctttgcttttcagcagttttactttgatgtgtctaggtgtggttttctatacaattattttggttgagatatgcacarcttcttgactctcaaactttaattgtgtcaacttgcctggattaacgaaaacccagaaacctggtaaagtgttgttttgggtgcgtctgtgagggtgtgtccagaggagattagtctataagtctgattgactaggaggggaagattggccttactgttggaggccccatttgattggctgggagtccagagagagcaaatgcagaaagcaaaatgggtctttttctgtgagctgggaccaacttttcctctgctgccttatacatcagaactccaggatagctggcttttggactcaagaacttacatcagcagtccctgcaggtctcgaggctgttagcctcaggctgagagttacaccatccgcttccctggttttgaggccgtcagatttggacacagccaccctaccagcgggatccc

SEQ ID NO: 69928 - DNA, 635 bp, Homo sapiens
agtttttataatttcactaatatttttaaaaatcaactttaggctttgtcaatttccacttttgaatatttatctcattgattttggcttttacttttgttgttttcttcatcctaatttattgtaaactttctctttgcttttcagcagttttactttgatgtgtctaggtgtggttttctatacaattattttggttgagatatgcacaacttcttgactctcaaactttaattgtgtcaacttgcctggattaacgaaaacccagaaacctggtaaagtgttgttttgggtgcgtctgtgagggtgtgtccagaggagattagtctataagtctgattgactaggaggggaagattggccttactgttggaggccccatttgattggctgggagtccagagagagcaaatgcagaaagcaaaatgggtctttttctgtgagctgggaccaacttttcctctgctgccttatacatcagaactccaggatagctggcttttggactcaagaactyacatcagcagtccctgcaggtctcgaggctgttagcctcaggctgagagttacaccatccgcttccctggttttgaggccgtcagatttggacacagccaccctaccagcgggatccc

SEQ ID NO: 69929 - DNA, 554 bp, Homo sapiens
acacacatatatatacatatatacacgcacacatatatatacatatatatacacacacacacacacacayatatatatatatatatatatatatatacaccatggaatactactcagccataaaaaagaataaaataatatcttctgcacaacttggatggagctgaggccattatcctaagtgaattagctcaggaacagaaaaccaaatactgcatgttctcacttataagtgggagctaagctatgaagacatgaaggcacacagagtgatagagtggacatggaagactcagaagtggggagggtgggagagatagtgagggataaaaaaactacatattgggtacaaggtacactactcaagtgaccgatgcactaaaacctcagactttaccattatactattcatccatgaaaccaaaaccacttgtacttcaagagctattgaaacaaaaaatgtatgtataaataataatattacttcaaaaagaaaacaaaaccagaaaataactagtgctatttttaaaaacgtgtgcattgttggtgggaat

SEQ ID NO: 69930 - DNA, 554 bp, Homo sapiens
acacacatatatatacatatatacacgcacacatatatatacatatatatacacacacacacacacacatayatatatatatatatatatatatatacaccatggaatactactcagccataaaaaagaataaaataatatcttctgcacaacttggatggagctgaggccattatcctaagtgaattagctcaggaacagaaaaccaaatactgcatgttctcacttataagtgggagctaagctatgaagacatgaaggcacacagagtgatagagtggacatggaagactcagaagtggggagggtgggagagatagtgagggataaaaaaactacatattgggtacaaggtacactactcaagtgaccgatgcactaaaacctcagactttaccattatactattcatccatgaaaccaaaaccacttgtacttcaagagctattgaaacaaaaaatgtatgtataaataataatattacttcaaaaagaaaacaaaaccagaaaataactagtgctatttttaaaaacgtgtgcattgttggtgggaat

SEQ ID NO: 69931 - DNA, 554 bp, Homo sapiens
acacacatatatatacatatatacacgcacacatatatatacatatatatacacacacacacacacacatatayatatatatatatatatatatatacaccatggaatactactcagccataaaaaagaataaaataatatcttctgcacaacttggatggagctgaggccattatcctaagtgaattagctcaggaacagaaaaccaaatactgcatgttctcacttataagtgggagctaagctatgaagacatgaaggcacacagagtgatagagtggacatggaagactcagaagtggggagggtgggagagatagtgagggataaaaaaactacatattgggtacaaggtacactactcaagtgaccgatgcactaaaacctcagactttaccattatactattcatccatgaaaccaaaaccacttgtacttcaagagctattgaaacaaaaaatgtatgtataaataataatattacttcaaaaagaaaacaaaaccagaaaataactagtgctatttttaaaaacgtgtgcattgttggtgggaat

SEQ ID NO: 69932 - DNA, 1097 bp, Homo sapiens
gcatttgtaggacggttcctgtcccactgaggttaactaaatggtctggggatgggcaaggagaaagaaggggagcacttgcaaagtagctggctccactttggaggaaaaaaatcctggggttgtttttgaggtccggctgagaaccaagagcaacaacaaatcatctatatttttttcagcgcatcatgtctatttttcacgtagcaactcccttccgggcattcggaaaacgctcctcgtcggatatttctacccacaggatgctctttctgtttaacatggaagtagctttgaattctctctgcaaagaagaggtccggtatcccggcgggagaagcaaagtgccactgggtgctggaacgtggaggagagggctcgcaggaggaagggtggggcttgggaaggaaaaaggcgcggctcggaggagaaaccggctgctcacaatccgcgaagccagaagttacccggctcgtggaaccacgtccacttcccccagccagttccctcctgggtttcattcttaaaaagcgatttgtattggtgcctctcttccgtgtgctacaaagagaagtgaccgctagagggcaatatgctgcaaaataagaatttgatcgcacatgagaagagctgaaataataagcatacagatagaatgaaatagaggtattgtgaagaagtgtggtgagtaggctttccaatccctgttctccatatccatacaccccctcaaatatacacacttaactgaatggcaaagtatctgcactgcagaagctaacccatcatttttttctctctctctcttagtttctgagagttgggaggagttttagggaatattgaactcctcgacatcagaacagggtagtttctggaagctttcaccgttcataagcccagagtataagatcaaagtagtggttctcaaccgggggccsggaggggaggaggggagtttgcctcccaaggaacatttggccttgtctggagagatttgtgtttgtcacagcttgggggatggggtgaacatagatactacatagatactagcacctagtgggtagaggccagggatgtcactcaacatcttacaa

SEQ ID NO: 69933 - DNA, 1097 bp, Homo sapiens
gcatttgtaggacggttcctgtcccactgaggttaactaaatggtctggggatgggcaaggagaaagaaggggagcacttgcaaagtagctggctccactttggaggaaaaaaatcctggggttgtttttgaggtccggctgagaaccaagagcaacaacaaatcatctatatttttttcagcgcatcatgtctatttttcacgtagcaactcccttccgggcattcggaaaacgctcctcgtcggatatttctacccacaggatgctctttctgtttaacatggaagtagctttgaattctctctgcaaagaagaggtccggtatcccggcgggagaagcaaagtgccactgggtgctggaacgtggaggagagggctcgcaggaggaagggtggggcttgggaaggaaaaaggcgcggctcggaggagaaaccggctgctcacaatccgcgaagccagaagttacccggctcgtggaaccacgtccacttcccccagccagttccctcctgggtttcattcttaaaaagcgatttgtattggtgcctctcttccgtgtgctacaaagagaagtgaccgctagagggcaatatgctgcaaaataagaatttgatcgcacatgagaagagctgaaataataagcatacagatagaatgaaatagaggtattgtgaagaagtgtggtgagtaggctttccaatccctgttctccatatccatacaccccctcaaatatacacacttaactgaatggcaaagtatctgcactgcagaagctaacccatcatttttttctctctctctcttagtttctgagagttgggaggagttttagggaatattgaactcctcgacatcagaacagggtagtttctggaagctttcaccgttcataagcccagagtataagatcaaagtagtggttctcaaccgggggccgggrggggaggaggggagtttgcctcccaaggaacatttggccttgtctggagagatttgtgtttgtcacagcttgggggatggggtgaacatagatactacatagatactagcacctagtgggtagaggccagggatgtcactcaacatcttacaa

SEQ ID NO: 69934 - DNA, 1097 bp, Homo sapiens
gcatttgtaggacggttcctgtcccactgaggttaactaaatggtctggggatgggcaaggagaaagaaggggagcacttgcaaagtagctggctccactttggaggaaaaaaatcctggggttgtttttgaggtccggctgagaaccaagagcaacaacaaatcatctatatttttttcagcgcatcatgtctatttttcacgtagcaactcccttccgggcattcggaaaacgctcctcgtcggatatttctacccacaggatgctctttctgtttaacatggaagtagctttgaattctctctgcaaagaagaggtccggtatcccggcgggagaagcaaagtgccactgggtgctggaacgtggaggagagggctcgcaggaggaagggtggggcttgggaaggaaaaaggcgcggctcggaggagaaaccggctgctcacaatccgcgaagccagaagttacccggctcgtggaaccacgtccacttcccccagccagttccctcctgggtttcattcttaaaaagcgatttgtattggtgcctctcttccgtgtgctacaaagagaagtgaccgctagagggcaatatgctgcaaaataagaatttgatcgcacatgagaagagctgaaataataagcatacagatagaatgaaatagaggtattgtgaagaagtgtggtgagtaggctttccaatccctgttctccatatccatacaccccctcaaatatacacacttaactgaatggcaaagtatctgcactgcagaagctaacccatcatttttttctctctctctcttagtttctgagagttgggaggagttttagggaatattgaactcctcgacatcagaacagggtagtttctggaagctttcaccgttcataagcccagagtataagatcaaagtagtggttctcaaccgggggccgggaggggaggrggggagtttgcctcccaaggaacatttggccttgtctggagagatttgtgtttgtcacagcttgggggatggggtgaacatagatactacatagatactagcacctagtgggtagaggccagggatgtcactcaacatcttacaa

SEQ ID NO: 69935 - DNA, 1097 bp, Homo sapiens
gcatttgtaggacggttcctgtcccactgaggttaactaaatggtctggggatgggcaaggagaaagaaggggagcacttgcaaagtagctggctccactttggaggaaaaaaatcctggggttgtttttgaggtccggctgagaaccaagagcaacaacaaatcatctatatttttttcagcgcatcatgtctatttttcacgtagcaactcccttccgggcattcggaaaacgctcctcgtcggatatttctacccacaggatgctctttctgtttaacatggaagtagctttgaattctctctgcaaagaagaggtccggtatcccggcgggagaagcaaagtgccactgggtgctggaacgtggaggagagggctcgcaggaggaagggtggggcttgggaaggaaaaaggcgcggctcggaggagaaaccggctgctcacaatccgcgaagccagaagttacccggctcgtggaaccacgtccacttcccccagccagttccctcctgggtttcattcttaaaaagcgatttgtattggtgcctctcttccgtgtgctacaaagagaagtgaccgctagagggcaatatgctgcaaaataagaatttgatcgcacatgagaagagctgaaataataagcatacagatagaatgaaatagaggtattgtgaagaagtgtggtgagtaggctttccaatccctgttctccatatccatacaccccctcaaatatacacacttaactgaatggcaaagtatctgcactgcagaagctaacccatcatttttttctctctctctcttagtttctgagagttgggaggagttttagggaatattgaactcctcgacatcagaacagggtagtttctggaagctttcaccgttcataagcccagagtataagatcaaagtagtggttctcaaccgggggccgggaggggaggaggggagtttgcctcccaaggaacatttggccttgtctggagagatttgtgtttgtcacagcttgggggatggggtgracatagatactacatagatactagcacctagtgggtagaggccagggatgtcactcaacatcttacaa

SEQ ID NO: 69936 - DNA, 1097 bp, Homo sapiens
atattccaccagcacaccaccataattaatggaggctagaacatgtctattaaatcccctggaaaaaaggttttcagtttcctgatctacaatttgtccattgttctgcccaaatccttcaggttccttcaaggctaggattgtccctactttactcttggcctcaattgccaagagactaatgcccatggctcttgacaaagaaaacaatcatttaaaggtatttaacctaatcgagagtcgtgagaatggagccaactacacagccatatatgaagtctgctaaaaacagaacaaatgggcaagtgctcaggtcctcaccaaagcaaagccttaaatgatgaagtcaaatataatctgggagaatatcagaatacattacttttgaaagaaaagtctaagaattataaacatgaaggaaaaacggggagaaaggtgcaagaattacattgactactacacaaaagactcaaagggccctaatatgactgtcatgtaggttcacataaattctacacatatctctgattattactttcctctaggtcaagagaccccagttagcaaaacacttaagcaattctyatttcataaacattaacatctggctttgagttagaagaaattctttcaaacatttaaatgagaatatttaaaatattctgggtgcactttttcattagaggctcccacaaaattgccacaaacaatatttaactgctttgttttaaattttgaaactcttgtaaaaatatttttacacagaattgtaagattttttaatataccccaaagatatttgcatttttgttgtttcatttaacttggtttaaaatttaaagtaatacatcattttttaaaaagcaaaaaagtcaaacattatgaatggtataattttactttgtgaaattttaaaaattgtatacagataatacattgtggaaggatacaaaagaaactgccaatagtagcgctctaatagtggctgttaaacaaggtttgatggctcaggaaaactcacagaacccacaatgacaatgcttacaagtttacagggtgtattttgcaggaaaaggatataacataacaatgacagt

SEQ ID NO: 69937 - DNA, 1548 bp, Homo sapiens
cataatctggggccctctctcctctggaaagaagattctggaaggggttgggagtgaggacaggctcagatcggagattctaatctggggccctcccttccctggaaataagattctggaaggggtaggggtgtggactgtcttagatagaaaatcctaatctgggtccctctctcccctggagataagattctggaaggggctggggtttggggccctctctcccctggcctggggcacctgtccctgttcccctgacccggccacactgtgatgacacgaacctcttgccacccccagccctggggcctggctgaggtcccttaagggtctgctttgccccccaccctcacctccaaagtgcagcaacagctttgccagcgacctctgacctctccctgaccctccactgcctcccacctcccaccctcattacatccccggccctgacctcatgtctgcggggccatgggcgagggtgagataaggcggccattgcaggctgtgctccctcctgggtaccgacgggaagggcgggccaggccgccagcctcagaagagagtggcccatgactcaccaggtgggcagcgcccaggccggcgtccgggaggaaacgccacttcctctgggtgaggcaggaggctggcgggggaagctttctggtttatgcattttttgaggttttgtttcaggagtccttcacttctgtgtcaaaagatcttctcccacaatttgttctagcaacttcagaatcttacttttttgtttgtttttgtttttagagacaggttctccatctgtggcccagactggagtacagtggtrtgacctagctcactgcagcattgaactcctgggctcaagcgatccacccacctcagcctcccaagtagctaggactataggcacgagccaccacagctggctaattgtttatttttgtagagatgaggtcttgctatgtattcccagtgccttgggaggctgaggtgcgaagatcgcttgagaccaggaattcaagaccagcctgggcaacatattgagaccctatctctacaaaaacatttttttaaaaagattagccgggtgtggtggcatgcacctgtagtcccagctagtcaggaggctgaggcgggaggatcgcttaagcccaggagttcaaggatgcagtgagttaggatcacacactgcactccaaacctgggagacagagcaagaccttgtctcaaaaaaacaaaacaaataaaaaaaacaccagactctgagaagaaagagtaagacagaaatataatccatagcccagttccacttgggtaaatcaaaactcctccaaaacagtgatacacatattaagaaatggaggtaaaattcacataacataaagttaaccatgaaccacttgtaaagggtacaattcagtggcatttagcacactcacctctatctagttctgagacatgtgagttaccccaaaaggaagatccgtccccattagtagccatgagtgatccttgttttacaagaacgcacgtgaatgaaagggcaca

SEQ ID NO: 69938 - DNA, 1548 bp, Homo sapiens
cataatctggggccctctctcctctggaaagaagattctggaaggggttgggagtgaggacaggctcagatcggagattctaatctggggccctcccttccctggaaataagattctggaaggggtaggggtgtggactgtcttagatagaaaatcctaatctgggtccctctctcccctggagataagattctggaaggggctggggtttggggccctctctcccctggcctggggcacctgtccctgttcccctgacccggccacactgtgatgacacgaacctcttgccacccccagccctggggcctggctgaggtcccttaagggtctgctttgccccccaccctcacctccaaagtgcagcaacagctttgccagcgacctctgacctctccctgaccctccactgcctcccacctcccaccctcattacatccccggccctgacctcatgtctgcggggccatgggcgagggtgagataaggcggccattgcaggctgtgctccctcctgggtaccgacgggaagggcgggccaggccgccagcctcagaagagagtggcccatgactcaccaggtgggcagcgcccaggccggcgtccgggaggaaacgccacttcctctgggtgaggcaggaggctggcgggggaagctttctggtttatgcattttttgaggttttgtttcaggagtccttcacttctgtgtcaaaagatcttctcccacaatttgttctagcaacttcagaatcttacttttttgtttgtttttgtttttagagacaggttctccatctgtggcccagactggagtacagtggtgtgacctagctcactgcagcattgaaytcctgggctcaagcgatccacccacctcagcctcccaagtagctaggactataggcacgagccaccacagctggctaattgtttatttttgtagagatgaggtcttgctatgtattcccagtgccttgggaggctgaggtgcgaagatcgcttgagaccaggaattcaagaccagcctgggcaacatattgagaccctatctctacaaaaacatttttttaaaaagattagccgggtgtggtggcatgcacctgtagtcccagctagtcaggaggctgaggcgggaggatcgcttaagcccaggagttcaaggatgcagtgagttaggatcacacactgcactccaaacctgggagacagagcaagaccttgtctcaaaaaaacaaaacaaataaaaaaaacaccagactctgagaagaaagagtaagacagaaatataatccatagcccagttccacttgggtaaatcaaaactcctccaaaacagtgatacacatattaagaaatggaggtaaaattcacataacataaagttaaccatgaaccacttgtaaagggtacaattcagtggcatttagcacactcacctctatctagttctgagacatgtgagttaccccaaaaggaagatccgtccccattagtagccatgagtgatccttgttttacaagaacgcacgtgaatgaaagggcaca

SEQ ID NO: 69939 - DNA, 1185 bp, Homo sapiens
ttttgacttctgagaaggtctctatccccaaacagtgagcactactttgctaaaaawagtctgtgtgttctgaataaatggaaacgtcttaccaatatatgaattgctgatctttaaagtaaataaataggcgaatagattcttatccacatttcttctagccacaaattttaaggaaatcctgcagtcctttacaagggggggagtttctcagctagatggaaagatatgacgacaatttccccattcacaaaacatttcctgtctccgtaagtacccactgcccaattactcattttacacttattctgtgtgaatttacattgtgacttggcatttttaggcatccgtggttcctactgatttcctctggtccccattggtttcctttcttaggctttactgaatctcccaagggccaaagtagaaacccaattaatgcgtgcataacctagatggctcatgcccttacttttacattctttccattgcatgacactgtcttggagctctttaaggaagcatctttcaaaatcttgtgtgtgagagagagaaaagactcacagaaggaaatgtagaatgggaagaaactattcatgaggaatatctctttaatatagtaagagcatgttggtagaaaaataaagactgcttgataactaaaggttaataaaaaccacaactgttggaaagcaaagacataacttcattcccccacataccccaaaatagcatacacagaaaagcaactctacatagccagttaagaaggattaattatgcctctaccatgagctcaacattatggtaggtgcttagcgaaaaaaagactataagtgtagatgtatatatgtgtgtgtataaaacgtgtaaaacaatataaaagaataatatcttatgttagatggagtggaataggctgaaagcattaggagagaaattagtgtgagccggatattagtatattttagctaatttgcaaaaactcatctttgactagtcatgctaaagtattgcctataatatcacatgccatttatcaatgtttacatgtctcatgatcatatattcaaatgttgataattattcaataatatagaccattgcaagactaagtcacccccaatgagaaatgtaattcaaacctgtaaacctactgaaaatggactgaaataaagaatgtga

SEQ ID NO: 69940 - DNA, 1185 bp, Homo sapiens
ttttgacttctgagaaggtctctatccccaaacagtgagcactactttgctaaaaaaagtctgtgtgttctgaataaatggaaacgtcttaccaatatatgaattgctgatctttaaagtaaataaataggcgaatagattcttatccacatttcttctagccacaaattttaaggaaatcctgcagtcctttacaagggggggagtttctcagctagatggaaagatatgacgacaatttccccattcacaaaacatttcctgtctccgtaagtacccactgcccaattactcattttacacttattctgtgtgaatttacattgtgacttggcatttttaggcatccgtggttcctactgatttcctctggtccccattggtttcctttcttaggctttactgaatctcccaagggccaaagtagaaacccaattaatgcgtgcataacctagatggctcatgcccttacttttacattctttccattgcatgacactgtcttggagctctttaaggaagcatctttcaaaatcttgtgtgtgagagagagaaaagactcacagaaggaaatgtagaatgggaagaaactattcatgakgaatatctctttaatatagtaagagcatgttggtagaaaaataaagactgcttgataactaaaggttaataaaaaccacaactgttggaaagcaaagacataacttcattcccccacataccccaaaatagcatacacagaaaagcaactctacatagccagttaagaaggattaattatgcctctaccatgagctcaacattatggtaggtgcttagcgaaaaaaagactataagtgtagatgtatatatgtgtgtgtataaaacgtgtaaaacaatataaaagaataatatcttatgttagatggagtggaataggctgaaagcattaggagagaaattagtgtgagccggatattagtatattttagctaatttgcaaaaactcatctttgactagtcatgctaaagtattgcctataatatcacatgccatttatcaatgtttacatgtctcatgatcatatattcaaatgttgataattattcaataatatagaccattgcaagactaagtcacccccaatgagaaatgtaattcaaacctgtaaacctactgaaaatggactgaaataaagaatgtga

SEQ ID NO: 69941 - DNA, 1185 bp, Homo sapiens
ttttgacttctgagaaggtctctatccccaaacagtgagcactactttgctaaaaaaagtctgtgtgttctgaataaatggaaacgtcttaccaatatatgaattgctgatctttaaagtaaataaataggcgaatagattcttatccacatttcttctagccacaaattttaaggaaatcctgcagtcctttacaagggggggagtttctcagctagatggaaagatatgacgacaatttccccattcacaaaacatttcctgtctccgtaagtacccactgcccaattactcattttacacttattctgtgtgaatttacattgtgacttggcatttttaggcatccgtggttcctactgatttcctctggtccccattggtttcctttcttaggctttactgaatctcccaagggccaaagtagaaacccaattaatgcgtgcataacctagatggctcatgcccttacttttacattctttccattgcatgacactgtcttggagctctttaaggaagcatctttcaaaatcttgtgtgtgagagagagaaaagactcacagaaggaaatgtagaatgggaagaaactattcatgaggaatatctctttaatatagtaagagcatgttggtagaaaaataaagactgcttgataactaaaggttaataaaaaccacaactgttggaaagcaaagacataacttcattcccccacataccccaaaatagcatacacagaaaagcaactctacatagccagttaagaaggattaattatgcctctaccatgagctcaacattatggtaggtgcttagsgaaaaaaagactataagtgtagatgtatatatgtgtgtgtataaaacgtgtaaaacaatataaaagaataatatcttatgttagatggagtggaataggctgaaagcattaggagagaaattagtgtgagccggatattagtatattttagctaatttgcaaaaactcatctttgactagtcatgctaaagtattgcctataatatcacatgccatttatcaatgtttacatgtctcatgatcatatattcaaatgttgataattattcaataatatagaccattgcaagactaagtcacccccaatgagaaatgtaattcaaacctgtaaacctactgaaaatggactgaaataaagaatgtga

SEQ ID NO: 69942 - DNA, 542 bp, Homo sapiens
ctttttccactagaccgtgccacttccactgccacagggtctggtcatgctgccaacatcagcaccctccctgccattacatacatcttgtgtttgggaaatctagaccttgcatggcactgtggcaaaggcttcagcagctcctcaacaattgactactgtctttagttttgatcatgattcataattcctgtcaaaagagcagaggacagtaatggcatcaaattcacaggactggctgggtgtggtggctcatgcctataatcctagcactttgggaggccgaggcaggaggatcacttgagctcaggagttcaaggycagcctaggcaacatagtgagacttcatctctacgaaaaaaatacaaaaattagccaagcacggtgacatgcacccgtagtcccagctactcaggtggctgaggtaggaaaatcacttgagcctgggaggtcgaggctgcagtgagctaggatcatgccactgcactccagcctgagaaataaagcgagatgctgtctcaaacaaataaaaatacacaggt

SEQ ID NO: 69943 - DNA, 1831 bp, Homo sapiens
tgcattcagtaataggttgctcaaaacttattgactgactgcctaacacctatagagactaatgaaaagccaaaggatatgattactggcttctctctatttacctttactttatgtctccctmtttattccaacaattaaagcaaacaggagggagagagtttgcttggacaaaacaatgttatagggaatgtagctgataaatcttaaccttcatctcagcagaagagcaccccaggcagcagctgggtgtttttgcttttgctgatttttaaaataaatgaaaatgaactgcaagttataacaggaaagcctgacctacacaaataataagacaccccacttaacctgtgcaatcaatacagcctcacgcaggaaaagtgctggggaagctggctagacacccagggtaaatccaggcagagtgagtgttcacagcaaggcagccctaaacttgtgtttgtctctgcatttctctctggtttgtccatgaatccaaaaaggcttaattgagttccttttttcctcccctgaacacataattagtatttgttccgagtcctctgttattatctcctatccggtttccctctgcccatctgaaccacattaattctgagacttatcttttctattttccttatagaaagaaaatgatctctatgtaaacctgaacaattcaggttttctaggcctcctgtccttccttggcaacttaatagtttaatacattaaatctctttactacatgtttactatatgcctcgtgccatgttaagcactggaggacaaaaagaaaagcagaaacagtggaaaaggcatgatgtctgtttccaaggattatggtaaggtgggtactaagaagtaaggaaattaaccgtggtggggtatgggattcagataagcttttgggacactttgcaaggcaagaaagggactatgagggagcaggtggtcaccactcctcaagagagttgtgcttggctcagggcctacaggccacactgctgctatgttccaggagaagaccccaccccttgacggctcttttgtttttaatgcacatgctgaccctgagaatgccttatgatgtctgacctaggcaactggttgtctgagttaaggatcctgcagatctttaggaaattgctgggaaaggcaaactgcccaaatatcacatgtcccaaggatgactggatggttgtagccctcccactggagggaaaaagactcatgtctcatgcttgttgagtcaggggatggaattccttgggaactgatcacagacaaccctgcttttcactttataatgaatgttcatgcatgctctaggttatgtcacagaagatgatcctggcttctgtgaagacaagtgaaagtaaacattgaaaatagacaggaagggaaaggagggatttagcaatgacccaccaagcagatgatgctttacagtcaggtgctgtgggaaatgtattaacaacatcagcgcttatttttttttacattgttttcatgtttaaactttttgaaataaataagaaaatttcattatagtctaggaaaatgaggcttgtaaagatcaagaggactttctgcattcacacagatgtatgaatagaatattcaagtatatgactccaagccatgttcctttgctagtagatgcttaatgcggagcaccatgaaatacacatttccagtgccctgtgagagtcatatgatgctttccattgagccaaactttgcaactaggatgaggacagataggaaacttagagactatttttaataacaaaattccagttggtatttagaggaaaatgttgttgcc

SEQ ID NO: 69944 - DNA, 1831 bp, Homo sapiens
tgcattcagtaataggttgctcaaaacttattgactgactgcctaacacctatagagactaatgaaaagccaaaggatatgattactggcttctctctatttacctttactttatgtctccctatttattccaacaattaaagcaaacaggagggagagagtttgcttggacaaaacaatgttatagggaatgtagctgataaatcttaaccttcatctcagcagaagagcaccccaggcagcagctgggtgtttttgcttttgctgatttttaaaataaatgaaaatgaactgcaagttataacaggaaagcctgacctacacaaataataagacaccccacttaacctgtgcaatcaatacagcctcacgcaggaaaagtgctggggaagctggctagacacccagggtaaatccaggcagagtgagtgttcacagcaaggcagccctaaacttrtgtttgtctctgcatttctctctggtttgtccatgaatccaaaaaggcttaattgagttccttttttcctcccctgaacacataattagtatttgttccgagtcctctgttattatctcctatccggtttccctctgcccatctgaaccacattaattctgagacttatcttttctattttccttatagaaagaaaatgatctctatgtaaacctgaacaattcaggttttctaggcctcctgtccttccttggcaacttaatagtttaatacattaaatctctttactacatgtttactatatgcctcgtgccatgttaagcactggaggacaaaaagaaaagcagaaacagtggaaaaggcatgatgtctgtttccaaggattatggtaaggtgggtactaagaagtaaggaaattaaccgtggtggggtatgggattcagataagcttttgggacactttgcaaggcaagaaagggactatgagggagcaggtggtcaccactcctcaagagagttgtgcttggctcagggcctacaggccacactgctgctatgttccaggagaagaccccaccccttgacggctcttttgtttttaatgcacatgctgaccctgagaatgccttatgatgtctgacctaggcaactggttgtctgagttaaggatcctgcagatctttaggaaattgctgggaaaggcaaactgcccaaatatcacatgtcccaaggatgactggatggttgtagccctcccactggagggaaaaagactcatgtctcatgcttgttgagtcaggggatggaattccttgggaactgatcacagacaaccctgcttttcactttataatgaatgttcatgcatgctctaggttatgtcacagaagatgatcctggcttctgtgaagacaagtgaaagtaaacattgaaaatagacaggaagggaaaggagggatttagcaatgacccaccaagcagatgatgctttacagtcaggtgctgtgggaaatgtattaacaacatcagcgcttatttttttttacattgttttcatgtttaaactttttgaaataaataagaaaatttcattatagtctaggaaaatgaggcttgtaaagatcaagaggactttctgcattcacacagatgtatgaatagaatattcaagtatatgactccaagccatgttcctttgctagtagatgcttaatgcggagcaccatgaaatacacatttccagtgccctgtgagagtcatatgatgctttccattgagccaaactttgcaactaggatgaggacagataggaaacttagagactatttttaataacaaaattccagttggtatttagaggaaaatgttgttgcc

SEQ ID NO: 69945 - DNA, 1831 bp, Homo sapiens
tgcattcagtaataggttgctcaaaacttattgactgactgcctaacacctatagagactaatgaaaagccaaaggatatgattactggcttctctctatttacctttactttatgtctccctatttattccaacaattaaagcaaacaggagggagagagtttgcttggacaaaacaatgttatagggaatgtagctgataaatcttaaccttcatctcagcagaagagcaccccaggcagcagctgggtgtttttgcttttgctgatttttaaaataaatgaaaatgaactgcaagttataacaggaaagcctgacctacacaaataataagacaccccacttaacctgtgcaatcaatacagcctcacgcaggaaaagtgctggggaagctggctagacacccagggtaaatccaggcagagtgagtgttcacagcaaggcagccctaaacttgtgtttgtctctgcatttctctctggtttgtccatgaatccaaaaaggcttaattgagttccttttttcctcccctgaacacataattagtatttgttccgagtcctctgttattatctcctatccggtttccctctgcccatctgaaccacattaattctgagacttatcttttctattttccttatagaaagaaaatgatctctatgtaaacctgaacaattcaggttttctaggcctcctgtccttccttggcaacttaatagtttaatacattaaatctctttactacatgtttactatatgcctcgtgccatgttaagcactggaggacaaaaagaaaagcagaaacagtggaaaaggcatgatgtctgtttccaaggattatggtaaggtgggtactaagaagtaaggaaattaaccgtggtggggtatgggattcagataagcttttgggacactttgcaaggcaagaaagggactatgagggagcaggtggtcaccactcctcaagagagttgtgcttggctcagggcctacaggccacactgctgctatgytccaggagaagaccccaccccttgacggctcttttgtttttaatgcacatgctgaccctgagaatgccttatgatgtctgacctaggcaactggttgtctgagttaaggatcctgcagatctttaggaaattgctgggaaaggcaaactgcccaaatatcacatgtcccaaggatgactggatggttgtagccctcccactggagggaaaaagactcatgtctcatgcttgttgagtcaggggatggaattccttgggaactgatcacagacaaccctgcttttcactttataatgaatgttcatgcatgctctaggttatgtcacagaagatgatcctggcttctgtgaagacaagtgaaagtaaacattgaaaatagacaggaagggaaaggagggatttagcaatgacccaccaagcagatgatgctttacagtcaggtgctgtgggaaatgtattaacaacatcagcgcttatttttttttacattgttttcatgtttaaactttttgaaataaataagaaaatttcattatagtctaggaaaatgaggcttgtaaagatcaagaggactttctgcattcacacagatgtatgaatagaatattcaagtatatgactccaagccatgttcctttgctagtagatgcttaatgcggagcaccatgaaatacacatttccagtgccctgtgagagtcatatgatgctttccattgagccaaactttgcaactaggatgaggacagataggaaacttagagactatttttaataacaaaattccagttggtatttagaggaaaatgttgttgcc

SEQ ID NO: 69946 - DNA, 1831 bp, Homo sapiens
tgcattcagtaataggttgctcaaaacttattgactgactgcctaacacctatagagactaatgaaaagccaaaggatatgattactggcttctctctatttacctttactttatgtctccctatttattccaacaattaaagcaaacaggagggagagagtttgcttggacaaaacaatgttatagggaatgtagctgataaatcttaaccttcatctcagcagaagagcaccccaggcagcagctgggtgtttttgcttttgctgatttttaaaataaatgaaaatgaactgcaagttataacaggaaagcctgacctacacaaataataagacaccccacttaacctgtgcaatcaatacagcctcacgcaggaaaagtgctggggaagctggctagacacccagggtaaatccaggcagagtgagtgttcacagcaaggcagccctaaacttgtgtttgtctctgcatttctctctggtttgtccatgaatccaaaaaggcttaattgagttccttttttcctcccctgaacacataattagtatttgttccgagtcctctgttattatctcctatccggtttccctctgcccatctgaaccacattaattctgagacttatcttttctattttccttatagaaagaaaatgatctctatgtaaacctgaacaattcaggttttctaggcctcctgtccttccttggcaacttaatagtttaatacattaaatctctttactacatgtttactatatgcctcgtgccatgttaagcactggaggacaaaaagaaaagcagaaacagtggaaaaggcatgatgtctgtttccaaggattatggtaaggtgggtactaagaagtaaggaaattaaccgtggtggggtatgggattcagataagcttttgggacactttgcaaggcaagaaagggactatgagggagcaggtggtcaccactcctcaagagagttgtgcttggctcagggcctacaggccacactgctgctatgttccaggagaagaccccaccccttgacggctsttttgtttttaatgcacatgctgaccctgagaatgccttatgatgtctgacctaggcaactggttgtctgagttaaggatcctgcagatctttaggaaattgctgggaaaggcaaactgcccaaatatcacatgtcccaaggatgactggatggttgtagccctcccactggagggaaaaagactcatgtctcatgcttgttgagtcaggggatggaattccttgggaactgatcacagacaaccctgcttttcactttataatgaatgttcatgcatgctctaggttatgtcacagaagatgatcctggcttctgtgaagacaagtgaaagtaaacattgaaaatagacaggaagggaaaggagggatttagcaatgacccaccaagcagatgatgctttacagtcaggtgctgtgggaaatgtattaacaacatcagcgcttatttttttttacattgttttcatgtttaaactttttgaaataaataagaaaatttcattatagtctaggaaaatgaggcttgtaaagatcaagaggactttctgcattcacacagatgtatgaatagaatattcaagtatatgactccaagccatgttcctttgctagtagatgcttaatgcggagcaccatgaaatacacatttccagtgccctgtgagagtcatatgatgctttccattgagccaaactttgcaactaggatgaggacagataggaaacttagagactatttttaataacaaaattccagttggtatttagaggaaaatgttgttgcc

SEQ ID NO: 69947 - DNA, 791 bp, Homo sapiens
tcatttcttaccttatacaaaaatcaactcaaaatggcccatttttaaatcatgttctttgtttactatattactaaaacaactattactatactatgcttactatagtttaaactcaacaactatatatagatatatagtttaaactatagtaagtgtagtatagtaattgttgtagtaatatagcaaatatatagttgttaagtttaaactatatatataaatatatatagttatagagggtgcatatatatataartatatatatatagacagagagagagatagagagagagagtaatagtctgctatcagatgtgtcttttgcaaatattttcttccaccctgtggcttatcttctcagtctcttaacattatcttttgcagagcaaaagttttaaatttttttgaagttcagattaccaattatatatttcatggatgtgtctttaatattgtatctaatgagtcattgcaatacccaaggtcgtataggttttctcatatgttatcttctaggagtttttatagtcttgtgttttccatttaggtctatgttccactttgagttaattcttatgaaggatgtaagatctgtgtctggatttggttttcttttgtagatgggtgtccagttgttccagcaccatatgttgaaaagaccatctttgccccattgtattgactttgttcctttgtcagaggatcttgtcaaagatcagttgactaaattttatgggtctatctgggctattttgttccattgataaatttgtctcttctttcatcaa

SEQ ID NO: 69948 - DNA, 791 bp, Homo sapiens
tcatttcttaccttatacaaaaatcaactcaaaatggcccatttttaaatcatgttctttgtttactatattactaaaacaactattactatactatgcttactatagtttaaactcaacaactatatatagatatatagtttaaactatagtaagtgtagtatagtaattgttgtagtaatatagcaaatatatagttgttaagtttaaactatatatataaatatatatagttatagagggtgcatatatatataagtatatatrtatagacagagagagagatagagagagagagtaatagtctgctatcagatgtgtcttttgcaaatattttcttccaccctgtggcttatcttctcagtctcttaacattatcttttgcagagcaaaagttttaaatttttttgaagttcagattaccaattatatatttcatggatgtgtctttaatattgtatctaatgagtcattgcaatacccaaggtcgtataggttttctcatatgttatcttctaggagtttttatagtcttgtgttttccatttaggtctatgttccactttgagttaattcttatgaaggatgtaagatctgtgtctggatttggttttcttttgtagatgggtgtccagttgttccagcaccatatgttgaaaagaccatctttgccccattgtattgactttgttcctttgtcagaggatcttgtcaaagatcagttgactaaattttatgggtctatctgggctattttgttccattgataaatttgtctcttctttcatcaa

SEQ ID NO: 69949 - DNA, 791 bp, Homo sapiens
tcatttcttaccttatacaaaaatcaactcaaaatggcccatttttaaatcatgttctttgtttactatattactaaaacaactattactatactatgcttactatagtttaaactcaacaactatatatagatatatagtttaaactatagtaagtgtagtatagtaattgttgtagtaatatagcaaatatatagttgttaagtttaaactatatatataaatatatatagttatagagggtgcatatatatataagtatatatatatakacagagagagagatagagagagagagtaatagtctgctatcagatgtgtcttttgcaaatattttcttccaccctgtggcttatcttctcagtctcttaacattatcttttgcagagcaaaagttttaaatttttttgaagttcagattaccaattatatatttcatggatgtgtctttaatattgtatctaatgagtcattgcaatacccaaggtcgtataggttttctcatatgttatcttctaggagtttttatagtcttgtgttttccatttaggtctatgttccactttgagttaattcttatgaaggatgtaagatctgtgtctggatttggttttcttttgtagatgggtgtccagttgttccagcaccatatgttgaaaagaccatctttgccccattgtattgactttgttcctttgtcagaggatcttgtcaaagatcagttgactaaattttatgggtctatctgggctattttgttccattgataaatttgtctcttctttcatcaa

SEQ ID NO: 69950 - DNA, 791 bp, Homo sapiens
tcatttcttaccttatacaaaaatcaactcaaaatggcccatttttaaatcatgttctttgtttactatattactaaaacaactattactatactatgcttactatagtttaaactcaacaactatatatagatatatagtttaaactatagtaagtgtagtatagtaattgttgtagtaatatagcaaatatatagttgttaagtttaaactatatatataaatatatatagttatagagggtgcatatatatataagtatatatatatagasagagagagagatagagagagagagtaatagtctgctatcagatgtgtcttttgcaaatattttcttccaccctgtggcttatcttctcagtctcttaacattatcttttgcagagcaaaagttttaaatttttttgaagttcagattaccaattatatatttcatggatgtgtctttaatattgtatctaatgagtcattgcaatacccaaggtcgtataggttttctcatatgttatcttctaggagtttttatagtcttgtgttttccatttaggtctatgttccactttgagttaattcttatgaaggatgtaagatctgtgtctggatttggttttcttttgtagatgggtgtccagttgttccagcaccatatgttgaaaagaccatctttgccccattgtattgactttgttcctttgtcagaggatcttgtcaaagatcagttgactaaattttatgggtctatctgggctattttgttccattgataaatttgtctcttctttcatcaa

SEQ ID NO: 69951 - DNA, 707 bp, Homo sapiens
cggctcccacagcctttatcttgccttgtaattacctgcaaatcaacttcctacacggtactcagttccttagagcaggggttcgcaacctcagggaccaccaactggcaccagtctacccatctgtcactgtctcccatcacccccagatgggaccctctagttgcaggaaaacaagctcagggctcccactgattctgcattatggtgagttgtataattatttcattgtatattaacaatgtaataataaagtgcacaataaatggaatgcacttgaatcatcctgaaaccatccccatacctgtctgtggaaaaattatcttccacgaaaccggtccctggtgccaaaaaagttggggaccactgccttagagtataagggcaagcctttcttctgatgtccgcgctgaggagcagagcctacctgaggtttgcagagcgagcagggcatgaatctgcttctctgctgccctccgccaaccgagcagggaaactgataatgtctggaagcttctctggccgctgtgggtcctgccctgtctggggatgggaggggaggggtttccagcatgttgggggtaatgctttcacttatgcttaatgagctgtgctctccatcctcctaacagccagaggacatggttagtaccctcccaccctccctccacagcccccctctctttccatggaagggtyggtcctca

SEQ ID NO: 69952 - DNA, 2299 bp, Homo sapiens
ccaaaacaaagaggaaaaaattttaacaattctactgaatccagaacatcaatgttaaggagtgaaatctgaataaagaactctaagaatacagtccatttttaaattagcaccaaatgggaaataaaagagaaaagatattactcgtaacasgttctgtttgtaaatgtttttagaatactaccttagatcccaaataagaatcaaacatgcctgggcccttaaagagaattggtggatagccccaactaacaaaaagacttgcaagagtgttccagcttttagctgggagcataaaaggaaaaaaacccttatgctacagtgagcctaaagggggtggagggaggaagggacagagaatgagctaagaagaagccaccatgttaattgtcgacactttctaaacccagactccagccctttcctcagctgctgccaaggggctcagtacttctgggaaagctacagtcacactggggagaggccctcacttcatccagcaacttgcactgcatccaacagcagcaccagccccgccactcgcccgcaccacagcccctgaattcgcctgcatctactccaccctcattcttcactatgaacgaggtgaccgtcacagaggataaatcaaggccctaattaaagtaggtggtgtaaatgttgaaccttttcggcctggtttgttggcaaaggccctggcctatggtgacatcgagagactcatcctaatgtaggggttggtggacctgctccagcagctgctgctgcatcaacagtaggtcctgccctgtccagagcagctgctccagctgaggagaaggaagtgtaagcaaagaaaaaagaatctcggccggatgcagtggctcacacctgtaatcccagcactttgggaggctgaggtgggcagatcacttgaagccaggagttctagaccagcctggccaaaatggcaaagcacagtctccaccaaaaatacaaaaattagatgggtgggctggcggatgcctgtaatcccagctgctcaggaggctgaggcacaagaatcacttgaacctgggaggcggaggttgcagtgactgggtgacagagccagactcggtctccgaaaagaaaaagataaagaaaaggaaaaacaaagaagaatctgaggagtgtgatgatggcatgggctttggtctttttgactagaagttcttttataactctttttacaaatttttaaaaaattaaactggactccagggaccagtgggtgaggccactggctataggggtggtgggcacgctgtggcgtgatggcatggggctgttgcagacatatgaactggtctctcaccactgccatgccacacaactgtgctctggcactgagtacagtggggacagccttgtggcagaacgccacagcattctcttagtgggtaatggcagcaccagcaggagcaggccaggagcaggaaggaggatcacaacagatcacacatggggactccggtctggatcctgcgctccctctggcgacttccagatccaaaagggcagattatgcaggggctgacaagtgaggacaagagccactgacatctggaatgactgcaagtatgactgcccatctatattcaaacaatataaactttgggttacacaactgaatgtgttcaggaatgtgtcattcagaataacaccacggctgccatctcagtccactctaggtcaaaatgaacacatatcttggttgctctcctacctccttgactgctatgtctgtttcttgtacgtgttccttttcctcttgcattccattaaatttctcaaaggcttgtcattgaacagcctctctgcatcctttttttgtttgtttttttaaaccacttaccattatatgatctgttttacctatcaaatctataatatctgtgtaaggtttgggaacagtccaccaactgccttcccttctgacatgaatcacagagtttgggggtcccaaagaccatcctcacgttcaataatgtgccacactgttagactatcaggtgtggcccaaggcacccagatctctatgcccttggaaggctccaaggacaaaggctagatatctctttaggcaaggttaaattctttactaaaccacctgcttgctgatacttctgattctccgattcatatttctaaccaccttcttgatatttccatcaacagtcaaactcatcaacatcttccccaatccaactgcgacttcactgtttctactaataatgccaacattatttcaccttgtttaaaaagctatttttaatta

SEQ ID NO: 69953 - DNA, 1562 bp, Homo sapiens
catcaaacagtaagatgaatattacaaatcaagtgcatttctattggtaagggcattagattccttttaaatagctgagaagtgttgtagtcagaatttaataaactataataaacattacacagtaaaagttccaaatcatatttcacataatttacctataggtatgactgcaagcgccaaaaaagatgacatttctagcatgttctatttaaccttgagcagacgttgataaagtctgatcctcagttgacacacatgtaaagacattatactgtctgatctttattcagtccccaaatgtggtcttcggaaataatgctctcttaacatttatttgtgtttacaagcacttttgatcctcacagctgtatgaggtaggcaggacaggtaaaaaaaaaaatacctgaacattagtttataaagtaagttatttacccaggttttatactgctaggaagtgattaaagcctagtatttttggactaccagtccagacatccatagtgcttacccatatatacaagaaaactagtttttaccaagttcctgtctttttgcaggttggtcttagtgtgttcctctttacttcctaccgttagaaacatttaatcatgtataccaagggttagcaaaccttttctataaaggaacagatatagtaaatattttaggctttatgggccttctggtgtctgtcacaggtactcaactctgttgtagtgctaaagtaaccacagaaaatatataaaccagtaggtgtggctgtgttccaataaactttatttacaaaaactggcaatgggctggatttgtgggccatagttagcccacccctgcactatatgtcatgcaagacaaattcattagattccttatctctcttaagaaatgtaaatgacttcaggtctccaggcaaattattcaatattaaattgcctttatgataattgagtacactagagaaacttaaattaacaaaacatttattgtaaattattcttaccacagcttaccttattcttaccacagcttcagcagactctcctgctaccrttgactcagaaacaataacactaaacagtggaacactacagacatttgagattcttcccgtgagtaacgcttcatatatattggccatttttatgcatgagaaagatcagttgctatcacttttgtgtttcatttgcttatgattcataaaagtctgaggccaaatgaatggtagactaaatcagacttctacttttataattttaatcagcttttctctcatctgtatataaaccaaaatgttatctatatgaaaatgacagtgctaatgagtatatacatactgtggatttgtactgagttataatttataaccaaaaagttcatattggttatttgagaaagtctgtggacaaactaatcatgagcaatttaacaacattcattcagtaaacactgtactagccactggggatacaaaatgtaacagtcccagtgctaagtggtttagctgctttggaaatgtgttgtagctcctgaagaggttaagcacagttaccaaagga

SEQ ID NO: 69954 - DNA, 1562 bp, Homo sapiens
catcaaacagtaagatgaatattacaaatcaagtgcatttctattggtaagggcattagattccttttaaatagctgagaagtgttgtagtcagaatttaataaactataataaacattacacagtaaaagttccaaatcatatttcacataatttacctataggtatgactgcaagcgccaaaaaagatgacatttctagcatgttctatttaaccttgagcagacgttgataaagtctgatcctcagttgacacacatgtaaagacattatactgtctgatctttattcagtccccaaatgtggtcttcggaaataatgctctcttaacatttatttgtgtttacaagcacttttgatcctcacagctgtatgaggtaggcaggacaggtaaaaaaaaaaatacctgaacattagtttataaagtaagttatttacccaggttttatactgctaggaagtgattaaagcctagtatttttggactaccagtccagacatccatagtgcttacccatatatacaagaaaactagtttttaccaagttcctgtctttttgcaggttggtcttagtgtgttcctctttacttcctaccgttagaaacatttaatcatgtataccaagggttagcaaaccttttctataaaggaacagatatagtaaatattttaggctttatgggccttctggtgtctgtcacaggtactcaactctgttgtagtgctaaagtaaccacagaaaatatataaaccagtaggtgtggctgtgttccaataaactttatttacaaaaactggcaatgggctggatttgtgggccatagttagcccacccctgcactatatgtcatgcaagacaaattcattagattccttatctctcttaagaaatgtaaatgacttcaggtctccaggcaaattattcaatattaaattgcctttatgataattgagtacactagagaaacttaaattaacaaaacatttattgtaaattattcttaccacagcttaccttattcttaccacagcttcagcagactctcctgctaccgttgactcagaaacaataacactaaacagtggaacactacagacatttgagattcttcccgtgagtaacgcttcatatatattggccatttttatgcatgagaaagatcagttgctatcacttttgtgtttcatttgcttatgattcataaaagtctgaggccaaatgaatggtaractaaatcagacttctacttttataattttaatcagcttttctctcatctgtatataaaccaaaatgttatctatatgaaaatgacagtgctaatgagtatatacatactgtggatttgtactgagttataatttataaccaaaaagttcatattggttatttgagaaagtctgtggacaaactaatcatgagcaatttaacaacattcattcagtaaacactgtactagccactggggatacaaaatgtaacagtcccagtgctaagtggtttagctgctttggaaatgtgttgtagctcctgaagaggttaagcacagttaccaaagga

SEQ ID NO: 69955 - DNA, 2258 bp, Homo sapiens
gtgataaatggaattatccatgcaaagcacccaaaataatgcctgaatcatttttttgcctcttgacaaatgctgatactagctaacttttgcatagcacttactatgagcctggtatgattctaagggctcgacatatgttagttcatttaatcctcacaacaattctgatactatttttaatcccaattaaaaatgaggaaacggaagcatggaacgtttaagtgactcccccaggttattcagctagtaagtagaggagcatatctcctctaaagctcatgctggtaactgcctcatcattattaaccacaggtgggagacccttccgttcagagtcttgtcttttagtaattcgagtctgacccatgacgtttactcatctgtgggtgagtgacactcctcggtgctcctaagactgtgatgccatgagccataataggtaacagtggcccaaaagtgcgtggagataaaccatgcatcaaggtaattttgatgatgtcgggatatagagattaatagatattaaaaaataggcaattctaaaatcaaagcaaatgatccttctttctatcccccggaatatctgtgcctgagagcctgagcagaatttgggggaatcaaaaatgttctccccaggccaagctcgggacctgctgatgagcccttatattcaatgtaagctctcatttactttagctgcattttagatttgtctcccaagtgacataagggagagcttttataaacacaaaacacaaatttgatgtttgaattccagcagccggccctgctctcggactcccggatttccggactcccggactcccggttcccgtttcctaaggcctgggctctgctggtctccagcccttgaggtgccacttggaatcctttacttctttctctcctctcttcactagatttcaaggccttatgaatggcggcagctcatacttcgcaggtgctttggaggcagttaattaatgctaattaagctgaaatatttaaaatttaatttgataaacattcatcaagttccccactgcatgccaaatactcttctaaacactggtaatgagggcagaaagatctagcatggtgatttacactaaatagcagttcaataaatatgtgtagcatgaaggaagggctcttagtttgctcatcgtggggctcagtatctgatgggaaaggcagacaactaagaaagttcttgcctcttagagtgagaattaccagggaggaaggtaagcaagagctgcttgctcaggaaagaggtcacacctgtgaaaggacaggtaggagccgagttaggttattgagggagattgggcctaggatggggagacgcagagcagcaagctgcgttcagtcctctcctggggctgctgcaggacaagaaggcatttgtggggataggggagggatgaggctgcagagcgtgacagagaccagcmcagggaggcctcacttgcaatttaacctggggagtttggaggaatttaaatagaggaatgcatgaccagatttgtgatttacagctctctgacagcagttcagaggtggatttggaatgtgggggcacagggcagaaaaccagttacaggagcaattgtgaagtaggcccagcagggataaggtgtgaccgagacagtagcggcaatggagagagggtcagagcctgagacatttaagagagaaactttttgaaggatgtgagcggggagggcagaacagaggagattaggagcactctaattgtttttgcttgatcccttgggaagagaggaataaatttcaccaagacaaggtgagtaggaagaagagtaggtttgggaaaatcggataagtcttcttatgatgggtagaagcatctatgacgctttcaaagaggtatcctggaggtgcttggctgtgtcctgtatgatgacaacgcaggtgatgatggtgataccatcctgaagagagggtaagcaggtggaacaaccccatgtatactattctttgtaaaatgatcctttttggtcaggtgcagtagcttgtgcctgtaattccagcacttggggaggctgaggtgggccaatcgcttgagcccagcagttccacaccagcctgggctacgtgatgagatccccacctctacgaaaaatacaaaaattagccaaatgtggtggcatgtacctgtagtcccagctactcaggagactgagatgggaggatcatttgagcccaggaggtcgaggcagcagtgagct

SEQ ID NO: 69956 - DNA, 1243 bp, Homo sapiens
ggggcttaaaacctagatgatgggttgataggtgcatcaaaccaccatgacacacatatacctatgtaacaaacctacacattctgcacttgtatcccagaaattaaagttaaaaaaataaataaaataaaggatagcaattccaatcacatagtcaacagtgaggaaaatggctacccggtgggcccacagacccagtggatctactgtgagccagccctgggccaggagtccattgatttcccgccctccatatcccacctctaacttggggctaaggatgaagctctggagctttgcctctcagtgccaatttggaccctgcgtctaccagtccttgacatgtttgggtttttccctgcccccagtgcatgtttacctgagtaaatggagcaaatctctttgaggaaggctgtggaattgttgtcacgtgcgcttgacttgttgtcacagggtcttcatcctggaaactcgacctctctgtcagttggtgggatctgactttgaaaacttgttcgggtctagcaactgggtaaaggatgaggaccttttcactgggatgactgcccttarccatcttcgattttgtttgattgtacatgttggtcagtacctttgatagctgtccattcattctgtccctagggttactgtgtcctgtcacctgtctccattaatgttcagactctgctgtcactgtattagtaaccacctagcttttgtgatgactgaccacaaccaccttctccattgtttggggcacctgttggcctcactgctgtctgtgaattcagttctgtgatgttctattttatcatcatcccttggctatggaggacggtcccaacaccagtgcattcttcatcactttgctgaaaggtgtgttcttcaggtcctccgccagagcagtcttccggggggttttctgggctaatagtggacccactgcagcatgcacacggtgatgcttctacatgccaaggagcaccaaagattgccagcaaaccaccacaaatctcagttcattttccagggctgctgtcacaaactaccacaaactaggtggctcaaactacagaaatgtatcatctcacaactctggaggctaaaagtgtgagatgaaggtgtcagaggcctggctccttctgagagctctgagtgaagggtttgttctgggccactctccttggcctgtggatggtggtcttctccctgcgtcttcacagcatcatccctctatgca

SEQ ID NO: 69957 - DNA, 918 bp, Homo sapiens
cattaagaattactgttttaagattcttatgatggttttatctcacttaaaaaaaaaagaaagatacaacccatcaaacattgaattgatcactgctcaacaagaacatgcactggtggagacaggacgtgaatatacaaaatttgtcagcaagcagggacagaagaacgatctctggaaaygttagaacaatgagttattatagcactggagaaggagacagattttacaaacttcaacaatcagcatggtgttaggcaaagctctctcttttggggaaaacatcctaggaatcatcaatcaattaggaagacaagaatgttgtgttgattattttaggggaaaacacatgacacttctttcctcttggctgacaaatgctaaacaacacattcagcggggttatcagacaatcggtgttggcctgtgctgaccagaaatgagagtgatgggcgctgctggacacagtatcgaggatgtggcaaaagaaaagaaaaggacagaaacaaaccatctggaaaaatcaattctgagaggatcctggtccatcctttgagaggctgtgaaagtcttgggaaatgtacgtggttgaaaataccaccaaaaaataagcataaacttttaattacttaaatacagccaacagactcctcttataacgtagcattttttagcgtaaacactctttattagaacactcagcaattagatggaaagaagatcaaaaggagagcattcaaaataatatctctatagctttttaagataacttaaatttcttccaaaaaaattaaacacatattatcagaaaggtaaaggaaatctgagatgacaataattatattaagcaagtcagcctgtctttgctgaccctaattttattactaacatccattctaaaatcccatttgtcatgca

SEQ ID NO: 69958 - DNA, 918 bp, Homo sapiens
cattaagaattactgttttaagattcttatgatggttttatctcacttaaaaaaaaaagaaagatacaacccatcaaacattgaattgatcactgctcaacaagaacatgcactggtggagacaggacgtgaatatacaaaatttgtcagcaagcagggacagaagaacgatctctggaaatgttagaacaakgagttattatagcactggagaaggagacagattttacaaacttcaacaatcagcatggtgttaggcaaagctctctcttttggggaaaacatcctaggaatcatcaatcaattaggaagacaagaatgttgtgttgattattttaggggaaaacacatgacacttctttcctcttggctgacaaatgctaaacaacacattcagcggggttatcagacaatcggtgttggcctgtgctgaccagaaatgagagtgatgggcgctgctggacacagtatcgaggatgtggcaaaagaaaagaaaaggacagaaacaaaccatctggaaaaatcaattctgagaggatcctggtccatcctttgagaggctgtgaaagtcttgggaaatgtacgtggttgaaaataccaccaaaaaataagcataaacttttaattacttaaatacagccaacagactcctcttataacgtagcattttttagcgtaaacactctttattagaacactcagcaattagatggaaagaagatcaaaaggagagcattcaaaataatatctctatagctttttaagataacttaaatttcttccaaaaaaattaaacacatattatcagaaaggtaaaggaaatctgagatgacaataattatattaagcaagtcagcctgtctttgctgaccctaattttattactaacatccattctaaaatcccatttgtcatgca

SEQ ID NO: 69959 - DNA, 551 bp, Homo sapiens
gaaaagtttgctgatccctgttctacattaaaaaaattattcccttcttttgccgccaatagagatcatttccttgttacttgcctctgctaatgcactgacttaattatttactgtgctactctttttagaattacgtctgtaatttcttagggtatactagaaatagttaattaatccaagaaatgactcaaaaactgaatttttttttagaatakaagtgaggagaaaaatgaatttgggatagataaacctgtggttgctgaccaaatagctctccatatagctgtcatctgtggatactatgagccttccaagcctcttattctcaaaattaaaattaaaaagagatgtacagattttccaggatcacttccagttcattttaagtaaatagacttatgcaacattgtcagttagacactaacagcaagtgttgttttcctggtagtacagctatctgtctagattgaaaacagagacacttagacaaataaatgagaaagtacagaagttgtactttaaatgctaattcacataatattttttac

SEQ ID NO: 69960 - DNA, 551 bp, Homo sapiens
gaaaagtttgctgatccctgttctacattaaaaaaattattcccttcttttgccgccaatagagatcatttccttgttacttgcctctgctaatgcactgacttaattatttactgtgctactctttttagaattacgtctgtaatttcttagggtatactagaaatagttaattaatccaagaaatgactcaaaaactgaatttttttttagaatagaagtgaggagaaaaatgaatttgggatagataaacctgtggttgctgaccaaatagctctccatatagctgtcatctgtggatactatgagccttccaagcctcttattctcaaaattaaaattaaaaagagatgtacagattttccaggatcacttccagttcattttaagtaaatagacttatgcaacattgtcagttagacactaacagcaagtgttgttttcctggtagtacagctatctgtctagattgaaaacagagacacttagacaaataaatgagaaagtacaraagttgtactttaaatgctaattcacataatattttttac

SEQ ID NO: 69961 - DNA, 487 bp, Homo sapiens
cagaggagagatgagatggtgatcccaggagctgcgagggaggggcattccggaaactgtggggaccctgggaggacaggcgagggcatgatcctctaactcatttccttggaaggatggtcgcttgtcccccaacactaagccggctccttagacagggactccccaggcactacatcaccgcactttatcactattgrtaattttccccctggcttggatgggggctgtaagcacacagcaggttggacctgtgtccccagaggcaatggcaaggcccccaggtgatgggctgggcccaagccatgcagtttagccatccagagctgtgaaggatggaggggcctgggaataagaggatgaagctggggtgaggagacagctgggattcctggattggggattcaaaatcggatttgaatgggaattctgggggaagccagattccagaacgtgggaatgtaagtagaagcgtgcaggccattgt

SEQ ID NO: 69962 - DNA, 1958 bp, Homo sapiens
tgtagtagacctgggttatttcccttgcttccttgttgaccttgggcatattatttgatgtaagcctagtgtttctctccatctgcttaaaaattaaaattataacatggcctgtcttaaaggccaactgaattcaaggatatgaaagaatttggtagcctcaactgagctgtacaaagagaggctactctttcttcctcttaccccacatccacagattgcagccagacaggacatgtatttgtccccaggctcactctccacctgtatgaccttgggaaagtcacttaacttcctaaagcatcagtctcctcatctgtgagaagggaatgtgagcaagtgaaatgaaacgcaaagctcctggatcaaacaggtgcagtggctcactcctgtaatcccagcaatttgggaggttgagggcgggaggattgcttgaggccaggagttctagagaccagcctgggcaacatagcaagaccctgtctctacagaaaattcaaaaattagctgggtgtggtggtgagcacctatggttccagctacttgggaggatgtggtgggaggattgcttgagcccaggagtttcaggctgcaatcagctgtgattgcgccactgcactccagcctgggcgacacagtgagactctctttattaaaaaaatgctcctggatcaataaatgtcacatgcaaaatgcttggtaaatgaaattcttcttaaaagtgcatctttggccaggcttggtggctcacgcctttaatcccagcactttgggaggttgaggcgggaggatcacttgagttcaggagttcgagaccagcctgagtaacatggtgaaaccttgtctctacaaaacacacacacaaaaattagctgggtgtgatggtgcatgcctgtagtcctagctacttgggagctgaggcaggatgatcgattgaggcagaaggatcacttgagcccgggaggcggaagttgcagtgagccgagatcatgccattgcattccagcctgggcaacacagtgagactctgtctcaaaataaataaataaataaatactttgaaaagtgtagcttgtctgtagatggtgtgaagaaagtggcttatggctgggcccacagtcctaagtagcaagatagggaggacaagcctcaggatgctctagacaccccctygcacccctccctaccccactgcccacagctgagtcaatgccagtttcccgcaaaggacaaaagggaaggaaatgaggctgctccatttgctctctgactggatccatttcctcccccaagattgtgggtgtgtctgtctgtcatctagcctctgcagcggccactgttctcagagggtcctttattgccgaagggcctggactgtcaggaaggcaggctcctgggtggggatggaaatgtttgcagcaggaatctccaactctggtacttcgactcactctgggctttgggactgggacacccacggagcatgactgttcaacccaaattctaccaataagtctttcagattgtctccttgttggtggaatttgaataagttctgtagatagcatcaatgtcaagttcctggttttgatattacactgcagttatgcaagatgttactactggaggaaactgagaggaagagtccatgagacctccctgttcactttttcaaaccactgtgcatctttatatctttttttttttttttttttttttttgagacagggtcttactctgttgctcaggctgcagtgcagtggcacgatcacagctcactacagcctcgacctcccggactcaggtgattctgccacctcagcctgccagttagctggggctataggcacatgtcaccatgtctggctaatttttttttttttgagacggaatctcactctgtcgccccagctggaatgcagtggcacaatcttggctcactgcaacctccgcctccc

SEQ ID NO: 69963 - DNA, 1307 bp, Homo sapiens
gtagcactattcacaatagcaaagacatggaatcaacccaaatgctcatcaatgatagactggataaagaaaatgtggcacatatacaccatggaatactatgcagccataaaaaggaatgagatcatgtcctctgcagggacatagatggagctggaagctgttatcctcagcaaactaacacaggaacagaaaaccaaagactgcatgttctcacttataagtgggagctgaacaatgagaacacatggacacagggaggggaacaacacacactggggcctgtggagagggagatgagagggggaaggagagcatcaggaagaatagctaaagcatgctgggcttaatacctaggtgataggttgacctgtgcagcaaactaccatggcacacgtttacctatgtaagagacrtgcacatcttgcatatgtaccccggaacttaaaataaatattaaaattaattttaaaaagcaacaaacagttcctcaccacctttaagagatgtttagctagtttccttgctgattgaacctggcagaggtgaggggggaagttggtgagaaaagatctgggaatgagacgatttgtccagccccataaaaggaaatccctggaagaattggagcaggtgggagaatctgcatctctttcatcttccatcgctccctggggaagcagtggggcggtgcttctcccagtctgccttctggttcgcaggcctggaggcacattagaatcacctgagggggcttttaaatccacccatgcctgggacccacccagaaatctccaggagtgcagctgaggtagggaagtttttaaaaactcttcaggtgactgtgaagcagagagcatatcactgctcgagcgtttcagaaccagaaacaaataagtgacacaagtgaagagtgaaactacaacatttcggtgagtttggaagggagcaggcattgtagatagatttttaaagaggagaagtgggaccccgagaggaggagcaatttgcctgggtcagtggcagagttggggaaggaggtagcctcgttttctttttggtcccctatacccttttttattttctggtggcatattatagtattaattgttctgacggcttagctttatatgtacccagccatgaaatttccactctgtcattgggcaacctctccagttagacctacacactgttgtaaagtgtttcctggcagggaaacccaagtatttcgtttctaattcttagctctttgcaagtctgagcagtgggtcatgagactcccacaactgtttagaaggagccag

SEQ ID NO: 69964 - DNA, 1307 bp, Homo sapiens
gtagcactattcacaatagcaaagacatggaatcaacccaaatgctcatcaatgatagactggataaagaaaatgtggcacatatacaccatggaatactatgcagccataaaaaggaatgagatcatgtcctctgcagggacatagatggagctggaagctgttatcctcagcaaactaacacaggaacagaaaaccaaagactgcatgttctcacttataagtgggagctgaacaatgagaacacatggacacagggaggggaacaacacacactggggcctgtggagagggagatgagagggggaaggagagcatcaggaagaatagctaaagcatgctgggcttaatacctaggtgataggttgacctgtgcagcaaactaccatggcacacgtttacctatgtaagagacatgcacatcttgcatatgtaccccggaacttaaaataaatattaaaattaattttaaaaagcaacaaacagttcctcaccacctttaagagatgtttagctagtttccttgctgattgaacctggcagaggtgaggggggaagttggtgagaaaagatctgggaatgagacgatttgtccagccccataaaaggaaatccctggaagaattggagcaggtgggagaatctgcatctctttcatcttccatcgctccctggggaagcagtggggcggtgcttctcccagtctgccttctggttcgcaggcctggaggcacattagaatcacctgagggggcttttaaatccacccatgcctgggacccacccagaaatctccaggagtgcagctgaggtagggaagtttttaaaaactcttcaggtgactgtgaagcagagagcatatcactgctcgagcgtttcagaaccagaaacaaataagtgacacaagtgaagagtgaaactacaacatttcggtgagtttggaagggagcaggcattgtagatagatttttaaagaggagaagtgggaccccgagaggaggagcaatttgcctgggtcagtggcagagttggggaaggaggtarcctcgttttctttttggtcccctatacccttttttattttctggtggcatattatagtattaattgttctgacggcttagctttatatgtacccagccatgaaatttccactctgtcattgggcaacctctccagttagacctacacactgttgtaaagtgtttcctggcagggaaacccaagtatttcgtttctaattcttagctctttgcaagtctgagcagtgggtcatgagactcccacaactgtttagaaggagccag

SEQ ID NO: 69965 - DNA, 533 bp, Homo sapiens
tgccagggtgggagggtgggaaccagggcactgtgcaggtttcctgtggcagctgtcgtgccactgggaactgttgagttgaacaggccactggaccgtgatccaggcatctcagtctgtttgggctgctatcacaaagtacattatattgggcaatttataaacaatataaatttgttgctcacagttctggaggctgggaaacccaaggtcaaagcaccagaagaatgtgtgtctggtgagggcctgtttcataagtggcgccttcacattgtgtcctcatatggtggaacyctcttttctttttacttctttttctttttttttttttgagatgggggtctcactctattgcctgggctggagtgtgctggcatgatcacagctcactgcagcctcaacctcctggactcaagctatcttcccacctccacctcccaagtagctgggactacaggagcacactaccacgcccagctaatttttctattttgtaaagacaggattttactgtgttgcccaggctggtttcg

SEQ ID NO: 69966 - DNA, 533 bp, Homo sapiens
tgccagggtgggagggtgggaaccagggcactgtgcaggtttcctgtggcagctgtcgtgccactgggaactgttgagttgaacaggccactggaccgtgatccaggcatctcagtctgtttgggctgctatcacaaagtacattatattgggcaatttataaacaatataaatttgttgctcacagttctggaggctgggaaacccaaggtcaaagcaccagaagaatgtgtgtctggtgagggcctgtttcataagtggcgccttcacattgtgtcctcatatggtggaaccctcttttctttttacttctttttctttttttttttttgagatgggggtctcactctattgcctgggctggagtgtgctggcatgatcacagctcactgcagcctcaacctcctggactcaagctatcttcccacctccacctcccaagtagctgggactacaggagcacactaccacrcccagctaatttttctattttgtaaagacaggattttactgtgttgcccaggctggtttcg

SEQ ID NO: 69967 - DNA, 1501 bp, Homo sapiens
tttagggatcccatactggtcacagagccaaagtaacacagtactgctttcttcttacaaggcggaagttcatcaataatattgtgaccagtagctattttaatatctgtcagagctttagcccaggctgaagtgctcaccaaccacaaaaaagtggcaacaagtgtaacaacaaagtcctaaagcaaaaatcagtaagagttaataatgaacarttaattttaatactaaatttcaaatccatgatgaagaaactgagattacattcaaccttatggtgctgagaaatggccttcatgatatactttattaaaaaagtcagtcagcatagtaaacattgctgttagtgttacaagcacagtgcctgagttacaacagtaaataagactcagtcatcccctcagaagtctaagattttcacactagaaaccaaagttttatacagccttcaacataacctcacctcagccacttactcccaggaccataccttagaccttgtcatcaccaataactgtatccttccatactctgttttgatcatcccattttcccataacacctctttccagctcactgtctctggcaccccaatcctaaaactcctttgaccccaccaagacctacaatctgatcctactgctttcttactgtatcaccacttcactaatgtcctcacttattttaatcaatttctgttctaagggccttcattatcatctcttgcacatactctcaactcacttatccttcttctgcaaaactctaactttagttaaaccaaattctccatgagatggataataaaatggtgaaaagcacacaccagaatggtatctcttttaaatttcctaaccacaaattttaagaatgctcactatattaagaaaaaggcaacaacaaaaatctcccaagacaccttatcactattaactctgtactaaatcctttgctatttattacaaagaatgggatggttttaatattttagaataaatggttctaatgggtggttttaatattttagatcataagtctaatcttgtttgatcttccttcaaattaatgaccagggtaggaataatataaaatttgtatcttttggatgctatatatgctaaacatatgcgtacactcaaggataggagctcttacatatctgcagcaaaaatctttctaacctcagaatggattttggagcttatcacagaagcattttgttttttaaataaacccaattagtttttaattattttgccagccaccttttagtcatttattaggttggtgcaaaagttattatggtttttgctatttattttaatgataaaaaccacaattatttttgtaccaacctaatatttaggataaataccagtgatctcttaggagatatagaagctatgctatatagcttgcccacttggtcaagacaacactgaatgaatacttaggattagagaaccaaaaataattactaattacatgaacacggaagtac

SEQ ID NO: 69968 - DNA, 752 bp, Homo sapiens
cggcctaatggggttggagtttcttctcctcgggtgctgaaagcgttctgcaattagtggcaaaggttgcacagctctgtgcactgaattattcactcttaaaacgtgaattttacaatggatctcaacgaagctgttattaagaaacaagaaagcttgggcttgagggatggagaatacagccttgcgagcctttttccccctagaactcgaaaccagaattgcaacgggaaattcccgggcctcggcctttttccttgggagtctggattggttttccgccaacaaacagatccccggaggccgtcgcgaggaccatacccacggacaaaacccacaacctgggcctctaggcaacgcgtgacgtcagggggcggatccggggcgcagttgcctggtaacagcggcggcccccgcccccttatctaaccaatcaagcgcgtctgcacgcagcgcgagcgccccacgtacgacgggcggagcgtggcatcacgcacayccccgctcggccaatcaggaaggagagggatgtgcgctccgtgcgtacgaccattgcccccgcggcaaggcttccccgcccccaccctcacacctctggtcctgccagcagggatcggggttcgggggtgcctcgcctcggggcgccggggtgtcccggggggccacctcccgctgcggccgggcggcctcccttccccaggccctcaggaggaggacgttccgaaaggcaacccgcccttaatggcggcgtc

SEQ ID NO: 69969 - DNA, 666 bp, Homo sapiens
tcccacctcagcctcccaaagtgctgggcttacaggcgtgagccaccaaccccagcccacttgtaggtcctatgcacaacagccagagttmtctctgtgtatgtcaccttgctctccacaaagaaggacagcagaagctggaagaaagtcctctgggcgcctgggctctggcgttgctctcttccacccatcgttcttatctcgcactcagggtagaaaagtctggtggaatggacacaaggaaagggctcagcacaggaggaaacaaggaggtgtaatcatgaccacagacggaggagatggcccaaggagatgataaaggaaaaggaggtgcagagctaaggaaagccccaaggagctgagagaggaaaagagacagcagagagacttccacggagatggggaggccttaagtagggcagcagcacatgtgggagagaaaccgagagggtggtgttaaagaaacgtaaaaggagccccactcacttccagtacagaaattcacccacagcagaggccaggcctcaattagaggcctacacaatggggtagacgctctcacagtccacgtccatcagcaccccttccatgttcctgcccacagaaaagcagaaagagtgtgtgaatagggacattgtcttctggcacaatcaaggctagaaagaa

SEQ ID NO: 69970 - DNA, 907 bp, Homo sapiens
atatctgccattctccttgggagcatcattgccaaatggtgggrcgttaaaatttctgaaatgaagagtggagttcccttcacaagcatcccagcctttctcgtgggtgaatgcacaacagcttaatgaaccccacatggtcagtcattccagcagctacttctccactcaccactgaaaaccattgtacatggcaaacctttgcagcaagttacatttggcccactttgcatttggtcacagattgttatgtggcaagcagggttaggagcatctgtatgtgcagcccctcagcagtcatcatctctcttttcccagcatggaaatacggtacctgaaatgggacacactgagtagataggtcatcccagaccaagatatgcaagagaagccacaacctgctgcaattgggcatcaaacacatatggtcgtcataaataaatcatatcctgttctcatttgcaagcctgccgtatgtaactctggcctatgggcttcaaatggagcaactccgggggccacttgctgctaagcaaataggtggattcatttgaattgtgattcactaactgatgtcttataaacataattggctgaaattgggggtgggaagatggcacaaggggacagaagaggttggtggtattgaaagagttcagacataagtaggccataggtgcattggtcatcccaaatgaatggagaaaaggccattagatgccaaagaatggtccccctcataaaaagggatgtcaccctggaaggcagctgaagcctgcgtggaaagatggaactcattttatgaatcaacacttcagatggttggttttctgtgcccaatcatttcctgaccatccactgagaggaaattttgtgcttcagaaaaaataacatgaaggttaaaatg

SEQ ID NO: 69971 - DNA, 678 bp, Homo sapiens
ggccttgtcactagccatgtcacatctgtgcttttgaagggaaatgtcataatattgctaatcaataggaggagtgacaggcccatttgtcaagaatgagccagcactgcaactgttgtcctctgcatctttctcttgggctttgcaaagggaagcccagggaatggactgctctgtgtctggggcagccccctcctgtgccagggtcaatagagagcccccctgggtgagaattgtgagccgtcttgccaatgttctgcacaagtggggcggaatatgatggcwagggctacagaagaaacatcgagtttccaagagtggtgtgcaaaagcaaccagacaccatgcaagaggaaagggtctcctgtatcaggaagtctattgacctttcatctggggagtgcagttgttcatgtgtttcttttgaactgcagatgtttcttgctgctctgttggtcagaggacaagtaggtcatttcaagagaggagtgaagcgaagggatagataggattggtactcactgacaattttcatctttgctctggaggaaaatgtaaccagagggtggaaaagggtggcagggcagtttgtaccccatgccctgctccacactagctccctggagctgatataaacccagatggcagggactcaccactgcaatcagattggtcatgc

SEQ ID NO: 69972 - DNA, 678 bp, Homo sapiens
ggccttgtcactagccatgtcacatctgtgcttttgaagggaaatgtcataatattgctaatcaataggaggagtgacaggcccatttgtcaagaatgagccagcactgcaactgttgtcctctgcatctttctcttgggctttgcaaagggaagcccagggaatggactgctctgtgtctggggcagccccctcctgtgccagggtcaatagagagcccccctgggtgagaattgtgagccgtcttgccaatgttctgcacaagtggggcggaatatgatggctagggctacagaagaaacatcgagtttccaagagtggtgtgcaaaagcaaccagacaccatgcaagaggaaagggtctcctgtatcaggaagtctattgacctttcatctggggagtgcagttgttcatgtgtttcttttgaactgcagatgtttcttgctgctctgttggtcagaggacaagtaggtcatttcaagagaggagtgaagcgaagggatagataggattggtactcactgacaattttcatctttgctctggaggaaaatgtaaccagagggtggaaaagggtggcagggcagtttgtacmccatgccctgctccacactagctccctggagctgatataaacccagatggcagggactcaccactgcaatcagattggtcatgc

SEQ ID NO: 69973 - DNA, 540 bp, Homo sapiens
gctcctcctccaagggcacctacatctccacaaagggccacaaaggactcaggagcttccttgacatggaagaagaaatcaccaatggtggggtttcagacactgtccgacaggtgaacggggtgatggtttgaagcaagagactgtgcctggggtctgcaaaggtttcactcatcagcagagggtgtttttgtagataaggggataaagaacaaggcaaaatgagaagagagacacagggtatgggggcctctggccctctgggaagggacaaggctgcagaagacctcagacagaggtggcacttgtgccggacagtaaagcaaaatgaccaaactgcctggattcaagtcctgcctccaccttctcctggctgkgggtccttgaacaaatactttaacctctctgagcctcagtttcctcagctgtaaaataagaataataacagaacctgctttcagggttgttgtgaggattaagtgagttaatatccatgaaacgctcagacacagggctgcaaaccagatgaatagcttctgg

SEQ ID NO: 69974 - DNA, 568 bp, Homo sapiens
ggtctacctattgtcggtctgtttgtctatctgttcatgtatgtatgtatgtatgtatgtatstatctatctatctatctatctatctatctatctatctatcaattaatcatctatctcttcagatcctcactacaccatcatcatctctggctcttcagaaatccccccaaagtatcagagactggcagaacaggagtcaaaccacacctcagacctgacaaccctggattcatttcctcatttttctatacctcttccatcctgcttcaggaaagccatcccaagctctcactttattcattgtaaaatatgtagtgtggaaattcagaaagataatgagatataatgaagttcactggtgtcttagaaaacatttttaaaatcttatcaaaacttgaaattctatgtgaaatcagtgtttatttgtccaaaaaagattttagccacactagtcatgaaatggcttgtctatttgtgtgagtgtcatataaataggcttcattcattttttttttttgaatagacataacttggaattctggattgttgggaagaaaacactatt

SEQ ID NO: 69975 - DNA, 496 bp, Homo sapiens
atatttgttgaaatattatccttttcctcactgaattgcattggcaccttggttgaaaatcagtgagtcatatgtgctgatctgtttttaaactctgttctgttccatcggtgctcatctctgtgtataccaaaaatacactgaattgattactgcattgattcctgtaactttatagtaagctttaaacttactattcagtaaattgtttggccattataaatacatatgcagtgttcaatgtcartatacaattcttccatgtgggcttacctggtctcctcggacacccccaacctggagtcctctgactcagctgtcttgatgtggctactgcttctctgtctactcatgacttgcccttcagcctcttgggttaccatgactcaacctgtgcagcctctgtttgctgtagttcctttgccctcccttggacactttccatggtaaaatccttaaaaatgttcccaagccaattctctctcacaaagaagaa

SEQ ID NO: 69976 - DNA, 831 bp, Homo sapiens
tccattcccatgacccaaacacctgccatcaggctccacctccaacgatggggattacattccgacaagagatttgagtgtggacaagtatccaaactatattatactgaattccttattgatctcaggtgaattctttagagttatctgcaaggaaagctgcggcactaagagagtgccattgaaggacgggaagaagacagtccttgaacaacttgaagcttacatcttatttccccaatacgaatttgcagttgctgtaaattaacattttaacaaatgccataattacaagtgactaccataattatgttacaatgcttttgcatgtgttgacagtatttatttagaaaatgtcaatattaatatatgccacagtttctgtcaacttgtgttgacattgctctttaaaagaaaaagaggaatttgctgggcttctcttgtctttagatggacccatatcttgtaaataaattgttgctggtttttwaaaaaaaatccatgtgtataagtgataagagatgttcctgacacgggaagggttccacacagtggagggactgaatatgataatggccagtgtttgtttatccaaatacaatttttcttaatcaaacaaaaacacacaaacccaggaaaattagcactttcctcgaacgccaaatgtcctcatcttttcttggagatgtgttttctatgctgaggcagccttgacctcaggtgaaagggaaaagcccccctccacctgattagagtaaatgatgggtaaggaagccatcacacctgcccatgcagctgagcggcagcacagggtgagcatggcaaatgagc

SEQ ID NO: 69977 - DNA, 915 bp, Homo sapiens
attttccaggattttatggctgatagacccaaattattagtcttgataaacaacctgaaccaaacatttataaagtcccttcctctcccatgggaatggaatgctcagactcctgctgagggagacaccagcaagcctcttgagaaggcaccagacagtgaactctgtggtcacatgaagggaggttcagatgctagacgaccagcgtatgacctggaaccattgaggattgcaaccgctgcctccagggtccagatgtgctgcagtagagggcagagcacaggaatcaagaagcagctgccacaccaaagaactgatgcttaaacacacaggtgtgttgcatttgagagaaggcaagaagaaaagacaatagaaggttaccctggaaaaacaacacctagcaaacctcagaatactccatgtgtcccaagagaaggaataattgtctttctagctgttatatattgcacactggccaggataaattcccagactataataatcctgactatgtagacggaagtttctatttataaagtcatgcagggggaaagttgattaatttttgtcccattgccacatctgtagactaagtaayttttaacttgctaacttttagaatgtccacctttgtgcattttggtagcattcttgtttcattattttagaaaggggtcttcccattactgggatgtcggggccctgtcagagaactattattaaggctctgtgagggaactgttcagtctcacagcaaggaccacagagcgtggtttcatctgaaccctacaagtcagggacaccagtgtgttttctactcgagttacctaaaaatggtctcaattttccatttcattctctgtaaatgacacaatagatggtttatagactcagcagccctcaccttttattaaa

SEQ ID NO: 69978 - DNA, 915 bp, Homo sapiens
attttccaggattttatggctgatagacccaaattattagtcttgataaacaacctgaaccaaacatttataaagtcccttcctctcccatgggaatggaatgctcagactcctgctgagggagacaccagcaagcctcttgagaaggcaccagacagtgaactctgtggtcacatgaagggaggttcagatgctagacgaccagcgtatgacctggaaccattgaggattgcaaccgctgcctccagggtccagatgtgctgcagtagagggcagagcacaggaatcaagaagcagctgccacaccaaagaactgatgcttaaacacacaggtgtgttgcatttgagagaaggcaagaagaaaagacaatagaaggttaccctggaaaaacaacacctagcaaacctcagaatactccatgtgtcccaagagaaggaataattgtctttctagctgttatatattgcacactggccaggataaattcccagactataataatcctgactatgtagacggaagtttctatttataaagtcatgcagggggaaagttgattaatttttgtcccattgccacatctgtagactaagtaatttttaacttgctaacttttagaatgtccacctttgtgcattttsgtagcattcttgtttcattattttagaaaggggtcttcccattactgggatgtcggggccctgtcagagaactattattaaggctctgtgagggaactgttcagtctcacagcaaggaccacagagcgtggtttcatctgaaccctacaagtcagggacaccagtgtgttttctactcgagttacctaaaaatggtctcaattttccatttcattctctgtaaatgacacaatagatggtttatagactcagcagccctcaccttttattaaa

SEQ ID NO: 69979 - DNA, 915 bp, Homo sapiens
attttccaggattttatggctgatagacccaaattattagtcttgataaacaacctgaaccaaacatttataaagtcccttcctctcccatgggaatggaatgctcagactcctgctgagggagacaccagcaagcctcttgagaaggcaccagacagtgaactctgtggtcacatgaagggaggttcagatgctagacgaccagcgtatgacctggaaccattgaggattgcaaccgctgcctccagggtccagatgtgctgcagtagagggcagagcacaggaatcaagaagcagctgccacaccaaagaactgatgcttaaacacacaggtgtgttgcatttgagagaaggcaagaagaaaagacaatagaaggttaccctggaaaaacaacacctagcaaacctcagaatactccatgtgtcccaagagaaggaataattgtctttctagctgttatatattgcacactggccaggataaattcccagactataataatcctgactatgtagacggaagtttctatttataaagtcatgcagggggaaagttgattaatttttgtcccattgccacatctgtagactaagtaatttttaacttgctaacttttagaatgtccacctttgtgcattttggtagcattcttgtttcattattttagaaaggggtcttcccattactgggatgtcggggccctgtcagagaactattattaaggctctgtgagggaactgttsagtctcacagcaaggaccacagagcgtggtttcatctgaaccctacaagtcagggacaccagtgtgttttctactcgagttacctaaaaatggtctcaattttccatttcattctctgtaaatgacacaatagatggtttatagactcagcagccctcaccttttattaaa

SEQ ID NO: 69980 - DNA, 1020 bp, Homo sapiens
acttgctttcactgttatttttccttggggttttaagtgttgccatatgtgctgggctccccgtccgggatgtgcctgtcctctgctctctgggcctttttggcgcctggtgtcagatgggcctcatcacctgtgtttgctgccaccggttatgagtctcgacaaagggggtcacttaggtagggtttgcgatccagttttcatcatgcagtcaatactgtcactttagcagtttccccagaacctgttaaatatttatgtgtgtttcaagcagactctgcgaaactggctactggtacatttattattattatcatcttaactagaaacaaagtattcgaagtgactgtgatatgaattattaacattatttttaacttttgtgaggttttcctatcattgatcttaaagaagaaagtaaatatttagcttgtatttagtttttcctcttactgaactttctgtgacttagttgatgtgtttgttagtgtttctggaaaagtggtaggaaaccgtgtttctttatctgaagatgggcttcagcctgcagctctgctaggggttctctggtgtttgttgagaggcattcaagttctgtgaaggatttcagccccgctcccagcagctggagtggggggcagaagaatgtgtctccaccagctatttctaggtgccagagatcctgcgtagcatgcaggaactcggatttgatcacttgatagtatgacttaagaaaaaaaaaaacctataaaaggagtaaactcacaggaaaaacaaaacttgtcattcttggtaggaaattccaaagtgtagtggaaatgtaaggagctggttgtagcatttatttcatggagaaagtggcatccrtgtaattgttaaagatggttactctttttttttattttttaaattttactttaaattttgggatatatgtgcagaacgtgcaggtttgttacataggtatacatgtgccatggtggtttgctgcacctatcaacccatcatctaggtttttaa

SEQ ID NO: 69981 - DNA, 803 bp, Homo sapiens
gttttgagtggcaaattaaagatttttcttaatatttgtcatctaaattattacaaaaagaatgtgatttcctttataatcagagagaagtgttattttcatttatttatatttaaatctcttttctttttcttatttttttctccygtatgtatcccatgaaggctagcatccctgcctcttgaaagaaaccagcccatttttgggaagtgctctacataaagctgccccatcttcctttcatttcaagagatctggaaacatttttatttcaaattgttttatcgttcttagaatatatattttttaatatatgaaattgaggaaaagacaaaggaaaagctgactccctaccctactggggctactcttccaatttttcctgctattgttatgtattaatattcactgggtactaaaaagatgggcagccccttagatccttttttcttatctctttctcataatcctacttcattccttcattcacttatttttaaaagggtcatgtgtacaaatacatagttcagaaaaattttaaatataactataaaagtatacagcaaaatcccattcacagtcttattctccttccacagccaaacacttttaattggcttcttatatatcttttcagaatttatctttgcaaatacacatgtatattcttactctactcttctctctcaacacaaaaagtagcataccatacataggataccattccttcttctttttaaaaaacacgcacaatatatctgagttcttctacatgagtacagaggtctttctcattcttcttt

SEQ ID NO: 69982 - DNA, 803 bp, Homo sapiens
gttttgagtggcaaattaaagatttttcttaatatttgtcatctaaattattacaaaaagaatgtgatttcctttataatcagagagaagtgttattttcatttatttatatttaaatctcttttctttttcttatttttttctcccgtatgtatcccatgaaggctagcatccctgcctcttgaaagaaaccagcccatttttgggaagtgctctacataaagctgccccatcttcctttcatttcaagagatctggaaacatttttatttcaaattgttttatcgttcttagaatatatattttttaatatatgaaattgaggaaaagacaaaggaaaagctgactccctaccctactggggctactcttccaatttttcctgctattgttatgtattaatattcactgggtactaaaaagatgggcagccccttagatccttttttcttatctctttctcataatcctacttcattccttcattcacttatttttaaaagggtcatgtgtacaaatacatagttcagaaaaattttaaatataactataaaagtrtacagcaaaatcccattcacagtcttattctccttccacagccaaacacttttaattggcttcttatatatcttttcagaatttatctttgcaaatacacatgtatattcttactctactcttctctctcaacacaaaaagtagcataccatacataggataccattccttcttctttttaaaaaacacgcacaatatatctgagttcttctacatgagtacagaggtctttctcattcttcttt

SEQ ID NO: 69983 - DNA, 803 bp, Homo sapiens
gttttgagtggcaaattaaagatttttcttaatatttgtcatctaaattattacaaaaagaatgtgatttcctttataatcagagagaagtgttattttcatttatttatatttaaatctcttttctttttcttatttttttctcccgtatgtatcccatgaaggctagcatccctgcctcttgaaagaaaccagcccatttttgggaagtgctctacataaagctgccccatcttcctttcatttcaagagatctggaaacatttttatttcaaattgttttatcgttcttagaatatatattttttaatatatgaaattgaggaaaagacaaaggaaaagctgactccctaccctactggggctactcttccaatttttcctgctattgttatgtattaatattcactgggtactaaaaagatgggcagccccttagatccttttttcttatctctttctcataatcctacttcattccttcattcacttatttttaaaagggtcatgtgtacaaatacatagttcagaaaaattttaaatataactataaaagtatacrgcaaaatcccattcacagtcttattctccttccacagccaaacacttttaattggcttcttatatatcttttcagaatttatctttgcaaatacacatgtatattcttactctactcttctctctcaacacaaaaagtagcataccatacataggataccattccttcttctttttaaaaaacacgcacaatatatctgagttcttctacatgagtacagaggtctttctcattcttcttt

SEQ ID NO: 69984 - DNA, 490 bp, Homo sapiens
tgcttacttgctaaaagtgtctttgtaatccccaaattaatacttgtggagctttcaaggtggctcctggatagacacacagtagtgaaaactctgtcactctttgcacacgtcccaagctaaggtcaaaaaaggtgacccttcgtcttcttgtttcagctctcatacaaagatgacctgaggacagagacagtagaggacagtgcagggtagtgcaagaagctgtggctctggggtctggtcaagatgcccctttcttctgttaggaagctttcccactcctctgcctgctttcgcatctcttccaaaatacaagtgattgcatgtgactcccttgttagagcaggctctcaataaataggctttgcttgatttcatttggttcatcttcatttatttccacaatagaaaaagtacctttaaactggatgccagatacygttcccagaatcaaaggaggaaaaacgtcaaatacttggtgaaggttctc

SEQ ID NO: 69985 - DNA, 895 bp, Homo sapiens
gaagaattttctctggcatccattactgtcatggatacatcattactatagatatgggagcttccatctttgagatggatataaatattgatggggaattatcttataaggtaatatctatgtgtaatttgtatgagaatgacaaattgggttggcatttgttaatttaggacctctggccatgtagacaaatttgctgacttcatggtgaaagacgtaaaaaatggagaatgttttcgtgctgaccatctattaaaaggtgaggttcttcatctccttcaggtaggattgatcaaaataaaaggtttaaactttctctcagatgtctttcattaaattttttattgaggcataacattcaaagagcaaagtgcacagatcttaagtatatagatcaagtcctttattttttaaaaaagttatatgtagataattagttatatacagataatttttctaattagcaaatgaatcaagacaataccatgactgctgttgtaaaatcaactgtgggattcatgtaaattaagaactttatgcttggatttactttttaattgtctagcattgaaactgaaaagtgcattgtmctttttcccattgattgatatatgtcaacactgttcttacagctcatttacagaaattgatgtctgataagaagtgttctgtcgaaaagaaatcagaaatggaaagtgttttggcccaggtgagtactctagagatgttatcagagtaacctaggtggtcgctgtccttctttcagtgtttaatgactgttgcatttcccattatgctgaccctggccacattgtaatgaagcagaggttaattctgtcctgtatagcgtctctttttttgcatttttattttcttctctcttttgtgactaacc

SEQ ID NO: 69986 - DNA, 947 bp, Homo sapiens
tgcatatgattctgaaaatctgatctagaaatcagatcaatggtttcctgaggcagggggcagatgggagtgggggagaaattgactgcaaagaggaataaggaaaatttctggggagatagaaatgttctgtgtcttgattgcatgcttgctctctcccttgtatacagtcacatatgtgtgtgtatgtrtatatatgaatatacatatagatacatacgacttgtcaaaagtcagcaacccatatgcttgaaatctgtgaatgttattgtatgaaattacacttccatgaaattgattttcttttaaggaaaggcaaaataaagtttttccagacaaaaactgagactttgttgctaccgtatctgcactaaaatgaacactaaatagagtttttcaggtagaaaaaaaatgatcccaagacaaaaacaaaaatgatgagcaacaggaagtgttcataagctgggaaacagaaatgggtactaaccgaactatattatattaatatctcgtgaggtcaccaggacccctcaggaaatgattgacctagaaaggagtctcacctcctggagagcaaccaggactctgtccctgaatcctggggtggccccagagaaaccacagatacacactcactcagtgtcactttcaccgcaggcttctttctttccttgcactgtcccaggggaccttgagcggagatgtgcatttcttataactgagatgctaagattaaaaaaaaaaaaacattttataaagatgttctccacatgtacctttctatgttttaataactttttctgtaagtataaaacaatacctgctcactgtagaaaacttgggaaatgcaaaaaaaaaaattagaggaataaattaagttccctattatccacatgcaataaccactattctcattttggagcacttcctttcagcttttctctgca

SEQ ID NO: 69987 - DNA, 947 bp, Homo sapiens
tgcatatgattctgaaaatctgatctagaaatcagatcaatggtttcctgaggcagggggcagatgggagtgggggagaaattgactgcaaagaggaataaggaaaatttctggggagatagaaatgttctgtgtcttgattgcatgcttgctctctcccttgtatacagtcacatatgtgtgtgtatgtatatatatgaatatacatatagatacatacgacttgtcaaaagtcagcaacccatatgcttgaaatctgtgaatgttattgtatgaaattacacttccatgaaattgattttcttttaaggaaaggcaaaataaagtttttccagacaaaaactgagactttgttgctaccgtatctgcactaaaatgaacactaaatagagtttttcaggtagaaaaaaaatgatcccaagacaaaaacaaaaatgatgagcaacaggaagtgttcataagctgggaaacagaaatgggtactaaccgaactatattatattaatatctcgtgaggtcaccaggacccctcaggaaatgattgacctagaaaggagtctcacctcctggagagcaaccaggactctgtccctgaatcmtggggtggccccagagaaaccacagatacacactcactcagtgtcactttcaccgcaggcttctttctttccttgcactgtcccaggggaccttgagcggagatgtgcatttcttataactgagatgctaagattaaaaaaaaaaaaacattttataaagatgttctccacatgtacctttctatgttttaataactttttctgtaagtataaaacaatacctgctcactgtagaaaacttgggaaatgcaaaaaaaaaaattagaggaataaattaagttccctattatccacatgcaataaccactattctcattttggagcacttcctttcagcttttctctgca

SEQ ID NO: 69988 - DNA, 947 bp, Homo sapiens
tgcatatgattctgaaaatctgatctagaaatcagatcaatggtttcctgaggcagggggcagatgggagtgggggagaaattgactgcaaagaggaataaggaaaatttctggggagatagaaatgttctgtgtcttgattgcatgcttgctctctcccttgtatacagtcacatatgtgtgtgtatgtatatatatgaatatacatatagatacatacgacttgtcaaaagtcagcaacccatatgcttgaaatctgtgaatgttattgtatgaaattacacttccatgaaattgattttcttttaaggaaaggcaaaataaagtttttccagacaaaaactgagactttgttgctaccgtatctgcactaaaatgaacactaaatagagtttttcaggtagaaaaaaaatgatcccaagacaaaaacaaaaatgatgagcaacaggaagtgttcataagctgggaaacagaaatgggtactaaccgaactatattatattaatatctcgtgaggtcaccaggacccctcaggaaatgattgacctagaaaggagtctcacctcctggagagcaaccaggactctgtccctgaatcctggggtggccccagagaaaccacagatacacactcactcagtgtcactttcaccgcaggcttctttctttccttgcactgtcccaggggaccytgagcggagatgtgcatttcttataactgagatgctaagattaaaaaaaaaaaaacattttataaagatgttctccacatgtacctttctatgttttaataactttttctgtaagtataaaacaatacctgctcactgtagaaaacttgggaaatgcaaaaaaaaaaattagaggaataaattaagttccctattatccacatgcaataaccactattctcattttggagcacttcctttcagcttttctctgca

SEQ ID NO: 69989 - DNA, 947 bp, Homo sapiens
tgcatatgattctgaaaatctgatctagaaatcagatcaatggtttcctgaggcagggggcagatgggagtgggggagaaattgactgcaaagaggaataaggaaaatttctggggagatagaaatgttctgtgtcttgattgcatgcttgctctctcccttgtatacagtcacatatgtgtgtgtatgtatatatatgaatatacatatagatacatacgacttgtcaaaagtcagcaacccatatgcttgaaatctgtgaatgttattgtatgaaattacacttccatgaaattgattttcttttaaggaaaggcaaaataaagtttttccagacaaaaactgagactttgttgctaccgtatctgcactaaaatgaacactaaatagagtttttcaggtagaaaaaaaatgatcccaagacaaaaacaaaaatgatgagcaacaggaagtgttcataagctgggaaacagaaatgggtactaaccgaactatattatattaatatctcgtgaggtcaccaggacccctcaggaaatgattgacctagaaaggagtctcacctcctggagagcaaccaggactctgtccctgaatcctggggtggccccagagaaaccacagatacacactcactcagtgtcactttcaccgcaggcttctttctttccttgcactgtcccaggggaccttgagcggagatgtgcatttcttataactgagatgctaagattaaaaaaaaaaaaacattttataaagatgttctccacatgtwcctttctatgttttaataactttttctgtaagtataaaacaatacctgctcactgtagaaaacttgggaaatgcaaaaaaaaaaattagaggaataaattaagttccctattatccacatgcaataaccactattctcattttggagcacttcctttcagcttttctctgca

SEQ ID NO: 69990 - DNA, 947 bp, Homo sapiens
tgcatatgattctgaaaatctgatctagaaatcagatcaatggtttcctgaggcagggggcagatgggagtgggggagaaattgactgcaaagaggaataaggaaaatttctggggagatagaaatgttctgtgtcttgattgcatgcttgctctctcccttgtatacagtcacatatgtgtgtgtatgtatatatatgaatatacatatagatacatacgacttgtcaaaagtcagcaacccatatgcttgaaatctgtgaatgttattgtatgaaattacacttccatgaaattgattttcttttaaggaaaggcaaaataaagtttttccagacaaaaactgagactttgttgctaccgtatctgcactaaaatgaacactaaatagagtttttcaggtagaaaaaaaatgatcccaagacaaaaacaaaaatgatgagcaacaggaagtgttcataagctgggaaacagaaatgggtactaaccgaactatattatattaatatctcgtgaggtcaccaggacccctcaggaaatgattgacctagaaaggagtctcacctcctggagagcaaccaggactctgtccctgaatcctggggtggccccagagaaaccacagatacacactcactcagtgtcactttcaccgcaggcttctttctttccttgcactgtcccaggggaccttgagcggagatgtgcatttcttataactgagatgctaagattaaaaaaaaaaaaacattttataaagatgttctccacatgtacctttctatgttttaataactttttctgtaagtataaaacaatacctgctcactgtagaaaacttgggaaatgcaaaaaaaaaawttagaggaataaattaagttccctattatccacatgcaataaccactattctcattttggagcacttcctttcagcttttctctgca

SEQ ID NO: 69991 - DNA, 947 bp, Homo sapiens
tgcatatgattctgaaaatctgatctagaaatcagatcaatggtttcctgaggcagggggcagatgggagtgggggagaaattgactgcaaagaggaataaggaaaatttctggggagatagaaatgttctgtgtcttgattgcatgcttgctctctcccttgtatacagtcacatatgtgtgtgtatgtatatatatgaatatacatatagatacatacgacttgtcaaaagtcagcaacccatatgcttgaaatctgtgaatgttattgtatgaaattacacttccatgaaattgattttcttttaaggaaaggcaaaataaagtttttccagacaaaaactgagactttgttgctaccgtatctgcactaaaatgaacactaaatagagtttttcaggtagaaaaaaaatgatcccaagacaaaaacaaaaatgatgagcaacaggaagtgttcataagctgggaaacagaaatgggtactaaccgaactatattatattaatatctcgtgaggtcaccaggacccctcaggaaatgattgacctagaaaggagtctcacctcctggagagcaaccaggactctgtccctgaatcctggggtggccccagagaaaccacagatacacactcactcagtgtcactttcaccgcaggcttctttctttccttgcactgtcccaggggaccttgagcggagatgtgcatttcttataactgagatgctaagattaaaaaaaaaaaaacattttataaagatgttctccacatgtacctttctatgttttaataactttttctgtaagtataaaacaatacctgctcactgtagaaaacttgggaaatgcaaaaaaaaaaattagaggaataaattaagttccctattatccacatgcmataaccactattctcattttggagcacttcctttcagcttttctctgca

SEQ ID NO: 69992 - DNA, 648 bp, Homo sapiens
agatatcgtgatgggaaatggtgacaccagttggcaggcgcattagcaaaactagaatcgattctgccctctcaatgtccctgggagagacccaggattgcaaacttgaaaattctcttgaactccatgattctaagtggtaaacaaacttatttttgggtacttaaactgcatgtactcctggtaagagtgtcctctaatttatgttcttgaagacaaaagacttggaaaatccttttatgaaaaccccacaaaggttgttacaaatagagagttgcaaacaagtttcaagttgacctgatttctctctgtaaaaatcttctttggtgagagtactttcctctcccggawaataagttgtactttaaagaaatgaacaaataaaaatgtttaattttatacatagtggctttctaattctttgccccccagtaaccactcaaagtgaagatattggctgaaagtttgttctttatagttatctactcacacagatttacttacatactttaaactttggaaagtgctgcttaaagtgctttaagttaaaatgtttcttaagttttaaattttatggagaccagtcctagctgctgagagtccaacaaaggtagcacttaatgcatacaagaaaatataaattcggga

SEQ ID NO: 69993 - DNA, 648 bp, Homo sapiens
agatatcgtgatgggaaatggtgacaccagttggcaggcgcattagcaaaactagaatcgattctgccctctcaatgtccctgggagagacccaggattgcaaacttgaaaattctcttgaactccatgattctaagtggtaaacaaacttatttttgggtacttaaactgcatgtactcctggtaagagtgtcctctaatttatgttcttgaagacaaaagacttggaaaatccttttatgaaaaccccacaaaggttgttacaaatagagagttgcaaacaagtttcaagttgacctgatttctctctgtaaaaatcttctttggtgagagtactttcctctcccggaaartaagttgtactttaaagaaatgaacaaataaaaatgtttaattttatacatagtggctttctaattctttgccccccagtaaccactcaaagtgaagatattggctgaaagtttgttctttatagttatctactcacacagatttacttacatactttaaactttggaaagtgctgcttaaagtgctttaagttaaaatgtttcttaagttttaaattttatggagaccagtcctagctgctgagagtccaacaaaggtagcacttaatgcatacaagaaaatataaattcggga

SEQ ID NO: 69994 - DNA, 648 bp, Homo sapiens
agatatcgtgatgggaaatggtgacaccagttggcaggcgcattagcaaaactagaatcgattctgccctctcaatgtccctgggagagacccaggattgcaaacttgaaaattctcttgaactccatgattctaagtggtaaacaaacttatttttgggtacttaaactgcatgtactcctggtaagagtgtcctctaatttatgttcttgaagacaaaagacttggaaaatccttttatgaaaaccccacaaaggttgttacaaatagagagttgcaaacaagtttcaagttgacctgatttctctctgtaaaaatcttctttggtgagagtactttcctctcccggaaaataagttgtactttaaagaaatgaacaaataaaaatgtttaattttatayatagtggctttctaattctttgccccccagtaaccactcaaagtgaagatattggctgaaagtttgttctttatagttatctactcacacagatttacttacatactttaaactttggaaagtgctgcttaaagtgctttaagttaaaatgtttcttaagttttaaattttatggagaccagtcctagctgctgagagtccaacaaaggtagcacttaatgcatacaagaaaatataaattcggga

SEQ ID NO: 69995 - DNA, 1215 bp, Homo sapiens
aatatatgactgagaagcggcaaaagtaaaatttactgtgattctgtgattacaggctgtactgtaatactgtgattacaggctttgttgtcaacactgagctgaatcttaagggccagggagcttccayactgacttgacagcaaggtggatggactaaatactttccttccactatcgccatcactgagatcttctgcaaatgggataagaatgggaaggcccagtccagcataaaccagtacagccttttgtgaaggctcctggaaagcaagctggagctgagtttatgattctgggacgtgagtcatttcccttgggaaacacaagtctccttgcccattcctgctccagaacatggtacaattgacaatatttttaaaagtctctaaaaactcctaaaaccttgtctttaatagaagacctattgtaaaaggtgccttgtccaagtgaaagccttctctttgggcttgagaaatatgcaggagtttaattactgaccaagtctctcttatttgggcaagcttgaatgaattcttcatggctgggatccttccttgggaaactaactttgatggctatctacccagcacctttccaatcaacactgtgattattttactttttttttttttaaaggtgttttattctgactttctgatgtagccttccgataaggccagaatctggataatccaggctaactaaccgctttttggccttaattgcctggcccatacaaagataatttactcaattctccacttcatttttcatgtgtagatgaagtctgactgtagttgctcaggcactattaattcaagttaacaagcaacgaaggctgcaataaatttgtatttcaggctcaactttgattttacttacaaacttcatacaaaagtgctggttggcatgcctgtctctgaaatgtgctctataggaaggcactacatgtaaacttgtatccttatgttctaaaacatatccaattttggtagagcttaagaagttagcagaatgaattttttttcattgttatttcaaataaaaagtaagtggaatatgtgtttctctggatggtatctacaagaaactaatttctcttgggggagaaattggactcccaagaaccctctgtaagaaatagtctcctaaaataatctggtgcctttgtatatttcagtagaaagaactagtcaaaatctgctgggtgca

SEQ ID NO: 69996 - DNA, 1043 bp, Homo sapiens
taaaactaagagaagaaatgcttacaaaagatttaaatcaatgcttacttgagcaatacagcattgatctagttcttttatttttccctcttcaggtataatagaatgcaagtttcatgagggcagatacttgggacttgttaattaactgcagtctctctaacatttagaaaagtacctgacacataatagatgcttaataaatatctcttagataatatgagctttaagaggaggaatcatggggatgccacacctcatcctgcatctgtttatatctacgagttgaagtagtgaggtcatctacctttgtctttgtaagaatatcactgtccgggccattacccttctcagaaaaaaaaaaaaatactttcaatgcaatcagcatttgtggatgatttaaagatggaatatcttaagtgaaagcatctgttggaaaacatgataaggtactcagagacaaagtccttgtcatttatatgttctgaatgatgcctagcttcccataggtaaacactgagacctaaattgccataataaaagatcagtgccattgccattaaaatgcactgtgtttctactatcttgagtgcagaaaaagaaaaaatgttggcatcatagggctgattctgcacccatgtggaatratttaattctgttaataatgctagaaatgttaagaaaacatttgggggagggaaaggcagaatatgggaacgtgcaaaaccagccttgtttcatctgaactccaggatcctgcgttttcccttgtttactgtacttattctggatctgttttcacttttatttgtggtcagcttcgatatgtctacacgaaagcacacttcagaagtaaaatgactctgtctttttacagtatgacttcagacagttggacagtttaggatgcactggttcctggatcaattttcccatgcctgcttaaggcatgctagttaatatactgcaaagagaaaaggcattgtctctaaaggcacatgaatccaaccattgagctgggttctgggtgtacgccatgccct

SEQ ID NO: 69997 - DNA, 1229 bp, Homo sapiens
caggcctcatattcatgaatttctcaaactgagacttttgacattgcctttaaatgagtgccatgatctgaatggctcctaaaattcatagattaaaacttagtccccattggggtgatattaaaagatgcggccttttgggaaatgattaaatcatgccctcatgaatggattagtgcctgataaaagagctggagggaactagcttaaggcctttttgctcttctgccatgtgaggacacacagttcatcccctctggaggaggcagctacaaggcgccatcttggaagcggagacagggtttcaccagacacgaaacctgctggcactttgattttgaacgttgtagcccacaaaactatgaggactaaatttctgttatttgtaaattacccagtcttaagtattttgttatataatagcagcacaaatggcctgagatgatgagttaatgtatacagtccttgaattcatgtgggtattgaagtttgataaatacaaactttaaaaataccacaattttgcagctctattgatatattaatttagtgctctaatatacatggaaatgtaaaaatattatagaagtgccttctaagaacactgacaagggatcctctcataatctgcatttacctccaattgtagcaatattttcactgagttataactgctgcctccctgtctgtcttcctgcctgcrtgagggatagaattgtgttctgcttagttgaaattccagtagctaatctaatctctggctgaaagaaggttaccaaaaattaaataatttgggagggatagtaagaaaggaaactcatctatattgaagtaaaataagtacagacatcaaagtggagaacaactttatagaagaaaacaagtatcttcccttcaaaaagggcaacaaaacaatcttgtggtattagtaattgtaactaacatatggcagctctcaaatacaaaccaggcgccatcttttgtgtgaagcttcctgacattatcagagaagttctgtccaactcagtgttggggttggggaagaggagaggagagctatcaaggggaataccacccagttctttttagcatcttggattccacttttgagctcatagaaacttttccagagaagctctctgaccatcttttctatttcttcctttggctccagagtgagcatggattaagagaaataaaatcaagatctgggagatttaagcagatct

SEQ ID NO: 69998 - DNA, 1144 bp, Homo sapiens
tggatctatgtttatggaaagttttaacggttgcaaagtcaaattgcaaaaacgattcatttttgtagagatcttgatatatcatactgcattctaataaaattttcaatactggcagtaacgtagattataatactaatgtttcccacgggatcccatgatcataactcctttggtaaatgtcctagagttaaggtgaatgcaccaaagagctgtaactcactgacatttaatattggctaatgcaatatgaaaaattcggcagcaaatacaggctgtagagaaacactccttcaagatttggagtccatgtcactcaaaaaatgttttctcctcatattctgagattaatgcagttctgacactttcctcacagatacacgatgatttaggaaagacaacaagaaagtcatggagataacagatgaatgggaccttcaagcagtaacattgtgacaagaaatgaaacttgaactctttgaacagaatttttccaggaaagccctttcaaactcttgaaagggaaacatcaaagtctgaagggcagataygaaaaaagtttcccctcttacaccaaagtgacacaaattcaatctgacacacatttatagtgaattttgtgtgccaacaaagataaaaaggaaaaggatacgtggttgtcctcaaggaacttattacaattatctctcatctgactgggacctctgttttctgaatattgttcccttctatcctctgcctacttcaaaaaggactgaagtggtacaggatttttcaaagtactctttaagatgctcaatttctgtcaaaatattaggaaacacaaatggtaactgccatgagaaaacattttttcaccaatcagtgtggcaaagatcaagaggtttaaaaacagaatctgttggtaagagcgtggagcaacaggcactctcagacatttctggtgggcatggaaagagatatgaccattacagaaagcaacctggtgatgcttacctgaagtttaaattcattacaaggtgatccaacaactcttcttctggaaatttattgccctttacaagtactttactcgtgtgaaatgatggatgttaggtatatttgtggcaccacatatattctgaatatgtccataggcacatgc

SEQ ID NO: 69999 - DNA, 1144 bp, Homo sapiens
tggatctatgtttatggaaagttttaacggttgcaaagtcaaattgcaaaaacgattcatttttgtagagatcttgatatatcatactgcattctaataaaattttcaatactggcagtaacgtagattataatactaatgtttcccacgggatcccatgatcataactcctttggtaaatgtcctagagttaaggtgaatgcaccaaagagctgtaactcactgacatttaatattggctaatgcaatatgaaaaattcggcagcaaatacaggctgtagagaaacactccttcaagatttggagtccatgtcactcaaaaaatgttttctcctcatattctgagattaatgcagttctgacactttcctcacagatacacgatgatttaggaaagacaacaagaaagtcatggagataacagatgaatgggaccttcaagcagtaacattgtgacaagaaatgaaacttgaactctttgaacagaatttttccaggaaagccctttcaaactcttgaaagggaaacatcaaagtctgaagggcagatatgaaaaaagtttcccctcttacaccaaagtgacacaaattcaatctgacacacatttatagtgaattttgtgtgccaacaaagataaaaaggaaaaggatacgtggttgtcctcaaggaacttattacaattatctctcakctgactgggacctctgttttctgaatattgttcccttctatcctctgcctacttcaaaaaggactgaagtggtacaggatttttcaaagtactctttaagatgctcaatttctgtcaaaatattaggaaacacaaatggtaactgccatgagaaaacattttttcaccaatcagtgtggcaaagatcaagaggtttaaaaacagaatctgttggtaagagcgtggagcaacaggcactctcagacatttctggtgggcatggaaagagatatgaccattacagaaagcaacctggtgatgcttacctgaagtttaaattcattacaaggtgatccaacaactcttcttctggaaatttattgccctttacaagtactttactcgtgtgaaatgatggatgttaggtatatttgtggcaccacatatattctgaatatgtccataggcacatgc

SEQ ID NO: 70000 - DNA, 590 bp, Homo sapiens
aaagcacttagcacaatgcttacttacaggcatgctcattcaatgagaattccctcacaccaaccttctactatagaactgaacactggctcartacagtgaaatctgtgatccagattaagaggaaaggaagagaaaggaagccccccatcgtccttcctttctagctctctataaactgtggccatttctcccactcacacagctctccttctttgcttcctagcagctataaatttgactcggtagacttatttctagaatccctgaacccttgtagtcatgacccaagtatgtggttccaagaaactaaaaaaaaacccatgcctgaaagagaaatcctaccatctctttcttctctgcccctgtggtatccacctccccagctggccctactgcctagtcagacagagtttctcctttattcaggggttctcactgctgcagcttcctcagcctcagcaactgccattaacgttagtgcttctctattgaaagagagtctggcatcaaacattaaagaggctgagcagcattctgcaaaataactggacagtacccttcaaaagtgtcaatggcataaaagacaa

SEQ ID NO: 70001 - DNA, 650 bp, Homo sapiens
tagaattcttgcaagaattaaatggtatgctgaatgtaaagcatgtagcccaacttagcaggctcacaacaagtgtagccttttttattatgagaagggacctcacctcttcactcagtgagaacaaagggaaacatagagactgtggaagtcagaaaggcccccaaaggtgtccacgctcttgtctctgaatcctgtgaatatgctacagtacacagcaaaagtaaatttgcatgtgtgattaaagttatgaaccttaaaataggaaggttagcctagattatcaggtaggcctaacacaatcaaatatatccttgaaagcagagagcaggccggccatggtggctcatgcctgtaatcccagcacatcggggggccaaggcaggaggattgcttgagttcaggagtttgagaccagcctgggcaacattgctaaactccatctctaataaaaatacagaaattatctggctgtggtggtatgcacctgtagtccagctactccagagrctgaggtgggagaattgcttgagcccaggaggcagaggttgcatattcatccccagaggcttcagatagtccttccagtaccctgattttagccttgtgagactcaaggcaaaagacccagctaggccatgtgctctatt

SEQ ID NO: 70002 - DNA, 877 bp, Homo sapiens
tttcctgagcctaagggtagggagagagacatgtacatgttcattaattgccaaaaagtacacttcaaagcaaactgaagtgatggagatcagccatgacagatttcttccaaatctttgctctcctacaccagaagtatccctggaaacaaaaggcagaaataaagacattcttacctgaagggaattattgatcagtaccagctctgagtactcagaaaattatctgcttacatgcaattttaattttataaatttgacaatgtgagataaatgataaagaaattctatcccaatgggtcctacatattggacagtgaacatatttttaactttgtaacaaagggagattaatatacctccaacatgaaatgactttggaattgtccaaaaagtgaactgaggagatatattaattaaattctcccttgagcctcaagaaggtgaggagggcctagaaggtaggcttgagcaaaattctccaacaaccacaattggaatgtaagcagaaggaaacaatctctcgttctttctcagatgaaaggaaaatggcaatcttttctagcctatctttctctatttgaaggactaacctgcagaaaagaaattagactcatttgggtgtcttcctccacaaggcagaattaggtttaagtttcagggaggaacattaaaaaaaatatatagcctcattgctccaaatcacaattagcatgtttcaagcaggatgagaagcaagaaaaaataaaaggagagagatcaaggcactgctaaggcacagagaacaatgrcagtggcttgacatcatatcttcagtaaacatgttgactccaacattctcctgtccatgcccttcccttggcagaccctgtcgggt

SEQ ID NO: 70003 - DNA, 1181 bp, Homo sapiens
tggatccaatttttagctcatccagcaagaaaatggaaggtattccagatggaagaaactgcacaagcaaaagtacagaaggacaagtgagcttagaatctgatgtagaccatcaggaagagtagtgttcattcatgcaggcttattttctcaaaaccacaggccatcagcagagatgtgcctcatcagtttatataagtttatataagaatatatatatatatattcttatataaacttaacctgttcaagacttaacatggcagaaataatgctatgtgtttgccaaatttcatttcatacccctycttaactgggaacatgttaaactgtgttttaagcttccctgcagtcaggcaggaccacggaactacttctgtgtaaaagatattaacttttgtcatttaatcacatggagatttggagggtgcttgtcactgtggtataacttattttatcttgactaatacattggaaaaaccatattcattacttgaattctgacgtcataaatttatacaatcattcaaaaaatatttaagagcccactgtgtgccaggtacattaggcatcgggaacacaggagtgagcaaaacaatagtctcttatagttaaatggaaatcattcccaaatattagcttttatgaatcacagaaacaaattccatttttagaaaagggaaactttagacacaacatttcttaaattactgaattggaataatagcctccaacccagtatttcattcagtccaagtatttgtcccttggccaatggccagttggacttttggcaaatcccttatctggttcctaaaaatcaggagtctgtcctgagccagaatgacccatcaggctgcacctctctggcctgtaaatagtttcttctgactcccatcacagagcaaaaatctgggggtttatcatcacagacaactattcaaactagttaaacgttagaagcaatccaaataggaattgactatttctgacttttaactagtttgaacagttaaaattccaacagttgagtggataagcaaactggtatatccatatgatggaatactatgcagcaataaaaagagcccttatactccttatagggtcctaattttagaacttcaaaagaggcctgtgagaacaacatttgttttctccaggacaatactagtatttca

SEQ ID NO: 70004 - DNA, 1693 bp, Homo sapiens
ggtctctccttgtggctttatttttactcatgcataggtcttcacacactacacacatgtaatttattgtataatgtctgaatgttccaaactttagagtttaaatacatatactcatgcaagtttattttctaatgtcttattttgacgtagaaaattttattcttgattgacaaagaaagcatttaattacctgacagggagaagagggaaaaaggaaatagagaaagggaaatatgatgatgtcataacatcatttttattaattgtcttcaaccacattttgattttacagatttggcctctgagtgattttggatttctatgtgacagccctaacggccacagattttcacataattagcaagcatttactcttgtgacttgattattacctcctattcaagtaaatgtattactgccattgaaaccatgtacataccaataagctatttgctgttcagttttagttctttttaattgctaaatgtaaagaataagcaacatatattctacaagctatattagttcaaaatatataaataaaatgtaatccaaaataagtcatttaactttatgatagatataaaaatattttggggggaaaacctggatgactgcttcacttttgaatttttggttttatasatatagtgaaagtaatcttctgtttttgaatatctcttatgctttggctacatttacaagtcagagtagtaattattcttacttacaaatccaatctgacactgctaagagttggacttaagaaaaagctgctaaattacatgcttagtacacacatttgaagtaaaaagtttcagtgattctgtaaaggatcccttaaaattatttaaatgagttcttacttgaactgtacacagaatattaaatatatagaaaaataaatctttaaggggtctacagtctgctatggccaataataatacattataaaagtccatttgaggccaggcgcgatggctcacacctgcaatcccagcactttgggaggccaaggcaggtggatcacctgaggtcgggagttcgaaaccagactaaccaccatggggaaaccccatctctactaaaaatacaaaaaaaattagccaggcgtagtggcacatgcctgtaatcccagctactcaagaggctgaggcaggagaattgcttgaacccgggagacagaggctgcggtgagccaagatcacgccattgcactccagcctgggcaacaggagcaaaactccatctaaaaaaaaaaaaaaaaaaaaaagtccatttgattatattagcaatgaaatagttccttatttataaatataggcattaatactatatcttaatactctgaaaaagaaaagtagtatgccaattttcagttatttttataaagctcccatgtcctatattacatttaaattgaagatggcagtattcatgagctttggaaatacaggataagattggagtcaagtcttctgactctaaagctatttttcttcctagagttgccacttcactttctttatgaactttgaaataacctcatgaatatccatattcaagcttcattatgggagaactggcttcacacgtatccacaaagatttctaatttaagtttaatgaccatagaattggagataggtgtataacaggcctataactttagcagcaagaaatatcatctg

SEQ ID NO: 70005 - DNA, 1693 bp, Homo sapiens
ggtctctccttgtggctttatttttactcatgcataggtcttcacacactacacacatgtaatttattgtataatgtctgaatgttccaaactttagagtttaaatacatatactcatgcaagtttattttctaatgtcttattttgacgtagaaaattttattcttgattgacaaagaaagcatttaattacctgacagggagaagagggaaaaaggaaatagagaaagggaaatatgatgatgtcataacatcatttttattaattgtcttcaaccacattttgattttacagatttggcctctgagtgattttggatttctatgtgacagccctaacggccacagattttcacataattagcaagcatttactcttgtgacttgattattacctcctattcaagtaaatgtattactgccattgaaaccatgtacataccaataagctatttgctgttcagttttagttctttttaattgctaaatgtaaagaataagcaacatatattctacaagctatattagttcaaaatatataaataaaatgtaatccaaaataagtcatttaactttatgatagatataaaaatattttggggggaaaacctggatgactgcttcacttttgaatttttggttttatacatatagtgaaagtaatcttctgtttttgaatatctcttatgctttggctacatttacaagtcagagtagtaattattcttacttacaaatccaatctgacamtgctaagagttggacttaagaaaaagctgctaaattacatgcttagtacacacatttgaagtaaaaagtttcagtgattctgtaaaggatcccttaaaattatttaaatgagttcttacttgaactgtacacagaatattaaatatatagaaaaataaatctttaaggggtctacagtctgctatggccaataataatacattataaaagtccatttgaggccaggcgcgatggctcacacctgcaatcccagcactttgggaggccaaggcaggtggatcacctgaggtcgggagttcgaaaccagactaaccaccatggggaaaccccatctctactaaaaatacaaaaaaaattagccaggcgtagtggcacatgcctgtaatcccagctactcaagaggctgaggcaggagaattgcttgaacccgggagacagaggctgcggtgagccaagatcacgccattgcactccagcctgggcaacaggagcaaaactccatctaaaaaaaaaaaaaaaaaaaaaagtccatttgattatattagcaatgaaatagttccttatttataaatataggcattaatactatatcttaatactctgaaaaagaaaagtagtatgccaattttcagttatttttataaagctcccatgtcctatattacatttaaattgaagatggcagtattcatgagctttggaaatacaggataagattggagtcaagtcttctgactctaaagctatttttcttcctagagttgccacttcactttctttatgaactttgaaataacctcatgaatatccatattcaagcttcattatgggagaactggcttcacacgtatccacaaagatttctaatttaagtttaatgaccatagaattggagataggtgtataacaggcctataactttagcagcaagaaatatcatctg

SEQ ID NO: 70006 - DNA, 593 bp, Homo sapiens
caagaagcccagttttccgcaaacactgccccgggagacccagatttccctgctgggacaccaaaaccggccaggctgcagtgcgcatcgtggccactgggcgccgcccaagcctcgcatggagacaccttccctccagcgcggctgcgagtccccaggttcagcggaggggatgggagcgacagggacaggcgggaggattctggtgcaatcccggggcagatcctccgcctcctcgcgatggtgacgaagtcccccagtgtaccccctccccagccttgagaggggtgagggtgggttggaggggagcagccagcagcacctcccctcgccctatccaggttctacctgccccgcaagttctckcgctgtagcatcgacgagtacaaccagtttctgcaggagggtggtggcagctgcctcttcaacaagcccctcaaggtaccagccccgcggcggggagcatgggagcgggccctgggcggggtccgggccagactcccgacctgtcctcccggtccagctcctggaccccccagagtgcgggaacggcttcgtggaggcaggggaggagtgcgactgcggctcggtgc

SEQ ID NO: 70007 - DNA, 593 bp, Homo sapiens
caagaagcccagttttccgcaaacactgccccgggagacccagatttccctgctgggacaccaaaaccggccaggctgcagtgcgcatcgtggccactgggcgccgcccaagcctcgcatggagacaccttccctccagcgcggctgcgagtccccaggttcagcggaggggatgggagcgacagggacaggcgggaggattctggtgcaatcccggggcagatcctccgcctcctcgcgatggtgacgaagtcccccagtgtaccccctccccagccttgagaggggtgagggtgggttggaggggagcagccagcagcacctcccctcgccctatccaggttctacctgccccgcaagttctcgcgctgyagcatcgacgagtacaaccagtttctgcaggagggtggtggcagctgcctcttcaacaagcccctcaaggtaccagccccgcggcggggagcatgggagcgggccctgggcggggtccgggccagactcccgacctgtcctcccggtccagctcctggaccccccagagtgcgggaacggcttcgtggaggcaggggaggagtgcgactgcggctcggtgc

SEQ ID NO: 70008 - DNA, 667 bp, Homo sapiens
gcaaatccgtgtggtctgggtccagaaccagacagatcgcttgtcctaggcgtggaagagccctgtggcatgagcccccaatggggggcacttggtaccccagcattcctccctggggcagccctcagctccagtcctgggactgctccgctcaaccccacccctctctccacagtgcccgcctaacctgcacaagctggacggttactactgtgaccatgagcaggtatgatggctgccccctgagcctgggattcagggcagtctcttrtctccactctgaccactcagcatctccatcccttgcctcttaattcttggactctcagggccgctgctacggaggtcgctgcaaaacccgggaccggcagtgccaggttctttggggccatggtgagtctggctagggctgggagtggggactccggaggacccagagctgagaagctggggagagtgggttccagctgaacaggcccccaagtgtgtagctccccaggatctcagggacccaggcagagtgtgggagatgcaggcctgaggtcttggggtgggtcctggggcgcgtggggtcacttggcatcctctccccacagcggctgctgatcgcttctgctacgagaagctgaatgtggaggggacggagcgtgggagctgtgggcgcaag

SEQ ID NO: 70009 - DNA, 667 bp, Homo sapiens
gcaaatccgtgtggtctgggtccagaaccagacagatcgcttgtcctaggcgtggaagagccctgtggcatgagcccccaatggggggcacttggtaccccagcattcctccctggggcagccctcagctccagtcctgggactgctccgctcaaccccacccctctctccacagtgcccgcctaacctgcacaagctggacggttactactgtgaccatgagcaggtatgatggctgccccctgagcctgggattcagggcagtctcttgtctccactctgaccactcagcatctccatcccttgcctcttaattcttggactctcagggccgctgctacggaggtcgctgcaaaacccgggaccggcagtgccaggttctttggggccatggtgagtctggctagggctgggagtggggactccggaggacccagagctgagaagctggggagagtgggttccagctgaacaggcccccaagtgtgtagctccccaggatctcagggacccaggcagagtgtgggagatgcaggcctgaggtcttggggtgggtcctggggcrcgtggggtcacttggcatcctctccccacagcggctgctgatcgcttctgctacgagaagctgaatgtggaggggacggagcgtgggagctgtgggcgcaag

SEQ ID NO: 70010 - DNA, 639 bp, Homo sapiens
cagccggcttgygttttcatcccgccatctgcacgtctaggcctgctgccagggttggttgccatggtgcgtcagcatgctgccgttgaaaagcactctgtaagcagctttctggtctgctcttgcttttacattttgatttgggataactcaagttcaaatctactccacgttgtggcggttctgtgacttctggggtagacttgttttagatgaaccgctcctgcaggcaggcccagctgcttgcagttcccttgcacgttgcttcactgtgttactccagctctcccaagggggcgtctgggggctgctcgggaggaagacggtggtcttgctcacaaatggatggtgtatggcaagactcctgatgactctatggagttagtgactacatggtaacatggggaaagggaccatttaattctcagggtatttgacaggatcagggagagttttgggctaaccacggctatgccagtgatttctgtgataggcttgtgatacaattggattcttttttctgacttgtgctcctattacgcaaaagctggacacattttgttattttgttttgttttgctttgtttctagagatggagtcttgccctgttgcccaggctggagtgcagtggcacaagc

SEQ ID NO: 70011 - DNA, 715 bp, Homo sapiens
tccatgctaagtgttttggaagctttatttaaggcttagggtaatattttatcttcctttaatattttgaagaaagtgacacttgccaaattaattttgccccccaaattgtacagcagttatcttrcttgtgtatttgtcaagctctgaaggggacaggctgtatttgtttctgttccctctctctttttcttctgttttccacatcacttttacttgcctaaatcatcagtattgatgactggtctttaaagttttgtccttgtctaattatttgttgatctcgtccttatatctgtaacttcctgtgtctacctttattataatgcaaactaaactgtttaatgatttttacctgtttgttagtaaacatgtaaactataagcatagtgggtcatcattttcacaatttcacctgttcaccattaaattcctagtacctagaatgccggtttggtctataaatcagtatataaatggtttagtgggctgaacattgcattggcattcttggtattcactactaacaaatgcagaagtaggagagggaaataaatcatagtttaaatgtggtacctgaactatccctaattctctagggatttgtgaacttctcgagctatttatgtgcctcatgatcttccagaaatattgcagcaagattctgaggtgttgctgactcatacaaggtgacacatttgttttcaaaataaat

SEQ ID NO: 70012 - DNA, 715 bp, Homo sapiens
tccatgctaagtgttttggaagctttatttaaggcttagggtaatattttatcttcctttaatattttgaagaaagtgacacttgccaaattaattttgccccccaaattgtacagcagttatcttgcttgtgtatttgtcaagctctgaaggggacaggctgtatttgtttctkttccctctctctttttcttctgttttccacatcacttttacttgcctaaatcatcagtattgatgactggtctttaaagttttgtccttgtctaattatttgttgatctcgtccttatatctgtaacttcctgtgtctacctttattataatgcaaactaaactgtttaatgatttttacctgtttgttagtaaacatgtaaactataagcatagtgggtcatcattttcacaatttcacctgttcaccattaaattcctagtacctagaatgccggtttggtctataaatcagtatataaatggtttagtgggctgaacattgcattggcattcttggtattcactactaacaaatgcagaagtaggagagggaaataaatcatagtttaaatgtggtacctgaactatccctaattctctagggatttgtgaacttctcgagctatttatgtgcctcatgatcttccagaaatattgcagcaagattctgaggtgttgctgactcatacaaggtgacacatttgttttcaaaataaat

SEQ ID NO: 70013 - DNA, 715 bp, Homo sapiens
tccatgctaagtgttttggaagctttatttaaggcttagggtaatattttatcttcctttaatattttgaagaaagtgacacttgccaaattaattttgccccccaaattgtacagcagttatcttgcttgtgtatttgtcaagctctgaaggggacaggctgtatttgtttctgttccctctctctttttcttctgttttccacatcacttttacttgcytaaatcatcagtattgatgactggtctttaaagttttgtccttgtctaattatttgttgatctcgtccttatatctgtaacttcctgtgtctacctttattataatgcaaactaaactgtttaatgatttttacctgtttgttagtaaacatgtaaactataagcatagtgggtcatcattttcacaatttcacctgttcaccattaaattcctagtacctagaatgccggtttggtctataaatcagtatataaatggtttagtgggctgaacattgcattggcattcttggtattcactactaacaaatgcagaagtaggagagggaaataaatcatagtttaaatgtggtacctgaactatccctaattctctagggatttgtgaacttctcgagctatttatgtgcctcatgatcttccagaaatattgcagcaagattctgaggtgttgctgactcatacaaggtgacacatttgttttcaaaataaat

SEQ ID NO: 70014 - DNA, 715 bp, Homo sapiens
tccatgctaagtgttttggaagctttatttaaggcttagggtaatattttatcttcctttaatattttgaagaaagtgacacttgccaaattaattttgccccccaaattgtacagcagttatcttgcttgtgtatttgtcaagctctgaaggggacaggctgtatttgtttctgttccctctctctttttcttctgttttccacatcacttttacttgcctaaatcatcagtattgatgactggtctttaaagttttgtccttgtctaattatttgttgatctcgtccttatatctgtaacttcctgtgtctacctttattataatgcaaactaaactgtttaatgatttttacctgtttgttagtaaacatgtaaactataagcatagtgggtcatcattttcacartttcacctgttcaccattaaattcctagtacctagaatgccggtttggtctataaatcagtatataaatggtttagtgggctgaacattgcattggcattcttggtattcactactaacaaatgcagaagtaggagagggaaataaatcatagtttaaatgtggtacctgaactatccctaattctctagggatttgtgaacttctcgagctatttatgtgcctcatgatcttccagaaatattgcagcaagattctgaggtgttgctgactcatacaaggtgacacatttgttttcaaaataaat

SEQ ID NO: 70015 - DNA, 575 bp, Homo sapiens
gtcagagctaacaatgttgartttaccagctgaagacacccacatcttccttctcttccttaggttgtggtcccccattggcatacttcctaccaacatgcctgcctaacataccaccaagaaatagcatgcctccatgccagaagcatcagcactgtacatgtgagcaatgcctccaggcctacaaggagatccaaagccaaaagtgtccaacttcatcaagggtatcagatgagtactcagaggtcaagaagaggaggaaagtcagagaatcttgcagcctttgccagacactgagaatttgcccaggcaccctctatactagaaagcggtttttatgatgaattccctgttgctcagttatcaaatgaaaaagcccatcacaaaagcagacatactgaaaaatgccataaaagagcacaaggagcacttcctgaggtcctgaggagagccggagagcctctgagtgtatgcagcctgtctttggggttgaagtaaaagaagtagaccactcttatgcccttgtcagaaaactggacctcacctatgatgagaggttgagatatgaaaagggc

SEQ ID NO: 70016 - DNA, 1090 bp, Homo sapiens
gttgactttttttttttctctttttcaactagtgtttcaacaggtttatttagattcagaatgtaaatttacaaatgatatagatcaccctgttattgctgtttttcagggacagtagaaagtgttttgttttttgagtgaaacaacttattaataaaaatccttaaatcacttttgtaatccaggacaagaaaatgtggcattagagtagaaatatctttggaaatgtgaaagaccccatagtgaaatatttgggatcagaagccagaggtgtaaaagtggtcaattcttggtttacttcatttaatctttcttttcataaagatacatacctggatttgtttatgttattcaagaatgtgtgagaaattaaaccatagttagttaatcctcttgtttatggctcttactttaaatattttaattgagcatctgttctttgggagtcttcctgcttgtactgggaatgtttagtcaaagaagaccaagcttgtgctcatgcaattgtagattctaggagaagctgtcatcatggaaggtgagacacttcataaaaaataaaagataggaaaaagaagtgatgaaagcaatagttttcattgctaagcagcattttggctgaatggggtttttcagtcttagaatgttgcgtattctcagccgggtgcagttgctcacatctgtaatcccagcactttgggaggctgaggtgggtggatcacctgaggtcgggagttcgagaccagcctgaccaacatggagaaaccctrtctctactaaaaatacaaaattagccaggcgtggtggcgcatggctgtaatgccagctactcgggaggctaaggcaggagaatcacttgaacccaggaggcggaggttgctgtgagccgagactgcgccattgcactccagcctgggcaacaagagcgaaactccctctaaaaaaaaaaaaaaaaaaaaaaaaaaaaattgttgcatattctctgagatatcctggattttttttttttaatctcaactggaatgttggtaatgtctctgatcaaaatgatagtggtaattgccacttcctgatgtctcagttgacgaga

SEQ ID NO: 70017 - DNA, 1090 bp, Homo sapiens
gttgactttttttttttctctttttcaactagtgtttcaacaggtttatttagattcagaatgtaaatttacaaatgatatagatcaccctgttattgctgtttttcagggacagtagaaagtgttttgttttttgagtgaaacaacttattaataaaaatccttaaatcacttttgtaatccaggacaagaaaatgtggcattagagtagaaatatctttggaaatgtgaaagaccccatagtgaaatatttgggatcagaagccagaggtgtaaaagtggtcaattcttggtttacttcatttaatctttcttttcataaagatacatacctggatttgtttatgttattcaagaatgtgtgagaaattaaaccatagttagttaatcctcttgtttatggctcttactttaaatattttaattgagcatctgttctttgggagtcttcctgcttgtactgggaatgtttagtcaaagaagaccaagcttgtgctcatgcaattgtagattctaggagaagctgtcatcatggaaggtgagacacttcataaaaaataaaagataggaaaaagaagtgatgaaagcaatagttttcattgctaagcagcattttggctgaatggggtttttcagtcttagaatgttgcgtattctcagccgggtgcagttgctcacatctgtaatcccagcactttgggaggctgaggtgggtggatcacctgaggtcgggagttcgagaccagcctgaccaacatggagaaaccctatctctactaaaaatacaaaattagccaggcgtggtggcgcatggctgtaatgccagctactcgggaggctaaggcaggagaatcacttgaacccaggaggcggaggttgctgtgagccgagactgcgccattgcactccagcctgggcaacaagagcgaaactccctctaaaaaaaaaaaaaaaaaaaaaaaaaaaaattgttgcatattctctgagatatcctggatttttttttttwaatctcaactggaatgttggtaatgtctctgatcaaaatgatagtggtaattgccacttcctgatgtctcagttgacgaga

SEQ ID NO: 70018 - DNA, 2051 bp, Homo sapiens
tgaaaaataagtcccagtgtagtagattgcaacgtcagggtacaaattaatcataataagaactggcactattatatgtctcaatacatctcaagcactttacatacattgtatacattttaccagtcctacaaaacagagcttatcaaacccacttcacagataaaaagcctgaagcccacagtctattaatatgtccaatttcacatggctggtaagtgacaggactgggacaagacccccagtctgaattagtgtaaagcacactctgttccatgcctcccaacctgagactgactgtgtccccttattcacttttcttctcactactcccaaacgtatatcaagtgatgaaaagattctgtacccaatctgctggactgaaatacagaaccagagcaaggaaattaccaaaatggtcaagaggtgtgaattaaggagagaaagataatatttggtgacaataagattacacatgcaaagtcagataaactcaaaagatcatggggtcacattctgtcattctggactgtccccctttttataggaagttaaatcttttccaagagaaatacataagagggtagtaaagagaagaaatagatcaatgttttttttttttttttttttttctctgacagtatgacttctatcctcgggcttctgccttgtgttacagcttccctatcttatatcactcctgggacagggatgcattgtctgcaagatttattatagggaaactgatcaagaatttttagggatgcggcatttcccaggaagtcattaactaagggacaagagccaagataaagaccttcatataggaggactcagcagaacaacatgccagacagagttcttagcctgagcatctcctcacttattcttcaaggttctcagggacttgtgagttcctgcatctcrggtcagtagagggaggagtgccattctctgacacataccaagttgaggaccctgaatgaagaatgagggaagcactcacccaaatagccttaacaggatgtggctgaacctgatttctactccggaggtcttaagaaggtaaagaccatgatctgaggctggctgactcaggtccatagaggaaggattcctaatgtgtgccaggagtaaagtgagtaccctgaagagtgcaggaaccaccaaacccctatcagtggggatcccacagaatcctccctattgtcacctctgagagatttaggcatgaatgtcagaaagaggcaccctcatatcctcagtagtaacagagaagtgaaggtcttgttctgaggtgggcaatcccagctcagcaaagggaggaatattaagccttcctgtgagtgagatttaggatcctgagttaggacctgagtaggacaatccaccataagacctcaacctgtctaccacagctgccactcttgggagaccatggtcagctgtggccagataaggccaccctcttcctcctatctgatctcagggaggtgcaggccttttaaatggagaggtcttcaggtcaaaaaagaggggagccctaggatctgctaggagccaaatcaaggaaaccgagtgagaactgaggggactgctcacctctgaatagagagagcaacagagtccacccccctgcataactcttaaattgccagggcaacatgtaaggctgaggactcaccatcactttttttttttaataattgaccttcttttttagaatagttttacgttcacagcaaaactgagcagaaaggagagtctcacaggcatcctgtcctcccacagacacagcctccttcatatcaacctcccaagccagggtgatacatttgttacaattgagaatacatggacacatcattatcacccaatgtccgtagtttaggattcattcctgttgctgcacattctgtggttttaatatttaaaaatgtataatgacatatgtttaccaccatagaatcatccagaattgttttactgccttaaaagttctctgtgcctgatctatttatctctcactctccccaacctttggaaaccac

SEQ ID NO: 70019 - DNA, 1329 bp, Homo sapiens
catttgagactcaatgaaaccacatatttttaaaaaactctaattcacagattaggaaggattacagtttttttttctagaaatgaagtcacaattcagaagggatttatagagtttgatgagtataaattatgttttacattcctgaagcaatgcctttggagtgtaaactttaagatatatatgatttctcaagcctgcctttctaatcatcgtggcttagtttgaagagaaactaattatgttaaaattgatgtatggccattgctaagataatttatcttggaaaatttggagcaaaatatataaatataaatctccaaatgattctgaagtctctggctatgaggctaaactttaggccatatttgagtttcggtggctctttggaattatattctttatcactattgacattgaagttgacagtcactcactatcccggctgtatacctggagctagagtttgatgtgacctgattgaaataattcagtctactaaataccatggttttcatttatttgattcacaaatatcagtgaatagcaccaggcctaaaattgttgatctttgcataaatagagtgctttttgaattacttttcaaaaagtgatttacttttgaaattactttgattacttacttttgaaattactgctgaatatccataatattgaatagttaagaggtgctactttgccagtgttatggattaaacataatttagctggctgggcatggtggctcacatctgtaatcccagtgctttgggaggctgagatgggaagatcacctgaggccaggagtttgaggccaggagtttgaaaccagcctaggcaacatagtgagaccttgtctccaaaaataataaaaataggctgggtgtggtggcttacgcctgtaatcccagcactttgaggggcccaggtaggcagatcacttgaggtcaggagttcaagaccggcctggccagcatggcgaaaccccgtctctactaaaaataaataaataaatwaataaattaattaaaaaaaaaaaaaaaaaaaaaccaaaaattttctgggtgtggtggtgcacgcctgtagtcccaactactatggaggctgaggcaggagaatcgattgaacccaggagtcggaggttgcagtaagctgagattgtgccacggcactccagcctgggtgacagagagagcctccgtctcaaaaataaataaataaataaataaataaattaattaattaattttttaagtgtgtccttgtgaaatatgaaactatgcttagataagttcactattgaaagtaaaatagacactccaaaacttg

SEQ ID NO: 70020 - DNA, 1329 bp, Homo sapiens
catttgagactcaatgaaaccacatatttttaaaaaactctaattcacagattaggaaggattacagtttttttttctagaaatgaagtcacaattcagaagggatttatagagtttgatgagtataaattatgttttacattcctgaagcaatgcctttggagtgtaaactttaagatatatatgatttctcaagcctgcctttctaatcatcgtggcttagtttgaagagaaactaattatgttaaaattgatgtatggccattgctaagataatttatcttggaaaatttggagcaaaatatataaatataaatctccaaatgattctgaagtctctggctatgaggctaaactttaggccatatttgagtttcggtggctctttggaattatattctttatcactattgacattgaagttgacagtcactcactatcccggctgtatacctggagctagagtttgatgtgacctgattgaaataattcagtctactaaataccatggttttcatttatttgattcacaaatatcagtgaatagcaccaggcctaaaattgttgatctttgcataaatagagtgctttttgaattacttttcaaaaagtgatttacttttgaaattactttgattacttacttttgaaattactgctgaatatccataatattgaatagttaagaggtgctactttgccagtgttatggattaaacataatttagctggctgggcatggtggctcacatctgtaatcccagtgctttgggaggctgagatgggaagatcacctgaggccaggagtttgaggccaggagtttgaaaccagcctaggcaacatagtgagaccttgtctccaaaaataataaaaataggctgggtgtggtggcttacgcctgtaatcccagcactttgaggggcccaggtaggcagatcacttgaggtcaggagttcaagaccggcctggccagcatggcgaaaccccgtctctactaaaaataaataaataaataaatwaattaattaaaaaaaaaaaaaaaaaaaaaccaaaaattttctgggtgtggtggtgcacgcctgtagtcccaactactatggaggctgaggcaggagaatcgattgaacccaggagtcggaggttgcagtaagctgagattgtgccacggcactccagcctgggtgacagagagagcctccgtctcaaaaataaataaataaataaataaataaattaattaattaattttttaagtgtgtccttgtgaaatatgaaactatgcttagataagttcactattgaaagtaaaatagacactccaaaacttg

SEQ ID NO: 70021 - DNA, 1329 bp, Homo sapiens
catttgagactcaatgaaaccacatatttttaaaaaactctaattcacagattaggaaggattacagtttttttttctagaaatgaagtcacaattcagaagggatttatagagtttgatgagtataaattatgttttacattcctgaagcaatgcctttggagtgtaaactttaagatatatatgatttctcaagcctgcctttctaatcatcgtggcttagtttgaagagaaactaattatgttaaaattgatgtatggccattgctaagataatttatcttggaaaatttggagcaaaatatataaatataaatctccaaatgattctgaagtctctggctatgaggctaaactttaggccatatttgagtttcggtggctctttggaattatattctttatcactattgacattgaagttgacagtcactcactatcccggctgtatacctggagctagagtttgatgtgacctgattgaaataattcagtctactaaataccatggttttcatttatttgattcacaaatatcagtgaatagcaccaggcctaaaattgttgatctttgcataaatagagtgctttttgaattacttttcaaaaagtgatttacttttgaaattactttgattacttacttttgaaattactgctgaatatccataatattgaatagttaagaggtgctactttgccagtgttatggattaaacataatttagctggctgggcatggtggctcacatctgtaatcccagtgctttgggaggctgagatgggaagatcacctgaggccaggagtttgaggccaggagtttgaaaccagcctaggcaacatagtgagaccttgtctccaaaaataataaaaataggctgggtgtggtggcttacgcctgtaatcccagcactttgaggggcccaggtaggcagatcacttgaggtcaggagttcaagaccggcctggccagcatggcgaaaccccgtctctactaaaaataaataaataaataaataaattaattaaaaaaaaaaaaaaaaaaaaamcaaaaattttctgggtgtggtggtgcacgcctgtagtcccaactactatggaggctgaggcaggagaatcgattgaacccaggagtcggaggttgcagtaagctgagattgtgccacggcactccagcctgggtgacagagagagcctccgtctcaaaaataaataaataaataaataaataaattaattaattaattttttaagtgtgtccttgtgaaatatgaaactatgcttagataagttcactattgaaagtaaaatagacactccaaaacttg

SEQ ID NO: 70022 - DNA, 1138 bp, Homo sapiens
tcctctatttttttttatagcaacactcattttccatagctctgaataccaccatcaccatccaattccaccctgggaggaaataagggagcaggctccatatatagattacatactctatgtaaaattgcttgtactcaaacccaaaacactctgaactcacttcatcagtattggttggagagaaaaattctgtgcctgaacaaggtgcagatttgtagcaccattatcagaggcagggctgattagcatatcacgggccagcaatattactgaaatcagaaataaaatttaaagtcacgtttaaggtaaaataatttgcttatttcattcaaatccaaaaactaggaatcatatgatagataattgggttgtatgttttaaaaaaggcaaaggaaataggggaagtgtctaaatttctaacttaatcctatagacaaattgcaaataaattatagaaacagaacagggacctatccaaaaatcatagaatttctaggctgaaaagaatcttaggtttgacttaatcatcttaattttacacatgaaaaattgagactaagggaagttaaatggcatttcaagctcacagatgagtaagtggcaaagatgagaccacaggctagatctctccattttaagatgggtgttttcaaagtatgtaatcaatttgtgacttcttgtcaatattatccagttcaattttgtttaatttaataaggacctactgttttctcatggcaaccatcttatttagataccttctaaaacacagaagtgtcaactggttgatgagatttaataatattatccagattaccttttgtttcataaaagatccccmcaagagttatatgttcatattttacaaaacaaattgtataccattattttcatattttaatttcatcctagtacaactgactggatgatgggaaggttcagtccatgtatcaggtagaacgaatcatcatcacatataattatgtgccccagaggcaaaatgcctggttccctctacacattgtcttctccacagagacaggcaaggaaaatggttatcagtgaagctgttttgtcaatttctgattaatttgggggaaatggtagcagtttgtttcctgttatgtcatgatgc

SEQ ID NO: 70023 - DNA, 1568 bp, Homo sapiens
gatccttgtaaaatacttaggaaaagtgagattcctagacagagaagattctaaatctgcacattgctgaaaaaccagatgcgatatattgaaaagcatttactttgggtgttttatgtaagtgagctagtgccacagaattgaggaaaaaaagcctaaaacacaagaaccaccaccaccacaacaaaatctaacttgagatgaacaaaaaggaaagaatgtttcaagggtaagataaatttcctggagtgcaacagtggtgagctgatatgatatgactttttttaatgcaaattacttccaattcacttgacatatgagggaacaatttgaacatgtgtctgcttgagcatagcataaaatttgagccaactttctatgtaccaatgtgaaattttgcctctgagaaacactaggtaaatgcaataaaatctgcacccaggtcaattgatctatgtaagaatacacgcagaaaatcaatcatctcccagccacctcagttcacagtgtggtataagctcacccatcctggtgttacaaatttccatcagatttcagacaacttcaggacaactaaaaaacagcaaacatttcttccagtgcccacttccatgagtaaacttcaggttttgagtaaacttcaggtttttcaaggcaaaatgtcatatttattacagtatctatgcatttcttaacaatgaccatgtgcaaaactatgctacccttttccttgggttcttattttttattatttattatcatatttattactttattttgaatttttaaaaggaaaagtctcactgtgttccctaagctggagtgcagtgataagatcttagctcactgcagcctcaagctcctgggctcaagggmtcctcccacttcaacctctcaagcagctgggaccacaggcaccaccatgcccagctaaattttttatgttttgtagagatggggactcactatgttgcccaggctggtctcaaactcctggcctcaagtgatcctcccacctcagcctctcaaagtgctgggattacaggcgtgagccaccatgcttagccaaggtccttatctttttaaaaaatgcacttccggtaacatttttgagtggtatgctcctatgctcccaattctattttgttgaaagtcctgtgactttttttttttttttttttttgagacagagtctctctgtcgcccaggctggagtgcagtggcactatctcggctcactgcaggctccgcccccgggattcacaccattatcctgcctcagcctcccaagtagctgggactacaggcgcccgccacctcgcccagctgattttttgtatttttagtagagacggggtttcaccgtgttagccaggatggtctcgatctcctgacctcgtgatccgcccgcctcagcctctcaaagtgctggaattacaggcgtgagccaccatgcttagccaaggtccttatctgtttaaaaaatgtacttctggtgacatttttgagtgttatgctcccaattctgtttggttgaaagtcctgtgatttttgttgtagatcatgca

SEQ ID NO: 70024 - DNA, 1568 bp, Homo sapiens
gatccttgtaaaatacttaggaaaagtgagattcctagacagagaagattctaaatctgcacattgctgaaaaaccagatgcgatatattgaaaagcatttactttgggtgttttatgtaagtgagctagtgccacagaattgaggaaaaaaagcctaaaacacaagaaccaccaccaccacaacaaaatctaacttgagatgaacaaaaaggaaagaatgtttcaagggtaagataaatttcctggagtgcaacagtggtgagctgatatgatatgactttttttaatgcaaattacttccaattcacttgacatatgagggaacaatttgaacatgtgtctgcttgagcatagcataaaatttgagccaactttctatgtaccaatgtgaaattttgcctctgagaaacactaggtaaatgcaataaaatctgcacccaggtcaattgatctatgtaagaatacacgcagaaaatcaatcatctcccagccacctcagttcacagtgtggtataagctcacccatcctggtgttacaaatttccatcagatttcagacaacttcaggacaactaaaaaacagcaaacatttcttccagtgcccacttccatgagtaaacttcaggttttgagtaaacttcaggtttttcaaggcaaaatgtcatatttattacagtatctatgcatttcttaacaatgaccatgtgcaaaactatgctacccttttccttgggttcttattttttattatttattatcatatttattactttattttgaatttttaaaaggaaaagtctcactgtgttccctaagctggagtgcagtgataagatcttagctcactgcagcctcaagctcctgggctcaagggctcctcccacttcaacctctcaagcagctgggaccacaggcaccaccatgcccagctaaattttttatgttttgtagagatggggactcactatgttgcccaggctggtctcaaactcctggcctcaagtgatcctcccacctcagcctctcaaagtgctgggattacaggcgtgagccaccatgcttagccaaggtccttatctttttaaaaaatgcacttcsggtaacatttttgagtggtatgctcctatgctcccaattctattttgttgaaagtcctgtgactttttttttttttttttttttgagacagagtctctctgtcgcccaggctggagtgcagtggcactatctcggctcactgcaggctccgcccccgggattcacaccattatcctgcctcagcctcccaagtagctgggactacaggcgcccgccacctcgcccagctgattttttgtatttttagtagagacggggtttcaccgtgttagccaggatggtctcgatctcctgacctcgtgatccgcccgcctcagcctctcaaagtgctggaattacaggcgtgagccaccatgcttagccaaggtccttatctgtttaaaaaatgtacttctggtgacatttttgagtgttatgctcccaattctgtttggttgaaagtcctgtgatttttgttgtagatcatgca

SEQ ID NO: 70025 - DNA, 1103 bp, Homo sapiens
aacaataatcaccacctcagatctgtaatcctgccaaagaaagctattcaatggggcagtgagatgacaggggctcacagaagctcatgttccctgaaatatcctttgcatttgtctttaaaaagcatgaggggaaatcaaagcagctgaaattgtggctttttttttcctggccagatctgaaaaacaatattccagaagctgtgcatcttatcttatggtccacatttccagtggggccgaatacagaaagtgcatttggattggcacgtggtttgaactattttactttagagaaagaaaattgagcaatcttggaagaactccatattcttctttaaaaaaaaatttttttttcttaggttcctcttgaaaactactttgagcaggaaggaagggtttggaacagctgtccctcggtgagtttggagaatgttaatcactgtcccttctctcttttacttaaagattagctcacatcccaggcccctgcaaaaggaaaccgcatatacttaacttttgagactatcgtgaggaacttttctgtaacagtagtagcatgtcagccagatctaaaagatgctcaagtctggaaacttaccccaaggcaatgagagcccatagggtcagcaatgggccgactggacatttgagaaagtcatttatttcttgactaaatttccccaggaaaaagtaaaacttaagaaaaacagagcacaaatgaaactgccatatacataggcatctgcaactttaaccaaagggtgctctcaggcaaggtgaccctgcatacaccatgtcagcttaaaaatattatattaaaggcattttcctctgtatattaagtaaggaaacatgcagggaaatagataacatataattccattttaataaaataatgattcctccaatccaagattttaaaaagcttttatacgattatttgagcacagagctagatgtggagggatgtacaacccactgcgaatatttgtaacagggaagagagtaagaggaggagggaggaggtgtttttwaaaaaagagaaacaaattttcttggatagaaatttttggaattttttgttttggaaacaaattttc

SEQ ID NO: 70026 - DNA, 1153 bp, Homo sapiens
gataaaagatggaagctgttactgtgctcaccaaggaatgagcatctgagccagtgactgaggaggtggcacctgacctggcttcagatgtacatgggtaggaactggctactcacattagatcaggaagacaaacttctcattggaccttttgtcttttcagccaaacctcaccgcaagacaccttttagagaagaacaaaggtcgccagtcatccygcacaaaaaacctgtccctggtgtcctcgtcctccagaggcaacacgtctaccctccgtaggggcccagggtccaggaggaaggtgcctgggcagttttccatcacaacagccttgaacactctcaaccggatggtccattctccttcagggcgccatatggtagagatcagcaccccagtgctcatcagctccagcaacccctctgtgatcacccagcccatggagaaagcagacgttccttccagctgtgtgggacaggtagggaagaaacgcctgggatgagggcactttggagttgggcaagtgattcataccatgtcacaaccaatatttgatgtttagtacttgctaagcacccagaatgccctactagtaactaatgccatatgtattccatgttagaattgtataaaccttttatttcatccttgaacagcctgtgagttaggtgttattactattatccccattttacagttgagcgaacttaggtttagaggggttaaacaacttatccaaattctcacagatacttttctttcccttgctgagtgccatgatatcgttcctgtcccttagagaacttccctctaaggagatgatggcacctattttctcgagagtgttttggcatcacaatctgagattcaatatcccatcctctggcaatgtattagacatcagatggaaagaaagcaaaagaaacaaaaagaaactatgggttattgaatgttctcaggactggttacctacatttataggacccagtccaaaatgaaaatacaagtcctatgctcaaaaatgatcaagaatttgaagatgggaacagcagagcattaaaccaagcaaagagccctgtgtggctatgcaaggcacaaaccggtgaagccagccctgggtgtttccagatggagtacctaataagataatgca

SEQ ID NO: 70027 - DNA, 728 bp, Homo sapiens
tggtagccacttcaaagactttttctcccttcctcagacaatcatggcacatggacatcagaggaagaaatggcgaagtttgtatgactcctccagcagagtccttggaaacaataaagcttcctttccaaattctgagaattctgtgttattctttaattggcagactgcccactgcacccaattcttaatattggaaacagtgcagaagccagaactcaactgaggagttctgagatgagtgaggttccaaggaaatgatgtgcagaggcgcaccccacaatccagtaagaaaaagctcatcatgtttgtcagaagagatttcatgtcagtctttaacagaatgagcaaaccttccatgctgaccagagaatatgcaaaagtaattttatccaatatttgaaaggagttttttccagtaaaattttggtgttctggtgtgaaatgcttcccttataatccacagaccctttattttcatagctcagaagttgagatcataatgtattgaaaaatgaaaaagtaaaagaatgacagctgcctccactcaaagcacaggaatctggcagccacagactccttgaagcttcagggacggatatcagagaatcygtgaccccacccccgggaattaatgtgcacatttttgtgtatatacctacatacaaattttctgcagaaaaagcctatagctttcatcagattctcaaaggtttcctgacctccac

SEQ ID NO: 70028 - DNA, 1423 bp, Homo sapiens
cacacacatatacatatgaacaatatacatagacctatatatgttctatatwtatagaacaatataatatatatagaacccaggaggtggaggttgcagtgagctgagattgcaccactgcactccagcctgggcaacagagcaagactcagtctcagaaaaaaaaaaaaatgtgtatatatatatacacacacacacatatatatatatgaacaatatatatagaactatatatgttctatatatagactatatagagaacaatataatatatatcaagtaagactcagtctctctatatatacataatagaacaatatatatatagaactctctctctctatatatatatataatagaacaataaaattctacgtgtggaagcaaggacaaattttgttttctttgatactaggtggtctatttttgtctgccagtatgtctttggggaatgacccctctcatatttcatactcctggcattccagtctgatccacttggtttgggtaggactgatccagagccaccagactgctctgttctcctggcaattggctcaaggacgggcataggatccaagccagacactcagaattcagatgacaatccatctcttttatctgaagtagcatgacgttcatctttacctgtgcaggaatgaagccatgtcagggcaaattggcaaggagagagaagggaagggagaggaaaaacacagagaaagacaactaagaacaaggtgaaccttcctactctgctaatttactccttggactcctctgttgtcatagccaatacatttatcttttcacttaagctaattgagttggtttccatcacttaactaaaggaatcctgactcaggcaatgtcccagcccctaaaagtcaggaacacatttctatcatggcttctttgggtttactttaatcaagaatgctttcccttgccaatatgttatgattttagcctgagataagtttttctatgaaatcaactgcccattctcactctacttgtgggcagagagagccttttctggcctcctccccttaccattatcaagtgggttatctgttcccacaagtgttgctttgggatggttcccccctctccacaggtcttaaatcctcaactgcgcctcctaagagatccccatccataggagatctgccccaccccattccggcctcattctctttcactttcgcccctgctcattaaactccagacaccatggtttcttttcttgacttcaaaaatgccaaacttttacctcaccccggggccttcaccatgctgttcctactgcctagaacttactttcttctgagatcctctctttctttcccttggctgacttttcatatgtcagcctgaatattatttgtaatcttccttcttcctactttcttacactcca

SEQ ID NO: 70029 - DNA, 1423 bp, Homo sapiens
cacacacatatacatatgaacaatatacatagacctatatatgttctatatatatagaacaatataatatatatagaacccaggaggtggaggttgcagtgagctgagattgcaccactgcactccagcctgggcaacagagcaagactcagtctcagaaaaaaaaaaaaatgtgtatatatatatacacacacacacayatatatatatgaacaatatatatagaactatatatgttctatatatagactatatagagaacaatataatatatatcaagtaagactcagtctctctatatatacataatagaacaatatatatatagaactctctctctctatatatatatataatagaacaataaaattctacgtgtggaagcaaggacaaattttgttttctttgatactaggtggtctatttttgtctgccagtatgtctttggggaatgacccctctcatatttcatactcctggcattccagtctgatccacttggtttgggtaggactgatccagagccaccagactgctctgttctcctggcaattggctcaaggacgggcataggatccaagccagacactcagaattcagatgacaatccatctcttttatctgaagtagcatgacgttcatctttacctgtgcaggaatgaagccatgtcagggcaaattggcaaggagagagaagggaagggagaggaaaaacacagagaaagacaactaagaacaaggtgaaccttcctactctgctaatttactccttggactcctctgttgtcatagccaatacatttatcttttcacttaagctaattgagttggtttccatcacttaactaaaggaatcctgactcaggcaatgtcccagcccctaaaagtcaggaacacatttctatcatggcttctttgggtttactttaatcaagaatgctttcccttgccaatatgttatgattttagcctgagataagtttttctatgaaatcaactgcccattctcactctacttgtgggcagagagagccttttctggcctcctccccttaccattatcaagtgggttatctgttcccacaagtgttgctttgggatggttcccccctctccacaggtcttaaatcctcaactgcgcctcctaagagatccccatccataggagatctgccccaccccattccggcctcattctctttcactttcgcccctgctcattaaactccagacaccatggtttcttttcttgacttcaaaaatgccaaacttttacctcaccccggggccttcaccatgctgttcctactgcctagaacttactttcttctgagatcctctctttctttcccttggctgacttttcatatgtcagcctgaatattatttgtaatcttccttcttcctactttcttacactcca

SEQ ID NO: 70030 - DNA, 1423 bp, Homo sapiens
cacacacatatacatatgaacaatatacatagacctatatatgttctatatatatagaacaatataatatatatagaacccaggaggtggaggttgcagtgagctgagattgcaccactgcactccagcctgggcaacagagcaagactcagtctcagaaaaaaaaaaaaatgtgtatatatatatacacacacacacatatatatatatgaacaatatatatagaactatatatgttctatatatagactatatagagaacaatataatatatatcaagtaagactcagtctctctatatatacataatagaacaatatatatatagaactctctctctctmtatatatatataatagaacaataaaattctacgtgtggaagcaaggacaaattttgttttctttgatactaggtggtctatttttgtctgccagtatgtctttggggaatgacccctctcatatttcatactcctggcattccagtctgatccacttggtttgggtaggactgatccagagccaccagactgctctgttctcctggcaattggctcaaggacgggcataggatccaagccagacactcagaattcagatgacaatccatctcttttatctgaagtagcatgacgttcatctttacctgtgcaggaatgaagccatgtcagggcaaattggcaaggagagagaagggaagggagaggaaaaacacagagaaagacaactaagaacaaggtgaaccttcctactctgctaatttactccttggactcctctgttgtcatagccaatacatttatcttttcacttaagctaattgagttggtttccatcacttaactaaaggaatcctgactcaggcaatgtcccagcccctaaaagtcaggaacacatttctatcatggcttctttgggtttactttaatcaagaatgctttcccttgccaatatgttatgattttagcctgagataagtttttctatgaaatcaactgcccattctcactctacttgtgggcagagagagccttttctggcctcctccccttaccattatcaagtgggttatctgttcccacaagtgttgctttgggatggttcccccctctccacaggtcttaaatcctcaactgcgcctcctaagagatccccatccataggagatctgccccaccccattccggcctcattctctttcactttcgcccctgctcattaaactccagacaccatggtttcttttcttgacttcaaaaatgccaaacttttacctcaccccggggccttcaccatgctgttcctactgcctagaacttactttcttctgagatcctctctttctttcccttggctgacttttcatatgtcagcctgaatattatttgtaatcttccttcttcctactttcttacactcca

SEQ ID NO: 70031 - DNA, 572 bp, Homo sapiens
tatgtttctttggttttattattacaaacacaccatggctctgtcacaatagggamatctaagctctacataccatttcttttctacctggacagggccccataaaagcctccaagccacgtgtagatgtgagacacatttgacagaacatttcaactcatagcttataatgatgccatttctccagctgtgcaagggctttacaaaaactgtgccaggacttcccatgaggctggattgcttgattcatgttttatgagccccacaatactgaagctccttttccagggacttggcataggcagtcaattccacatttgggataggtcctctctggaagtgaatgtcaggcagtgacatccaagtttctgcatgcagtgggttaacagccatgtttagggggaacatgatttaaaaagtacatctctctccctcctcccccacatgcacaaggctcacatctcattatggtgcggcccatgtacattaaagtgtgatacttggttttgaaaacattcaaacagtctctgtggaaatctgagagaaattggcggagagctgccgtggtgcat

SEQ ID NO: 70032 - DNA, 643 bp, Homo sapiens
ccccaaaaaagaacaaaaatcaggcctgtattagacttttcctcaacgatactaaatagcaggagataatttaacaggagaggaaactctcaatgttttggagaaaaaaagttcacaggctattttaaggagggaagccatgtccccaacaggcactgattacacctatggaggcagttctaatggaagaacaacaagaggtctctaaaatggratattttaaggaagttatgatgtaaaaactgcaattttgtttaattaaccaaggaacaggaaatgaacaattactgattaaaatggaatttgtgttctggaaaatcaaataaaggaaacatctctcacccacacacttacaaaaggcaaaaaatatccacaacaaccaaaagcaaatacacaaataaatgcaaataatgagtacaagataagattcataataagtaggtctgggaggtctgataaataaataacaggagatccttaaggcaaaaggcacagaagaagaaaaatattaaagaaacaatgcaagataactttaaatgtagaaaaatttacattttaagaactaaatggctgcaaatcaaattccaaactgcacaaaaagccccaaactcgtcatctcctggtgaaatttcttaaatctgag

SEQ ID NO: 70033 - DNA, 2296 bp, Homo sapiens
caggcaaagtttctccttacttgacccttttgttctattcaggccttcaatggattggatgaggccaccccatattagggagggcaatttgcttttatgattcagatgttaatctcatccagaaacatcctggcagatatacccagaataatatctaggtaccccatggctcagtcagattgacacataaaattaaccattgcaccacctgtttaccctactatctaagcccagaggaagagggtcccacttcttcctaagtgaatttctctacctgtcctcagcctcattgttcaaccccaaagcattcttgagaattgcctaaacatagagaaaccagcaaagaggaaaattgtaatcttccaggtaacctataactcttgtgcagaaaaggctatggatattgtaaagggaaagcaagtttatagattgcaagcagatcagcaactatatggcttggtagaaaaagtaagacccagtgttagatcagtaggatggctatatgactgagccatagggtacccagatattattctgggtatatctgcaaggatgtttctggatgagatttaataatttattttacgttctaaaatagctagaagacaataacatgaatgtgtctagcattaaaaaaagacaaatatttaaggtgatgtctatccaaagtacactgattagatctttacactgatacgaatgtacgaaattgtcacatgcatcctgaaattatatacgtctattgtgcatcaacttaaaaatatttttaaaaatctaattaaatattaccataaggatcctttgcatataagaggaaatttaacacaaaatggcttatgcccagaataaattgatgggctcatgaatacgaaaaatccaagagagaaacccagcattagacatcgctggatttagaggctctgataatgtcatcaagaactggtctctccccttctctttggtctactttcatctctattggctgcttttccagagaggctctctttgggggtgacaagatgccagccagcaattccaagcttatattctcacacatgcaagtccaagagttcatatcaaagtcctcaacatgactctacagatcacgaactggacccatgatcagtcctcgcacagatcactgtggtcaagaggatgctgtcctcccactgatcaagcctacgtgacatgtcacctacggtatgtggttagagtcggccccatccaaaccccatggacggagtagccgagggaagacggggcgcccttagcagaataaacataaatggatagcttggtggtgaaaattacaggatgctcactacctatttttaaaaaaaatctgaagatatttgagtgtagttctaagacagtggttctcactgggggaaatgttgttggcaggggacatttggcaatgcacgaaaacatctttgtttttcataactgggtgatgctactggcatctgtggggtagaggctagggatgctgctagaatcctgtgatgcacaggacggcctcccgcagcaaagaattctatggcccaaaatgtcaatagtgctgaagatgagaaaccctatcccatgaccaaaaatgctgccaaggatgctgtgatccgtgtcattagataatgaaagatttctgttcagatatgctgtgaatattcatgtccttgcagtttgcaaatacctgttggcccgtcacagtgagaaagaggcctcagatctttctctgcttcccttaactcttgagctaaacttccagccccatccatctatatatcaggaactgtaatcgttgaagtgaccattttagatccaaagcaattaggtgggaaaatcctagagggccttttataaatcaagattatgggcaagagttaatacaacagatggtgggcactcacccgcgatctcctccgtgaagatcagccaagtggctccatgtattccaccaggcagtgcttggaggaagttgcctgcccatctgcacttattttccttttgttcatatcggctgataaaaacagcaccaggatcagagmctcagtagcacattccttggggcttccaatggtatccctatggaaatgatgtgtgtcatgggaaggcaggtgaggaaccttgcaagtcttctttatgttgtcaattaggatgcttttggctaccagtggctgcaggccctctcaagttgttttatacaatagggcaatgtattatcacaaataagtccagaggtcccgattttgttttgctacagatctcctagctttgttcttccctgaaatagttactg

SEQ ID NO: 70034 - DNA, 872 bp, Homo sapiens
tcctttctcagtgaagtgtcaaaggttaatttaacagggcagcctcatccacgttggagaagtataaaaaggtaggagcaagaaagcttgaatcaaggtaacgcatagatttcctccttacacacttgttctgccaaaacccatctgtgttcgtctgagttattcagagaaacagaaccagcaggataatatatgtgtgtgtgtgtgtgtgtgtgtatatatatgccacacatacaaacacacgtaaatatggagagaaagagatttttaatttatatatatttagggagtataagtgcatataagtgcagttttgttacgttggtatattgcacagtgatgaagtctcagcatttagtgtaaccttcacctgaatagtgtttattgtacccaagaggtaatttgtcatccctcacccccttcccaccttttgaaatcttcaatgtctattattacactccatgtgtccataggcacacattgtttagctcctatttatttgtgagaacatgtggtatttgactttctgtttctgagttatttcacttaggatgatggactccagttgtatccatgttgctgtgagagacatggtcttattcttttttatggctgagcagtattctatgstatatgtgccacattttctttatccaattgtccattaatggaccttaggctgattccatgactttgctattgtgaagagtgctgtggtaaacatatgagtgcaggtgtgttttgctataatgatttcttttcctttgagtagatacccagcaatagaattgctggattaaatggtagttctatttttaactctttgagaaatctctgtatcattttccatagagattgtactagtttacatc

SEQ ID NO: 70035 - DNA, 552 bp, Homo sapiens
cattacctagttactgacaggcattcaataatattaattcttttcccatyctattatgccttgctgatacgattagcagacttttagacctggataaaccagtagcattgaacaagttatgctgaaatagtcaaggtagcctctgagacattttttcattcaacaaatacttgcatctaatatagtcaagcactatgttggaagctggagatacaaagggaaataggacccaggcctgtcctcacagaccttaaggtctcatgcagcagagagatcaatagaaagaccattatactaaggtatgatgttggtaagacatggtatatatctcttgaaactctgggttgtaagtgacagaaaacctaacccttagtggtttaagcaacaaggaagtattttggctcaaacgactgaggaattggaggaagagctggtcaggcatcgcttcatgaaaggctcatcccagtatcaccaggacaggacttctctctctttgctcagctgtgtttccctctgtgttggttccatgctctgatgggcttccatctgcaa

SEQ ID NO: 70036 - DNA, 552 bp, Homo sapiens
cattacctagttactgacaggcattcaataatattaattcttttcccatcctattatgccttgctgatacgattagcagacttttagrcctggataaaccagtagcattgaacaagttatgctgaaatagtcaaggtagcctctgagacattttttcattcaacaaatacttgcatctaatatagtcaagcactatgttggaagctggagatacaaagggaaataggacccaggcctgtcctcacagaccttaaggtctcatgcagcagagagatcaatagaaagaccattatactaaggtatgatgttggtaagacatggtatatatctcttgaaactctgggttgtaagtgacagaaaacctaacccttagtggtttaagcaacaaggaagtattttggctcaaacgactgaggaattggaggaagagctggtcaggcatcgcttcatgaaaggctcatcccagtatcaccaggacaggacttctctctctttgctcagctgtgtttccctctgtgttggttccatgctctgatgggcttccatctgcaa

SEQ ID NO: 70037 - DNA, 1243 bp, Homo sapiens
tgcattccccacaaaagcctgagggctgaatgagaagctacttctccaaaagcctgtatccctcaacaaacaagctcgcccctgtggcaaagcacaccctctggttttactgcttacgcagagccgttgcttaattgacagatggtgccgctgtgaaaatacagccatgtgggagagaaataaatcaataagaaagaagactgaaacactctctccagattcttttttattctagtgaatgtgaatcaggattttctaataaaaatcaagttaaaaaaatttatggcaggtgtgctacatattgagcggtttcaggacaatatcagaactggctgtggctacaatgaaaaacattttacaggctgtttgtaaaagctggtcaccccccagcctggccaacacagtgaaaccctgtctctaccaaaaaaatacaaaaattagccaggcttggtggtgcgcagcctgtaatcccagctactcaggaggctgaggcaggagaatcacttgaacctgggaggtggaggttgcagtgagccgagatggcaccactgcactccagcctgggtgacaaagtgagtctcygtttcaaaaaaaaaaaaaaatgctggtcacctcgatctttatcgcaatgaagaaaagacaacacatgttttaacagccttcatccccctaattagcttatttttttagcatgcagttaatttgaaaactttatttaaacgtaaattgagtggatcagtgtggaaaggtaagtcgatacacagcagattaaagataacaaaaagaaacaagtgacctatattttcagaacttttccagaatgatcgtttgttttgtttgatcagtgctagagaaagaagtggctggaagttggcaaaagaacaagtgggaaactgtaaaacggcctgtctgaaatctgttcttttttgtggttatttgggccaggctgactcctcattgccagcacttctcacatcaagcacccggtccaccacaaatatgcacatctcgtcacatgccggtgacattacatgccctccagtgggtaagctttcttcactttgtctaaatcttttggaattacagcaaccaattgactggatgtgatggtttctataatttttcatctagtgactgagaaaaaaaaaaccctgacgtttgaaaagagccactttaaaaagttgtaaacaagcatgaagaggctttcctgggtcattagctgatttttattttgcaaaatgca

SEQ ID NO: 70038 - DNA, 1105 bp, Homo sapiens
cttttagtatataagcctattgtccacttttatggattttcatgagcacatgaactttggcaatggtgagtactgatttacacacctagattttcctgcctgagagatcctcatagacaacctaatgtcttgctcaaagtgacgatcaatatatggctgttgtttgtgactttataggtcaatctccaccctcctagaaggtatatcagaattaaggaacttctccaggttgcattacattctccacttcctctcctcccctcagccctccatggcttcttggttccaattctacattctcacctccctgtttataaatgttgtcagtccaggctaatgatgggagtgtgctatatccaagtgtgttgggccagaatataaagtaaagaatcactgatatcggcaataatgccacagccaaaggaatatttaaggaaagagacctggcagcaacaggcaagagagtcctgtaaggagagactaggggcaggcacccaaggcatcagaggctttaattctgtgctcagtttcatctcggacaagctgagataaaatatctgtgataacatttagaattaattgaagaagtttgtcagaagctattagaaaattatgctatatgaaagagaatatttcttataaagcagatacatagttggtacctttccagaaatgtctaagttttaaaaacattttaatctgaagaattacctttttttgaaatgcactgaattttgtctcaaaactctaaaactagtctgaagatggacaattctatttgatcccaaattaatatttccccagggcawcatcctcaaatagtattccatttttcacagagattttcaaataatgtgtcctttattagtcatgttcctaaagaatgtgaggtttttaacttaattcccacactttagattatactataatgacttgaagagtaagtcaccttttatttgggggcaaaagattcaattagatttgagcactgcagatacactttaatgagtcttatcacagggtctctatcatcagatctgataactactgtccagtggaatggaggaacaagtgccagtacttaatttcacaatatattcttgca

SEQ ID NO: 70039 - DNA, 799 bp, Homo sapiens
tgttgtttagaaatatgaagatatgtaaacccaggaaaaaagcagttgaaagtggaagactctagagaggggaacaggtaggggtggggaaggatgggacagggaatcatgttttgttacaagtatattagctcaatttgatgtttggaactgtgtgcactgaaaaaaaaaaactaatttgaaaaatcaattaatttctcttagcaagaggtgtctcatggctgccctgactcaaacgtaaggcttagaaaataatgacaatcttgcccctccccaaaaaacccagcctcttatttttgtgtagctgtgtatttcttaaagtatgttattatttcaaagaattatacccatatcaaatatcttggagacgaagaaagttattcacagggaagaaaattataacgaagcaggaaattcttaaatgcaagtttaaacaccttcctaaacttcaaccattgtaatttatcatgtagctaatttcctttttgacttattgggaaatctttaggtcccccccattcctgtgttgtctggttcagcccttggcctgttgatggccttttagctccttgggacctgctctgggggagctccagggactcaggctcctcctggcttcagcytgtgtccagttcttttttttttttttcctataatagtgagctttaagatttttattttattttattttaaaaatgttaagagacagggtcttgctgtgttgcccaggctagagtgtagtggctattcacaggcatgatcatcataactactgtagccttgaactcctggcctccaa

SEQ ID NO: 70040 - DNA, 1166 bp, Homo sapiens
ttgagatccttcctccctctcctctgagccatgttggtgagattcacatttgcctttcttgcagtggccgccacaggacttctttctctcccctttctgaagtgcctgcagctgggagatgaacttggtcttccatgctctgaagttggcctcaatgctgccgtgcttgcttttaaccacgtcgcagtcgccctcccctcgactcatcacacgatgcacgccaagcatccagagccacttgtcaacatttttgccaacctgcgaggaaaagatagataggctaaaagcayggttctctaaatcagggttttccagactgctctgcaaaagcccaaagtccttctggggcccctggtcatgggctaccactaagaaagaggaaattgctggcaaaatgaccttcaagccttcaagctccagccttgacccagaagagggtcattttatgtattctacttttctgccttagatttattgttttaaacaaaaggacaaacaaaccccctttatcaaatgaagggttaatgactaaaaaaaaatttgaaacctaccattctatatcatgataagaacaaaacaggagttaacaaaataaatgagttccaaaaatgtaacaaagcctatggggcctaagcctattccgttataaaatgaaaatataatcaatttggcaagattcgtaatttcctaaactcagtaatttatttcactgtgatatgaagcaattaagctgaggaacaggggttatcagaggcatagttaagagttcaaaaacttaataagcttcctgagtggcaaggcattaaacaaaatatttacatatctacgccaggcgaagtgtctcacgtctgtaatcccagcactttgggaggctgaggcaggcagattgtttgaggccaggagttcaagagaattccttgaaccctggaggcagaagttgcaatgagccgagattgtgccattgcactccagcctgggcaagagagtgactctgtctcaaaaaaaaaaaaaaaaaatttacatatctgaattttcccattcatagtctaatttatttgaaaatatggggagaggccagatgcagtggctcacgcctataattccagcaccttgggagaccggagtgagaagaatgctcaagcccaagttcaacaccagcctgggca

SEQ ID NO: 70041 - DNA, 1383 bp, Homo sapiens
atgacgtatcagccatcctttccccaaatgtgtggctactcaatgatgcagacttaaagcagttacactggaaacgggcttcgttcccacggaggtgcagctgcagtgctccactgcctgcccactctgcctctccaataacagaggccagcaacatcggcctttcagtttagctcaactaggatgaattaaacgtctgactgtcataatttggacacccattataccaatcaacttagtgayttcatggatgtatcatgttgatcttttgagacaaatttatatttacaaatgagtatctttcaaatcaggagcaataatcacaggttagctaagcccgattaacttacatttaataaatatacgcatatttatacacatatatacaaacatatacatacctgcatatttatatatacatacctgcatatttatatatacatacctgcatatttatacatacatttagatacatacatgtgcacatatatacacacctgcatacacacgtgtgcatacctatacacataacatatacttgtacataggtacacacataaatacacatatacaagcatgcatgcatacatacttacatatatatgtagatatatacaaatcagtcaggatccaatcaggagacagaaatcacacatgaacttgaacatggaaagtttcattaagatttattaactagtactgagagattaaccacaaagggctaaagagcgacttgaagaaagctgctcttcctgcagatgcttctgtgccctggactggccatgctgccctggagcggcctgaaccaagccagggctgttcccaggcccagctccccgaccccgctgctgagcaggtcctgatgaatctggagctgacaggcaatgccctgagaaccagcatgattcctacatacattgatgtgcgatcatatactttataaaattgtgcatctgtatttacatagaataacatttatgtctatatatttacaaaaggggtagagattcttttggcaaaaattttagagtataaacaccataattatgtgtctcactagccccagaattaacagctgtcaggcagcagcttttaacaagcgaccctcaacataacctcatacagatactctgtttgctgtaaaaagtttcagaaacaagtgttggccacaaactaaagggaggacgtcaccttccaacacaggaagagggagagaggtgacccttttttgcagaaccataatatctgaaacttacaagtaggagcctgagaaactaaacttcggaaacccaacaacccgagagtgtgtagctttaaggaagaaatgttgattcacggaagctgtcattagaaatcgagttgtccccagcaaacaatccaaga

SEQ ID NO: 70042 - DNA, 1383 bp, Homo sapiens
atgacgtatcagccatcctttccccaaatgtgtggctactcaatgatgcagacttaaagcagttacactggaaacgggcttcgttcccacggaggtgcagctgcagtgctccactgcctgcccactctgcctctccaataacagaggccagcaacatcggcctttcagtttagctcaactaggatgaattaaacgtctgactgtcataatttggacacccattataccaatcaacttagtgacttcatggatgtatcatgttgatcttttgagacaaatttatatttacaaatgagtatctttcaaatcaggagcaataatcacaggttagctaagcccgattaacttacatttaataaatatacgcatatttatacacatatatacaaacatatacatacctgcatatttatatatacatacctgcatatttatatatacatacctgcatatttatacatacatttagatacatacatgtgcacatatatacacacctgcayacacacgtgtgcatacctatacacataacatatacttgtacataggtacacacataaatacacatatacaagcatgcatgcatacatacttacatatatatgtagatatatacaaatcagtcaggatccaatcaggagacagaaatcacacatgaacttgaacatggaaagtttcattaagatttattaactagtactgagagattaaccacaaagggctaaagagcgacttgaagaaagctgctcttcctgcagatgcttctgtgccctggactggccatgctgccctggagcggcctgaaccaagccagggctgttcccaggcccagctccccgaccccgctgctgagcaggtcctgatgaatctggagctgacaggcaatgccctgagaaccagcatgattcctacatacattgatgtgcgatcatatactttataaaattgtgcatctgtatttacatagaataacatttatgtctatatatttacaaaaggggtagagattcttttggcaaaaattttagagtataaacaccataattatgtgtctcactagccccagaattaacagctgtcaggcagcagcttttaacaagcgaccctcaacataacctcatacagatactctgtttgctgtaaaaagtttcagaaacaagtgttggccacaaactaaagggaggacgtcaccttccaacacaggaagagggagagaggtgacccttttttgcagaaccataatatctgaaacttacaagtaggagcctgagaaactaaacttcggaaacccaacaacccgagagtgtgtagctttaaggaagaaatgttgattcacggaagctgtcattagaaatcgagttgtccccagcaaacaatccaaga

SEQ ID NO: 70043 - DNA, 581 bp, Homo sapiens
cgcgcgacgycacacaccattttcagatgccgttgcaattaaatcttgccacactgtcctcctgggtgattgttgacagttattgtagccacagagagaacataagacacgttgcgttcattcgctagaaatccctgtttccttctctcagaaggcagtcacagtccctacctgagtcgtgtgaaacacagggcctgagagtgctttacaggcattcacgtgctgtccgagtggcattcgggggctggcctagctggccctagtcctggtgtgcagggttcaggcagtcttgacctgcaacaaccgaggttttttagtcttttaacccagccattttcaattttttaaaaattaggtaagttaaaaaagctgggtaaaagctgactcagccctgtgtgcttgtgttccttagagctctccttcaaagagcgccgggcagggctgactgttttcacgtgtgcccgtcagttctcgccacatcccttgcctgtgggtgaaagctcaggtgtggggagggtgtcctgtgtcccacacggtgctgtgctgctgccagaatacgagtcccattgagcctctccaaa

SEQ ID NO: 70044 - DNA, 581 bp, Homo sapiens
cgcgcgacgtcacacaccattttcagatgccgttgcaattaaatcttgccacactgtcctcctgggtgattgttgacagttattgtagccacagagagaacataagacacgttgcgttcattcgctagaaatccctgtttccttctctcagaaggcagtcacagtccctacctgagtcgtgtgaaacacagggcctgagagtgctttacaggcattcacgkgctgtccgagtggcattcgggggctggcctagctggccctagtcctggtgtgcagggttcaggcagtcttgacctgcaacaaccgaggttttttagtcttttaacccagccattttcaattttttaaaaattaggtaagttaaaaaagctgggtaaaagctgactcagccctgtgtgcttgtgttccttagagctctccttcaaagagcgccgggcagggctgactgttttcacgtgtgcccgtcagttctcgccacatcccttgcctgtgggtgaaagctcaggtgtggggagggtgtcctgtgtcccacacggtgctgtgctgctgccagaatacgagtcccattgagcctctccaaa

SEQ ID NO: 70045 - DNA, 547 bp, Homo sapiens
ttttttttaaataaaggatcagatagtgagtgttttagattgtttgggcccacatacagcccctatgtcacccactcaactctgctgttgcagctgggaagcagagacaatctgtaactgaatgaacatagctgtgccccaataaaactttattcatgaatacacatatttgaatttcataaaacgtttaaatgtcacaaaacagtattcctctcttgattttttgctaccgtaaaaatgtaaaaacattcttagttcacaagctgtatgtataagttgtgagcttgatttggcctatggacacagtttacacacccttgttattctttccagaagggaacatgtggtgccctcacttaaaaatatcagaaaagtgcagagttttcttttctacaggtctagtaatataaggatgttctctcgtaaagcataaatctcggttctgggtcgttttcctgacccagataattttccgtcaataattctcttcctcgtaytgtttttcatgaataaaaggagacagatacattttagaaaagcccatata

SEQ ID NO: 70046 - DNA, 540 bp, Homo sapiens
cttagtcaggcacggtggctcacatctgtaatcctagcactttggaaggctgaggcctgtggattacttgagcccaggagttcaargccagcctaggtaacatggcaaaccccatctctactaaaaatacaaaaattagctgggtgtagtggcacacctgtagtcccagccacttgggaagctgaggtgggagcatcgcttgagcctgggaggcagaggttgcagtgagctgagatcgtaccactgcactccagcctgggtgacagagtgagaccccatctcaaaaacacaagcaaacaaaaaacaagaaacagacttaatactctaatactctcttagaggcaagttcctctatgcccctctcttcctttctctccagagaaaaccaacatcttgtattttgagttaatcattcttttgctttttatgagttttaatatctttaaatgtattcctaaaatatattttagttttgcctgattttgaactttatataagtggattcacagctatatagccttctatgacctgcttcctata

SEQ ID NO: 70047 - DNA, 540 bp, Homo sapiens
cttagtcaggcacggtggctcacatctgtaatcctagcactttggaaggctgaggcctgtggattacttgagcccaggagttcaaggccagcctaggtaacatggcaaaccccatctctactaaaaatacaaaaattagctgggtgtagtggcacacctgtagtcccagccacttgggaagctgaggtgggagcatcgcttgagcctgggaggcagaggttgcagtgagcygagatcgtaccactgcactccagcctgggtgacagagtgagaccccatctcaaaaacacaagcaaacaaaaaacaagaaacagacttaatactctaatactctcttagaggcaagttcctctatgcccctctcttcctttctctccagagaaaaccaacatcttgtattttgagttaatcattcttttgctttttatgagttttaatatctttaaatgtattcctaaaatatattttagttttgcctgattttgaactttatataagtggattcacagctatatagccttctatgacctgcttcctata

SEQ ID NO: 70048 - DNA, 540 bp, Homo sapiens
cttagtcaggcacggtggctcacatctgtaatcctagcactttggaaggctgaggcctgtggattacttgagcccaggagttcaaggccagcctaggtaacatggcaaaccccatctctactaaaaatacaaaaattagctgggtgtagtggcacacctgtagtcccagccacttgggaagctgaggtgggagcatcgcttgagcctgggaggcagaggttgcagtgagctgagatcgtaccactgcactccagcctgggtgacagagtgagaccccatctcaaaaacayaagcaaacaaaaaacaagaaacagacttaatactctaatactctcttagaggcaagttcctctatgcccctctcttcctttctctccagagaaaaccaacatcttgtattttgagttaatcattcttttgctttttatgagttttaatatctttaaatgtattcctaaaatatattttagttttgcctgattttgaactttatataagtggattcacagctatatagccttctatgacctgcttcctata

SEQ ID NO: 70049 - DNA, 540 bp, Homo sapiens
cttagtcaggcacggtggctcacatctgtaatcctagcactttggaaggctgaggcctgtggattacttgagcccaggagttcaaggccagcctaggtaacatggcaaaccccatctctactaaaaatacaaaaattagctgggtgtagtggcacacctgtagtcccagccacttgggaagctgaggtgggagcatcgcttgagcctgggaggcagaggttgcagtgagctgagatcgtaccactgcactccagcctgggtgacagagtgagaccccatctcaaaaacacaagcaaacaaaaaacaagaaacagacttaatactctaatactctcttagaggcaagttcctctatgcccctctcttcctttctctccagagaaaaccaacatcttgtattttgagttaatcattcttttgctttttatgagttttaatatctttaaatgtattcctaaaatatattttagttttgcctgattttgaactttatataartggattcacagctatatagccttctatgacctgcttcctata

SEQ ID NO: 70050 - DNA, 743 bp, Homo sapiens
tgctagatgcccacgagtggtatatacaggaagaacacatgtgcgcatcaaaggagaggacatgcttgaggactagaacgtaaaccccgcaggaatgtatcttttttgtttactgctatccccagtgttcagcataggtgcctgaaaaagatttgttgaccaatgaatgaggcctgaattacctgaggaagatttgggtaggaaattggacttcacacactaagatgtgaagaaagggtaagacttgaataaataaatgaaagcgaaggttgtcttttgggcttgttataagaagatatagcccatcgtatgtcttctttacagattcgttaccactgaaaccaatgaacagttggtgtatgtaattattgattcagcaggaaatggcaggccccctgagtggagggaccttggctttttcaccatgtaggcccacttcttagcaaagtgcctgcaatttaacagggtcttgatggttctctgttaaaaggaataatgatttataagactatgacagctgattagagccttagagtggggaatcttccatgccaggccaatcacctcgaaawttatcctttctatagtccaggggtccacaaactacaacccgtaggcccaatccacacatttgtttacctattgtccatgggtgcgcttgcattgcagttgcagaattgagtggctgagacagagatggcatgtggccccttggcctacacaggttaaaatacttgctgtct

SEQ ID NO: 70051 - DNA, 437 bp, Homo sapiens
aaacatacttttggggctcctatattgcccagttacagctctttttaagtttttrtgttccaatataacttaaaatgatttcagggcctttggtaatcaatagtgttatcaaattggggggataatatatcaaaaatgtgtgacttatccagtaggccaagtattgaagcatgggcttccatgggacagcagttattagcccatcaggagggaaaagccattgtaactttccttatgcttagggaatcctgagtctcatcttcccttatgcctgtcctactagaattctatggtttatatcataatcttcctcaagaagattgggtctttttgctcaaatttctaaaatttgaaaacttaacatccataggactgttttttaaacgtgaggattttgatttgagtggacatgggtaatggggtattttctttgggta

SEQ ID NO: 70052 - DNA, 437 bp, Homo sapiens
aaacatacttttggggctcctatattgcccagttacagctctttttaagtttttatgttccaatataacttaaaatgatttcagggcctttggtaatcaatagtgttatcaaattggggggataatatatcaaaaatgtgtgacttatccagtaggccaagtattgaagcatgggcttccatgggacagcagttattagcccatcaggaggsaaaagccattgtaactttccttatgcttagggaatcctgagtctcatcttcccttatgcctgtcctactagaattctatggtttatatcataatcttcctcaagaagattgggtctttttgctcaaatttctaaaatttgaaaacttaacatccataggactgttttttaaacgtgaggattttgatttgagtggacatgggtaatggggtattttctttgggta

SEQ ID NO: 70053 - DNA, 437 bp, Homo sapiens
aaacatacttttggggctcctatattgcccagttacagctctttttaagtttttatgttccaatataacttaaaatgatttcagggcctttggtaatcaatagtgttatcaaattggggggataatatatcaaaaatgtgtgacttatccagtaggccaagtattgaagcatgggcttccatgggacagcagttattagcccatcaggagggaaaagccattgtaactttccttaygcttagggaatcctgagtctcatcttcccttatgcctgtcctactagaattctatggtttatatcataatcttcctcaagaagattgggtctttttgctcaaatttctaaaatttgaaaacttaacatccataggactgttttttaaacgtgaggattttgatttgagtggacatgggtaatggggtattttctttgggta

SEQ ID NO: 70054 - DNA, 437 bp, Homo sapiens
aaacatacttttggggctcctatattgcccagttacagctctttttaagtttttatgttccaatataacttaaaatgatttcagggcctttggtaatcaatagtgttatcaaattggggggataatatatcaaaaatgtgtgacttatccagtaggccaagtattgaagcatgggcttccatgggacagcagttattagcccatcaggagggaaaagccattgtaactttccttatgcttagggaatcctgagtctcatcttcccttatgcctgtcctactagaattctatggtttatatcataatcttcctcaagaagattgggyctttttgctcaaatttctaaaatttgaaaacttaacatccataggactgttttttaaacgtgaggattttgatttgagtggacatgggtaatggggtattttctttgggta

SEQ ID NO: 70055 - DNA, 998 bp, Homo sapiens
gtgcggcttgacgcatctctcccagaggtagtctcagaaaaatagtttagttgctgaaatgtctaaagttccaggacacttcagggatgtctrgaaataataaacagaatatttgaaatcaagatattaaacaaatctagcctagtcgatcaccataaatgtggatatttccactcttatcacagaggccatttgagagatgccaacattatgctgcaactttggacaaaatttatgtccatgcttcccaaacttcagtcatttttttttgccacttttttgattttttaggtatgcaccatctgtaatattgcttattcaatgcttttccttaaatagactctttgttgaattttaagaacttccctaacttgattcaaagtaatagtattcaagataaactgacttaatttactagtaataatttttagatacacattaaaatgagtacataactgtcaaaatagaaaacatttgtctgtgtgcctctgaagaatcatctcttgtatttgtaccatgctttgggaacacattgcactaggttgtcagaatctgaaagaacagacatttttgggacctacggtaacttgctaaactagagggagagaaggaaggcactctccaacgtttggcttggtctgttcacagcacaggcaaaccctgactcctgctaaaaatttgtttgtaagtcagtcatgtggagcaagaacatattatatgttaaatggatttttatgggctggtgggagaaggtgattgccacatagaaaaatgcaaacttttatggtcttttttttctctgaggctgcttggatgccaccacaaacatgatttatgtatttattttggcccaaggacaatttaccagttcctgatgcctagttaatggacgtagatgtttcttgaatttaattgattaaaactgtttaaaactttgtcttcagcatccgggaaatttcagaaagagaatgattcttatttgaaatcgaaaggaattc

SEQ ID NO: 70056 - DNA, 1406 bp, Homo sapiens
agctaaaagtatcattcaacatcatggccaaataagaacattttcagaagaaccctcactgactcttgctgaaataaatactaacgtatcagcttcagaaggaggaaattgaacacagaggactggagtggaattgcagttacactagtacgaaacaaattggcgaacattttgataacttgaaataaacaatgatgtataaataaggagctaatttggaggagaggattaaaaacaaggaaaagctgggcactgtggctcatgcctgtcatcccagcactttgggaggccgaggcgggtggatcacgaggtcaggagttcgagaccagcttgcccaacatggtgaaaccctgtctctactaaaaatacaaaaattagccaggcacggtggtgtgcgcctgtactcccagcaactcgggaggctgaggcaggagaatcgcttgaacccgggaggcagaggttgcagtgagccaagatcgcaccactgcactccagcctgggtgacaagaacaaaaactccgtctcaaaaaaaaaaggaaaaattaatacattaaacataaaatggtagcttggaaaaggagatcagaactgaactgtttctggtctggagattttgattggcctgattttcttttttaatgtcaagtatgcattttaaatatctaaaagaatgaattagaacgtgtagttttcaagcttgtagaagggaaaagtagaatgaaaaaaccaaatcaatttaataaaaggcaggagagaagaaaaaggaagcaaagaaaaagtacattaatcttaaatgcaaaataacataatagaagtacagttgatccttgaacaacacgggtttgaactttgtgggtccacttatatgtggatttttttccacctctctcacccctgagacagcaagaccaacccctcctcttcctcagcctactcaatgtgaagacaagaatgaagatctttatgatgatycacttccatttaatgaatagtacatgttttctcttccttatgattttttttttttttttgagacggtgtctcactgttgcccaggctggagtgcagtggcgcaatctcggctaactgcaacctctgcctcccaggttcaagctattctcctgcctcatcctcctgagtagctgggactataggcacacatcaccacgccaggctaattttttgcatttttagcagagacgaggtttcactatgttagccaggatggtctccatctccagacctcgtgatctgcctgccaggcctcctaaagtgctgagattacaggtgtgagccactgcacctggcccatgattttcttaataacatcttttctgtagcttactttattgtaagaatacagtgtgtaatacatatacaaaatatgtgttaatcaactgttgaaa

SEQ ID NO: 70057 - DNA, 1406 bp, Homo sapiens
agctaaaagtatcattcaacatcatggccaaataagaacattttcagaagaaccctcactgactcttgctgaaataaatactaacgtatcagcttcagaaggaggaaattgaacacagaggactggagtggaattgcagttacactagtacgaaacaaattggcgaacattttgataacttgaaataaacaatgatgtataaataaggagctaatttggaggagaggattaaaaacaaggaaaagctgggcactgtggctcatgcctgtcatcccagcactttgggaggccgaggcgggtggatcacgaggtcaggagttcgagaccagcttgcccaacatggtgaaaccctgtctctactaaaaatacaaaaattagccaggcacggtggtgtgcgcctgtactcccagcaactcgggaggctgaggcaggagaatcgcttgaacccgggaggcagaggttgcagtgagccaagatcgcaccactgcactccagcctgggtgacaagaacaaaaactccgtctcaaaaaaaaaaggaaaaattaatacattaaacataaaatggtagcttggaaaaggagatcagaactgaactgtttctggtctggagattttgattggcctgattttcttttttaatgtcaagtatgcattttaaatatctaaaagaatgaattagaacgtgtagttttcaagcttgtagaagggaaaagtagaatgaaaaaaccaaatcaatttaataaaaggcaggagagaagaaaaaggaagcaaagaaaaagtacattaatcttaaatgcaaaataacataatagaagtacagttgatccttgaacaacacgggtttgaactttgtgggtccacttatatgtggatttttttccacctctctcacccctgagacagcaagaccaacccctcctcttcctcagcctactcaatgtgaagacaagaatgaagatctttatgatgatccacttccatttaatgaatagtacatgttttctcttccttatgattttttttttttttttgagacggtgtctcactgttgcccaggctggagtgcagtggcgcaatctcggctaactgcaacctctgcctcccaggttcaagctattctcctgcctcatcctcctgagtagctgggactataggcacacatcaccacgccmggctaattttttgcatttttagcagagacgaggtttcactatgttagccaggatggtctccatctccagacctcgtgatctgcctgccaggcctcctaaagtgctgagattacaggtgtgagccactgcacctggcccatgattttcttaataacatcttttctgtagcttactttattgtaagaatacagtgtgtaatacatatacaaaatatgtgttaatcaactgttgaaa

SEQ ID NO: 70058 - DNA, 1406 bp, Homo sapiens
agctaaaagtatcattcaacatcatggccaaataagaacattttcagaagaaccctcactgactcttgctgaaataaatactaacgtatcagcttcagaaggaggaaattgaacacagaggactggagtggaattgcagttacactagtacgaaacaaattggcgaacattttgataacttgaaataaacaatgatgtataaataaggagctaatttggaggagaggattaaaaacaaggaaaagctgggcactgtggctcatgcctgtcatcccagcactttgggaggccgaggcgggtggatcacgaggtcaggagttcgagaccagcttgcccaacatggtgaaaccctgtctctactaaaaatacaaaaattagccaggcacggtggtgtgcgcctgtactcccagcaactcgggaggctgaggcaggagaatcgcttgaacccgggaggcagaggttgcagtgagccaagatcgcaccactgcactccagcctgggtgacaagaacaaaaactccgtctcaaaaaaaaaaggaaaaattaatacattaaacataaaatggtagcttggaaaaggagatcagaactgaactgtttctggtctggagattttgattggcctgattttcttttttaatgtcaagtatgcattttaaatatctaaaagaatgaattagaacgtgtagttttcaagcttgtagaagggaaaagtagaatgaaaaaaccaaatcaatttaataaaaggcaggagagaagaaaaaggaagcaaagaaaaagtacattaatcttaaatgcaaaataacataatagaagtacagttgatccttgaacaacacgggtttgaactttgtgggtccacttatatgtggatttttttccacctctctcacccctgagacagcaagaccaacccctcctcttcctcagcctactcaatgtgaagacaagaatgaagatctttatgatgatccacttccatttaatgaatagtacatgttttctcttccttatgattttttttttttttttgagacggtgtctcactgttgcccaggctggagtgcagtggcgcaatctcggctaactgcaacctctgcctcccaggttcaagctattctcctgcctcatcctcctgagtagctgggactataggcacacatcaccacgccaggctaattttttgcatttttagyagagacgaggtttcactatgttagccaggatggtctccatctccagacctcgtgatctgcctgccaggcctcctaaagtgctgagattacaggtgtgagccactgcacctggcccatgattttcttaataacatcttttctgtagcttactttattgtaagaatacagtgtgtaatacatatacaaaatatgtgttaatcaactgttgaaa

SEQ ID NO: 70059 - DNA, 668 bp, Homo sapiens
agaaagagcctggttatattttagaaagaatcactacatccttaaagagaaattccacttatttcacatattgcttggattagcttaggtcatttggcttaacatcttggcgcctcatacaggtatttctgaactatcaaaatcattttcaaaggataaacatggcagtgcatggtgtgttccaatgactggtgtatgtgcatatacacagacacttacatgtcaaccctcatttttaaaagaagaaaatgacgaggttgtgggaaaagggaacacttacacactgttattagagtgtaaattagttcagccattgtggaaagcagtatggcaattcctcaaagagctaaaaacagaactaccattcaacccagcaatcccattactgggtatataaccagagkaatataaatcattctactgtaaagacacgtgcacacgaatgttcactgcagcagtattcacaataacaaagacatggaatcaacctatatgttcttcagtgacagactggataaagaaacatggtagatatacaccatggaatacgatgcaatcgtaaaatgaacgacagcatgtattctatgggaacatggatggagctggaggctattatccttagcaaactaatggacgaacagaaaaccagatactgcgtgttctcactt

SEQ ID NO: 70060 - DNA, 576 bp, Homo sapiens
ttaaactatacatcaaaacacattacaaaaaacagcctaagaggctgtccattatactagagtggtcaaaaacaaggacttatgtacctgacagacttgggattgattcctgactccatcttttcctaactgtgttgctttaggcaagttacatgaattctggacctctgtgtcttctcaggtacaatgaatagaatggtatttttctcattggaatcaacctaagtgtccatcaacagatgaatggataaagaaaatgtkgggtatccatatacaatgaaatgttattcatcctttaaaaagtagatccttgcatttgcaacaacatggatggacctggaggacattatgctaagtgaaataagccacacacagaaagaaaattactacatgatatctagagtcttaaaaagtctaatacacagaaacagagagtagaacagtggttctactctaccaggggcagggtactgggggaaatggggagatgctggtcaaagagtacaaagttgcagttatgtaaaatgtaaatctagagatctaatgtacagcatgagaactaatttgctagagagt

SEQ ID NO: 70061 - DNA, 608 bp, Homo sapiens
cgaggctccaacctctagttatactgcctttaacttccttttgactctctgwttttaggccaaactcttcttctatgtacctttatagaatttgacaggattaaaaaaaaaaatctttggaattttctctatgtataataatgagatttttgggtaatattacagatttcgatttgttcaacttgtaggaaaatataccagtttcagaattgctttctattccagagaatagagaatagttaatttatatataatattaattgtttaataaagttcctgttatacctcaaaatatataatgctgtttatttacaaaacaattataaaaatatttatgaaataatgttagctgtgagacctccttaaaaatactcatttctgtatttagaaatttagctataagagcattcatttgctttgtataatacaaaaatttggaaacaggctaaatatccagaaatgaattgattaataaaggtttagtcatataacccatataatggattgttattctgccactaacttgattaatggcattaatttttaagtaaagaaaatattcatatgtcctttttcatgttatctttataatttaaaaagctttttat

SEQ ID NO: 70062 - DNA, 715 bp, Homo sapiens
ttgggttctttgactaaaatgtttaggactttctttcccactcatctgtcccaaatgacttccttttgaataagaattactgtctctttctgtgagtgagtgacaggctatctcctgggtccccttttctctctcttaataacagcatgtttggatactgatgctaagtgcagaaragctggtgctcctaggctggcagtaatgaaaatatttttaaaaggatgtctgctcctctatgtttccctcagtcttgactgccttcaaaggctgaggaaggtcacaagaaggctcctataactatagtatggtgttgtccaaaaaggaaaaaagaaaaaggtaagagctttaacaatctttcctctcttgctgctgttgccaagatgctgaacatcctgccacccatcctctaacaggtttttacaggagagtggcagactccgcccacttcatggtgaaggtcaggaagttaaagggtaaggcaacaagctgggggcgtgagggaaaaggagggaggaggatgttttgtggacagggccctggaagaaagcagagggtgtaaagaaagttacacggcaatttctgtgctatttagcaactatatattgagtctaggattgtaggggctgcagatacaaagatgattggatgactctgacagctgccacaccttaagtgactcgctgtccattggaactgcacaaggtcttgggatccc

SEQ ID NO: 70063 - DNA, 715 bp, Homo sapiens
ttgggttctttgactaaaatgtttaggactttctttcccactcatctgtcccaaatgacttccttttgaataagaattactgtctctttctgtgagtgagtgacaggctatctcctgggtccccttttctctctcttaataacagcatgtttggatactgatgctaagtgcagaagagctggtgctcctaggctggcagtaatgaaaatatttttaaaaggatgtctgctcctctatgtttccctcagtcttgactgccttcaaaggctgaggaaggtcacaagaaggctcctataactatagtatggtgttgtccaaaaaggaaaaargaaaaaggtaagagctttaacaatctttcctctcttgctgctgttgccaagatgctgaacatcctgccacccatcctctaacaggtttttacaggagagtggcagactccgcccacttcatggtgaaggtcaggaagttaaagggtaaggcaacaagctgggggcgtgagggaaaaggagggaggaggatgttttgtggacagggccctggaagaaagcagagggtgtaaagaaagttacacggcaatttctgtgctatttagcaactatatattgagtctaggattgtaggggctgcagatacaaagatgattggatgactctgacagctgccacaccttaagtgactcgctgtccattggaactgcacaaggtcttgggatccc

SEQ ID NO: 70064 - DNA, 1960 bp, Homo sapiens
ctggaaaccctcccccttctcacagatgcctggccgtggtggggctgcggtggggacccacttggtcttgctgagtgatctgtgacggctcgcggggtggctcaggtatcaggggacagccatgtctgtgaggactccggccccgctcagatgaggcagcccagcccgtcgcccagggtccggctgtgggagctgcagtagggatggctctgcctaggtgggccgaggccgtgcggggctttaggtgagggctgggatctaactcagcgcaggcttcaggtgggagaacgggcagctgggccctcctggtgactcacatcacgtgagacaacactgtgccctggcctttccagtctttcctgcagctgcgcaactggacggcctccctgctctgctccgcagccgacctccccgcccgtggcttcagcaaccagatcccgctggtggcgcgggggaactgcaccttctatgagaaagtgaggctggcccagggcagcggagcacgcgggctgctcatcgtcagcagggagaggctggtacggccctgtgcgtcccccgctgggccagctctcaggggcaggaggggggtgcaggaggcagagatggcagcagctggggctggtcttccgacttctcgctaaaggcagatccatctgtggggaggatctgggccgagtgtgaacatggggaggatccgggccgagtgtggccgtggggagggcggagatgagtctgttcttcctgagctgctggctggggctgtggaactttggccgtggtcttgttgggtgcctgtcctagagcagcccccaggggtgacggagaccacacyctctgtggggatgggattggggtggcttctgaggagcaggtggcctggccctgagctggtcctttctgggtaccctggtgcccttgccctctagccggtggggccgtgctcgcctgtggtcctagccaggtggcctgaagcctggccccttttccatcttctgtgaaatggggctgtggttgagagctgggggcctggcagggctggtcacagcacagggacatgccgactgctgggctgggcagggtgcgtggccgcccctgaagtgtagttttggagtaagaaggaatggagttcaggaattccctcacagctctgcctgtggctctgggctgcccccgccagtgttgcaccctgagcctggcaatccacggaggcctggtgcaggggctcagggccgagggcagagcaggccgggcagagccgagagtgccatccctgtccgcacacgctgccgtcgtagttgagagaggccctcagtgggtgcggggctcaaggcggcttagtgggcaggcatgggctgtgacaagtatcactcaggacttgtatgtgcggttcgggagtcccacggccgagggagggattagtggcgcttttaggcctggggccctgttgtcaggtgaagaaggcttgatgcccttcggcctccctgttcttgggtcctcctggggggccggaggctgtcagctgcagagggggagccagcaggcgcccccagcctgacccgagcctcgagtgagggtcccaggagaggaggcgaatgggcacagagctgggggcccacccactgctgcgggtgatgcctgccgctccctcctctgggcccccaggtccccccggggggtaataagacgcagtatgatgagattggcattcccgtggccctgctcagctacaaagacatgctggacatcttcacggtaggtctgcgccggctcagacccacgctcccgaggagatggggcagggggcttcgggctggctgccgggggggtttgtgcctcagttggtgggatcagggtggtgggtgaggcgtggcccctgcaggccagggtctccagccccagccccacagcccacagctgcacgtcgacccatggctggcgggtggctctgacgcctgcctcc

SEQ ID NO: 70065 - DNA, 710 bp, Homo sapiens
ccgcccacctcggcctcccaaagtactggaattacaggcatgagctaccatgcctggccgctttttgaatgtaggccagccttgcactcctgggataaaccccaccaggtcatggaatatgattttttttttttttttgagacgaagtctctgtcacccaggctggagtacartggcacgatctcggctcactgcaacctccacttcccaggttcaagcgattcttctgcttcagcctcccgaatagcttggactactgtcatgtgccaccatgcctggctaattggaatatgatttcttttaattacaacattccatttgctagtattttattgagaaattttgtatctgaaatcatgagtattccatctggccaaatatgtggctggaatttcatcaaaagtggcagaggggttcccagaagggactgtttcaaaaagtcctgagataggacctgttgggattccaaagaaaggagcataaaacaccagggtaatcagttcaaatcattgttcggaggaactttcatacagggttgtgggggctgcagtgtgtccttgtgttggacagcaaacaaaaaaaaaagctctacttgtgtacgtctgcaatgagaagtttgggttatggagagtatatgagggcttaaggaatttggctcagatccagggccagtttctacatgtttagcaacatgtttgatctctcagtgt

SEQ ID NO: 70066 - DNA, 710 bp, Homo sapiens
ccgcccacctcggcctcccaaagtactggaattacaggcatgagctaccatgcctggccgctttttgaatgtaggccagccttgcactcctgggataaaccccaccaggtcatggaatatgattttttttttttttttgagacgaagtctctgtcacccaggctggagtacagtggcacgatctcggctcactgcaacctccacttcccaggttcaagcgattcttctgcttcagcctcccgaatagcttggactactgtcatgtgccaccatgcctggctaattggaatatgatttcttttaattacaacattccatttgctagtattttattgagaaattttgtatctgaaatcatgagtattccatctggccaaatatgtggctggaatttcmtcaaaagtggcagaggggttcccagaagggactgtttcaaaaagtcctgagataggacctgttgggattccaaagaaaggagcataaaacaccagggtaatcagttcaaatcattgttcggaggaactttcatacagggttgtgggggctgcagtgtgtccttgtgttggacagcaaacaaaaaaaaaagctctacttgtgtacgtctgcaatgagaagtttgggttatggagagtatatgagggcttaaggaatttggctcagatccagggccagtttctacatgtttagcaacatgtttgatctctcagtgt

SEQ ID NO: 70067 - DNA, 710 bp, Homo sapiens
ccgcccacctcggcctcccaaagtactggaattacaggcatgagctaccatgcctggccgctttttgaatgtaggccagccttgcactcctgggataaaccccaccaggtcatggaatatgattttttttttttttttgagacgaagtctctgtcacccaggctggagtacagtggcacgatctcggctcactgcaacctccacttcccaggttcaagcgattcttctgcttcagcctcccgaatagcttggactactgtcatgtgccaccatgcctggctaattggaatatgatttcttttaattacaacattccatttgctagtattttattgagaaattttgtatctgaaatcatgagtattccatctggccaaatatgtggctggaatttcaycaaaagtggcagaggggttcccagaagggactgtttcaaaaagtcctgagataggacctgttgggattccaaagaaaggagcataaaacaccagggtaatcagttcaaatcattgttcggaggaactttcatacagggttgtgggggctgcagtgtgtccttgtgttggacagcaaacaaaaaaaaaagctctacttgtgtacgtctgcaatgagaagtttgggttatggagagtatatgagggcttaaggaatttggctcagatccagggccagtttctacatgtttagcaacatgtttgatctctcagtgt

SEQ ID NO: 70068 - DNA, 710 bp, Homo sapiens
ccgcccacctcggcctcccaaagtactggaattacaggcatgagctaccatgcctggccgctttttgaatgtaggccagccttgcactcctgggataaaccccaccaggtcatggaatatgattttttttttttttttgagacgaagtctctgtcacccaggctggagtacagtggcacgatctcggctcactgcaacctccacttcccaggttcaagcgattcttctgcttcagcctcccgaatagcttggactactgtcatgtgccaccatgcctggctaattggaatatgatttcttttaattacaacattccatttgctagtattttattgagaaattttgtatctgaaatcatgagtattccatctggccaaatatgtggctggaatttcatcaaaagtggcagaggggttcccagaagggactgtttcaaaaagtcctgagataggacctgttgggattccaaagaaaggagcataaaacaccagggtaatcagttcaaatcattgttcggaggaactttcatacagggttgtrggggctgcagtgtgtccttgtgttggacagcaaacaaaaaaaaaagctctacttgtgtacgtctgcaatgagaagtttgggttatggagagtatatgagggcttaaggaatttggctcagatccagggccagtttctacatgtttagcaacatgtttgatctctcagtgt

SEQ ID NO: 70069 - DNA, 701 bp, Homo sapiens
ccatgggattttaatttatagcagtgacttagtgatgacacagagaggttaataacattgaaagaagaattcattatttacaattcgtgaaagaagagggcatatgctgggcctcatggggatacagctggaagcacaggggaggagaaagcctttaactgggtgtggtattctgatacatactggtttttgtccaccgttcctgattcataacccctatagcccttttgttaaaatgctgggtatgttaggcctcagggwcaggcctctgacctcctgccctcctttcgctctaacgttcctccacctttctgactgtgggtctcatgagtgggtccaaccctataccctgggaaaggaatgttgatgttttgaagcttccataaagactccaagaggtcacagttgagtgagcttccaggtggtccccccaggaagggcatggaagctctgtgccccttccgccacaccttgccctaggagtctcttcatctgtatcctttgcaatattctttataatacactggtaaacatgagtgtttccttgagttccgtgagctgctccagcaaattagttgaacccaaagagggggtcgcgggaaccccaactcaaagcccattagtcagacattttggaggcctggacttgtgactggagtgcagggtggggcagtcttgtggactcagccctcaacctgtgg

SEQ ID NO: 70070 - DNA, 581 bp, Homo sapiens
agccactggcccaggcagaagtctccttgagcccactgggtcatatgcgtgtcaccacacgtgaactagtgtggtggctgcctgcggacaccctcctgttctgagccctgggcctgtgttcttctcagacactcccagactgaggggtggtgtgtggcgggtggcagggtggctgtggagactggkgatctggagcctggtgctggcacctggcctgagtttccgtgggcagctggcggggacctgtgctgctgctgctgactgtgggtgggcgggcggcgcctgggagtggctcttgctcaggaattgataggaaccctaaaaactaggataccccctcctcggcccatgaggcacgcacagtgacttatttaagacttcccccttaatttatctgcccccaggatgcgtcagtctgttcagtggtcagcaggccccccaccccccgccgactgccctcgccatcgtggtcagacccccctcccaacacaacacgctgctggtctgtgtcagcctttgtaacgtgggaggctctgccgtgtcttccgggtgaactgtatttggattgcgcgcattgtcac

SEQ ID NO: 70071 - DNA, 581 bp, Homo sapiens
agccactggcccaggcagaagtctccttgagcccactgggtcatatgcgtgtcaccacacgtgaactagtgtggtggctgcctgcggacaccctcctgttctgagccctgggcctgtgttcttctcagacactcccagactgaggggtggtgtgtggcgggtggcagggtggctgtggagactggggatctggagcctggtgctggcacctggcctgagtttccgtgggcagctggcggggacctgtgctgctgctgctgactgtgggtgggcgggcggcgcctgggagtggctcttgctcaggaattgataggaaccctaamaactaggataccccctcctcggcccatgaggcacgcacagtgacttatttaagacttcccccttaatttatctgcccccaggatgcgtcagtctgttcagtggtcagcaggccccccaccccccgccgactgccctcgccatcgtggtcagacccccctcccaacacaacacgctgctggtctgtgtcagcctttgtaacgtgggaggctctgccgtgtcttccgggtgaactgtatttggattgcgcgcattgtcac

SEQ ID NO: 70072 - DNA, 581 bp, Homo sapiens
agccactggcccaggcagaagtctccttgagcccactgggtcatatgcgtgtcaccacacgtgaactagtgtggtggctgcctgcggacaccctcctgttctgagccctgggcctgtgttcttctcagacactcccagactgaggggtggtgtgtggcgggtggcagggtggctgtggagactggggatctggagcctggtgctggcacctggcctgagtttccgtgggcagctggcggggacctgtgctgctgctgctgactgtgggtgggcgggcggcgcctgggagtggctcttgctcaggaattgataggaaccctaaaractaggataccccctcctcggcccatgaggcacgcacagtgacttatttaagacttcccccttaatttatctgcccccaggatgcgtcagtctgttcagtggtcagcaggccccccaccccccgccgactgccctcgccatcgtggtcagacccccctcccaacacaacacgctgctggtctgtgtcagcctttgtaacgtgggaggctctgccgtgtcttccgggtgaactgtatttggattgcgcgcattgtcac

SEQ ID NO: 70073 - DNA, 578 bp, Homo sapiens
tagatccttttcaaacctgatattatgaatttgctaataatatcacctctgtaatgtaattatctgcttatcttcccttatattttaaactctgtctttgcttttctttttctctatgtgtgattctgaagaggcacaatgcaaatgattgtattgatattaatatgtgtgagtagtggtgtatacacaggtagataattgactgtctatgttatttttgctttaattaatgtaaattagtaaagtttattttgaaaatgttctctctattggaagattttaaaaaacaataacttacaccaaaacaattgtcctttgtgaaggttgaactcattcaggagataactgactcgtcatctaacatctcataagctctgaataaaaagtaaatcagtattttaagaaagtgcatttgtgattttggacttgttgtattaaggtgaaatataatgtggtttgtcatcaatctctcygtgtggcataaaagggctgacttgttgaaatttcataggtttttatttacagagaaaacaagaccctgttctgcccagagtcctatcagtccacacattcaaagg

SEQ ID NO: 70074 - DNA, 639 bp, Homo sapiens
ctccacacactttatgagcattaagataatcaatattcataagagccctctgaagtatgacccattatttctttccatttatagaaagaagactgaggttctgagaattttaataacttgtcaaaggccaactgctaataagtaataatctgttcgttatattctctctggaagaaagaagcaattccctgaggaaatgagacagtgggcaaataagtttggataaggaacctgtttaaaaattttcaaaaaagggagtgagggagcctgcccatggaatcgccataggctatgagcatacagggagatcatcccatgctatgagcatacagggagagcatcccatgccatgagcatgtggggtgagcatctcatgctatgagcatcccatgctatgagcatagggggtgagcttcccatgccatgaacacagggggtgagcatcccatgccatgaacatagggggtgagcatcccatgccatgaacataggtggtgagcatcccatgccacgaacatagggrgtgagcatcccacactatgagaatatggggaggtcatcccatgctatgagcacaggcggtgagcatcccaggctataatccaatgctatgagcataggcggtgagcatcccatgcc

SEQ ID NO: 70075 - DNA, 1296 bp, Homo sapiens
tagttttctacagctctacatagctctaccaaactcctctgggtcaaataactcttcctgttcaactgcaccagcctccagtcccttcccctcgtcagattcaattgtgttcatttccatcaatatctgtaagcaaagtatttttagagttgacctggggcttcccattcttccccccacatcacgtacaaagcaaaaacatacatacaaaaacagcacatacaaaacaaattacatacatacatgtataacaaaacacattgcgtataaaaacaaaatacactacctgctattgcctttggtcaaggaagtccaaaactaagaaaagagagagttcatttcttttttttttttcytttttctaatgagaacatggagaggccaggggagaaacaaaatatcaatttttcaattgctctcatttttactgaagtgatagttgacttggggtcaaaatattaaagctgaaagcaagacaatccctttcttaactctgagattctcccttcgtacattcccaagattgaaaccctctagagcccagcaagtaaatgaacaacatcaacatgctattgtttcctttgtctttcaaggccctgttcaaatgtctcctcctccatgaagacttcctgactatcattttgattcaagtcatttttttttttttttttttttttttgagacggaggctcgctctgtcaccaggctggagtgcagtggtgcaatctcggctcactgcaagctccgcctctcatgttcaagcgattttccttcctcagcctcctgagtagctgggactacaggtgcataccacctcacccagctaatttttgtaattttagtagagacagggtttcaccatgttggcattttttttcctttctttgttcccacagtaatttgctggatctctaccttgtactgtgatctgctttatatcctagatacgtgttaagtgtattaaatacaaagtttttgaaaatacctgccacatctcctaactgtatgttttagagtataccagtatgaaaccgctttatgtagtcccagcagagaatgggggaaaaaagttttggcttcattgtcatgaactgagatgagaaaatcataaatatgcccagagtttggcaaacatcatctccaaaactttattgggcagagtaattttaactggcttcgaagcattgacagtgatccagggtaattttatgacaagttctcttgcttaaaaacttaacttggacatcaaccaaatctgtatagtagcattcttatatttccagaatatcttgactg

SEQ ID NO: 70076 - DNA, 1140 bp, Homo sapiens
gttcataccagaacagagttagaggcttccgtccaagtcctttccaaaggcaaattaccatgcctctccttgaggcctgtgttcttgtcaagcccaggagccctgcasgatgtgatcccccaaagcaggccacctgccaccatgcacgcccacctccagagtccctgcttttcctagaaaggcatccaggacttctgtacatgaacctcagcctgcctggctcacagcatccctcctctcccctcctatcaacaaggctgttatcaaaataatttttttgtttttgaggctgagtctctctctgttgctcagactggagtacagtggagctatctcggctcactgcaacctccgcctcccgggttcaatctattctcctgcctcaacctcccgagtagctgggactacaggtgcccaccaccatgcctggctaatttttatatttttagtggagatggggttttgccatggtggccaggctggtctcgaatttctggcctcaagtgatctgcccacctcggcctcccaaaatgctgggattacaggcgtgagccaccgtgtctggcccaaaataaatttttaaaaaattttcatcaattatttatttatccttaatttttcaacctttaaaaaattttcaactattttagaatcagggggtacacgtgcaggttgttacatggggatattgtgtgatgccgaggtttgggcttctattgaacctaccacccaaacagtgagcatggtacccaacaggtggtttttcaacctttgccccttgtagtcttctccttcttgtagtccccagtttctatttttgttatctttgtgtccatgtgtagtcagtgtttagctcccacttttaagtgagagcatgtggtatttggttttcgttcctgtgttaatttgctgaggagaatggcttccagctgcatccatgttgctgcaaaagacacaattctattcttttttatggctgtgtagtattccatgttggatatgtaccacatgtaaaacaaattatttttggtctcttgaaatttccctgtattttcctgctctctcctctaattagggtggttgccttcccagatctccacttgtggaaggggagctactccagattcaactcaatggcct

SEQ ID NO: 70077 - DNA, 1140 bp, Homo sapiens
gttcataccagaacagagttagaggcttccgtccaagtcctttccaaaggcaaattaccatgcctctccttgaggcctgtgttcttgtcaagcccaggagccctgcaggatgtgatcccccaaagcaggccacctgccaccatgcacgcccacctccagagtccctgcttttcctagaaaggcatccaggacttctgtacatgaacctcagcctgcctggctcacagcatccctcctctcccctcctatcaacaaggctgttatcaaaataatttttttgtttttgaggctgagtctctctctgttgctcagactggagtacagtggagctatctcggctcactgcaacctccgcctcccgggttcaatctattctcctgcctcaacctcccgagtagctgggactacaggtgcccaccaccatgcctggctaatttttatatttttagtggagatggggttttgccatggtggccaggctggtctcgaatttctggcctcaagtgatctgcccacctcggcctcccaaaatgctgggattacaggcgtgagccaccgtgtctggcccaaaataaatttttaaaaaattttcatcaattatttatttatccttaatttttcaacctttaaaaaattttcaactattttagaatcagggggtacacgtgcaggttgttacatggggatattgtgtgatgccgaggtttgggcttctattgaacctaccacccaaacagtgagcatggtacccaacaggtggtttttcaacctttgccccttgtagtcttctccttcttgtagtccccagtttctatttttgttatctttgtgtccatgtgtagtcagtgtttagctcccacttttaagtgagagcatgtggtatttggttttcgttcctgtgttaayttgctgaggagaatggcttccagctgcatccatgttgctgcaaaagacacaattctattcttttttatggctgtgtagtattccatgttggatatgtaccacatgtaaaacaaattatttttggtctcttgaaatttccctgtattttcctgctctctcctctaattagggtggttgccttcccagatctccacttgtggaaggggagctactccagattcaactcaatggcct

SEQ ID NO: 70078 - DNA, 1140 bp, Homo sapiens
gttcataccagaacagagttagaggcttccgtccaagtcctttccaaaggcaaattaccatgcctctccttgaggcctgtgttcttgtcaagcccaggagccctgcaggatgtgatcccccaaagcaggccacctgccaccatgcacgcccacctccagagtccctgcttttcctagaaaggcatccaggacttctgtacatgaacctcagcctgcctggctcacagcatccctcctctcccctcctatcaacaaggctgttatcaaaataatttttttgtttttgaggctgagtctctctctgttgctcagactggagtacagtggagctatctcggctcactgcaacctccgcctcccgggttcaatctattctcctgcctcaacctcccgagtagctgggactacaggtgcccaccaccatgcctggctaatttttatatttttagtggagatggggttttgccatggtggccaggctggtctcgaatttctggcctcaagtgatctgcccacctcggcctcccaaaatgctgggattacaggcgtgagccaccgtgtctggcccaaaataaatttttaaaaaattttcatcaattatttatttatccttaatttttcaacctttaaaaaattttcaactattttagaatcagggggtacacgtgcaggttgttacatggggatattgtgtgatgccgaggtttgggcttctattgaacctaccacccaaacagtgagcatggtacccaacaggtggtttttcaacctttgccccttgtagtcttctccttcttgtagtccccagtttctatttttgttatctttgtgtccatgtgtagtcagtgtttagctcccacttttaagtgagagcatgtggtatttggttttcgttcctgtgttaatttgctgaggagaatggcttccagctgcatccatgytgctgcaaaagacacaattctattcttttttatggctgtgtagtattccatgttggatatgtaccacatgtaaaacaaattatttttggtctcttgaaatttccctgtattttcctgctctctcctctaattagggtggttgccttcccagatctccacttgtggaaggggagctactccagattcaactcaatggcct

SEQ ID NO: 70079 - DNA, 548 bp, Homo sapiens
agtgctgtgattacaggtgtgagccgccacgcccagccagcaggcagtggtgacatataggagtcagataagaagtgaacaagacagactaggatctccacgaggtggtggctttgtctgactgactgagattgatgcagtaatgatacccaaaggggaaactgatgaagtaaaatgagggggggtgggcagtttcactcaccttgtctccttctggcagccaagagggagaggtgggcagcaccgggaggccgggatggttttgctcagggccctgactgcctgaactgcttctctaaataacctgaggcctctttctgcactcragggccccatatcctctgatccctgtgttgctgcacccgaatcagcccaggctggggcagcatggattccaggtggagcagctgctgagtccctgctagtttctgagaatagctcacaagagcagaggtgagattctgcagagctttgtgggtctctaagccagtcatccatcttcctgccacctttggagccctccagggatgagcagaacccatgtttca

SEQ ID NO: 70080 - DNA, 1760 bp, Homo sapiens
tcctgcaagactagaacctacgtcttccggctgccagcaacacctcttcctctccatggaaacagatgacttcctgsaattccagactcaacctttggaagacaaagaccaaccctgggtggcccagattccttagtgactttggaaagttagcgcccagcttttagatctggagaccaaggaagatagagcaagctgagagtaacattcattcacacacacacatacacacatgcacacgcacacacacacacacacacaccaggcttgaggaaaagaatcccatgagaaaaataattgcaagacaggcttaatagctaacattgactgagtgcttagtctttgccaggcactctgctcagccattttacatgcattttttttttaattctcaataacccagtgatgggagctattactgtacctgttttacacatgaaaaactgaagctcacagacactgagccctttccccaaagctgcacagctactgaatggtgtggccaggctgtctgactacagaccccacgcatattttttcttttacagaaagaataaatagaaatcatttgttgaaatagcacattatagacaacttcctgagttgcaaattttacccctcttttactcagagatactttaagacttctcttttaaggattttaagttgcttagagtggagcttgttaagctgtacacacacgtgagtcactggggatcttgttaaaatgcagattctgatttgcagatggggatgccctgaattcttggtctctgaggccctctcaggtgggatctctgatggtggtctacacacacatcctaacacaacactcacacacacacgtaccgtagtgccaatactgggagactgaaattctatattttatatgcgcacctaagcttcctcagaaaaagaaagaaatgcaaatacttcatcactaagaatttaaaggagcacattgtggcttccagcgtcagaagcaggaaccattaatctagtggggatgacaggaaatgaaatgtaagaaagctgattagcagcacctttaaaaattagacagctcagctccagaaagggaaataaaagtttggaatctgagctttccctggcataaaagggcagaatagctcttttcaaaatctcgagtgacttttagttgttttgttgttgttgttttctcatcacctccttaaaatcagctcttacactgcctcttgggggtgcagataatccgagcagacttggactgctgccatgaatacacagtctcactcctttgctgctcctcaatattttattttctttcctgtggagaggtcggcgaaggtgaggttgtgctgctggtgattaattgtggtaataaacagggtgagagaaagaactggaaacgcgagaggggttggagatttatctgaaaacatggatcctgggtaaataacgggatgactgtgagatgattacaggctgaattgtgtcctccccaaaagatatgtgcatacctcagtgatattgcgagtttagttccagaccatcaaaatagagtgagtcacgcaaactttttggtttcccagttcatagaaaagtcatgtttacactataccgtagtctattaaatgtgcaatgccattaggtctaaaaagtgtacttaccttaacaaaaaaaatactgctaaaattctgacacagaggaagaaagtaagcatatgcttttggagaaatggcaccgataagacttgctcaatgtggggttgccataac

SEQ ID NO: 70081 - DNA, 1760 bp, Homo sapiens
tcctgcaagactagaacctacgtcttccggctgccagcaacacctcttcctctccatggaaacagatgacttcctgcaattccagactcaacctttggaagacaaagaccaaccctgggtggcccagattccttagtgactttggaaagttagcgcccagcttttagatctggagaccaaggaagatagagcaagctgagagtaacattcattcacacacacacatacacacatgcacacgcacacacacacacacacacaccaggcttgaggaaaagaatcccatgagaaaaataattgcaagacaggcttaatagctaacattgactgagtgcttagtctttgccaggcactctgctcagccattttacatgcattttttttttaattctcaataacccagtgatgggagctattactgtacctgttttacacatgaaaaactgaagctcacagacactgagccctttccccaaagctgcacagctactgaatggtgtggccaggctgtctgactrcagaccccacgcatattttttcttttacagaaagaataaatagaaatcatttgttgaaatagcacattatagacaacttcctgagttgcaaattttacccctcttttactcagagatactttaagacttctcttttaaggattttaagttgcttagagtggagcttgttaagctgtacacacacgtgagtcactggggatcttgttaaaatgcagattctgatttgcagatggggatgccctgaattcttggtctctgaggccctctcaggtgggatctctgatggtggtctacacacacatcctaacacaacactcacacacacacgtaccgtagtgccaatactgggagactgaaattctatattttatatgcgcacctaagcttcctcagaaaaagaaagaaatgcaaatacttcatcactaagaatttaaaggagcacattgtggcttccagcgtcagaagcaggaaccattaatctagtggggatgacaggaaatgaaatgtaagaaagctgattagcagcacctttaaaaattagacagctcagctccagaaagggaaataaaagtttggaatctgagctttccctggcataaaagggcagaatagctcttttcaaaatctcgagtgacttttagttgttttgttgttgttgttttctcatcacctccttaaaatcagctcttacactgcctcttgggggtgcagataatccgagcagacttggactgctgccatgaatacacagtctcactcctttgctgctcctcaatattttattttctttcctgtggagaggtcggcgaaggtgaggttgtgctgctggtgattaattgtggtaataaacagggtgagagaaagaactggaaacgcgagaggggttggagatttatctgaaaacatggatcctgggtaaataacgggatgactgtgagatgattacaggctgaattgtgtcctccccaaaagatatgtgcatacctcagtgatattgcgagtttagttccagaccatcaaaatagagtgagtcacgcaaactttttggtttcccagttcatagaaaagtcatgtttacactataccgtagtctattaaatgtgcaatgccattaggtctaaaaagtgtacttaccttaacaaaaaaaatactgctaaaattctgacacagaggaagaaagtaagcatatgcttttggagaaatggcaccgataagacttgctcaatgtggggttgccataac

SEQ ID NO: 70082 - DNA, 675 bp, Homo sapiens
gaggattccaataggggcagcatgatagccaagcagagatgttgtgggataattcatttatttagttcagctcctactctctatcagaccctgtgcccagtgcttggaatacagtggtgagtaacatacaagcctgtcttcaaaggatcttagagtcttaaatgggaaagctagacacacacagttaatagataggcctgggccaggggacagagataaggctggggcagagaggaaagtgatgtaatgggtctctagtttccacaatggaatgttggtatcagggactgaagtggatcgcttaacatcctgtgcccaaggcacagttgtggcaccttggaagtttttttttttkttgttgttgttgttttttttgagacagtctcgctctatcgcccaggatggagttcagtggcatgatctcggctcactgcaacctctgcctcccaggctcaaacaattcttgtgcctcagcctcccaagtacctgggattacaggtgtgtgccaccacacctggctaatttttgtattttttagtagagatggggttttgccatgttggccaggctggtcttgaactcctggtctcaagtgatctgcctgcttcagcatctcaaactgctgggattataggcgtgagccaccgcatctggccctgcatcttgcaagtcttt

SEQ ID NO: 70083 - DNA, 675 bp, Homo sapiens
gaggattccaataggggcagcatgatagccaagcagagatgttgtgggataattcatttatttagttcagctcctactctctatcagaccctgtgcccagtgcttggaatacagtggtgagtaacatacaagcctgtcttcaaaggatcttagagtcttaaatgggaaagctagacacacacagttaatagataggcctgggccaggggacagagataaggctggggcagagaggaaagtgatgtaatgggtctctagtttccacaatggaatgttggtatcagggactgaagtggatcgcttaacatcctgtgcccaaggcacagttgtggcaccttggaagtttttttttttgttgttgttgttgttktttttgagacagtctcgctctatcgcccaggatggagttcagtggcatgatctcggctcactgcaacctctgcctcccaggctcaaacaattcttgtgcctcagcctcccaagtacctgggattacaggtgtgtgccaccacacctggctaatttttgtattttttagtagagatggggttttgccatgttggccaggctggtcttgaactcctggtctcaagtgatctgcctgcttcagcatctcaaactgctgggattataggcgtgagccaccgcatctggccctgcatcttgcaagtcttt

SEQ ID NO: 70084 - DNA, 675 bp, Homo sapiens
gaggattccaataggggcagcatgatagccaagcagagatgttgtgggataattcatttatttagttcagctcctactctctatcagaccctgtgcccagtgcttggaatacagtggtgagtaacatacaagcctgtcttcaaaggatcttagagtcttaaatgggaaagctagacacacacagttaatagataggcctgggccaggggacagagataaggctggggcagagaggaaagtgatgtaatgggtctctagtttccacaatggaatgttggtatcagggactgaagtggatcgcttaacatcctgtgcccaaggcacagttgtggcaccttggaagtttttttttttgttgttgttgttgttttttttgagasagtctcgctctatcgcccaggatggagttcagtggcatgatctcggctcactgcaacctctgcctcccaggctcaaacaattcttgtgcctcagcctcccaagtacctgggattacaggtgtgtgccaccacacctggctaatttttgtattttttagtagagatggggttttgccatgttggccaggctggtcttgaactcctggtctcaagtgatctgcctgcttcagcatctcaaactgctgggattataggcgtgagccaccgcatctggccctgcatcttgcaagtcttt

SEQ ID NO: 70085 - DNA, 1400 bp, Homo sapiens
ccagtaaaacctaaagggctctccctcccactcattgttacagctataacaacattgaaaccccaagagagggatgtaggaaggaagagtgtggaccttggtgcatggaagacttgagtgactttctgagctccaaaccttaatatttgtggttttagcaaattatttactctctccaaacctcagtcctcactcaggctcattatctgttaaatagggataagtatggcacctatgtcttaagtaggagcaaaaggagcaagtaaaagaatgtatgtgaaggactcagtattgtgactggcccacggtaagtaatcaacagatgctgagtttgtaataatacatgattgataatatctgatgaataacgtatgattgataataacattaccttggtcagggtcagtagagaaacccagcatatcaggtagatcagctgaggtcaggtttccccatcacttggtttctgagaatagccccggagggatttgcaagttcagccccatcccttggccagatttgcaatgtcaggaggacatggctggcaggctcattctgtcctcagatttcttaccccatggggatcaaggagggrgagcccaagccttggattataaagacattcttgcatctccctgtgtaaaatgataatgccaaaggatcctggcaccaggcaagggcacgtggcccccagccaaggctccttgtccccacatcgattactaggtgcctactgatattagaccctggggactgtcttgaaagtccttgtttctttccccttaatgtctttgtttatttaatagctgcattgtacaagtgggaatggtgtgtatttctgtctcctggcagtggtggttgactttaaaaaaaatgttttaatcccagcactctgggaggccaaggtgggaggatcgcttgaggccaggagtccaagagcaacctaggcaacatggcgagatcctatctctacaaaaaaatttttttgaaatttaaaaatattttaatgcactttattttttagagcaactttaggtttatagcaaaacttagtggaaagtacagagatttcccatatactccctgccttcatacacagcatagcctccccgactatcaacatcccacaccacgtggtacatttgttatagtccattgacacatcattatcgcccttcgtccgcagtgtacactagggttcactcttggtgttgcactttctatgggagttgttgacgttttacaccagtagttgtcctgcggaagcctatccaaatagctcggggcaaggctggtgatgctaatttatttccaaataacctgttttggagaaggggtttaagattgagcagaagtgcaaaagaaagaaataaaggcatggaggaaagaaaagagagaaa

SEQ ID NO: 70086 - DNA, 628 bp, Homo sapiens
ttttttctgccttccgtctccttgggagtcacctgggttctggccctacatgtcccagcccggcccagrgcttagagccgggagatgctcagtccatggtgccggctgctccctgggccaggagagcccttggtggctctgtcacctctcctgggtgaccctggcctctgccctggggacaacctcattcctctggattgccccatcttccctgggacccctgcaagccccattggccttacttgactccgaatctttgtatgaacatcatgtgtttctgcagggtgtggctgacatctagctggatgcagtggatgattctggaggacctcttgcccttctccttcatgacctgtagggcagggccaagaggaggaagcagcctcagaacagacaaaagactccctgccccaaacggcagtcatcccacagtcagcacttctggaaggaaggaaggaaggtttccttctgcagaaagctcctttttaccttgtttctgacaccagggagggtcagcagagcccagcgcacctgtggtgcctgagttaccatctatgcccaggatgtgcgtctgaccacagcccccactcccaacccaggctcaacgttccctccagctggagtcctg

SEQ ID NO: 70087 - DNA, 2185 bp, Homo sapiens
tatgtctgtcacactgagcctctcctcttctccccaaggtcagaagcccaccctctccaggatatagtcagaaataacttcccgaaagaggggcgagcggggctggggtgcctttcccggctayacaagcctctgccacaggcacgcaggcatcaaatgtttaccacagacctgggcagaccattttattaatattaataagtaaccaggaacaaagggcccctttatttttagctttctctaattgtgtagtaattactcatctacaaaacaaatgaggccctgctcgcggttgccatggtaccgggtgcccagcctccctgcaggatgattggccaagaagcccgctgctcccgccttggccccgcccctccaccccgccactggctcagagcaaagccccagcaactgggcagccaatcccctcccagccctaaggccgggcggggcttcccagcgaccttccagaagcggtcctcgcagcccacaggaaaaaatgttgactcatccctacagaggacgtctgtcttcccagagaagcccgcccgtgctccatcgcctagtttcttctgggcattggctaacttccctcagccttgtttcagctaaaggttcccttccaataattctcttcaggctggcttcctcttacacgaccacgcctcctcccggcctcctttgtctgacattggtctgagtgcattcagggaccagaaacctgtcagccaaagccaggcagtgtctgcaacagcaggagcaggtgcaaaaaatacttataccgcctcctgaggccactcgtaaatgatttggggttatctcctcccccaaggataatggagaatttagttaagagcagctgtggttttttcttgagtgtctgttttaaggttgcagagcctggctcagccatcccagggctggtacgatggagcgtccgctgacagtggcttagaggacagaatgacgacaggcttaggctcaaatcctgtctctgccacttcagataagctactatcctttccaaactacagtttttaaatctttaaaatgggaatgagaatgacagtgctcacttcatagggttatgagaatttaatgggataaggcaggtgggcttgacatggtacttggctcactcataatacatgtgagctattattattaacatctattatcattattgtattcaaattgactaggatgtgtctctagcattctattgaccacttacaagataccttcccctggaaccctcttagcctataccacggagtggctgccatcgtggtgttctcatcccctgacagatctaatttcaacagcccatcacagctgttcaaaggcattatttgtctgcttcctgttctgtaggatcccaagctgggaagggagacctttttaaaaaaattaatattaataagcaaccaggaacaaagggccccttcattttctgtgttttctaattgcatagtaattacttatccatatgaagaatgaggactaggctgactttgccgccgggaggcctgatggtttgtattgttggggaaagcaggtgccacccgcagacacatgcaaaatatcttccaaggacccataatctcacctttcattcaggagagctcacccatgaggaagaggactgaggacatgggcaaaggagggggtgccccaggtagggtgaatcaggtatggctttctggcactttgagccaaattttgacagagagggcaaagacaaggacagagggaaatggagtggcagaaagaaaggggacagtggccacctcaagggcaaaggaatgggaaacaatagccccaagcagggaataaataacaacttgttggcagaagcaaaggaaagttaagggaactaaggcagagatttgccatggaatgccctcctgtgtctgctttctcaatgcctctcactccacaccccttgctccaggtcacgagcccagccccagccccagaccccaggattaggggtcaggctgttctttgtggagctacagccaggcttatcttctttagatggttctgtccttactgagcgccacttgcatgaagaatacgaacctccctctcctgtgactatatcaacatggctttcaagatctcccagaaccttgactgtctctatctcttcaagcccatattccctgcctagcagacagcttcc

SEQ ID NO: 70088 - DNA, 559 bp, Homo sapiens
tctgaagatgggcacagccaggtgccacttgccaccagctgtgtggcccaggaaggkccgtgcagccccatgtcacatggtgagaatgaggctctactaagagtgatatctgcacccccaaccagatgagatggatgttcatagaaagggtaagtccaggtggaaaggaggacccttcataaaggggatcagattgcatcttcctgaaaggggacccaggctacctggtttatgagtgagaacagccaggatgaagagtctcggagctctctaggacctgggcgtgctttcatttctcccagctagctgtcttgcatggccctgctagggggactcagaaaggggctgggagaggttcgggatccatgcacagcatgagggggaccggaggtgggaagtgggtaaagtgggcatacagtgaggacactgaaaagaaagaccacaaagaaaacatcaggatagttgggaggtgacatgactgctgtgtaatgtcacgaagtcacaggatccccggggcatggcaggggttcgcagaatctacctgatggggatgaggaga

SEQ ID NO: 70089 - DNA, 559 bp, Homo sapiens
tctgaagatgggcacagccaggtgccacttgccaccagctgtgtggcccaggaaggtccgtgcagccccatgtcacatggtgagaatgaggctctactaagagtgatatctgcacccccaaccagatgagatggatgttcatagaaagggtaagtccaggtggaaaggaggacccttcataaaggggatcagattgcatcttcctgaaaggggacccaggctacctggtttatgagtgagaacagccaggatgaagagtctcggagctctctaggacctgggcgtgctttcatttctcccagctagctgtcttgcatggccctgctagggggactcagaaaggggctgggagaggttcgggatccatgcacagcatgasggggaccggaggtgggaagtgggtaaagtgggcatacagtgaggacactgaaaagaaagaccacaaagaaaacatcaggatagttgggaggtgacatgactgctgtgtaatgtcacgaagtcacaggatccccggggcatggcaggggttcgcagaatctacctgatggggatgaggaga

SEQ ID NO: 70090 - DNA, 534 bp, Homo sapiens
agcacactaggtaacacaccaagcaggggaacctgtctttcactacataggcaagatgctacgggaaatgggctctgggtttacacagattatgactcagttctctactgttgtgaagctgtgtttggataaatccctcaacttttctgagtcttattttttcatttgtaaaatgtagatagaagacctactttcccacattgctctcaggtttaaagtacgtcaattaggatacagcaaagtctgtttgatactgaaaactttccagcaacaatgaaccttagaacaagtcatctctcatctttgctcttgcctgtaactactaagcgactactccatcttctgttcttagggattttaaattgttgrcgtttttgatttagtcaggaatgcgttgtatggggatatcaaacctgcatgctctccaagcattgactgtagtctgatcttagtaggtcgtgcacatataattttactatttctcaatttatttcggtgctgatgtaattagtaaaatacgatttaagagtgtta

SEQ ID NO: 70091 - DNA, 1800 bp, Homo sapiens
acttgaaggagacttttgcattcctaatttggcggtggatgctgggcgtggtggtttactcctgtgattgcagcactttgggaggccgaggcgggcagatcgcttgaggtcaggagtttgaaaccagtctggccaacatggtgaaaccccatctctactaaaaatatgaaaaaaaaaaaaaaaaaagccaggtgaggtggtgcacgcctgtcatcccagctactcgggaggctgaggcaggagaacctcttgaacccgggagktggaggttgcagtgagctgagatcgtgcctttgccctccagcctcggcaacagagcgaaactctgtctcaaaaaggaaaaaaaaaattagctcggcgtggtggtgcacaactgtagacccagctactcgggaggctgaggtgagaggatggcttgagcccggcaggtggaggctacagggagctatgatcacaccactgcactccagcttgggcaacaaagcaagaccctgcctcaaataatagtaatagtaataataataataataatttagaggtgggtctggaatctactggggagaggggtgcggcttcgaggaacctctggggatccccagagctgtgaacctgactgattctttggttctgtgcatcgttttggggtcagaccttgggatgagcattttatagggcccgtatccttcatagccatccatgggcttcagtttccctctctgggaagtagcaacagcccacctagggctgggagggggcagctgggaggatggagggaggagacggggcctgtgcatggctggccctggggacaccgctggccggcacacacctgaacatggtggaattcctgggcctcaggatccaatcaaatgttgtgaaatctccactggcaagctctgcctctgtgtaactcagtttccccacctgctccaggccagggcaggggctctgtcatctcctaacctcttccccttgcaaacggcacatctgtaagttctcgggtcccaggggccttcatgccaggcacgccccgattgaagaaactgaggcacagagaggctgggggtgacgcggcaggtgacccggcccaggggactgaggtctttacggctggacgatggtcgcctgcatcccacccgccgtgacgacggcgtctccggcacaattagccgagcgggaacgctcccagctaattaattcagctgcgctgggcccggtgacgggggccgcctcctaatgaggcagcccaggcacaaagacccctgtgtgtgccccgccccgcccctgcccagcgcggggtggacgcacggaggcacagagggccggccggccaccgtgctgagcaccgcgggggaggctccaccatgccccactccacagaggaccccgaggctcagagagggaggcgacccccacagcccattcatgccgagacccccaccccaaactgcaacgtgaccactgggacagagaggaccaaggacagaatgagatcagggatcatgagaggcatcccagtgctgactgtgatgctgttacaaaaacacaatagtgtccttccctccattttaagtacaattgcatggattttagtgcattgagacttgtgcagccatcagctctgattccagaacattccatcaccccaaaaggaagccttgtccccatcagccgtcactccttatcccctcccctggcaccaacgtatcccctccttccctgtctctgtggatgggcctgtcctggacgtttcatggaaatgggtcacacactgtgtggccttgcgtgtctggcatctct

SEQ ID NO: 70092 - DNA, 1800 bp, Homo sapiens
acttgaaggagacttttgcattcctaatttggcggtggatgctgggcgtggtggtttactcctgtgattgcagcactttgggaggccgaggcgggcagatcgcttgaggtcaggagtttgaaaccagtctggccaacatggtgaaaccccatctctactaaaaatatgaaaaaaaaaaaaaaaaaagccaggtgaggtggtgcacgcctgtcatcccagctactcgggaggctgaggcaggagaacctcttgaacccgggagttggaggttgcagtgagctgagatcgtgcctttgccctccagcctcggcaacagagcgaaactctgtctcaaaaaggaaaaaaaaaattagctcggcgtggtggtgcacaactgtagacccagctactcgggaggctgaggtgagaggatggcttgagcccggcaggtggaggctacagggagctatgatcacaccactgcactccagcttgggcaacaaagcaagaccctgcctcaaataatagtaatagtaataataataataataatttagaggtgggtctggaatctactggggagaggggtgcggcttcgaggaacctctggggatccccagagctgtgaacctgactgattctttggttctgtgcatcgttttggggtcagaccttgggatgagcattttatagggcccgtatccttcatagccatccatgggcttcagtttccctctctgggaagtagcaacascccacctagggctgggagggggcagctgggaggatggagggaggagacggggcctgtgcatggctggccctggggacaccgctggccggcacacacctgaacatggtggaattcctgggcctcaggatccaatcaaatgttgtgaaatctccactggcaagctctgcctctgtgtaactcagtttccccacctgctccaggccagggcaggggctctgtcatctcctaacctcttccccttgcaaacggcacatctgtaagttctcgggtcccaggggccttcatgccaggcacgccccgattgaagaaactgaggcacagagaggctgggggtgacgcggcaggtgacccggcccaggggactgaggtctttacggctggacgatggtcgcctgcatcccacccgccgtgacgacggcgtctccggcacaattagccgagcgggaacgctcccagctaattaattcagctgcgctgggcccggtgacgggggccgcctcctaatgaggcagcccaggcacaaagacccctgtgtgtgccccgccccgcccctgcccagcgcggggtggacgcacggaggcacagagggccggccggccaccgtgctgagcaccgcgggggaggctccaccatgccccactccacagaggaccccgaggctcagagagggaggcgacccccacagcccattcatgccgagacccccaccccaaactgcaacgtgaccactgggacagagaggaccaaggacagaatgagatcagggatcatgagaggcatcccagtgctgactgtgatgctgttacaaaaacacaatagtgtccttccctccattttaagtacaattgcatggattttagtgcattgagacttgtgcagccatcagctctgattccagaacattccatcaccccaaaaggaagccttgtccccatcagccgtcactccttatcccctcccctggcaccaacgtatcccctccttccctgtctctgtggatgggcctgtcctggacgtttcatggaaatgggtcacacactgtgtggccttgcgtgtctggcatctct

SEQ ID NO: 70093 - DNA, 1800 bp, Homo sapiens
acttgaaggagacttttgcattcctaatttggcggtggatgctgggcgtggtggtttactcctgtgattgcagcactttgggaggccgaggcgggcagatcgcttgaggtcaggagtttgaaaccagtctggccaacatggtgaaaccccatctctactaaaaatatgaaaaaaaaaaaaaaaaaagccaggtgaggtggtgcacgcctgtcatcccagctactcgggaggctgaggcaggagaacctcttgaacccgggagttggaggttgcagtgagctgagatcgtgcctttgccctccagcctcggcaacagagcgaaactctgtctcaaaaaggaaaaaaaaaattagctcggcgtggtggtgcacaactgtagacccagctactcgggaggctgaggtgagaggatggcttgagcccggcaggtggaggctacagggagctatgatcacaccactgcactccagcttgggcaacaaagcaagaccctgcctcaaataatagtaatagtaataataataataataatttagaggtgggtctggaatctactggggagaggggtgcggcttcgaggaacctctggggatccccagagctgtgaacctgactgattctttggttctgtgcatcgttttggggtcagaccttgggatgagcattttatagggcccgtatccttcatagccatccatgggcttcagtttccctctctgggaagtagcaacagcccacctagggctgggagggggcagctgggaggatggagggaggagacggggcctgtgcatggctggcccyggggacaccgctggccggcacacacctgaacatggtggaattcctgggcctcaggatccaatcaaatgttgtgaaatctccactggcaagctctgcctctgtgtaactcagtttccccacctgctccaggccagggcaggggctctgtcatctcctaacctcttccccttgcaaacggcacatctgtaagttctcgggtcccaggggccttcatgccaggcacgccccgattgaagaaactgaggcacagagaggctgggggtgacgcggcaggtgacccggcccaggggactgaggtctttacggctggacgatggtcgcctgcatcccacccgccgtgacgacggcgtctccggcacaattagccgagcgggaacgctcccagctaattaattcagctgcgctgggcccggtgacgggggccgcctcctaatgaggcagcccaggcacaaagacccctgtgtgtgccccgccccgcccctgcccagcgcggggtggacgcacggaggcacagagggccggccggccaccgtgctgagcaccgcgggggaggctccaccatgccccactccacagaggaccccgaggctcagagagggaggcgacccccacagcccattcatgccgagacccccaccccaaactgcaacgtgaccactgggacagagaggaccaaggacagaatgagatcagggatcatgagaggcatcccagtgctgactgtgatgctgttacaaaaacacaatagtgtccttccctccattttaagtacaattgcatggattttagtgcattgagacttgtgcagccatcagctctgattccagaacattccatcaccccaaaaggaagccttgtccccatcagccgtcactccttatcccctcccctggcaccaacgtatcccctccttccctgtctctgtggatgggcctgtcctggacgtttcatggaaatgggtcacacactgtgtggccttgcgtgtctggcatctct

SEQ ID NO: 70094 - DNA, 1800 bp, Homo sapiens
acttgaaggagacttttgcattcctaatttggcggtggatgctgggcgtggtggtttactcctgtgattgcagcactttgggaggccgaggcgggcagatcgcttgaggtcaggagtttgaaaccagtctggccaacatggtgaaaccccatctctactaaaaatatgaaaaaaaaaaaaaaaaaagccaggtgaggtggtgcacgcctgtcatcccagctactcgggaggctgaggcaggagaacctcttgaacccgggagttggaggttgcagtgagctgagatcgtgcctttgccctccagcctcggcaacagagcgaaactctgtctcaaaaaggaaaaaaaaaattagctcggcgtggtggtgcacaactgtagacccagctactcgggaggctgaggtgagaggatggcttgagcccggcaggtggaggctacagggagctatgatcacaccactgcactccagcttgggcaacaaagcaagaccctgcctcaaataatagtaatagtaataataataataataatttagaggtgggtctggaatctactggggagaggggtgcggcttcgaggaacctctggggatccccagagctgtgaacctgactgattctttggttctgtgcatcgttttggggtcagaccttgggatgagcattttatagggcccgtatccttcatagccatccatgggcttcagtttccctctctgggaagtagcaacagcccacctagggctgggagggggcagctgggaggatggagggaggagacggggcctgtgcatggctggccctggggacaccgctggccggcacacacctgaacrtggtggaattcctgggcctcaggatccaatcaaatgttgtgaaatctccactggcaagctctgcctctgtgtaactcagtttccccacctgctccaggccagggcaggggctctgtcatctcctaacctcttccccttgcaaacggcacatctgtaagttctcgggtcccaggggccttcatgccaggcacgccccgattgaagaaactgaggcacagagaggctgggggtgacgcggcaggtgacccggcccaggggactgaggtctttacggctggacgatggtcgcctgcatcccacccgccgtgacgacggcgtctccggcacaattagccgagcgggaacgctcccagctaattaattcagctgcgctgggcccggtgacgggggccgcctcctaatgaggcagcccaggcacaaagacccctgtgtgtgccccgccccgcccctgcccagcgcggggtggacgcacggaggcacagagggccggccggccaccgtgctgagcaccgcgggggaggctccaccatgccccactccacagaggaccccgaggctcagagagggaggcgacccccacagcccattcatgccgagacccccaccccaaactgcaacgtgaccactgggacagagaggaccaaggacagaatgagatcagggatcatgagaggcatcccagtgctgactgtgatgctgttacaaaaacacaatagtgtccttccctccattttaagtacaattgcatggattttagtgcattgagacttgtgcagccatcagctctgattccagaacattccatcaccccaaaaggaagccttgtccccatcagccgtcactccttatcccctcccctggcaccaacgtatcccctccttccctgtctctgtggatgggcctgtcctggacgtttcatggaaatgggtcacacactgtgtggccttgcgtgtctggcatctct

SEQ ID NO: 70095 - DNA, 1800 bp, Homo sapiens
acttgaaggagacttttgcattcctaatttggcggtggatgctgggcgtggtggtttactcctgtgattgcagcactttgggaggccgaggcgggcagatcgcttgaggtcaggagtttgaaaccagtctggccaacatggtgaaaccccatctctactaaaaatatgaaaaaaaaaaaaaaaaaagccaggtgaggtggtgcacgcctgtcatcccagctactcgggaggctgaggcaggagaacctcttgaacccgggagttggaggttgcagtgagctgagatcgtgcctttgccctccagcctcggcaacagagcgaaactctgtctcaaaaaggaaaaaaaaaattagctcggcgtggtggtgcacaactgtagacccagctactcgggaggctgaggtgagaggatggcttgagcccggcaggtggaggctacagggagctatgatcacaccactgcactccagcttgggcaacaaagcaagaccctgcctcaaataatagtaatagtaataataataataataatttagaggtgggtctggaatctactggggagaggggtgcggcttcgaggaacctctggggatccccagagctgtgaacctgactgattctttggttctgtgcatcgttttggggtcagaccttgggatgagcattttatagggcccgtatccttcatagccatccatgggcttcagtttccctctctgggaagtagcaacagcccacctagggctgggagggggcagctgggaggatggagggaggagacggggcctgtgcatggctggccctggggacaccgctggccggcacacacctgaacatggtggaattcctgggcctcaggatccaatcaaatgttgtgaaatctccactggcaagctctgcctctgtgtaactcagtttccccacctgctccaggccagggcaggggctctgtcatctcctaacctcttccccttgcaaacggcacatctgtaagttctygggtcccaggggccttcatgccaggcacgccccgattgaagaaactgaggcacagagaggctgggggtgacgcggcaggtgacccggcccaggggactgaggtctttacggctggacgatggtcgcctgcatcccacccgccgtgacgacggcgtctccggcacaattagccgagcgggaacgctcccagctaattaattcagctgcgctgggcccggtgacgggggccgcctcctaatgaggcagcccaggcacaaagacccctgtgtgtgccccgccccgcccctgcccagcgcggggtggacgcacggaggcacagagggccggccggccaccgtgctgagcaccgcgggggaggctccaccatgccccactccacagaggaccccgaggctcagagagggaggcgacccccacagcccattcatgccgagacccccaccccaaactgcaacgtgaccactgggacagagaggaccaaggacagaatgagatcagggatcatgagaggcatcccagtgctgactgtgatgctgttacaaaaacacaatagtgtccttccctccattttaagtacaattgcatggattttagtgcattgagacttgtgcagccatcagctctgattccagaacattccatcaccccaaaaggaagccttgtccccatcagccgtcactccttatcccctcccctggcaccaacgtatcccctccttccctgtctctgtggatgggcctgtcctggacgtttcatggaaatgggtcacacactgtgtggccttgcgtgtctggcatctct

SEQ ID NO: 70096 - DNA, 1800 bp, Homo sapiens
acttgaaggagacttttgcattcctaatttggcggtggatgctgggcgtggtggtttactcctgtgattgcagcactttgggaggccgaggcgggcagatcgcttgaggtcaggagtttgaaaccagtctggccaacatggtgaaaccccatctctactaaaaatatgaaaaaaaaaaaaaaaaaagccaggtgaggtggtgcacgcctgtcatcccagctactcgggaggctgaggcaggagaacctcttgaacccgggagttggaggttgcagtgagctgagatcgtgcctttgccctccagcctcggcaacagagcgaaactctgtctcaaaaaggaaaaaaaaaattagctcggcgtggtggtgcacaactgtagacccagctactcgggaggctgaggtgagaggatggcttgagcccggcaggtggaggctacagggagctatgatcacaccactgcactccagcttgggcaacaaagcaagaccctgcctcaaataatagtaatagtaataataataataataatttagaggtgggtctggaatctactggggagaggggtgcggcttcgaggaacctctggggatccccagagctgtgaacctgactgattctttggttctgtgcatcgttttggggtcagaccttgggatgagcattttatagggcccgtatccttcatagccatccatgggcttcagtttccctctctgggaagtagcaacagcccacctagggctgggagggggcagctgggaggatggagggaggagacggggcctgtgcatggctggccctggggacaccgctggccggcacacacctgaacatggtggaattcctgggcctcaggatccaatcaaatgttgtgaaatctccactggcaagctctgcctctgtgtaactcagtttccccacctgctccaggccagggcaggggctctgtcatctcctaacctcttccccttgcaaacggcacatctgtaagttctcgggtcccaggggccttcatgccaggcacgccccgattgaagaaactgaggcacagagaggctgggggtgacgcggcaggtgacccggcccaggggactgaggtctttacggctggacgatggtcgcctgcatcccacccgccgtgacgacggcgtctccggcacaattagccgagcgggaacgctcccagctaattaattcagctgcgctgggcccggtgacgggggccgcctcctaatgaggcagcccaggcacaaagacccctgtgtgtgccccgccccgcccctgcccagcgcggggtggacgcacggaggcacagagggccggccggccaccgtgctgagcaccgcgggggaggctccaccatgccccactccacagaggaccccgaggctcagagagggaggcgacccccacagcccattcatgccgagacccccaccccaaactgcaacgtgaccactgggacagagaggaccaaggacagaatgagatcagggatcaygagaggcatcccagtgctgactgtgatgctgttacaaaaacacaatagtgtccttccctccattttaagtacaattgcatggattttagtgcattgagacttgtgcagccatcagctctgattccagaacattccatcaccccaaaaggaagccttgtccccatcagccgtcactccttatcccctcccctggcaccaacgtatcccctccttccctgtctctgtggatgggcctgtcctggacgtttcatggaaatgggtcacacactgtgtggccttgcgtgtctggcatctct

SEQ ID NO: 70097 - DNA, 2008 bp, Homo sapiens
tttttttttttttttttttttgtatttttagtagagacgggttttctccatgttggtcaggctggtcttgaactcccgacctcaggtgatcctcccgtctcggcctcccaaagtgctgggattacaggccgcgcccggccatctccacctgcttgaaggtcttgccgtcgtagacgcccaccgtgctacccaccatcgcgggcaggagaagcacgtcccgcgggtgcgtcttcaccacttccggcttctccgtgggcggcgcccccttcttggccttgcgcaggcgcttgagcagcgagcgctgcttccgccacaggcccgggttcagccgccgccggcgcgcgctgttcagctgcatccgctgctccgaggacatgtccagtagctggtccaggtccacgccgcgctgggtgaagttgcggaaggtctgtttcttctgctgctgtacctctgccgtcttgctgcatcctcagaatagctctccaggcccttctttatgagacagggtcttgcctttgttgcccaggctggaatgcagtggtgtgatcatggctcactgcagtcttgacttcttgggctcaagggatcctcctgcctcagcctcccgagtagctcgaaccacaggtgcacaccaccatacctggctaatttttgattatttgtagagatggggtcttgctacggtgcccaggctgatctcaaactcctgggcccaagggatcctcttgcctcggcctcctaaaatgctgggatcacaggcgtgggtcaccgtgcccggcaagctctgggtcctyctgcacggtcgcctggtggagcagaaaccaccgccagcggctccccgtctatttgtctgtgcacattcctgggctcagacggtggcttccgaggccggaacttcggagtcacctgctccgcacttgagtctggaacgtctcagaccggacccctccctttacagcctgagagagggagagaccctgcccaggcctcccaggggcctgcccacccgacagctcctgactcccccaccctcattggtccagaaatggaaggcttcggcccaggagcgatcaatgcaccctaatggacatgtgtcggggggggggggaggggcgctgagtcgcaggagacacccttccctgtgcagagggggaaactgaggccactcccaggccccatgggtcactggcccgaagcagtgtgagccctgccgggtcaggggttgcatctggagcagcccagggagaatgaggctggggacccttcattccgggggtcattagggacaccccaccaggctgtgtgtgcccagggtggtctcttccccagctccgactgccccgccgggttttggggcttacggttctgtcctgggctcaagtcctggctcccaccaggcactgtggggcatcccctctgggtctggggtccacagtgcctgtctccaggcgtgagagaagcttctagagacaatctgtgagcatctttcccatccctgcctctccccagctcaagctccgaagggaacgtggatggcaggagagaggagggaggcgtggggcgagtttatctctcactggctttctccgcccccacctggcctcccctggggcttctgtgattctttgttttttttttgaggcagggtgtttctctgtcccccaggctggagtgcaatggtgctatcgtggctcactgcagcctccacctcctaggctcaagcaatcctcccacctcagcctctcgcgagtggctgggaccacaggcacgcggctccatgctagctaattttttttattttttgtagagatgaggtctcgctgtgttgcccagactggtcttgaactcctggcctctggtgatccttccacctcagcctcttgggtagttgagactgcaggcatgagccaccacacgtggctaatttttgtttatttatttatttatttttgtagagatggggtttcaccatgttgcccagactggtttcccaactcctgagctcaag

SEQ ID NO: 70098 - DNA, 1964 bp, Homo sapiens
agagatacagcaagtcggagagagacagagagacatggggagacagaggcagcgcaggggcggctgtgcagggcgatgggccgagggctccatcccggccttcctggcccctgggccccccgcctcccagctgtgactggcctgctctggccttgggctccgcctgacttttctgggtttggggttgagggtgcaggaggccctggcagggcaggactctgggtccccaggggccgcctcaccatcctgcccccggggtcacagaacttgggcatctccccatcagtgggcgacacgggcccagcagggactcgggaaggggctggggcaccctgggctctgctcagcccgtgtcccaggagcttggcaaggggcgcacagccagcccacagctaactgctgaggggaaccctcctctcccaggtgccagcccaggtgggggcagggagcctcaggccctaccctcgggtgctcacagcgtctcctggacttagcagaggtcggtgaggcccgaggaagcttcatgctggggtctcggtgcaggaggtggaggggggatgggaaaaggcttgaagggagggcccggatccatcaatggacactgaggctgcttggtgtctcctggaagatctgttcacatcctggcccctgaaacttgtgaatgggactttatttagaaatagggcctttgcrgccgggcgcggtggctcacgcctgtaatcccagcactttgggaggccgaggcaggcggatcacaaggtcagaagatcgagaccatcctggctaacacggtgaaaccccgtctctatgaaaaatacaaaaacaaaattagccgggcgtggtggcggcaggcgcctgtagtcccagctactcgggaggctgaggcaggagaatggtgtgaacccggaaggcggcgcttgcagtgagccgagatcgcgccaccgcactccaacctgggcgacacagcgacactccgtctcaaaaaaaaaaaaaaaaaaatagggccttggcagatgtgaccgagttatgacgaggtcgttcgagtgggcctggcgcagcgtgactggcatccatataaaatacacatgcattgattgggcactggtgaaagggaactacctcagtccccacctcaggatgtcgcataaccggtgtttatggcaccaaaaacttcatctctgtaaaccacttggaggggtgtctggcaccaagtccatgtccatgagtgtctgaaaatagcataaaaataaaatagaaaaaaagaaagagctggtgcctaccctcggggagcctacaggacgtgagcttgaaagagctggttatctccccgtctctctgtctctctctgtcttggaaatgtctaagggggcaggcaggagggcttcctggaggaggggtcctttgagctgagttcagaagggcgagaaggagccaggtttctcatggagcagccaatgcaaagggctgggggccacctggagcctggtgtgtccttcgggcagctggtgtggctggagcaggggatgccaagcctgctgagggcttcatgggccgcagggaggagtttggtttttctcctgagggcactggggagccacagcagagtttagagcagaagaaggacacaatttgtgccctgtgcccgtggtgagcggcgagcagggagggctgcctggaggcgggtaaggacctcagagcggaattctgccacagtgaagctttggaggaaatctttcttccttttctcttcttttcccatcacgggttgagaaattggagggaggggcattgctggggcttcctgtgcccgcgtgtgcggggggttctggggcctgctgcctgcctgagccagccccttttcccgccagaggcctctcgtcagtccccgggggggcccagtggtgaccttgggcctcggggaacatccagacctgggtcagtggcctcggcaagtgcccggggga

SEQ ID NO: 70099 - DNA, 1964 bp, Homo sapiens
agagatacagcaagtcggagagagacagagagacatggggagacagaggcagcgcaggggcggctgtgcagggcgatgggccgagggctccatcccggccttcctggcccctgggccccccgcctcccagctgtgactggcctgctctggccttgggctccgcctgacttttctgggtttggggttgagggtgcaggaggccctggcagggcaggactctgggtccccaggggccgcctcaccatcctgcccccggggtcacagaacttgggcatctccccatcagtgggcgacacgggcccagcagggactcgggaaggggctggggcaccctgggctctgctcagcccgtgtcccaggagcttggcaaggggcgcacagccagcccacagctaactgctgaggggaaccctcctctcccaggtgccagcccaggtgggggcagggagcctcaggccctaccctcgggtgctcacagcgtctcctggacttagcagaggtcggtgaggcccgaggaagcttcatgctggggtctcggtgcaggaggtggaggggggatgggaaaaggcttgaagggagggcccggatccatcaatggacactgaggctgcttggtgtctcctggaagatctgttcacatcctggcccctgaaacttgtgaatgggactttatttagaaatagggcctttgcggccgggcgcggtggctcacgcctgtaatcccagcactttgggaggccgaggcaggcggatcacaaggtcagaagatcgagaccatcctggctaacacggtgaaaccccgtctctatgaaaaatacaaaaacaaaattagccgggcgtggtggcggcaggcgcctgtagtcccagctactcgggaggctgaggcaggagaatggtgtgaacccggraggcggcgcttgcagtgagccgagatcgcgccaccgcactccaacctgggcgacacagcgacactccgtctcaaaaaaaaaaaaaaaaaaatagggccttggcagatgtgaccgagttatgacgaggtcgttcgagtgggcctggcgcagcgtgactggcatccatataaaatacacatgcattgattgggcactggtgaaagggaactacctcagtccccacctcaggatgtcgcataaccggtgtttatggcaccaaaaacttcatctctgtaaaccacttggaggggtgtctggcaccaagtccatgtccatgagtgtctgaaaatagcataaaaataaaatagaaaaaaagaaagagctggtgcctaccctcggggagcctacaggacgtgagcttgaaagagctggttatctccccgtctctctgtctctctctgtcttggaaatgtctaagggggcaggcaggagggcttcctggaggaggggtcctttgagctgagttcagaagggcgagaaggagccaggtttctcatggagcagccaatgcaaagggctgggggccacctggagcctggtgtgtccttcgggcagctggtgtggctggagcaggggatgccaagcctgctgagggcttcatgggccgcagggaggagtttggtttttctcctgagggcactggggagccacagcagagtttagagcagaagaaggacacaatttgtgccctgtgcccgtggtgagcggcgagcagggagggctgcctggaggcgggtaaggacctcagagcggaattctgccacagtgaagctttggaggaaatctttcttccttttctcttcttttcccatcacgggttgagaaattggagggaggggcattgctggggcttcctgtgcccgcgtgtgcggggggttctggggcctgctgcctgcctgagccagccccttttcccgccagaggcctctcgtcagtccccgggggggcccagtggtgaccttgggcctcggggaacatccagacctgggtcagtggcctcggcaagtgcccggggga

SEQ ID NO: 70100 - DNA, 1780 bp, Homo sapiens
tcttggtccaaatcgactgcgagggaaactttggttttaaaacgaggggtgattgcccgctctgaggtcgacaccacgcttactcaggtgactgagccttagttttccatcagtcaagtgggaagagcagcccattgccagccgctccccgggccctgtcccgcctggacgcctcccgcccgcagagaatccgcagagtcccgtagcaccgcctccctccaggagcctgcgccccggcccctgggtcagggttgggatgcgggctctgcagacgccccggagaacagctttacctgcgggctgtccctgcccggtttagtccaagggcctcggtgtgagggcctccgctgtcaaggcgggggaaccggttctcttggtttctctctccttccccagaggcttcaacgcagacgtgagccccagccgggcccgccccgccccctgctctccggctctcacaccgcaccccccccgaaaaaggctgcccacctgccctgggaccccccggatgcctccacgagagtggcccctggagaatgcactctgagacagtgactatccgtgcggagtcccagagcaggggcccccaaagctctccggagtggtcacaagccccgctcccgccccggctccagtgtgtcagggatgggggagagcctaactaaatctgcctgcacccctccaccaaagccacgagtcggtggtcttctccggaagtgcatggcccctccaagctcccacactgaccacatctcctcctgcctcctaaggtgacccggaccaggggccaggagaccgccgcttgccgaggctgagggactgaaggagcagggtccaaccaggccccccgtagggctccttcgccactttctcaagcgttcctcgacgaggaaaaagtgtaaactgagtcactaagcacactgggtcccggaggcggggtcatcgagctgcccagagctggaccaacaaaccccaaggaggacactgccccggcgccccttccccatggaccccgcagcgcactcacgtcggctgggcgggcctcagggagcccaagggccggggggggccgagccggcaggttaggccccgaccatcgccctgggcgtggcttccaggggcgaagccggagaggctgcacggaaccggagctggcaacgggagctaagagggacagggacactcaggagtgctgtcaccgatacccaaagcagctgtgtctgggcggggcgaggaggggccagaaggcctctgctggggaccttgggggcatggggaagacaaggcccgaagcagaaggccggggcctggagccgggagggctgcgtctgaaggggtgctggctgatcgctagcagaacccaaggagggtggggccgcccctgcccggccttcccccttctcccctcacctggggatttgctgtccckgcgtccctgcgtccctcccgcacgcggctctgggaatgctgggctggggctggttgtcttgtccgggcgttcccgctcgcggggagatcatttgcaccctgaatcccccactgcgagcacttccaaccggactgcagaccgccagctccgggcccgcctccctcaccagggcctttccccgcacagcccggccgggcttggaaaaactccgagcgggattcccagcgcagggacgcccaccaggcgcggtgtctcgggctggataagaaggggacccggccacggctccttccccgacctgggggcacacagagaaggagagagattggtggggggggcggggtgccggga

SEQ ID NO: 70101 - DNA, 1780 bp, Homo sapiens
tcttggtccaaatcgactgcgagggaaactttggttttaaaacgaggggtgattgcccgctctgaggtcgacaccacgcttactcaggtgactgagccttagttttccatcagtcaagtgggaagagcagcccattgccagccgctccccgggccctgtcccgcctggacgcctcccgcccgcagagaatccgcagagtcccgtagcaccgcctccctccaggagcctgcgccccggcccctgggtcagggttgggatgcgggctctgcagacgccccggagaacagctttacctgcgggctgtccctgcccggtttagtccaagggcctcggtgtgagggcctccgctgtcaaggcgggggaaccggttctcttggtttctctctccttccccagaggcttcaacgcagacgtgagccccagccgggcccgccccgccccctgctctccggctctcacaccgcaccccccccgaaaaaggctgcccacctgccctgggaccccccggatgcctccacgagagtggcccctggagaatgcactctgagacagtgactatccgtgcggagtcccagagcaggggcccccaaagctctccggagtggtcacaagccccgctcccgccccggctccagtgtgtcagggatgggggagagcctaactaaatctgcctgcacccctccaccaaagccacgagtcggtggtcttctccggaagtgcatggcccctccaagctcccacactgaccacatctcctcctgcctcctaaggtgacccggaccaggggccaggagaccgccgcttgccgaggctgagggactgaaggagcagggtccaaccaggccccccgtagggctccttcgccactttctcaagcgttcctcgacgaggaaaaagtgtaaactgagtcactaagcacactgggtcccggaggcggggtcatcgagctgcccagagctggaccaacaaaccccaaggaggacactgccccggcgccccttccccatggaccccgcagcgcactcacgtcggctgggcgggcctcagggagcccaagggccggggggggccgagccggcaggttaggccccgaccatcgccctgggcgtggcttccaggggcgaagccggagaggctgcacggaaccggagctggcaacgggagctaagagggacagggacactcaggagtgctgtcaccgatacccaaagcagctgtgtctgggcggggcgaggaggggccagaaggcctctgctggggaccttgggggcatggggaagacaaggcccgaagcagaaggccggggcctggagccgggagggctgcgtctgaaggggtgctggctgatcgctagcagaacccaaggagggtggggccgcccctgcccggccttcccccttctcccctcacctggggatttgctgtccctgcgtccctgcgtccctccygcacgcggctctgggaatgctgggctggggctggttgtcttgtccgggcgttcccgctcgcggggagatcatttgcaccctgaatcccccactgcgagcacttccaaccggactgcagaccgccagctccgggcccgcctccctcaccagggcctttccccgcacagcccggccgggcttggaaaaactccgagcgggattcccagcgcagggacgcccaccaggcgcggtgtctcgggctggataagaaggggacccggccacggctccttccccgacctgggggcacacagagaaggagagagattggtggggggggcggggtgccggga

SEQ ID NO: 70102 - DNA, 1780 bp, Homo sapiens
tcttggtccaaatcgactgcgagggaaactttggttttaaaacgaggggtgattgcccgctctgaggtcgacaccacgcttactcaggtgactgagccttagttttccatcagtcaagtgggaagagcagcccattgccagccgctccccgggccctgtcccgcctggacgcctcccgcccgcagagaatccgcagagtcccgtagcaccgcctccctccaggagcctgcgccccggcccctgggtcagggttgggatgcgggctctgcagacgccccggagaacagctttacctgcgggctgtccctgcccggtttagtccaagggcctcggtgtgagggcctccgctgtcaaggcgggggaaccggttctcttggtttctctctccttccccagaggcttcaacgcagacgtgagccccagccgggcccgccccgccccctgctctccggctctcacaccgcaccccccccgaaaaaggctgcccacctgccctgggaccccccggatgcctccacgagagtggcccctggagaatgcactctgagacagtgactatccgtgcggagtcccagagcaggggcccccaaagctctccggagtggtcacaagccccgctcccgccccggctccagtgtgtcagggatgggggagagcctaactaaatctgcctgcacccctccaccaaagccacgagtcggtggtcttctccggaagtgcatggcccctccaagctcccacactgaccacatctcctcctgcctcctaaggtgacccggaccaggggccaggagaccgccgcttgccgaggctgagggactgaaggagcagggtccaaccaggccccccgtagggctccttcgccactttctcaagcgttcctcgacgaggaaaaagtgtaaactgagtcactaagcacactgggtcccggaggcggggtcatcgagctgcccagagctggaccaacaaaccccaaggaggacactgccccggcgccccttccccatggaccccgcagcgcactcacgtcggctgggcgggcctcagggagcccaagggccggggggggccgagccggcaggttaggccccgaccatcgccctgggcgtggcttccaggggcgaagccggagaggctgcacggaaccggagctggcaacgggagctaagagggacagggacactcaggagtgctgtcaccgatacccaaagcagctgtgtctgggcggggcgaggaggggccagaaggcctctgctggggaccttgggggcatggggaagacaaggcccgaagcagaaggccggggcctggagccgggagggctgcgtctgaaggggtgctggctgatcgctagcagaacccaaggagggtggggccgcccctgcccggccttcccccttctcccctcacctggggatttgctgtccctgcgtccctgcgtccctcccgcacgcggctctgggaatgctgggctggggctggttgtcttgtccgggcgttcccgctcgcggggagatcatttgcaccctgaatcccccactgcgagcacttccaaccggactgcagaccgccagctccgggcccgcctccctcaccagggcctttccccgcacagcccggccgggcttggaaaaactccgagcgggattcccagcgcagggacgcccaccrggcgcggtgtctcgggctggataagaaggggacccggccacggctccttccccgacctgggggcacacagagaaggagagagattggtggggggggcggggtgccggga

SEQ ID NO: 70103 - DNA, 679 bp, Homo sapiens
aactatgcctgaaggtggtccattctaacatcagcctttttggttcaagagccaatcaactccccagcttttcactaatgtcagtttgatgtgggtttctccacctttcttatttatttatttatttaaaaaaaaattttttttttttgaaacagcatttcactatgttgcccaggctggtcttgaactcctaggctcatgtgatcctcctgccttggcctcccaaagtgcctgggattacaggcatgaatcaccacacccagctgtttctccacatttcaagttgtttctccacctttcaagtccactttgtgcctgaggacagagccttgttagtagccagggcagagagctgaagattcgagacatcacaggttatccctgctcaacaggggcttcagatcaggggcttagatcaggggcttcagatgaacctcaaacctctgacccttggatcattcagaacgtggttgctggaaagcaacacccacatggcgtcattcagatttgggactgaggacagttcccaccaactgaatatctaccatgatgcatttagygagcacctactatgcactaggcccagtgcaggccacaaagtgaaacaactgatgcttcacaaagaccttgtgtgggaagcttttgcccatgctgttccatctgcctagaacacacttcc

SEQ ID NO: 70104 - DNA, 908 bp, Homo sapiens
gggaagggggatgggaaggttgtgggggtctacccaccctgttcctggaagggagagatcccggtcccctctctagccccacactggggccctcaccctcaaacataaaggtgtcagcttctgctcttatgtcctcatcagataacttcttcccgtcttcatcctggagagaaggcagtaaccccccccaacccccacccccataaaaagtcacactagctctaagggctcttgagtctaatctgagacagtctctgaagattcatcctttttccagaaatccaagtccatcttgcactcctagacccctcttggtcaccatggccagagccctcacctcatggccttcctctctggcttccttgcctcctcttgggttcctactgggaagactcaatgacccatgaatattttaatgaaaagtttctgagaaaaagttactggcaacctgagttacaggagaattaaatggcaatttcccttggaaattagagattaagtattgcttcaaagatttgcccacattctagagtgataaatctagagaatcttatccccctggagacgtttgggttgtaaggctaaggactatggcatctcactgaagargatttgtttatgctccagaacaaagcacaccatctctcacaaagctaccattctcactcaatctctctctctctctttctctgtctctctcattctctttcttgggaagaaatagaaaatgtgccaagactcataatgtagggcccctctcttaggatgcaaactctgctgcacatacaagtgaaaacattacccttggagaaatttgacttgaggatgaagagccagtgccacaatcccactctggctaacagtattgctgtgagcaagacatgggctgctctgatctagaggtttaa

SEQ ID NO: 70105 - DNA, 1289 bp, Homo sapiens
ctgggtgaagccagctgggcttctgagtctggtggggacgtggagaacctttgtgtctagctcaaggattgtraacgcaccaatcagcgccctgtcaaaacagaccacttggctctaccaatcagcaggacataggtagggccagataagagaataaaagcaggctgcccgagccagcagtggcaacccgctcaggcccccttccacattgtggaagctttgttctttcactctttgcaataaatcttgctgctgctcactctttaggttcacactgcttttatgagctgtaacactcaccgcgaaagtctgcagcttcactcctgagccagcgagaccacgaacccaccagaaggaagaaactccgaacacatctgaacatcagaaagaacaaactccagacgcgccaccttaagagctgtaacactcaccgcgagggtccgcggcttcattcttgaagtcagtgagaccaagaacccaccaattccggacacaccattgtctgagtaagtttgggtgccaggactatgaggtcgtgtgaagacttccagccccatacctgcagaacagtctgcagctcactctgctctgaactgccccaactttgcacagatattctccattcctcgaaatgaaactgtatccttcaaagctcacacatttcgcttattggctcagcgtagggagcaagttctctagatagcttactaccaaataaaatggtggagaagggaacccaggcagctgggcacaaaaaaggaatgagcaacaagcttcctctctgaacatgattttctgtgtaaggtcttggacactccctcgactgcttccagccatctgcctcatgctaggtttctagttaatgtggaatgaaaactctcacatcttccttctagatgtagctgtggtaattgcaacttaggcagttgtgcttgagaatcttcttcttaataccacatggcaaggtcattccccaatgcttttatttaccttcacttgaatttttatattaaacattggattgaacaagaacggagaagagaatcacaattattgtgtagatgctacattgtagttacattttctcttgtaattattacagtgctgggactattcgagctttaaaatcctttctgaagatcctaaagctactcagtggttctgctggcattaggggttgatatggtttgggtctgtctgtgtcccttcccaaatctcatgttgaattgtaatccccaatgctggatgtggcgcctggtgggaggtgtttggatcatgggggcggatcc

SEQ ID NO: 70106 - DNA, 1289 bp, Homo sapiens
ctgggtgaagccagctgggcttctgagtctggtggggacgtggagaacctttgtgtctagctcaaggattgtgaacgcaccaatcagcgccctgtcaaaacagaccacttggctctaccaatcagcaggacataggtagggccagataagagaataaaagcaggctgcccgagccagcagtggcaacccgctcaggcccccttccacaytgtggaagctttgttctttcactctttgcaataaatcttgctgctgctcactctttaggttcacactgcttttatgagctgtaacactcaccgcgaaagtctgcagcttcactcctgagccagcgagaccacgaacccaccagaaggaagaaactccgaacacatctgaacatcagaaagaacaaactccagacgcgccaccttaagagctgtaacactcaccgcgagggtccgcggcttcattcttgaagtcagtgagaccaagaacccaccaattccggacacaccattgtctgagtaagtttgggtgccaggactatgaggtcgtgtgaagacttccagccccatacctgcagaacagtctgcagctcactctgctctgaactgccccaactttgcacagatattctccattcctcgaaatgaaactgtatccttcaaagctcacacatttcgcttattggctcagcgtagggagcaagttctctagatagcttactaccaaataaaatggtggagaagggaacccaggcagctgggcacaaaaaaggaatgagcaacaagcttcctctctgaacatgattttctgtgtaaggtcttggacactccctcgactgcttccagccatctgcctcatgctaggtttctagttaatgtggaatgaaaactctcacatcttccttctagatgtagctgtggtaattgcaacttaggcagttgtgcttgagaatcttcttcttaataccacatggcaaggtcattccccaatgcttttatttaccttcacttgaatttttatattaaacattggattgaacaagaacggagaagagaatcacaattattgtgtagatgctacattgtagttacattttctcttgtaattattacagtgctgggactattcgagctttaaaatcctttctgaagatcctaaagctactcagtggttctgctggcattaggggttgatatggtttgggtctgtctgtgtcccttcccaaatctcatgttgaattgtaatccccaatgctggatgtggcgcctggtgggaggtgtttggatcatgggggcggatcc

SEQ ID NO: 70107 - DNA, 681 bp, Homo sapiens
attgctttggaatagattatgaaatgttcagattgctttgggaagaattcaagtaaggaaataattctctcttttgttttaaagctcacactatataaactgtaggaaatggtttattggaagaagtaattttaatgcccaaaaaacctgaggaggcatttattctgcttggactattccctgtagtccctctcctccccagttcttttttttttttttttttttttttttttttttttttttttttttgagacggagtctcgctctgtggcccaggcgggagtgcagtggcgcaatctcggctcactgcaagctccgcctcccgggttcacgccattctcctgcctcagcctcccgagtagctgggactacaggcgcccaccatcacgcccggctaattttttttgtatttttagtagagacggggtttcaccgtgttagccaggatggyctcgatctcctgacctcgtgatccgcccgcctcggcctcccaaagtgctgggattacaagcgtgagccaccgcgcccggcctcctccccagttctttagaagaagtatttctcttgattcctctctgatacagaaaactggcacattctagaggtctatcataaaaacatatagcagttatgtctagagagccttaagtcatatggacatgactcttctctttggtacag

SEQ ID NO: 70108 - DNA, 763 bp, Homo sapiens
tatcagcatgctaaactatttgttctaattccagctgtgatgattatgtattctgttgctcaagggcacattgccttgcttacaggagagaaagtttctcttttgaaactgtgcagcagtggcacacagctaaatctcctttgttatttgtctagaaagtttagtctttaaatattttatctcaatcacaaaagacaattccccagtggagaaattcaaaatcacaaaatattctgaatgctcctggaaattattttattttctcacatgtgagatagctggttgaggttgttgatgaaaccatgcctataacagtttagtaaatactgttattattcatttggtattgtacattctttataaaacacaacattaataaaaaagtaatattattgagtggaaaattataaaacaaatgacagataaagagataatgtctatactacaaaaaggttcttacaaactgttaataggtgaaagatgtaaaagaaaaataagcaaaaaatggaaataggcaattgacagaaaataaaaactaaatggtcagcacaaaaaataatacggttgaattcagtattgatcaggggcttacaaattaaagtaaccatgagatagtacttttacccaacagaatggcaaaattttaaaaaagagtgttaagaactgttgctggcacagatatgaaaataaagtacacttccattaatttcttctggatrtacaaatgttaatctcagttttagcaacattaactaaaattaaa

SEQ ID NO: 70109 - DNA, 535 bp, Homo sapiens
tttggtctctgaggctgtggaagggcacagggagcctggagccccagcctctgggggtgtctcaggactgctcgctgctctagtgacacaaggaccgacgcctgaagtcaggcgagtctcataccccactgtctgtgtttgatccaaggaggctgtttacacaacgctcactgattgaaagaggcaggtgttactgcgggtgccaggctgtgtgtgaggctagtgctttcctgctgtggtgtgtgattcagggacccaggataggctcttgagtccccaggcatcttctcattggttcctgatgctaagatcccttgccctgcagaaatgctgcacattayaacaagtgggaaagaaggccccagcaaccctgaccccggcctcctcccagagtgggggttgtgatgggggtgggggtacactgacagtacactggagaggccgcagctcgcctgccctatctgccccttcccctgctgcttggccctggcctcagcctcccaatccagccaaccactcccgatctcctctctcc

SEQ ID NO: 70110 - DNA, 535 bp, Homo sapiens
tttggtctctgaggctgtggaagggcacagggagcctggagccccagcctctgggggtgtctcaggactgctcgctgctctagtgacacaaggaccgacgcctgaagtcaggcgagtctcataccccactgtctgtgtttgatccaaggaggctgtttacacaacgctcactgattgaaagaggcaggtgttactgcgggtgccaggctgtgtgtgaggctagtgctttcctgctgtggtgtgtgattcagggacccaggataggctcttgagtccccaggcatcttctcattggttcctgatgctaagatcccttgccctgcagaaatgctgcacattataacaagtgggaaagaaggccccagcaaccckgaccccggcctcctcccagagtgggggttgtgatgggggtgggggtacactgacagtacactggagaggccgcagctcgcctgccctatctgccccttcccctgctgcttggccctggcctcagcctcccaatccagccaaccactcccgatctcctctctcc

SEQ ID NO: 70111 - DNA, 524 bp, Homo sapiens
catttcctctttcacagggattcttggagtgagggttcttttggctaacgaaggtacaaggcggaatcttgtaagataggagagggtcacgaggggggaggatgcagggccatgacatcgggagggtcactctgccacctgcgtcatggggctggggagaaacgccctgcagatcacaggcctggagtacctggaccgcctcgactttcctccgcagcatgttctccatgtcctctgagaacttcctcaccagctccaagccatccacctcctcgatcttcagactggactccacatccttgtacttctgtttggggaaagtgggagagatgcgtgcatgtggttttgtaccaggatagttgcacctgtgtatgcatggcctccaacctctccacagatgcattccggcacayggagcctggtttactcaactagggtgaggcccagccctctcctccctggacaacatccccagtgatagaatagctgcctctcctcaaatatcctctctgttccaggtgctc

SEQ ID NO: 70112 - DNA, 1029 bp, Homo sapiens
tggtaaccagctctcacttaagccattccgttctgaaaacaatgagaatgagaacctttaaatatgtgaatcataacacagttacagctgcataatgtttttatggttttcaaaatgcttccgcacagtttatcttgtttcgtcttcctgctaacccttttgagagtgggaggcacgcattacttaattataagaaaatgagaaaactgaaggcagagacaacaaatgagctatccaagatcacaaatgggttttgtttctgtttctgattttgtttttaaaatcagagcggagatcagaaccatcatctcctggtcttcctattttgcaagcagcgcccggtacacacctgttggatacacagcttgaacacaggacctaattgttcgctaggcatgaacaacagggtgttttgactcctgcaagctgctaacagtcttgcacagtgctagactgtgcactagcactatctagaatgtgatcctttgaccggtaggcaggttatcacttaccagtttttggcaagatcaggagcttgtgacagaatgtaaatcagctgtgtctataaacacactgcttagtttgtctttttatttttttttacattttattttgaaataattttaggcttaaagtagaagaatagtgtagagttcccataaaccctttgggaacttcctctaatgttaatatcttgcatgaccataatatagtgattaaaactgagaaactgacatgggtataawacttttaacaaacttcagacttcattttgatcttacgagtttctccacttcagtcctttttttctggtgcagatccaatccaagatcccacatgacatttagtcatcgtgtctcctttgtctcatccaagtggtggtagttctcagtctttccttgtttttttttttttttttttttttttgtttgtttgtttgtttgtttttaatgactttgacacttttgaagaatccgggtcagttatcatgtagaatgtctcttaatctgggtttgtctgatgtttact

SEQ ID NO: 70113 - DNA, 665 bp, Homo sapiens
tccattgttcacgactgcagggtgatttctttgggattgcagacaagggcctcccagtcacttttggtttggtgtctgttcttaacacagttcctgaaacatagaaggcactcgatgagtatttgctgaataaataactgaatgaatatgtgaagaagagaagctgttcatggactagggattctggcaaggtgtggcatggctgagacagcaccagatgagaggctaggaggcctccatcccagacctytctctgctcctcaccagctgagtgaccttgggcaaatgtctttgcttctcttgacctctgtttgttcatttttcttaatctaggagaggagtatatgtagaggattcttttatgttctgtgcatctgtggtcttttgcctgacaagtagaccatttgacttcatatgagcacattccttcatgcattccttctgtcatatttattaaatgcctactgtgtaccaggctaggtgctggaaaagcaagatgtgcggaaacaagggtgcgcagggtctctgccctcacagagcttgtcaggtttgataagagcttacgttcttatgatgccagccaataaacaactggcaacttcatacacaccatgctttcagagcactgtgaatattaataccatggagaaagtaaaggagataat

SEQ ID NO: 70114 - DNA, 588 bp, Homo sapiens
ttgggatatcctattccttccctcatccaattttgtccaattaatccatgaagacttacctcatgtgtctcctttctccaaaagtatttgctgatgtccccttacaaagaagttataagaaaggtataacattaaggcatttaaaagtcttaattctagaagtgcatgtgtatacaataccctgttataaaaaatgaaatacagaaactctctaaattttatagttattgaattaatgagatatttttggctrttaaagccctgaaagaagtaatttattggcatcaggtaagttttctcaaatatgtgaagagaatgcttgctctcatccatcacctttatacattgtcttgaatatttacacaatattgagagctacatcctagtgttcaaaatattattgattttaaagcaatttcaggtaatgtcacttagtacaaaccccattattaaaacatttttagtaaataactactgtttctctactcctctcccccaaccccacccttgcatgattgcatctcattcatagatgccattggcatttgtgctatattcttatataaaaattctcagcaagatgggtta

SEQ ID NO: 70115 - DNA, 588 bp, Homo sapiens
ttgggatatcctattccttccctcatccaattttgtccaattaatccatgaagacttacctcatgtgtctcctttctccaaaagtatttgctgatgtccccttacaaagaagttataagaaaggtataacattaaggcatttaaaagtcttaattctagaagtgcatgtgtatacaataccctgttataaaaaatgaaatacagaaactctctaaattttatagttattgaattaatgagatatttttggctgttaaagccctgaaagaagtaatttattggcatcaggtaagttttctcaaatatgtgaagagaatgcttgctctcatccatcacctttatacattgtcttgaatatttacacaatattgagagctacatcctagtgttcaaaatattattgattttaaagcaatttcaggtaatgtcacttagtacaaaccccattattaaaacatttttagtaaataactactgtttctctactcctctcccccaaccccacccttgcatgawtgcatctcattcatagatgccattggcatttgtgctatattcttatataaaaattctcagcaagatgggtta

SEQ ID NO: 70116 - DNA, 511 bp, Homo sapiens
aaaaaaaagacatgaactccagtgagactaaaatctgaaaatgcatatatgtatgtataaagacatacatatttatatgtataatcatatatttctgctctagctttccctrattaatgtcagttaaattagaatggtgtgtagaaagatgtgtttccctctttttttccatttcctagagctggaataaaatatccatgttttatgggaaaaaaaagtattatgcaggtatgccccagagatagtgtaggttcagttttggaccaccacaataaagctaataccataataaagcaagtcaaacacttttttttcatttcccagtgcatataaaagttgtatttggctgggcatggtggctcacgcctgtaatgccctttgggaggccaaggtgggtggatcatgaggtcaggagatcgagaccatcctggccaacatagtgaaaccccgtctccaccaaaaatacaaaaattagccaggtgtggtggtgtgcgcctgtaatcccagctag

SEQ ID NO: 70117 - DNA, 511 bp, Homo sapiens
aaaaaaaagacatgaactccagtgagactaaaatctgaaaatgcatatatgtatgtataaagacatacatatttatatgtataatcatatatttctgctctagctttccctaattaatgtcagttaaattagaatggtgtgtagaaagatgtgtttccctctttttttccatttcctagagctggaataaaatatccatgttttatgggaaaaaaaagtattatgcaggtatgccccagagatagtgtaggttcagttttggaccaccacaataaagctaataccataataaagcaagtcaaacacttttttttcatttcccagtgcatataaaagttgtatttggctgggcatggtggctcacgcctgtaatgccctttgggaggccaaggtgggtggatcatgaggtcaggagatcgagaccatcctggccaacatagtgaaaccccgtctccaccaaaaatacaaaaattagccaggtgtggtggtgtrcgcctgtaatcccagctag

SEQ ID NO: 70118 - DNA, 1000 bp, Homo sapiens
tattatccagcactcactttcttctataacatatttaggaggcgacaatgatgcaaaattcataatatggtcaatataatataattacaggtctaatattaattattttattggcagagtaactatttttaggaattatacctttttttttcttttctaataaccctattgtcttctcttttctacccatcctgacttgttcatttattccataaacattaaatgcctacaaggcattcagctatgtcctgggcattagaaacaccgtaagtgaacagatcaacatggctaggtcatcccagagcttcacatttacttctttcttcaagtggcttggtttttactaggcttcaatgactacaaagaaaaaaaaagttcatttcttgacttgaatattgatactttcaaacatagcaatgctacactccccaataaatcctttttgaagactgaaacagtttagtttgtaagagtataccttgaaatcaacaatttatcaagctttataaagtacctatagagtgtgaaccattgaatgtaagatattctacaaataaaacccagatgcaattttttgaggaatatatagacatacagacattttcacttttttctacttttgatttatttatttatttaaatagaggtataagctgggtgcggtggctcaagcctgtaatccagcactttgggaggccaaggtgggcwgatctgaggtgggcagatcaggagttcgagaccagcctggccaacatggtgaaaccctgtctctactaaaaatataaaaattagctggggcgtggtggtgggtgcccgtaatcccagctactcaggaggctgaggcaggagaatcgcttgagcctgggaggcggaagttgcagtgagcagagatcgagccactgcactccagcctgggtaacagagcaagactctttcaaaaaaaaaaaaaaaatagaggtataatttacatataataatattggtagatgttaaattttca

SEQ ID NO: 70119 - DNA, 1327 bp, Homo sapiens
tctcgatctcctgacctcgtgatccgtccacctcagcctcccaaagcgctgggattacaggcatgagccaccgcgtccggccctcattttttattttcaattgaattagaattcaaatcaaagcataattctacttgattatagctcttgtgaaagattcttagggaaaagaataacatgaacgttaggatggcctttgtttgtagattggattttcatgaattattcccatggttaactgaaagttaaatgcatataaacaagagttggcaagggctgatgctgtacactctcaagaggctcccaagttttgttttgtttcttttttcatgagcacccagaatctttcctctcactggatccagattttattctcagggtatctaaccagatgatgcaacatstgtgctctcttttaagaacgtgagaaatgaagctttttcatttttccttgctttgacttctgggaaatctaatcaaaactgctcagactttccttttcttgtttgctttagaagacagcttgctggaagggttctgtggaggtctcccacctgtggaagaaggtgatagaaaaattagcctgataatggaactgtcaacccaggtttcccttcagactgagagaattactcagctgaaagaagttttggaggaaaaggaaaggaagattcagcagctggaagctgagcggagtccccatcctccccaagaggtcaaggaccctccaggatgtttaccagaagccccagttttctctactcatgacatcccacctgtggtctctgatgagaatttgtagattcccaataagaaaacaataaaagtttattaagtgtcatccaggtaaagtctgataccaaatagtctcctaggtgacaaactcaagttcaagttcatgtgtttgaatgtatactatcatgttcgtattggaaggaaacaaaaaaaaggaaatgttcaagagcaaacactgaatgtttcccctttggacagtaatagtcacgtaaaccacgcagctgtagaatactatgtttttagacattcctggtagcagtgggggagggaagaaaacaaaactagacagatggtgaaagaacttagcattatcctcttagcagagatttgtcacactgcaagggaggggtggcaccaaccccgtttagtatgcagctctattgtgaacagaaagctgtcgcggagggccagcttcaaactcgtgaatgcgcgggtactaaagagcaggagctaaagagcaggagccgtcagcagagtaaatagccatgaggtctgtcctttcatgtcctcaggagtttatttctttatggca

SEQ ID NO: 70120 - DNA, 761 bp, Homo sapiens
ggatccactgtgtcaccagttctcatctatacctgtcagctgccatatcagggtggcatgagagaaaggatcatttccctgagaattgctattgcctagttcaaaccatggttataagtttcactctattttccaaaatgcacacacagaaagggttccatcatattcccatttcccagatttgaccatgagagatactagttctataagggatgcttctgatttttttctgtcttccttctaaaccagcagttttgaacttaagaatcaagactatgctaactttgttattccagttgcatagcatctttctttccccagggcaatgtgcaagttatgtctaacttctctgggctgaagggaaacagccttaggtaaataagtgaagagaaaaaatttaaagagcttggcaatgagaataaagtacataaatgcatacatgggtggggggaggttatgctcctacagttaagtatctctgtgttgtactgtacatattagcaatgctcccatatggctctggatgctgggcttctgtyactgatgctgcatacaacttgtcttttaatgataatgcagtcctattgcattaagactcaagactctctttgaaagtcaagagtctctttgaaaatgcttattgatgcgaatgccttcatttttcttgaagaaacacatgcaagaaaagaagcataagaggaaaaccttgaacaaaaaccctgagaaaaaattaatgatttgtaatctcttgtcttagtttt

SEQ ID NO: 70121 - DNA, 320 bp, Homo sapiens
tcacttacattgcaggtttctagtaagaaagttggttggtatcaaccaactttggaagaaataggaaagtataagtcctatattccagcaaaatttataaagttctgggacctgtaagaagataaacacaaagagccttttttttttctttttttgtatttttagtagagacagggtttcactatgttggccagactggtctcmaactcctgatcttgtgatccacccacctcggcctcccaaagtgctgggattacaagcgtgagccaccatgctctgcaaaaataattttttaaatcttaaaataagtttattctctg

SEQ ID NO: 70122 - DNA, 659 bp, Homo sapiens
gatccaccgcgcctggcccaattttgcatatttttaatgacacgaactaaacgtttttcttagtattawtcattaaaattaacaaagattcatgttttgctgggcgtggtggctcacgcctgtaatcccagcactttgggaggctgaggcaggtgaatcacaaggtcacgagttcgaggccagcctggtgaacatggtgaaactccgtctctactaaaaatacaaaaaattagctgggcctggtggcaggcgcctgtaatcccacctactcgggagggtgaggcaggagaattgcttgaacctgggaggcggaggttgcagtgagccgagatcgcaccactgcactccagtgtgggtgatagtgggagactctgtctcaaaaaaaaaaaaaaaaaaaaaaaaaagaaaaacaaagattcgtgttttgaatttggaaattaccaaaaattgtatgagagaaatagaaataatttataatttcactgcccagggataatcactggtggtattttgtggtctagctccttagatattaatatatgattaatatgatatattttgaaacagtgctttttaaatctatatatattttttaatatttttttgtaaaaacaggctcatactgtacacagtatttataatttatttaaatttaatat

SEQ ID NO: 70123 - DNA, 659 bp, Homo sapiens
gatccaccgcgcctggcccaattttgcatatttttaatgacacgaactaaacgtttttcttagtattaatcattaaaattaacaaagattcatgttttgctgggcgtggtggctcacgcctgtaatcccagcactttgggaggctgargcaggtgaatcacaaggtcacgagttcgaggccagcctggtgaacatggtgaaactccgtctctactaaaaatacaaaaaattagctgggcctggtggcaggcgcctgtaatcccacctactcgggagggtgaggcaggagaattgcttgaacctgggaggcggaggttgcagtgagccgagatcgcaccactgcactccagtgtgggtgatagtgggagactctgtctcaaaaaaaaaaaaaaaaaaaaaaaaaagaaaaacaaagattcgtgttttgaatttggaaattaccaaaaattgtatgagagaaatagaaataatttataatttcactgcccagggataatcactggtggtattttgtggtctagctccttagatattaatatatgattaatatgatatattttgaaacagtgctttttaaatctatatatattttttaatatttttttgtaaaaacaggctcatactgtacacagtatttataatttatttaaatttaatat

SEQ ID NO: 70124 - DNA, 659 bp, Homo sapiens
gatccaccgcgcctggcccaattttgcatatttttaatgacacgaactaaacgtttttcttagtattaatcattaaaattaacaaagattcatgttttgctgggcgtggtggctcacgcctgtaatcccagcactttgggaggctgaggcaggtgaatcacaaggtcacgagttcgaggccagcctggtgaacatggtgaaactccgtctctactaaaaatasaaaaaattagctgggcctggtggcaggcgcctgtaatcccacctactcgggagggtgaggcaggagaattgcttgaacctgggaggcggaggttgcagtgagccgagatcgcaccactgcactccagtgtgggtgatagtgggagactctgtctcaaaaaaaaaaaaaaaaaaaaaaaaaagaaaaacaaagattcgtgttttgaatttggaaattaccaaaaattgtatgagagaaatagaaataatttataatttcactgcccagggataatcactggtggtattttgtggtctagctccttagatattaatatatgattaatatgatatattttgaaacagtgctttttaaatctatatatattttttaatatttttttgtaaaaacaggctcatactgtacacagtatttataatttatttaaatttaatat

SEQ ID NO: 70125 - DNA, 1130 bp, Homo sapiens
tgagcaaccgtacccagccccttgtgtgctcttctagatccccttccacctgcagggccagggaggctcgttgagatttttttttttttttttttttttttgagacagagtctcgctctgttgcccaggctggagtgcagtggcgcaatctcagctcgctgtaagctccgcctcccaggttcatgccattctcctgcctcagcctcccgagtggctgggactacaggcgcccgccaccacacccggctaattttttgtgtttttagtagagacrgggtttcaccgtgttagccagaatggtctcaatctcctgacctcgtgatccacccgcctcggcctcccacagtgctgggattacaggtgggagcccccatgcccggccgacccaccctgagagcatgacctctcagttgtgctggggatgccacaggggcctcagggctgtgtaccctgcggtgtgaggcgtttgcttctcttgagaggtgtcctccttcccccaggatcctccttcccctggggtccacttgttcgtagcttttggtggcttccagaatggtttctaatcatttgtctgatgaggcttatgcacagactcctagagcctatgatttctagagcctgtgatttctggtttcattttggctgtggctgtgcatagcagtgcattttcatgcttgtgtcttctccagcaaccccagaacttgaaggttttttactttaaaaacatatgcagcgtatcttcctttttatattgaaagtggtggctgggcgcagtggctcatgcccgtaatcccagcactttgagaggccaaggcgggcaaatcatgaggtcaggagatcgagaccatcttggccaacgtggtgaaatcccgtctctactaaaaatacaaaaaattagctggatgtggtggtgcgtgcctgtagtcccagctactcgggaggctgaggcaggatgatttgaacccgggaggcggaggttacagtgagccgagatcgcaccactgcactccagcgtggtgacagagcaagagtccatctcaaaaaaaaaaaaaaaaaagtttgaggaaccaggggactaaatggtcacctatccgtgatcctgtccccaccctcgccagccctcgatcctc

SEQ ID NO: 70126 - DNA, 665 bp, Homo sapiens
tccctccccaattcgtatgttgaagtcttaagccccggaacctcagaatgtgactgtggttagagataaggtctttaaagagacaattayatttaaataaggttttagggtgggtcctaatccaataggactgatcttttttttttttttttttttttttttttgagatggagtcttgctttgtctcccaggctggagtgcagtggcacaatctcagctcactgcaacctccgcctcccaggttcatgcggttctcctgcctcagcctctcgagtagctggaattacaggctcatgccaccacacccggctaattttttgtatttatagtagagacagggtttcaccatgttggccaggctggtctggaattcctgacctcaaataatctgcccgcctgggcctcccaaagtgctggcattacaggtatgagccaccgtgctgagccaaagttttgatatactttgaattgaactttttcaatgtggggacatttctcaaaactgaaagttagtgtgaaagtgatggaatctcccttagtcaatgtcatcaaggagcagagcaggcaaatcagacagatcctgccgcgagtagaagataaagctgtaccctgattataccacactgagatgagcccgttgaataaatgcggtgagcatgtatgtg

SEQ ID NO: 70127 - DNA, 732 bp, Homo sapiens
cagaaagaggaccagattcctggggtcagtaactaaggatgacaatggaggaccccaaggggccctctgggacaaaaataggactgggatgcactatctcagaaactggatgcaggagctcaaggaaaacaccttagcaccggggtttccatgtccccagcacttctcacgctcagtgttttaactctcatttccagacaatgtaataacatagcgggtactgggggtgtggtccctgtcctcatgacgtttacaaacagaacatgaataaatgatggattaaataaattacatggaaatacatttaggatatggaaggaaaggaacaacacaggagggagacccaacccagggcagggggtgcaggattgtttcccaccagaaatgacattcacaaaggatggataggagttggccagcaggagaagcagactttcaggcccagggagaaagtgtgttcaaaggtcctgaggtgaaaagcttaagaaactgaaagagggatggggggatagcaaagaaaagtggtgtgctgggcatggtagctcacacctacaaycccagcactttgggaggcccaggcaggaggatcacgtgaggactggagtttaagaccaggctgggcaccacagggagaccacatctctacaaacaaattaaaaaattagccaggcatggtggcacgcatctatagtcccaggtactcccagctactcaggaggctgaggtgggagg

SEQ ID NO: 70128 - DNA, 695 bp, Homo sapiens
tttcagctttctacatagggatagccagttttcccagcaccatttattaaatagggaatcctttccccattgcttgtttttctcaggtttgtcaaagatcagatagttgtagatatgyagtgttatttctgagggctctgttctgttccactgatctatatctctgttttggtaccagtaccatgctgttttggttattgtagccttgtagtatagtttgaagtcaggtaacgtgatgcctccagctttgttcttttggcttaggattgacttggtgatgcaggctcttttttggttccatatgaactttaaagtagttttttccaattctgtgaagaaagtcattggtagcttgatggggatggcattgaatctataaattagcttgggcagtgtggccattttcacgatattgattcttcctacccattagcatggaatgttcttccacacaaatattcttgagatttcttcagatctgaaagtcagcctgagtttttagacttgcttcgaaagactttggccctgggaaaaaggaaatcagtactccaggaacaagattttcctcgactttgtctcaacccaaagacgctatagcagcgcagttttcaaacgtgctttgaaaataaatgggacagtgtgtccacactggattttgcctttccctttttattacagcccgccccttttgtaaa

SEQ ID NO: 70129 - DNA, 695 bp, Homo sapiens
tttcagctttctacatagggatagccagttttcccagcaccatttattaaatagggaatcctttccccattgcttgtttttctcaggtttgtcaaagatcagatagttgtagatatgcrgtgttatttctgagggctctgttctgttccactgatctatatctctgttttggtaccagtaccatgctgttttggttattgtagccttgtagtatagtttgaagtcaggtaacgtgatgcctccagctttgttcttttggcttaggattgacttggtgatgcaggctcttttttggttccatatgaactttaaagtagttttttccaattctgtgaagaaagtcattggtagcttgatggggatggcattgaatctataaattagcttgggcagtgtggccattttcacgatattgattcttcctacccattagcatggaatgttcttccacacaaatattcttgagatttcttcagatctgaaagtcagcctgagtttttagacttgcttcgaaagactttggccctgggaaaaaggaaatcagtactccaggaacaagattttcctcgactttgtctcaacccaaagacgctatagcagcgcagttttcaaacgtgctttgaaaataaatgggacagtgtgtccacactggattttgcctttccctttttattacagcccgccccttttgtaaa

SEQ ID NO: 70130 - DNA, 695 bp, Homo sapiens
tttcagctttctacatagggatagccagttttcccagcaccatttattaaatagggaatcctttccccattgcttgtttttctcaggtttgtcaaagatcagatagttgtagatatgcagtgttatttctgagggctctgttctgttccactgatctatatctctgttttggtaccagtaccatgctsttttggttattgtagccttgtagtatagtttgaagtcaggtaacgtgatgcctccagctttgttcttttggcttaggattgacttggtgatgcaggctcttttttggttccatatgaactttaaagtagttttttccaattctgtgaagaaagtcattggtagcttgatggggatggcattgaatctataaattagcttgggcagtgtggccattttcacgatattgattcttcctacccattagcatggaatgttcttccacacaaatattcttgagatttcttcagatctgaaagtcagcctgagtttttagacttgcttcgaaagactttggccctgggaaaaaggaaatcagtactccaggaacaagattttcctcgactttgtctcaacccaaagacgctatagcagcgcagttttcaaacgtgctttgaaaataaatgggacagtgtgtccacactggattttgcctttccctttttattacagcccgccccttttgtaaa

SEQ ID NO: 70131 - DNA, 695 bp, Homo sapiens
tttcagctttctacatagggatagccagttttcccagcaccatttattaaatagggaatcctttccccattgcttgtttttctcaggtttgtcaaagatcagatagttgtagatatgcagtgttatttctgagggctctgttctgttccactgatctatatctctgttttggtaccagtaccatgctgttttggttattgtagccttgtagtatagtttgaagtcaggtaacgtgatgcctccagctttgttcttttggcttaggattgacttggtgatgcaggctcttttttggttccatatgaactttaaagtagttttttccaattctgtgaagaaagtcattggtagcttgatggggatggcattgaatctataaattagcttgggcagtrtggccattttcacgatattgattcttcctacccattagcatggaatgttcttccacacaaatattcttgagatttcttcagatctgaaagtcagcctgagtttttagacttgcttcgaaagactttggccctgggaaaaaggaaatcagtactccaggaacaagattttcctcgactttgtctcaacccaaagacgctatagcagcgcagttttcaaacgtgctttgaaaataaatgggacagtgtgtccacactggattttgcctttccctttttattacagcccgccccttttgtaaa

SEQ ID NO: 70132 - DNA, 1615 bp, Homo sapiens
tttctcacattgtcataatggaaattcccaaatttctcaaatgtgctttttttcttcatctctggtagcatgaaagcatctgccaaaaaatatgaaacttaagatgtatttaatgccattgcccaaacttgtaataacttgtaataatcagattatccttaaaacagtcaagtgtcattcccacaaagggcactggtgctctctccctttgagtaatgaaaaattttaaacctttgcttcttccttctgatgtctgtactcacagggtttacagtaccttttatgaggtgctactatgctgctggtatgtacaaatgtatagcatcagattctataggtaatagtgtcaaactactatcaagcatgcatctatctgtacacatgttttcaataaacatgtattaaccacttattttgtgctggtgcttggcactggaaatagaaatatgtaagattcaattcctgctcacaacatttagagtctagagtctatccactaggttgacaagttaacattgtgaaatctgtaatataaagagcctgaggatacagagaagtgacacagaggtcacactttggggctgttaggaagggcttcctgaagaaggccattgctgaggagaatacaatccacaagcatttattaagtgcctatgtcaagcccagctccaagcctgggtatacagtagtgaataaaggagaaagatattcctacctgcatgaagcttacattctaggagaataacgtgaagaaagaacagaagcttgccagatgaatgatccacaaagaaatgaacagtgtatctttggaggttagttatatataagtaagtatagctcagaaaagtctccagctcgctgtgtaatctctgtcttatccaaaactcactgagaacatgttgaagtgtccccagtttctataraggagtgcttccctccacaccagcgaacagggcctagaatccattcacaggtgaggggcctctgccatgaaaaagacatgtgcaggcgcatatgtgcactcaatcacagagacacacatgcacatgcacacacacagggtgagccattcacatggtgaccactgacactgcactggctagtcccagtcttgacatccccattgtaacaatgctcaatgccagaagcaggaatagaaggaagagattctacctggtccctacccacaagagctcgttttaagtttcttcctgatcacaaaagggagagtagatgttgtaatattcatggtgctttttaaagagagagtacacactagtatgtgtgccccttttgttcagagcaatggttatgcactctcactcaaataaacttaagtgtttcaaaggactcttggatggaggatgtaacatctacttgggtgtaatgatccctatgatcttgcaatgtaaaaatacagtatcttgatttttttcaaaagatataaagatgtgggcgggctgtggtggttcacacccataatcccacaagtttgagaggacaaggtaagaggattgcttgagctcataaggtcaaggccagcctgagaaacacagtgagatgctgtctctatttaaaaaaaaaaaatatatatatataaaggtgtgggtgtgaa

SEQ ID NO: 70133 - DNA, 1615 bp, Homo sapiens
tttctcacattgtcataatggaaattcccaaatttctcaaatgtgctttttttcttcatctctggtagcatgaaagcatctgccaaaaaatatgaaacttaagatgtatttaatgccattgcccaaacttgtaataacttgtaataatcagattatccttaaaacagtcaagtgtcattcccacaaagggcactggtgctctctccctttgagtaatgaaaaattttaaacctttgcttcttccttctgatgtctgtactcacagggtttacagtaccttttatgaggtgctactatgctgctggtatgtacaaatgtatagcatcagattctataggtaatagtgtcaaactactatcaagcatgcatctatctgtacacatgttttcaataaacatgtattaaccacttattttgtgctggtgcttggcactggaaatagaaatatgtaagattcaattcctgctcacaacatttagagtctagagtctatccactaggttgacaagttaacattgtgaaatctgtaatataaagagcctgaggatacagagaagtgacacagaggtcacactttggggctgttaggaagggcttcctgaagaaggccattgctgaggagaatacaatccacaagcatttattaagtgcctatgtcaagcccagctccaagcctgggtatacagtagtgaataaaggagaaagatattcctacctgcatgaagcttacattctaggagaataacgtgaagaaagaacagaagcttgccagatgaatgatccacaaagaaatgaacagtgtatctttggaggttagttatatataagtaagtatagctcagaaaagtctccagctcgctgtgtaatctctgtcttatccaaaactcactgagaacatgttgaagtgtccccagtttctataaaggagtgcttccctccacaccagcgaacagggcctagaatccattcacaggtgaggggcctctgccatgaaaaagacatgtgcaggcgcatatgtgcactcaatcacagagacacacatgcacatgcacacacacagggtgagccattcacatggtgaccactgacactgcactggctagtcccagtcttgacatccccattgtaacaatgctcaatgccagaagcaggaatagaaggaagagattctacctggtccctacccacaagagctcgttttaagtttcttcctgatcacaaaagggagagtagatgttgtaatattcatggtgctttttaaagagagagtacacactagtatgtgtgccccttttgttcagagcaatggttatgcactctcactcaaataaacttaagtgtttcaaaggactcttggatggaggatgtaacatctacttgggtgtaatgatccctatgatmttgcaatgtaaaaatacagtatcttgatttttttcaaaagatataaagatgtgggcgggctgtggtggttcacacccataatcccacaagtttgagaggacaaggtaagaggattgcttgagctcataaggtcaaggccagcctgagaaacacagtgagatgctgtctctatttaaaaaaaaaaaatatatatatataaaggtgtgggtgtgaa

SEQ ID NO: 70134 - DNA, 1615 bp, Homo sapiens
tttctcacattgtcataatggaaattcccaaatttctcaaatgtgctttttttcttcatctctggtagcatgaaagcatctgccaaaaaatatgaaacttaagatgtatttaatgccattgcccaaacttgtaataacttgtaataatcagattatccttaaaacagtcaagtgtcattcccacaaagggcactggtgctctctccctttgagtaatgaaaaattttaaacctttgcttcttccttctgatgtctgtactcacagggtttacagtaccttttatgaggtgctactatgctgctggtatgtacaaatgtatagcatcagattctataggtaatagtgtcaaactactatcaagcatgcatctatctgtacacatgttttcaataaacatgtattaaccacttattttgtgctggtgcttggcactggaaatagaaatatgtaagattcaattcctgctcacaacatttagagtctagagtctatccactaggttgacaagttaacattgtgaaatctgtaatataaagagcctgaggatacagagaagtgacacagaggtcacactttggggctgttaggaagggcttcctgaagaaggccattgctgaggagaatacaatccacaagcatttattaagtgcctatgtcaagcccagctccaagcctgggtatacagtagtgaataaaggagaaagatattcctacctgcatgaagcttacattctaggagaataacgtgaagaaagaacagaagcttgccagatgaatgatccacaaagaaatgaacagtgtatctttggaggttagttatatataagtaagtatagctcagaaaagtctccagctcgctgtgtaatctctgtcttatccaaaactcactgagaacatgttgaagtgtccccagtttctataaaggagtgcttccctccacaccagcgaacagggcctagaatccattcacaggtgaggggcctctgccatgaaaaagacatgtgcaggcgcatatgtgcactcaatcacagagacacacatgcacatgcacacacacagggtgagccattcacatggtgaccactgacactgcactggctagtcccagtcttgacatccccattgtaacaatgctcaatgccagaagcaggaatagaaggaagagattctacctggtccctacccacaagagctcgttttaagtttcttcctgatcacaaaagggagagtagatgttgtaatattcatggtgctttttaaagagagagtacacactagtatgtgtgccccttttgttcagagcaatggttatgcactctcactcaaataaacttaagtgtttcaaaggactcttggatggaggatgtaacatctacttgggtgtaatgatccctatgatcttgcaatgtaaaaatacagtatcttgatttttttcaaaagatataaagatgtgggcgggctgtggtggttcacacccataatcccacaagtttgagaggacaaggtaagaggattgcttgagctcataaggtcaaggccagcctgagaaacacagtgagatgctgtctctatttaaaaaaaaaawatatatatatataaaggtgtgggtgtgaa

SEQ ID NO: 70135 - DNA, 639 bp, Homo sapiens
ctaaaggttctaccatctcactatgtatataagtatatgtatatttgtgtgttttatatactctctctttatatgtatattttatttctacatattcatatacttatatctattttatttaacggttaaacctgcagacttctttgcatgggggawgctttctctttctctattctccactaacatttttgctcaactcacaacatttttcccttactactagcttgaaagacactgggcctgagggtacattagtgagtaaaacgaacaaatccctaccctcagggaagggatccctaccttcattttcaaatccctaccctcattttagtggggaacagacattcaaaattaaaatatttagcatgttagtgataagtgctaaagagcaaaaaacaaagtgagaaaggaggctagatgtgttaagtggggttaacattttagaaggggtggttaggaagaccccactgagaaggtaacttttgagtaaagacttgaggaaggaaatcctgcagctatctggggaagtactttccaggtagatgaaacagcaagtgcaaaggccctgaggcagagccatgcctacttttttccaggaatctccaacaggtcaatggctgaggcagaatgagcccactg

SEQ ID NO: 70136 - DNA, 972 bp, Homo sapiens
tgcatgtacacacttaatacatagtgcacattcccattttaacagtggctcatttaggcagtgacttacaattgcagggaaaggggaccataccagattgtgggaattgggtaattaccatattctctctggaagaaatactgcctcagggatgaataacaaagtgatttgtgacttctaagcaaatttcctagtctgcatacgtttccttatctgcaagctggaagacattgagtataataaatagatgtccttttaatatcattttacttccttaaaaatggaagtagtagaattgcttaatggaagtttaggaatcctcacagataacatttacctgatttcacttattctccagctctgctctttgaaggtaaatacaggagttggttgtttttagcaatgttagggcaaaaagataaatgcttcgttttttaagacatgtgttatacattagttaacctctgccaggagagttgggttttttggtattgttttctgtgccgtctgccctctagagactattactggaaaatgtttaccgaagtattttgcactggcgatcattgtgtgagcctgagagggtatctggttgtgttgtgttctcttaccacctccaaaatattctgggaggcycagtgtggtgggtcatgactgtaatcccagcactttgggaggccgaagtgggaggatcacttgagctcaggaatttgagaccagcctgggcaacaatgtgtagtcccagctacttgggaggcttaggagggaggatcacttgtccctgggagatccaggtctgcagtgagctatgtttgcaccactgcactcaggcctgggcaacagagtgagaccgtgtctcaaaacaaaacaacaaaatgtgtaggatatgttccattaggtaactggttaatagttcttatgtacaatttctattaggtggaattgcaggccatttttaaattggaatgttaa

SEQ ID NO: 70137 - DNA, 550 bp, Homo sapiens
atgtgacatctataccgatacgtatgaaatctgattaaaacataactattgatgcaacctcaggagttactttgaagtatattccaaccctgtttttgtacttacgccccactttgtatcttcatggagccgacttcgttgttgaaccarcccatggcttgcaaggaggggtagtcgtcagagatctcccactggcgtccaataaagttttccttctcaaagatggtcatcttagactccttatgattctgtaattcagaaattgttttaaaatgtttagtactagtgctatggctatcattcttcatgtttttcaaaattgaaacacttttggattatacaaggaagcacatgataatttaaaaagattaaggcaacagatttgtgagaaaaaagttacccataattttgtttattccaatttaaataccataacattttgaatgtacaaataactgatatactattttggaacaatgaagaggatttgacagtgagaaaaagtactaacaaaatgcagccaaccaagggattaatattcactaatgtg

SEQ ID NO: 70138 - DNA, 789 bp, Homo sapiens
aagaataaggcctgcccaggcagttcaggtctaactaaagagttgcaggacatgcggaggaacacagctgagccatgggggtcagtgccctctgtgggagcaggacagccctgaggggcacagagcactccaggaccaagtggggctttactggaccaggagagaaggctcttctgcctggggaaagcaagctttgtctcagtttgggaggccgcagagacctgggttttaggttctctcaacattgctatggctgtcagccagttgtctcctgcacaggtcttcacacactggggcccactactctctatgacagctcccaacctcccacatgatgtcagcacatgagtccatctgattccagggagtttgaaatgcatggaggagcttattttgttggcttgccttggtgttaggagcttgttgttttcttcccccatgtaaactaagcttttacctgggctctgaggcactcccgggttttcagcactcaataagcaggtgcaggggtggggagcagccaggtggagcctgttccacaacttcctgctcacttggtgctccgtgaggtagctgcccgtgtcccagcaagcaaggtgacatagattctgaaagccgcaggttgatggagctattgccctgagctgactggtgttcactggcagcagcagatcctgtcccccagtgacagtgtaaagcaccgtggctttcacagatttacacctcctgcctttcgatggcaggtgtcagcctctctctcgacatttgctgaaacgattcagcyttttt

SEQ ID NO: 70139 - DNA, 1058 bp, Homo sapiens
atataaaaatgggtttaaagatcatctaatataaacttttcatgtaataagtgacacaactgagtcctaaagagattaggtgacttgcccatggtcactaattagcgatctagttattggcagaagtgagatcatcaagattcttcttctttacccaaatactaaaaaccacaactttgggaatttacaaggaaaaaataattcttggttcttttttgtttgtttttgttgttttctcaagagtttattatgtatagttcatatattgaaagttttagatgtaacaactgtcttctcccagcctaatatctgtacaccaattttcccaactattgactactacacaatatgttatttccctattaatttgtgatggcatctttatcctatatcaagtataataaaaaaattcttcattcttaataataatattgatgggctgggcacagtggctgacacctataatcccagcactttggaaggctgaggcaggtggatcacttgagcccaggagttcgagaccagcctgggcaacatggcaaaaccccatctctacaaaaaatacaaaaattagccaggcgtgatggtacatgcctgtagtcccagacgctcgggaggctgaggcaggaggatggcttgagcctgggaggtcgaggctgcagtgagctgtgtttgtgccactgtatgccagcctgggtgacagtgagattctttctcaaataataataataataataatagtaataataatattgatggggaaactgaggtttaagttggaagtctttaagattatatgattaggcaatattagcattatgtgagtkcatggctacagtcctttctttctgttctaaaccccttggagctccacagctctgagatgccctttagtgtaggtttgccctgtactgtgtgtgctcctcacccctttcctcagaaatgccccgtacctctctgactcaggatgacgctacgaaactgacatgcaattattagcctcattctagctactatgggtttttgtgtagtttgcagggcatcattttattgtgtgc

SEQ ID NO: 70140 - DNA, 557 bp, Homo sapiens
ttatgattcttagttctcatgtataaaacaggaatcaccacacttctttgggtttatgttaggagcgaataaaataatgtatacgagagagctttgaaaaggatacaaatatgactgttactcttattagacaaggaagatctgtcacatgcaaatgacaactagttaaaagaacttattgccaactacacttacccgtaagccaagtccacaggccactcagagatcaatggcagtcattttttaatatttcagaggtggctaataaacatgcaaacttgataaatgttctgatgaaggaagcacratgcccggcacataactatttgtggaattgaacataattgaggcttaaagaatgaatagaaattagataggtcaacaatactgtggatggacattccaagcagagggtattgcatcaaaagtactttgggcattggagaaattttaggaagtttggtgtggcaaggacataactctatgaactgggaattgatgagagatcaggctaaagaagtaggcaaggaccaggttgcaaaaggtattgtgttctg

SEQ ID NO: 70141 - DNA, 557 bp, Homo sapiens
ttatgattcttagttctcatgtataaaacaggaatcaccacacttctttgggtttatgttaggagcgaataaaataatgtatacgagagagctttgaaaaggatacaaatatgactgttactcttattagacaaggaagatctgtcacatgcaaatgacaactagttaaaagaacttattgccaactacacttacccgtaagccaagtccacaggccactcagagatcaatggcagtcattttttaatatttcagaggtggctaataaacatgcaaacttgataaatgttctgatgaaggaagcacaatgcccggcacataactatttgtggaattgaacataattgaggcttaaagaatgaatagaarttagataggtcaacaatactgtggatggacattccaagcagagggtattgcatcaaaagtactttgggcattggagaaattttaggaagtttggtgtggcaaggacataactctatgaactgggaattgatgagagatcaggctaaagaagtaggcaaggaccaggttgcaaaaggtattgtgttctg

SEQ ID NO: 70142 - DNA, 557 bp, Homo sapiens
ttatgattcttagttctcatgtataaaacaggaatcaccacacttctttgggtttatgttaggagcgaataaaataatgtatacgagagagctttgaaaaggatacaaatatgactgttactcttattagacaaggaagatctgtcacatgcaaatgacaactagttaaaagaacttattgccaactacacttacccgtaagccaagtccacaggccactcagagatcaatggcagtcattttttaatatttcagaggtggctaataaacatgcaaacttgataaatgttctgatgaaggaagcacaatgcccggcacataactatttgtggaattgaacataattgaggcttaaagaatgaatagaaattagataggtcaacaatactgtggatggacattccaagcagaggrtattgcatcaaaagtactttgggcattggagaaattttaggaagtttggtgtggcaaggacataactctatgaactgggaattgatgagagatcaggctaaagaagtaggcaaggaccaggttgcaaaaggtattgtgttctg

SEQ ID NO: 70143 - DNA, 965 bp, Homo sapiens
gacttaacagttagagatacttctcttatacatatgccaaagtcattatttctccagatttcctgtgacaaagtattttgtgatcatttataaattcccatgcattatcgctaccttccagatcatattatcaacacaaaccagtggaaagtaccagaaagaaataaagaaacgggcactacatttgaaatacaaaaacactccttattttgttgaaatttctagaacatcaataactaaaaaacaaacgaaagcagaaaaatgccaatttatttccccatgggcagaaacagtcattcttaaacccaaagcctggaaagaaactgaactcctatgaacacttttgtaatcactttagttctcatcacctctttgttatacaaaaactactttcaaagcccccccgccaaaaaaaaraaatccaggtccatttcacctctcagccaaacagctgcagttctatttaagattgacagacattccaaatggttctttgctcctactgagtacttaataccaagagttcacagttctccaactacagtgaagacagcccgaaaacataaagtaacatcttggccaacatttgcttaagaaaatatgcttctttggccaactaaatcgtctcttgcccatgacccaacagcctaccatttcttttgctctcaattcctacttatgcaagcacatcctgagtatgggaaatgagatatgtatgggaaacattcaccttgctatttatcacttgtataaactgatcaattgttaatggatctactcatttttatttagaaacagtccacagaagagctcaaaaatttaactgcctagaaaattcagagatttaagtacaattttgtttctaaaatggcatacaacttttccttatttttttaagtagtatttttttcctattcaacagactagaatgtgtttttgttaatttggaaaattcagaaaatttt

SEQ ID NO: 70144 - DNA, 754 bp, Homo sapiens
ttggatccttttggggcccctgcctcatggcctgcctggggccctcactctgcctcagtgctctgctgggctggagattgtgcattcagcccctggctcaccggcacccccatccacaaactgctctcaggaacatggcacccacacacaggactgtgtggcttctccaccccaacccagaaaccctgtgaggcaggcggcaccattgctatctaagattgaagcagagacctgcttgttgcttttctctgctctcggcatgcagtcggggtcactgacccgtggtctatgacacctcatctccttccccttcctcgaaatgagagagggcctcatgctcacttccaggcgtccttctcctatgcgtacaggcctrgtgggtgcacctgagaccaggaagcaagctcttcaaaaggacttcacacagcccctgccctgtgcagggcggagcgggcagactccttcccaggtgcccttaagagtcctgggcccccacagtggctttgcgagccccattgtgtcgcctctgaaatcgttttgccgaagaagcgtgtgtgcttgcaagtcaagagccaagggagagagtggctgaggtttcctggtgggccaagtgtggggcgtctgctgggaccctgagtgagccgcccggcgatggtgcgtttgagctgtggtgtctgcaccactcacatcacacaggtcaggcttctttgatttatggagataagcccgtgggcagcctttccagaggctgggg

SEQ ID NO: 70145 - DNA, 641 bp, Homo sapiens
gcttctgcttggttggatctcatcgctgggagactcctcagagccgccgtggctgcgaggagccctcaggatcatcctgccttcccccttggctcaggcctccctgggccaccccgctctccctgtcctgtcaggaaaccagctagagggaacagcaaggcctccacaggctgaggaccctggggctgggagcgccccctcggcctgtgtggctctggctcatgttcggcagggtgctactgggagggctaagcacagtgctcacaggccctgtgtggtgagggccggctgccagggaacaggaggggcttccctttgtcctctcctgccctggtcacccagcaagcctcctgccctggtcacccaggaagcctccttggtgcaggggctgagcagcacagaggtgtggggctgcaaagctggccagtccttggaggtctcagtctcaaacattccacccttgcccactcctcttattagagcctgagaggctctgtgactgtctgggacgcaagcacagggagcctggctggctctggagctgaccatgtgttggggagatggccaggaaacgctgcgctggtggtggtcagcccagcctccgggacacagacacagtgcsctgggggcggtgcgaagaa

SEQ ID NO: 70146 - DNA, 715 bp, Homo sapiens
agagcagatagtcaccctgagagacaggcctgtttagccttctttatggctcattgaatgtgagcagacaaataaggagggttctctgagttaggcctgctggacttccatcagcagcccctctgagatcccttccatatatacaaacacacacaaagacaagttggacagaaggccctccaaattagatccctaaccaagaactccaagagtatcccttcgaaacaatctgcctattcttctgagaaacctcctcaaaatcttcctgattgaggagaagtctaccaaaccaggactcttcctggtttgaaagagccaaccgagacctcccaggarctgaacaaacaccctgcaatgaggctacagacacagatatcccatggtggagctacagacaccccacaatggggctgcagataccccaccacagggtacaaaaccagtcgggagaaggaaggaagcattggcagcgcctaggatacgcaccagttcagacatcctacgatggggctacagacagacaccctacaccctaccatggggctacagacagatactctgtgatagggctgcagttaagggacatctccccaggactatttctccattgcaattaaatctatgcacattgggtcggcagcaccccaccagtagagagagtaccagagtcagcccccagtccaagataattaggcagccatttgggctggcttct

SEQ ID NO: 70147 - DNA, 468 bp, Homo sapiens
attgtgattgtgaagttaaagtgaggccagttagcatggcatgtgtttcccagcgacactgtgggtgtagacctaaggtcagcggacagctggtgccacccggccatggagaccccagcaagcacagcaggaggggcagcgggtcagtgccccgatgcagctcagggggtgcaggagtggagagcgggtgaagtcagctgcaggaggggtggtgcctacaggagattcgggagccggagcagttgtggtgacagtgtggctgcaggagtggtggcaggggtcggggagaggaggtcatgggggtggcagggtygaggggctgagaggaccatcagtcagcctcacagggcgaagtcaccgtgagtggtgatgggaaggaagccagtgagccaagggtcctctgtgaatcagggagtgacctggcagttgacaggtgacatgaggacatggcagattaaagtgatctga

SEQ ID NO: 70148 - DNA, 468 bp, Homo sapiens
attgtgattgtgaagttaaagtgaggccagttagcatggcatgtgtttcccagcgacactgtgggtgtagacctaaggtcagcggacagctggtgccacccggccatggagaccccagcaagcacagcaggaggggcagcgggtcagtgccccgatgcagctcagggggtgcaggagtggagagcgggtgaagtcagctgcaggaggggtggtgcctacaggagattcgggagccggagcagttgtggtgacagtgtggctgcaggagtggtggcaggggtcggggagaggaggtcatgggggtggcagggttgaggggctgagaggaccatcagtcagcctcacagggcgaagtcaccgtgagtggtgatgggraggaagccagtgagccaagggtcctctgtgaatcagggagtgacctggcagttgacaggtgacatgaggacatggcagattaaagtgatctga

SEQ ID NO: 70149 - DNA, 726 bp, Homo sapiens
ccaagaccccaggggctcgacagcgactgcaggcccgaaggcagcacacccgcaaaaagtagcctttgtcccctgtccctgttccccccaccccttccctaaatctggaccttggcacctgctaggaagagccttggacccttccagttgcgtaaagcaaacctaccccggatctctggcttcagccgccagggggcagtggcagccctggggccctttcccttctggaggaagcacaagcctcagggaaggggaagcaggatgcggagggccaaagcccgggacctctacttgaacagttcyactggggaggctggagaactaaggaaacacctgtacatagtgtccgctgccctgactcccgcttagcacacccttaggcaggcgccccttccacctttccccgagaccgtcgtcgctggagggggcagggtccagcccgcctggatcggtggtgtgcacctgatgggatttgggaaatgggctatccgtaaagctttatcttgcttggcttagctgtgagaagtggttctcttcctctggtcccttctggggactctgtttccccatttcttgctgctgtgtccctcaccagttccttgcaggattccttcgtttttaaatgcccttgaatctagctttgccttggagaccccagtgggtgctgctcctgccgttttcttcctgccaagcctgaatcaatgtttcatctccaaccctctgcca

SEQ ID NO: 70150 - DNA, 726 bp, Homo sapiens
ccaagaccccaggggctcgacagcgactgcaggcccgaaggcagcacacccgcaaaaagtagcctttgtcccctgtccctgttccccccaccccttccctaaatctggaccttggcacctgctaggaagagccttggacccttccagttgcgtaaagcaaacctaccccggatctctggcttcagccgccagggggcagtggcagccctggggccctttcccttctggaggaagcacaagcctcagggaaggggaagcaggatgcggagggccaaagcccgggacctctacttgaacagttctactggggaggctggagaactaaggaaacacctgtacatagtgtccgctrccctgactcccgcttagcacacccttaggcaggcgccccttccacctttccccgagaccgtcgtcgctggagggggcagggtccagcccgcctggatcggtggtgtgcacctgatgggatttgggaaatgggctatccgtaaagctttatcttgcttggcttagctgtgagaagtggttctcttcctctggtcccttctggggactctgtttccccatttcttgctgctgtgtccctcaccagttccttgcaggattccttcgtttttaaatgcccttgaatctagctttgccttggagaccccagtgggtgctgctcctgccgttttcttcctgccaagcctgaatcaatgtttcatctccaaccctctgcca

SEQ ID NO: 70151 - DNA, 1115 bp, Homo sapiens
aaggaagcacctaggatgactcggtttctggcttgaccaaatgggtggaaaacggtgacatctgttagattaaactggggatgtactaagtgtaaagtctgagaggaaagatgaatgcagcgactgtggcatctgtggtgcattcatgtgaacctaaggagggaagaatgcaaaagggaagtctacactgggcggtgagaatcaccaggtgggaggcaggagctaaagttagagaaaaaacggagagctccggaagaatgyaggatggggctcctaggagttcgatgtttaagggatgcgaggaaaacaaaccttggagatggagaaactgctggaaaggtaggaacaaagcccagagagcaaagtcacaactatccaaccacttctcttcccagtaccccagacacctccctagatgaggacagccagggctctaagctctcacctggaagcccgaccctgataggagaaaccttgtctcttgaaataactacataaacggagcaggtcttgagagtgttcacacgcacaaatcgaggcagctgggaggctaggtaggacgcaatgagcagtgagtaggcaggagcaaagttccccacctcccccgcccctcaactccttccagctcacctggaccaggcctggatcccacttccaacaggtcctcatgccagctcacaccccgaagaaccttgagccgagccaactcaacacctcgcctggtgccgtcccaacagagccttccattggcccccaccccctcgaaagccctttcccaacaactcatacactagcacctggggatgagggatcaaagacagaaacgccctaagcaagaagtatgaatgccttagaactaactctaatagagcccgggcactggaatggctaaagagatcacctgactagatggttacagataaaggtggggtaccttactcaagaccacaccagaaattaactacacaacaggatcggaacctggcgtctcgcttcccagccttagaccctttccccacagatgttcaccagtagacctctgcacccaacttcttgccaacattaccctttcgtgggtgtgggtttggggtttttgtttttttttagaatggggt

SEQ ID NO: 70152 - DNA, 1115 bp, Homo sapiens
aaggaagcacctaggatgactcggtttctggcttgaccaaatgggtggaaaacggtgacatctgttagattaaactggggatgtactaagtgtaaagtctgagaggaaagatgaatgcagcgactgtggcatctgtggtgcattcatgtgaacctaaggagggaagaatgcaaaagggaagtctacactgggcggtgagaatcaccaggtgggaggcaggagctaaagttagagaaaaaacggagagctccggaagaatgtaggatggggctcctaggagttcgatgtttaagggatgcgaggaaaacaaaccttggagatggagaaactgctggaaaggtaggaacaaagcccagagagcaaagtcacaactatccaaccacttctcttcccagtaccccagacacctccctagatgaggacagccagggckctaagctctcacctggaagcccgaccctgataggagaaaccttgtctcttgaaataactacataaacggagcaggtcttgagagtgttcacacgcacaaatcgaggcagctgggaggctaggtaggacgcaatgagcagtgagtaggcaggagcaaagttccccacctcccccgcccctcaactccttccagctcacctggaccaggcctggatcccacttccaacaggtcctcatgccagctcacaccccgaagaaccttgagccgagccaactcaacacctcgcctggtgccgtcccaacagagccttccattggcccccaccccctcgaaagccctttcccaacaactcatacactagcacctggggatgagggatcaaagacagaaacgccctaagcaagaagtatgaatgccttagaactaactctaatagagcccgggcactggaatggctaaagagatcacctgactagatggttacagataaaggtggggtaccttactcaagaccacaccagaaattaactacacaacaggatcggaacctggcgtctcgcttcccagccttagaccctttccccacagatgttcaccagtagacctctgcacccaacttcttgccaacattaccctttcgtgggtgtgggtttggggtttttgtttttttttagaatggggt

SEQ ID NO: 70153 - DNA, 1374 bp, Homo sapiens
actgggcctcccactatggcctcaagccagcatcactggcttttcttcttcccagcagggaacagcaggcacagagtcagaagtgggaagtgcagctggacgcctgcaccactgcctggtctctgccccttctctcctccccttccccagcaacacccctgtgtccccaaggtcaccagaatcaggtggaaactgggttacatcacaggactggggaggcagcctttgttgggcctgctctgataacattcaagtgctggccttggccactgtggaggaggggcagaaacagagggactaggcacactgtccacacctcacgaccccgacaggagcagacaggtgctgggaaacagttctttctgaatctcaatctcttgctcttatatccttttttggggggggtggggggctggggggcaggggaagacagtgtcttgctctgttgcccaggctggagtgcagtggcgtggtcacagctcactgcagcctccaactcctaggctcaagccatcctcctaccttagctgcctgagtagctgggactacaggcacgtgccaccatgccaagctaatttttaaaattttttttgtagataccgggtcttgctttgttgcccaggctggtcttcaacttctgggctcaagcaatcctcccaccttggcctcccaaagtgctgggattacaggcatgagccttattgcacgcagtcttccttctctctctctttttttctaatacaaactggcagatgatggttcgatctctcgaatttttttttttattttwttgttttatttactttagtagagacaggggtctcactttgttgcctgggctggttttgaactcctggcctcaagcaatcctcctacctcagcctcccaaagtgctgggattacaggtgtgagccgccgaacctggcctcttttttttttttttttaaaagatttgaaggtatctttatttacttatttagattttttaaatcgaggtataacatatacaagtgtgcaaatcttaaccacacagcttgataaacacttgatgtatatacgtgcactctcaagagcaagatgtacagtgtttccagaaagctccctcctgcctccttccagtcataactcctaacaaggacagccactgtccttattaccatgttgtcatgtggcctgtttttgaatgtcacataaacagcatcatatagaatgtacccttttgtgtctggtttctttcactcaataatattaaattgtgagtttttttttaatgtgaagtctttcaacgtttagaaattcaatgacactctgttatacaggttttgtttgtttgtttgtttattgagacagagttttgctcttgttgcccaggct

SEQ ID NO: 70154 - DNA, 679 bp, Homo sapiens
gaccaacatggagaaaccctgtctctactaaaaatacaaaattagctgggcatggtggcacatgcctgtaatcccagctactcggggggctgaagcgggagaatcgcctgaacccgggaggaggaggttgtggtgagctgagatctcaccattgcactccagcctgggcaacaagagcaaaactccgtttaaaaaaacagacaaacaaaaaaacaccaaaaaaaaaaaaaccttccaggctcaagagatcctcctacctcagcctcccaagtagctgggactacaggttgtacctccatgcctggctaatttttgcttctttttttttttttttttggtagagatgggatttcaccayattgcccaggctggtctcgaactcctgggctcgagtgatccgcccaccttggcctcctacagcactgggactagaggcatgagccactgtgacctgcctatttatttaatttgtgtttggctcgtccagtgaagcagtgggagtggagaaggaacaaaaaaatctgtaagtcgttgtgatcaattaactgtaaccaccactgcactcgggccagctccatcgagttcattatgaggaaggagagaagaggggagaaccttctactttctagaccctggggtttgtggggagaggaaggccgagggaggagaggaagagatt

SEQ ID NO: 70155 - DNA, 562 bp, Homo sapiens
acacttcctgtttctgcttctgcattctatatttattcttccatctgctacaaactgtattctgcattcactgctttataaaactgcagtctcaaagttagttgtagacatctgtatgtagagatatgatgtaacagataccctaaagggtcttacccatactgtacaattaaattttgggaaattgaaacaactgtcccttacatacactgctagtttcaagggaaaaaaaaaaagtgaggaaattcttcaaggacaaaaacaaagcctgaaacccamcttggaccattaagtaaacacaaaatctgcttgggctgaggacaagtccccatatcagcccatgagttaggaagatatgatttgggttctctttaaagtcattccctgcaaagacctttaagagactaaaatgaaaccctcttgatgggaattccttgtaaatcccatattgaggcatgatactctaagttggcttgtacaatcgtagatggattctacactgcatgtctcacaaaagtaagtgaaaatcttttggggatgaaaacatccctaatacagagtc

SEQ ID NO: 70156 - DNA, 562 bp, Homo sapiens
acacttcctgtttctgcttctgcattctatatttattcttccatctgctacaaactgtattctgcattcactgctttataaaactgcagtctcaaagttagttgtagacatctgtatgtagagatatgatgtaacagataccctaaagggtcttacccatactgtacaattaaattttgggaaattgaaacaactgtcccttacatacactgctagtttcaagggaaaaaaaaaaagtgaggaaattcttcaaggacaaaaacaaagcctgaaacccaccttggaccattaagtaaacacaaaatctgcttgggctgaggacawgtccccatatcagcccatgagttaggaagatatgatttgggttctctttaaagtcattccctgcaaagacctttaagagactaaaatgaaaccctcttgatgggaattccttgtaaatcccatattgaggcatgatactctaagttggcttgtacaatcgtagatggattctacactgcatgtctcacaaaagtaagtgaaaatcttttggggatgaaaacatccctaatacagagtc

SEQ ID NO: 70157 - DNA, 655 bp, Homo sapiens
tggaatggggcttgtattagtttgctaaggctgccctagggagttgaaaagtgtgacccgtttgatggtagcactctcagaggcaggagaaataagttctttatttctgaaggggaatataggcagttcatttcagcatccacaggagcctgaacaatgggccattctatggtcccrgaatagaggaaatggagggtttggagtggctaacctagtttccaaactaaagcactcttcggttggtacagtgaaatgcaatttctttagtaaatagtaccatgtggtgagattttggtggtctgtcttctgactgtgatattaacttgtttctgtagaactcttcagctgcctgacttctctacatcatcaagcctccaagggatgggccccttccaaagttgtcttcctctttcccagcagtgctttcccaagaaatcaatcacaaactcaatttcactttacaatttccttcttttcagttcttcagtagctaagatttgtgccactgggtctcaaatctgttctcagaatttccttactctgggtaagaccccttgccttctggcagtgtgcttcagttaacattacctatgtttcactactgctagggccttgctgtaccatcaataccccctgactctcagcttgtgaatgg

SEQ ID NO: 70158 - DNA, 655 bp, Homo sapiens
tggaatggggcttgtattagtttgctaaggctgccctagggagttgaaaagtgtgacccgtttgatggtagcactctcagaggcaggagaaataagttctttatttctgaaggggaatataggcagttcatttcagcatccacaggagcctgaacaatgggccattctatggtcccagaatagaggaaatggagggtttggagtggctaacctagtttccaaactaaagcactcttcggttggtacagtgaaatgcaatttctttagtaaatrgtaccatgtggtgagattttggtggtctgtcttctgactgtgatattaacttgtttctgtagaactcttcagctgcctgacttctctacatcatcaagcctccaagggatgggccccttccaaagttgtcttcctctttcccagcagtgctttcccaagaaatcaatcacaaactcaatttcactttacaatttccttcttttcagttcttcagtagctaagatttgtgccactgggtctcaaatctgttctcagaatttccttactctgggtaagaccccttgccttctggcagtgtgcttcagttaacattacctatgtttcactactgctagggccttgctgtaccatcaataccccctgactctcagcttgtgaatgg

SEQ ID NO: 70159 - DNA, 1096 bp, Homo sapiens
ggccatagggttattttaaacaattattttagcctggatatacaccaatatggtttggctgtgtccccacccaaatgtcatcttgaattgtagttcccataattcccacatgtcataggagggacccagtgggaggtaactgaatcataggcagttaccctcatgctgttctcatgatagtgagttctcatgagatatgatggttttataaggggcttttycctgccttcagtctgcatctgtccttgctgccaccatgtgaagaagggcgtgtttgctttcccttctgccatgattgtaagtttcctgaggcctactcagccacgccgaactgtgagtcaattagatctctttcctttatatattacccagtctcgggtatgtcattagcagcatgagaacagactaatatatacacttttttgttagccacagttatcattactttctgcccctagattctctccttgttgatactggcttctgaaattatttgcctttttgccctatgaaagaatgaaaacatatttcagaattctatggatcagctgaggaaaatgtgggtaggaagcaggtagaggtttaggctgcacagaacagctacctagaaaagtggcacatgaagtagtcttgctgtgaaaagtcaggcttggtttatcatgttgaaatgttgccaatgattaacattgtaaagacacaggaggaaggaaagtaaaaaaaagtattcaggaaacactgatcaatccagtatggtagagatgaagcacgaggccagttctgtttcataattgtccacctttttcatataccagtattgcaaacacataaatccaatctattcccaaagtctttaccttaggtgatatccaagaccccaccttcttttcaaaaacatagaagaacctgcacacttcagtctcccattggacatgatcacttttctatctgaatgaaagaaatcaagggagaaaagatattgggggtcatttcttctttctctagtaaagaaagacgaggagccaaggctcagaagtgcaaaggagaagtattcaacagggtataactagatctagtgtgcattttaacatttgaaata

SEQ ID NO: 70160 - DNA, 924 bp, Homo sapiens
tttataatcagaatgtcattataattaaatgttatgctgtgccatttcatcagtttatcagaccttcttatagtcaatgtcacattaaattagaatccgagtaaataatgtttaaaaatagctgatacatttgaagttcaggctaaaaamctcatatttttatttgtaaaatgttctcagtgttagctttattgataataaccgataaccaacctaatattgtatgatttttaaattatttttaagcacaaaatagacccatgttggggatgaataacatgtctgattttgttaattttgtctactacttttccctatatttccttgtttccttcatcctaaatttttaaaaatgaaaactgtaatcattattgaatgtttattaaatgttttcttttgttaactgaagtaaaaggaaacattcttgtagaattatggaaactaacaatgtagtaggacctaaaattgaatgttaggaggttcttcattttaagggtcttcctgtgggagaagtttccattcaactgttgtatcaattttatcatcaacatttcccagctcctgctctttacagagttctaagaatacctaagtaagagaaaataaaaaagatacaaaaatgtcagggtgtgtctgaaagatggattcacacagaggtcatctggatggtgctcactcgttcaatgaaaacccacctgctccaaggtagcctgagagaggctgtattcctccaggttgaaggtctgtttcactgcatgtaaagagactgacattagtggcttatatatttttcaccaagtgtttgtaaagtcatacaatagagacagtagcttcaaattgtttagatactgtaagatataggccaaataattacattttcttgaaggataaagaagagtggtgatatggctaataaaagatagc

SEQ ID NO: 70161 - DNA, 924 bp, Homo sapiens
tttataatcagaatgtcattataattaaatgttatgctgtgccatttcatcagtttatcagaccttcttatagtcaatgtcacattaaattagaatccgagtaaataatgtttaaaaatagctgatacatttgaagttcaggctaaaaacctcatatttttatttgtaaaatgttctcagtgttagctttattgataataaccgawaaccaacctaatattgtatgatttttaaattatttttaagcacaaaatagacccatgttggggatgaataacatgtctgattttgttaattttgtctactacttttccctatatttccttgtttccttcatcctaaatttttaaaaatgaaaactgtaatcattattgaatgtttattaaatgttttcttttgttaactgaagtaaaaggaaacattcttgtagaattatggaaactaacaatgtagtaggacctaaaattgaatgttaggaggttcttcattttaagggtcttcctgtgggagaagtttccattcaactgttgtatcaattttatcatcaacatttcccagctcctgctctttacagagttctaagaatacctaagtaagagaaaataaaaaagatacaaaaatgtcagggtgtgtctgaaagatggattcacacagaggtcatctggatggtgctcactcgttcaatgaaaacccacctgctccaaggtagcctgagagaggctgtattcctccaggttgaaggtctgtttcactgcatgtaaagagactgacattagtggcttatatatttttcaccaagtgtttgtaaagtcatacaatagagacagtagcttcaaattgtttagatactgtaagatataggccaaataattacattttcttgaaggataaagaagagtggtgatatggctaataaaagatagc

SEQ ID NO: 70162 - DNA, 924 bp, Homo sapiens
tttataatcagaatgtcattataattaaatgttatgctgtgccatttcatcagtttatcagaccttcttatagtcaatgtcacattaaattagaatccgagtaaataatgtttaaaaatagctgatacatttgaagttcaggctaaaaacctcatatttttatttgtaaaatgttctcagtgttagctttattgataataaccgataaccaacctaatattgtatgatttttaaattatttttaagcacaaaatagacccatgttggggatgaataacatgtctgattttgttaattttgtctactacttttccctatatttccttgtttccttcatcctaaatttttaaaaatgaaaactgtaatcattattgaatgtttattaaatgttttcttttgttaactkaagtaaaaggaaacattcttgtagaattatggaaactaacaatgtagtaggacctaaaattgaatgttaggaggttcttcattttaagggtcttcctgtgggagaagtttccattcaactgttgtatcaattttatcatcaacatttcccagctcctgctctttacagagttctaagaatacctaagtaagagaaaataaaaaagatacaaaaatgtcagggtgtgtctgaaagatggattcacacagaggtcatctggatggtgctcactcgttcaatgaaaacccacctgctccaaggtagcctgagagaggctgtattcctccaggttgaaggtctgtttcactgcatgtaaagagactgacattagtggcttatatatttttcaccaagtgtttgtaaagtcatacaatagagacagtagcttcaaattgtttagatactgtaagatataggccaaataattacattttcttgaaggataaagaagagtggtgatatggctaataaaagatagc

SEQ ID NO: 70163 - DNA, 1245 bp, Homo sapiens
attttgtcaacttcctgctgcaggagaacttaataatgaaattattcttatagctctctaaaaatttggatatattgaaatatttttcttcataattctttagtgtgcttctgttgcttctctgctaaatatgaacaaggacgcatatagccccatataataggaaaataggatatagcagtcatttgaggataagtgactgctacaataagataaaaaaggtattgtcaactctgtcaataaagaagatagattttattgccttctcaagtaacagcttcccatgtaggtaggtagcaggtcaaggcaagaagacagctttgctccatgatgtcatcaaaggacctggttccttctatgccatttctccatcaactcaggatgctgtctttatccacataggtgatgcctctacattccagaacatgaaagtattctgacatatcttccttggacatgacatatttttctatgtattgctggactttgtttattgtcactttaggtaggattttaatgtgtatgttgtccctgaagattggaattctttccctacttaaattctttccctactgtccttgtccagttttggtatcaagggtgtctagttttaaattctccagtatagttttataggataaggattatttattgctttggtattcatggaaaagcctgagaacttatttaatgattttccatttcttcttgagtcagttttggtacttataattttctctatggtaagcccctgcatatgttttaaatatattgagataaggtgatcacagtatttgcaaaattctaaaaatttctgtgattatgtccactttttcatttctaataccatttctttgattgtttatttctctttttttctgctaagccatctttagcataactttcatcctcatgatgccaaggtggctgtttgcagcggaccctatccytgttggactgaacaaaggatgacaaacatgggaataaagacaaagacaaaagagtatatttggaagaagaggtctgggggctccttgcttccagtgaacacaggccctgagcctttacagcccttcgtatttattagagtgaatagggagaaggggggtggttgtcggtcagtagcttgatttacagcaggcttgcaagactgcattcgtcaaccaataggctctagatgtcccattagataacctcaaggagcatgacaccagggagtgattgccttcagcaaaccttctggtg

SEQ ID NO: 70164 - DNA, 1138 bp, Homo sapiens
taggttcccagccgacccagaacttcgcctcgatcctaaaggcatgtaacagccattcgcactttagagaaaaggagcacgcttcttcacaagcaggcttggattcagtatctgaatctagaaccggaaggtggtggggggcggagtttgggaggaagcctgaagaccctagcgggatgggatagactggccctacaccatgcatttcaggatagtacatgcctggcatgctcctgcccaggcttccgaggatgccccagccattccccagctagacagaataccaccccttgtacagagcacctaggcctcgaggcccctcctcctgaacaaggcttggttctccttcaggccaaagatgggacctggcgaacaggaccataaaatctcaaactttggggaattggtccagtgtattttccacaataaaactggaaaccagagacaggaatacaaaggcctggcttttcctggcccctgcccccactgtctccacccacccagccctgacccagggggcaccaaggtgcccatctgcagggagacccaggtctgctggccatcacccacccacttgtgtctgcttctgaaccatgttcactggatggagagcctctgcaggtgtccctcctgtggggagctttgccaggtggcctgctggaattgccccggaagcactaaccccsttctgccctggacataaggctctgtggctaggaccctcgttttagggccacactcagctgggtttgatgtctgggtttgccacttgctgtgtgacctcaggcatgcagcttaagctctttgagcttcaggctccttagctatatagtagggctctactgtagaaagattaagagagccaagatgtttttttgccgggcgtgctggcatgtacctataatcccagctactcaggaagctgaggcaagaggattgcttgagcccaaggagtttgaggctgcagtgagctgtgatggcaccactgctctccagcctgggcaacagagtgaaaccctgtctcaaaaagagagatagagataggagagagagagagacagagaaagacgacagagagaaagagagcgcgcgccaagacctatgaagtggtttggcacatactaagcacaaaggatcc

SEQ ID NO: 70165 - DNA, 904 bp, Homo sapiens
taccaccatggtagtagtttgtgtctaatatatgtgcacacgcctttatacttcaggcagcatgtggacatcgacccagccagaacagaaatcagtataaactaatcatacacatgaaaatggaaacccacaaataatactagcttctcttttgaaaaagcagtaatgtgtgtttgtttttgagaagatttaaaaaaaaaacaatgaaaatggccccagcagagaatgccctttccttatgttgtcagtgatggggctaactgagcctggaaaagaaacagatgccgtgagggagaaattggtaggtgggagaactggagggagaggcttcccgcaaccttgtcttccagagctttataaccatcctccctactctgtcatgtttcctcctaatatctatttctctttgttcattgctacttgagtaagtctctactgcctccccctgcaagcagccctggccacccagggctttaatgacaagaaaaaatcatatcttttcctccctacaagatgaatatgccagattcccaggaatatcagctgtttaaaaacatcactagattattagatctaaggcaaaggaaatagagtttttgtacctgctcaaattgtggccatttgataaacctgctacctttagagtacagatgtctttgaaagagactccagcttcttatgttgctcaacacttcaccccrtatcgagagcgggaaagaagacaacagctacactttgtagaaggaaggggaaaacccacaaagaagccaacctgccttttatcagtgtgagctctttgttttggtgacataacacaccatgtcagttcctggcatgcttaatttctggcttgcctaaagtaacaacaatgccagttactagaaatacagctgctataaatggt

SEQ ID NO: 70166 - DNA, 904 bp, Homo sapiens
taccaccatggtagtagtttgtgtctaatatatgtgcacacgcctttatacttcaggcagcatgtggacatcgacccagccagaacagaaatcagtataaactaatcatacacatgaaaatggaaacccacaaataatactagcttctcttttgaaaaagcagtaatgtgtgtttgtttttgagaagatttaaaaaaaaaacaatgaaaatggccccagcagagaatgccctttccttatgttgtcagtgatggggctaactgagcctggaaaagaaacagatgccgtgagggagaaattggtaggtgggagaactggagggagaggcttcccgcaaccttgtcttccagagctttataaccatcctccctactctgtcatgtttcctcctaatatctatttctctttgttcattgctacttgagtaagtctctactgcctccccctgcaagcagccctggccacccagggctttaatgacaagaaaaaatcatatcttttcctccctacaagatgaatatgccagattcccaggaatatcagctgtttaaaaacatcactagattattagatctaaggcaaaggaaatagagtttttgtacctgctcaaattgtggccatttgataaacctgctacctttagagtacagatgtctttgaaagagactccagcttcttatgttgctcaacacttcaccccatatcgagagcrggaaagaagacaacagctacactttgtagaaggaaggggaaaacccacaaagaagccaacctgccttttatcagtgtgagctctttgttttggtgacataacacaccatgtcagttcctggcatgcttaatttctggcttgcctaaagtaacaacaatgccagttactagaaatacagctgctataaatggt

SEQ ID NO: 70167 - DNA, 604 bp, Homo sapiens
cggccagcagcagcgtgatggggtctgggagggctcagagctgcgctggagggagactcaccggccgatcagaaccacctgtgccacctggccagcagggacgactctgtccgcctccccgctgggagcaaagcaagggccggtcaccccttcctaataaattcccgtggccaataatgacaagctggtgacaggtgctggagagctgagttctgagtggatacgtggggtgatggctgattttatgggtgcactagggcgggccatggtgccccagggtttggttaaatgtttttttgtttttgttttttttctgagatggagtctcaccctgtcgcttggggttggagggcagtggcgcaatctcagctcactgcaacctctgcctctcgggttcaagctattctcctgactcagtctcccaagtagctgggactataggagcctgccaccacgcctggctaatttttttgtaattttagtagagayggggtttcaccatattggccaggctggtctcgaactcctgaccttgtgatccgcccacctcagcctcccaaagtgctgcgattccaggcgtgagtcaccgtgcctggccagttaa

SEQ ID NO: 70168 - DNA, 749 bp, Homo sapiens
tgggtggcagcaggggcgcccggccttggctcaaccttcccgactctaggcacggccactttgcctctgggtggggaccaggggcctccgtgtacaaagagctggcactcgtttaactctcagcatagagcctggcacgcggtcagccgtcacaatcctctgtgggagtttgcagaacgagagaatgaaagggcgaaggcaggctgggcgtggtggctcacgcctgtaatcccagcactttgggaggctgaggcaggtggatcatgaggtcaggagatcgagaccatcctggctaacacggtgaaacctcatcgttactaaaaaaaaaaaaaaaaatacaaaaattagccaggcatggtggtgggtgcctatagtcccagctactctggaggctgaggcaggagaatgacgtgaacccgggaggtggagcttgcagtgagccgagatggtgcccctgcactccagcctggacgacagagcaagactccrtctcaaaaaaaaaaataaagaaaaaataaagaaagggcaaaggcaataggccaggccctctggagaagggaggacccacgcaggctcccgggtggcctgcctcagtccatggcaggggttcttgccctccaggggacactgggtgatatctggggacatctgtggctgtggggggtgctcctggcatggagtgggttgggtggaggccagggacattgctcagctccctgcagtgccccggacggccccacgccagggaa

SEQ ID NO: 70169 - DNA, 816 bp, Homo sapiens
aattgtgatgactcttggcaaaagctctttaatttctgtctcccattgatatttgctaccatgctctcctgctgtggccagaattcagtcctaagaagttaccacatgtgactgggtgcattttgttaaataataactttattgatatgtatacatccatatgatgatgtagatacagatcataaacactactttatgccatatatatatatatatatatatatctgcacatgagtggttcaaactccttgacataaaaacatatagaatttgggcacagtggctcatgcctgtaatcccagcagtttggtaggccaaagtgggaggatcacttgaggccaggagttcaagaccagcctgggcaacatagtgagaccctgtctctacaaaaaatctttaaaaatattagcaaagtgtggtgacacacccctgtattcccagctactcaggagacaaagatgggaagattgcttgatcccaggaggttgaagttatgctgagctatgatcgtaccactccaacctgggtcacaaagcaaggccctgtcccccacaaaaacaaaaacaaraacaaaaacatacagaatttccatttagattttttacagcaggggaaagcatgctgatgtcagttcattggtaattattttgcccataagtacctgttggaaaaaggaaatcgtgaaaacataaagaataaaattaccatgaatcatactagtgatttaaagtaatactattattacttgtttgatttatactaattcacactagtgatttatagtaataatttatagaataacttactagagcatta

SEQ ID NO: 70170 - DNA, 944 bp, Homo sapiens
cactttgggaggcctagctgggtggatcacctgaggtyaggagtttgagaccagcctggccaacatggtgaaaccctgtctctactaaaaatacaaaaaagttagccaggcatggtggtgcacacctgtagtcccagctactcgggaggctgaggcaggagaattgcttgaaccctggagacagaggttgcgtgagctgagatggagctactgcactcaagcctgggtgacagagcgagactctgtctcaaaaaaaaagagaaaaaagaaaaacgaatagaatatctttggacagtttaaaaaataattacaaagcagccccctgtgtaaccaacactcaagtcaagaaataataatggccaaacatggtggcttatacctgtaatcccagcacaatgggaagctgaggccagaggactgcttgagcccagaagttcaagactgggcaacaaagtgatgtcccgtctctatgaaaaattttaaaattagctgggcatggtggcacgtgcctatagtcctagctacttggggggctaaggtgagaggatcacttgagcccagaaggttgaggctacaatgacttgtgattgtgccattgcacgcaagcctgggtaacagagcaagactctgtctcaaaaataaaataaaataaaataaaataaatagtaataatcagcacccaagaagttccctgtgcatcccctgagtgatcacaaccatctccctcctatcagaattactattatactaactttcatgatgttaattccttcttgttctttataatctaccacctgtatttgaattttatatgtgtggattcccactgtgcacattcttctgtatcatgcttctttccctcaatgttatgtttgtgggattcaaacaactaactcactggttgtcaccgtagctcactcattttcattgctgtattgtatgaa

SEQ ID NO: 70171 - DNA, 944 bp, Homo sapiens
cactttgggaggcctagctgggtggatcacctgaggtcaggagtttgagaccagcctggccaacatggtgaaaccctgtctctactaaaaatacaaaaaagttagccaggcatggtggtgcacacctgtagtcccagctactcgggaggctgaggcaggagaattgcttgaaccctggagacagaggttgcgtgagctgagatggagctactgcactcaagcctgggtgacagagcgagactctgtctcaaaaaaaaagagaaaaaagaaaaacgaatagaatatctttggacagtttaaaaaataattacaaagcagccccctgtgtaaccaacactcaagtcaagaaataataatggccaaacatggtggcttatacctgtaatcccagcacaatgggaagctgaggccagaggactgcttgagcccagaagttcaagactgggcaacaaagtgatgtcccgtctctatgaaaaattttaaaattagctgggcatggtggcacgtgcctatagtcctagctacttggggggctaaggtgagaggatcacttgagcccagaaggttgaggctacaatgacttgtgattgtgccattgcacgcaagcctgggtaacagagcaagactctgtctcaaaaataaaataaaataaaataaaataaatagtaataatcagcacccaagaagttccctgtgcatcccctgagtgatcacaaccatctccctcctatcagaattactattatmctaactttcatgatgttaattccttcttgttctttataatctaccacctgtatttgaattttatatgtgtggattcccactgtgcacattcttctgtatcatgcttctttccctcaatgttatgtttgtgggattcaaacaactaactcactggttgtcaccgtagctcactcattttcattgctgtattgtatgaa

SEQ ID NO: 70172 - DNA, 944 bp, Homo sapiens
cactttgggaggcctagctgggtggatcacctgaggtcaggagtttgagaccagcctggccaacatggtgaaaccctgtctctactaaaaatacaaaaaagttagccaggcatggtggtgcacacctgtagtcccagctactcgggaggctgaggcaggagaattgcttgaaccctggagacagaggttgcgtgagctgagatggagctactgcactcaagcctgggtgacagagcgagactctgtctcaaaaaaaaagagaaaaaagaaaaacgaatagaatatctttggacagtttaaaaaataattacaaagcagccccctgtgtaaccaacactcaagtcaagaaataataatggccaaacatggtggcttatacctgtaatcccagcacaatgggaagctgaggccagaggactgcttgagcccagaagttcaagactgggcaacaaagtgatgtcccgtctctatgaaaaattttaaaattagctgggcatggtggcacgtgcctatagtcctagctacttggggggctaaggtgagaggatcacttgagcccagaaggttgaggctacaatgacttgtgattgtgccattgcacgcaagcctgggtaacagagcaagactctgtctcaaaaataaaataaaataaaataaaataaatagtaataatcagcacccaagaagttccctgtgcatcccctgagtgatcacaaccatctccctcctatcagaattactattatactaactttcatgatgttaattccttcttgttctttataatctaccacctgtatttgaattttatatgtgtggattcccactgtgyacattcttctgtatcatgcttctttccctcaatgttatgtttgtgggattcaaacaactaactcactggttgtcaccgtagctcactcattttcattgctgtattgtatgaa

SEQ ID NO: 70173 - DNA, 418 bp, Homo sapiens
agcacgcaggtaagccgcgggctcggcgccccctcccgccaccgggcgccggcgtggggctcggaatcgttccggggctcgggctgggccgcgcgggcgcggatgyggcgggccgggttgggccgggcgctggggtgccggggtgctgcagggagggagctcggcggccggggtcggggcgccgggctgcgccggtgttgtcgccgctttgccgcgggacttcaaacagcaagggctgcagcggggccagctccaggcgccgttggcctgaggtagggtggggggaaggggctttccggggcctacgtctgcagccagccctccgcccagcgcctccatccctgcaggctgggcgcagctctcggcccctgcccggtgcttccctgggaaatgacctcttcctcttcgcagcccttgt

SEQ ID NO: 70174 - DNA, 1219 bp, Homo sapiens
ataaaatcacttcattacatgttagtgcaagggtgtccaatcttttggcttccctgagccacactgaaagaagaaatgtcttggaccacacataaaatatactaatactaatgacagctggtgagctttaaaagcaaacaaacaaaaaaatctcataatgttttaagaaagtttacgaatttgtgttgggctgcattcaaaggtatcctgggccacacgtgcccacaggccgtatgttggacaagcttgtgttagtgggtgaaagcaatattgatatatttcatatgatttaaaatgtatatgtgggaccacgcacggtggctcacgcatgtaatcccagcactgcgggaggcagaggcaggcagatcaccttgggtcakgagtttgagaccagccatggccaacacggtgaaaccctgtgtctactagaaatacaaaaattagctgggcatggtggcatgcacatgtagtcccagctactcgggaggctgaggcagagaatcacttgagcccaggaggcagagtttgcagtgagccgagattgcgccgctgcactccagcctgggcgacagactgagactcggtctcaaaaaaaaaaaaaaaattaaaatgtgtatgtataaccaaaatcataaagcttccaaatagcaacctataatgttaattttatctacatgcttaaaagtttacataactaagttagaaaaaaataaaaggcttttagggtattatcttgttggaaaataaaagattgtcttatatttggggtgattttttttttttttgggagaccaagtttcgctcttgttgcccaggctggagtgcagtggtgcgatctccactcactgcaacctccacctcccgggttcaagcagttctgtctcagccttcctgagtagctgggattacatgcatgcgccaccacgcccagctaattttgtatttttagtagagacgggatttctccacgttggtcaggctggtctcgaattcctgacctcagatgatctgcctgcctcggcctcccaaagtgcagggattacaggcatgagccacaatgcccagcctatttggggtgattttatattcaggcatacaaagtagttgttaagatagtaaggcaacatactttgagagtaagaaaaacatccacacaatgctttgctgattataacatttcccagatagaatgttacataatctccataacaagccagtc

SEQ ID NO: 70175 - DNA, 1061 bp, Homo sapiens
agcaatgaataaatgattaacataaaaacaaagaataaaacaatagaaacaacagattcacataaatgaaaataaaagtgagtctcaaaagtattaaaagatattcaacctcactgataacttkagaaatgcaaatcaaaactatactgcattgaaatggtaaagatgaaaaaatttgatggagcacatgtgtagcatactggcctgcaggaaattaacccagaccattgatacagagatacaaactaaatcattgtttcttcattttgtacaccctcacataatttcttcattgaaagtgcatgggagcataatatcaagaaatcaaaagaagaaataaataaaaagaagaaataaagatactaaattgttgctgaactccttcaaaatgtattgttgaaaaattagtattctttttcaaataacttttagaggaaacaaaggcaacttacccttcctaaattaaatcactcctcaaaaatcatttagatggctgaattatatataagttgggttagatagacatatgatgatagatgatacagatgatgataatgaagatagatgatacagagagatagatagatagatagatagatagatagatagatagatagatagatagatgatagttttatttttctcattttctccttgccaataaaaatctgcttgcagaatttcagctaataaatcatttggttgcctacagaacctacttcctttttaacaagtgtaagattccacagagatgtaacaaaatccttgtgctttagctgaaaattgtgcccacattacttgcttcaaaaccttttccatctttgcaataggtgcaatagatattatatagataaattattcacgtatttgtgttcttttctgccatgaaatgataaaaaagttcttttgagattctttgttatgatcctttagctgtaaggaattccttcagccttttaaagtgatttcctcttttcttgctactgtaatattcttaaatttacattgggtatatggcctttatttttccctctcggcatcatttatatcttatggcctaa

SEQ ID NO: 70176 - DNA, 1061 bp, Homo sapiens
agcaatgaataaatgattaacataaaaacaaagaataaaacaatagaaacaacagattcacataaatgaaaataaaagtgagtctcaaaagtattaaaagatattcaacctcactgataacttgagaaatgcaaatcaaaactatactgcattgaaatggtaaagatgaaaaaatttgatggagcacatgtgtagcatactggcctgcaggaaattaacccagaccattgatacagagatacaaactaaatcattgtttcttcattttgtacaccctcacataatttcttcattgaaagtgcatgggagcataatatcaagaaatcaaaagaagaaataaataaaaagaagaaataaagatactaaattgttgctgaactcyttcaaaatgtattgttgaaaaattagtattctttttcaaataacttttagaggaaacaaaggcaacttacccttcctaaattaaatcactcctcaaaaatcatttagatggctgaattatatataagttgggttagatagacatatgatgatagatgatacagatgatgataatgaagatagatgatacagagagatagatagatagatagatagatagatagatagatagatagatagatagatgatagttttatttttctcattttctccttgccaataaaaatctgcttgcagaatttcagctaataaatcatttggttgcctacagaacctacttcctttttaacaagtgtaagattccacagagatgtaacaaaatccttgtgctttagctgaaaattgtgcccacattacttgcttcaaaaccttttccatctttgcaataggtgcaatagatattatatagataaattattcacgtatttgtgttcttttctgccatgaaatgataaaaaagttcttttgagattctttgttatgatcctttagctgtaaggaattccttcagccttttaaagtgatttcctcttttcttgctactgtaatattcttaaatttacattgggtatatggcctttatttttccctctcggcatcatttatatcttatggcctaa

SEQ ID NO: 70177 - DNA, 865 bp, Homo sapiens
aggatcctgtcctgagcagagcaatgaaaaaattcagaatatagttctgggagcccaggggggtgcaggagaccgtgatgaccttcaggggacacaataggatgtaacagagtctccaaacagccggcctggggctggggtactgggattatgaacagaggactagagagagagcagacatgaagcacccagtacacgtcgcggatcactcaaaaacgtttgcacgctttctcccagtcctgagactatgggtctggactgatgctcatcttatttatttatttgttattttatttttttgagatagagtcttgctctgtcacccaggctggagtgcagtggcgcaacctccacctcccaggttcaagcgattctcgtgcctcagcctccccagtaagtgggattatagacatgtgccaccacacccagctaattttgtgcgtttgtatttttagtagagacagggtttcaccatgttggccaggctggtcacgaactcctgacctcaagtgatccaccagccttggcttcccaaagtggtgtgattataggcatgagccactgcgcctggccccatcttatatatgtttgagacagagtcttgctctgtcatccaggctggaatgcagtggcacaatcayggccactgcagcctggacctcctgggctcaagcaatcctcctgcttcagtctcccaagtagctgggactacaaggcacacaccaccacacccggctaatttttgttttgttgttttgttttgtttttagagacagggtcttgctatgttgtccaggctgctgtccggcttctgggcacaagcagtcctccctcctcagcctcccaaagtgctgggattgcaggc

SEQ ID NO: 70178 - DNA, 856 bp, Homo sapiens
ggatcctcccacctcagcctcatgagcagctggaattacgggtacaagccactacacctggctaattttggattttttgcagagatgaggttttgccatgttgcccaagctggcctcaaactcctgggctcaagtgatctgtccgcctcagcctcccaaagtactgggattacaggtgccagctatccgtgcctggccagtcctgggcttaactcagcattgctaaacccgcgcccatccccaggtgaccgaggtgagtggtagacaccttaatagctagcagcttagctgggcttctgacgctgccacctgccacttgactagttgacaagctacttttcttcagggatgtagtcactgtattgccagctaaggcaagaccaagttgtttctgggacctgaggtccttgggcacataaagaagccttttggacttgcttctgtggagtttccatttcagacttaagaggttttttttttttttttttttgaggtggagtcttgctgttgccyaggctggagtgcaatggcacgatctcagctcactgcaacctctgcctcctaggttcaagcaattctcctgcctcagcctcccaagtagctgggattacaggcacttgccataatgcctcgctaatttttttgtatttttagtagagacagggtttcaccatcttggccaggctggtcttgaactcctgaccttgtgatccacctgccttggcctcccaaagtgctgggattacaggcgtgagccactgcgcccggccagacttgagtttgatggctcactctttgggcaagcttccctgggcttttcttccttgcacatacctctgctattagtcaagcctac

SEQ ID NO: 70179 - DNA, 856 bp, Homo sapiens
ggatcctcccacctcagcctcatgagcagctggaattacgggtacaagccactacacctggctaattttggattttttgcagagatgaggttttgccatgttgcccaagctggcctcaaactcctgggctcaagtgatctgtccgcctcagcctcccaaagtactgggattacaggtgccagctatccgtgcctggccagtcctgggcttaactcagcattgctaaacccgcgcccatccccaggtgaccgaggtgagtggtagacaccttaatagctagcagcttagctgggcttctgacgctgccacctgccacttgactagttgacaagctacttttcttcagggatgtagtcactgtattgccagctaaggcaagaccaagttgtttctgggacctgaggtccttgggcacataaagaagccttttggacttgcttctgtggagtttccatttcagacttaagaggttttttttttttttttttttgaggtggagtcttgctgttgcctaggctggagtgcaatggcacgatctcagctcactgcaacctctgsctcctaggttcaagcaattctcctgcctcagcctcccaagtagctgggattacaggcacttgccataatgcctcgctaatttttttgtatttttagtagagacagggtttcaccatcttggccaggctggtcttgaactcctgaccttgtgatccacctgccttggcctcccaaagtgctgggattacaggcgtgagccactgcgcccggccagacttgagtttgatggctcactctttgggcaagcttccctgggcttttcttccttgcacatacctctgctattagtcaagcctac

SEQ ID NO: 70180 - DNA, 904 bp, Homo sapiens
ctgggcaacaagagtgacactccatttccccccaaaaaaaaacaaaaaaaaaaaaaaaaagaggggagtgtgatagctcatgcctgtaatcccagcacttgctgaggcaggtggatcacctgaggtcaggagtttaagaccagcctgaccaacatagtgaaaccccatctctactaaatattcaaaarttagccaggcgtggtgattgagtgcctataattccaactattagggaggctgaggcaggagaatggcttgaataaggaggtggaggttgcagtgaaccgagatcatgccattgcattccagcctgggtgacagagcgagactctgtccaaaaaaaaaaaaaaaaaaaaaaagtacacagggtcttgctctgttgagggcaatagcaccatcatagctcactgcagccttaaacacctgaactctgatcctcccacctcggcctcccaaggtgctgggattacagatgtgaaccaccgtgcccagccaccctattgctctgaaatagggttgttccttctttgtgccatgggacatagtctactgaggcatcatcaatcctacctttgaaggggggccctccaagggctcagactatcttccattaaacagcactgttctctggtcttagttacccctcaacccccagagattgagaaaccacctcagtccatacccatgctgaccgctaccacctctgtgaaaacttctctccatcttcttcccaaatggccacacctgaggtcaatcttgacttcctcccacaaccaggatcctctcccctaaggagctatcggtcactgatccgagggccaggactcttttcccaaatctgccctcctttatccccagccccactgaagcagggcccaccactgagagcttcaggccatctcat

SEQ ID NO: 70181 - DNA, 904 bp, Homo sapiens
ctgggcaacaagagtgacactccatttccccccaaaaaaaaacaaaaaaaaaaaaaaaaagaggggagtgtgatagctcatgcctgtaatcccagcacttgctgaggcaggtggatcacctgaggtcaggagtttaagaccagcctgaccaacatagtgaaaccccatctctactaaatattcaaaaattagccaggcgtggtgattgagtgcctataattccaactattagggaggctgaggcaggagaatggcttgaataaggaggtggaggttgcagtgaaccgagatcatgccattgcattccagcctgggtgacagagcgagactctgtccaaaaaaaaaaaaaaaaaaaaaaagtacacagggtcttgctctgttgagggcaatagcaccatcatagctcactgcagccttaaacacctgaactctgatcctcccacctcggcctcccaaggtgctgggattacagatgtgaaccaccgtgcccagccaccctattgctctgaaatagggttgttccttctttgtgccatgggacatagtctactgaggcatcatcaatcctacctttgaaggggggccctccaagggctcagactatcttccattaaacagcactgttctctggtcttagttacccctcaacccccagagaytgagaaaccacctcagtccatacccatgctgaccgctaccacctctgtgaaaacttctctccatcttcttcccaaatggccacacctgaggtcaatcttgacttcctcccacaaccaggatcctctcccctaaggagctatcggtcactgatccgagggccaggactcttttcccaaatctgccctcctttatccccagccccactgaagcagggcccaccactgagagcttcaggccatctcat

SEQ ID NO: 70182 - DNA, 1713 bp, Homo sapiens
aatcttttactgtaaactgtagtactttttcattactcccaagatgagtcttgtaagctacaaaggtaagagaggggcctggtttccccagtaattcccataccctgaaagaagcacaaatcttggattaggcatgaacattaaaattcacctaacagctcaaacatggaagattaaatgcacattggagaagatggaaataattggatctgagccaagttcattgagtaatgtgtaaactacaagttacttgttctgtgttcactgaaattccatcacaagcattcaaatcatttgtcattttcaacctgaagtgctgacttgtggacttgactatgcactgtctatcttagtaaaagagattataaaatgcaatccaggatgtgtgaaaggtatagaaaaaggatatacccagtccatctggatacttgtctcagccctcatgtgtgaccttatataaattaaataatatctctgagcactgattattttggtctgtaaaatgcagccttttgctctaaaagccccttccagctcttgagttctagttttcaggggtatagatataaagacagagcagaggataccagtatgtcccttggtgtcctacacctggccccagaggggagctgagcaaaggtgcacagagaagtctgctccccacaccctctactccatgcataaataaagcctaagaggaaggagcaagtgatttggcactaagcagcctgcctgctctctaccctgagccacctgagtcagttcctgtcactgccaacacatctcagtgggtcccccgaattcctgggggatgtaaaagagacatgcacacatttcagcccctttctgctgactctgagattgcacagcaagctgcagccattatttttattgctgatgccacttcctatcgaaacaatttggtgctaataagcccctataatagtaagcaatggtttggctgaataattgtcactaaataccattcaaggctttgttgcttcttgggcatattgctaattattctgcatctgaaataacacccagaggcccactgaatgctagtaaatagggtttcttcatgctcctgaagcccagggctgggtgtgatttggaatgccaaggctctaatccagtaaacaatggctgcttcacagcctcaactcctacaaaatcacagctttttgcaaatcgtactggagctcagacaaatcaagatgtctgtctggtgacagaattggtggaggagattggtgtgggtgagggtctccttgggactgtccaggggaggtcttgrggtgaacacagggcttctgttgtaaagggaggagccacagagtctgactggttcacctcaaagctggatctatgtaattatagtcaccactaggaaaagcaaaggttggtaatataaaaggagtgaataccgcaggtggagtggaggtaggaagtttagaatgtccatatcaagctccatgttacagagcagtttatgcagactttgtttttgcctgatctaggatgcaggtgattttgccttctattttctggcacagtgctattcccgaccctcagtttcctcgcatgcactgcctcattcctcctcactctcaggacaattcagttagccaaaggccatgctaagaatcacagggatctgaggcaggatcctgcagaggagcagaggattatggaattaacacatgcagctac

SEQ ID NO: 70183 - DNA, 947 bp, Homo sapiens
aagatactgactttgtacttcacaaatttaggtgcaaacatgtgacccaggataggaaaatgaaggtgagcataataggaaaatgaaggtgagcttgggttgctttacaagaagtataagctttggaatgagggagtggatctcactcttcttgttctgctggccaggacagcctgaaaaccttcacacattatgagctggggagagagtgggccttatcttcaaaggagaggaaattgggtggtaaaaggagttaaggtcatataattgaggagtgtttttaaagagtggagtggtttagcctacccaaaaagaggcaatacagtcactgtatgcagtaatctgaaagcatgagttggggaagtggtctaaaggagcagaattaacaacattgggtgaaaactgctgcgacaaagattttagtttcttagagggaagaacttcaacaatggctaccgctattgtgctcctctaccaggtaagttcaatwgctttatgtcatcaacactcaagcaacctggccaagcaggaattttttttctccatttttcagatgaagaaacagacttaaagaagggaagtgacttggcaaagccacatggattaaaagggttgaagccaagaacaaaagcttggaagtcagaggagtctgctccctccactgtattgggttctctatctacaagcagaggagcctgaagaaggaatgagttgattggaaagtaatatgttccctgttattgaaggtgaccacctgtcaatgattccatggaaaagactcaagaaaaacaaattggtagatctttggagttaggatcttagactctaaaatcatacgccacttcagtaactcattggctgagatttgcttgtttgtttatttcctttttgctgttttatagacctactgtagtctaagtgtttgtcatagggccaggtccctgtaa

SEQ ID NO: 70184 - DNA, 806 bp, Homo sapiens
ctggtaagttaaaagcagtttagcgataattccacctccgcactgaagacttccagggactgttaatgaatttaaatgctggggattctctcagatgcctcattgcatatgttcctcacattaagatgctaatgagagatctgctggacaggggtgctggagccggaccagggacggtggctggatagggtcaccagctggtcagggcttttctaattccttatcggcacgtgatcattgaactctcccaacaggttaaccagcctcagtctctgtggagattggagattcagtcagctgggcctgggccacgctggctcgtagcagccttctcctcaaacccgaaggctgttgggcacaggccttatcaaggaggcaggagaattgctgcaggacttgaaggcctgggaccccttcaagaagccatgccttactcagggacccagatggactgtgccaaggcttgggacccaagtccrtgctctcgggaggttccaattttgaagggaagcaccgattctcgtggggcgtggggcggaagaagtggctgaaagagggcagggcaggtagaagatggaggtatttaccaggaatggagtggctcgggcatttggaggctggggaatgatcaggatgacacttggggctgcccttaggaacagcatgagaaatagttggcttagcatccccatgggtgtgggaagatgggtctccttttgacagaagccaaaagcaaaagagagaggcaagagactaagggtgtagaagggcacagaggttgagaatggttgccctggcttggatcc

SEQ ID NO: 70185 - DNA, 569 bp, Homo sapiens
tcacttgagcaggagaggtcaaggctgcattgagccatgactgtaccactgcactccagcctgggtgacagagcaagaccatgtctcaaaaataaaaataggctgggcacgatggttcacgcctgtaatcccagcactttgggaggccgaggcgggcagatcacctgagttcaggagctcgagaccagcctggccaacatggtgaaacccccaactctactaaaaatacaaaaattagctgggcatagtggcgggtgcctgtagtcccagctatttgggaggctgaggcaggagaatcacttgaactcrggaggcagaggttgtggcgaactgagatcgtgccactgcactccagccagggggacagagtgagactccgtctcaaaataataatgataaaataacataaaataaaaataaacacagggcatgggagaagaggaaatgagcccagcctttgtagacaccctgttcaagtttccttagctaggaatggaagagacagggtggaatcagggctgaagctgaagctgactgccaatgtgtttaaggaaaaggaggtactgggg

SEQ ID NO: 70186 - DNA, 757 bp, Homo sapiens
taaaaaatacaaaaattagctgggcatggtggtgggttcctgtagtcccagctactcaggaggctgaggcaggagaatggcaagaacctaggaggtggagtttgcagtgagctgagattgcaccactacactccagcctgggcaatgtggtaagatcccgtctctcttaaaaatacaaaaaaaaaaaaaaaaaaaaaaaatgctgagcgtggtggtgtgtgcctgtggtcccagttactctggaggctgaggtgggagaatcgtttgatccccggaggcggagactgcagtgagctgaggcactccagcctgggtgacagagcaagacttgtctcagaaaaaaaaataaaaacaaaaaaagaagctgctgagagcaggcaaatggaagsccagagggagaaacgcccgcacgaaaccaggagtctgtgtttgtttagcaaacagagcctgctctttgggtcagagggaaccatgtggttgagccgtgagcttcctcttgcatctcacttccgccagtgctcgtctcagagggcggtggctgatccctggctgagaccaacccactcgttccataaactcacacgccccccgcacggggcgtcctcctcctcaacaagaacccaggatgccaggcatcaatgcctgcggagacccgagtccgggaggtgcgtgcggagacccgagtccgggaggcgtgtgttggccacagaactgccctcagcagtgcccctgatcccccgcttctccgctcctgcag

SEQ ID NO: 70187 - DNA, 728 bp, Homo sapiens
atcccacacctcagacatgggcctcggggagcaggcactcggtactccggggatacagagtccctcctaggcgcttggccacaccagacagtccccactcaccccaggccccaaacactgagtactgggtgttggcatgagaggcacacagccaatggagaagttgggagctggtgaggagggaggcatccaggtggcttgggggagacagggccatcctctcttagaaacacagagatgcctcaggatatatatccaggtgaagaaagcaaaatactgaactcggtctcagatgctactttttgcataagaaagggagaatgaaatatatatttggtgtgtgttttgtttttttttttgttttttggtttttggtttttgttttgagacagagtctcactctatcgtccaggctggagtgcagtagcgtgatcttggctcactgtaacctccgcctcccgggttcaagcagttcttstgcctcagcttcctgagtagctgagactacaggtgtgcaccaccatgcccagctaatttatgtatttttagtagagatggggttttgccatgttggccaggctggtcttgaactcctgacctcaagtgatctgcccacttcagttaggattacaggtgtgagcctccacgcccagctcaaatatgtattagtaaaacagaagtattagaactgtaagaacaccatgacagtgctttgacatctccattgc

SEQ ID NO: 70188 - DNA, 680 bp, Homo sapiens
accgcgcctggcccaattttgcatatttttaatgacacgaactaaacgtttttcttagtattawtcattaaaattaacaaagattcatgttttgctgggcgtggtggctcacgcctgtaatcccagcactttgggaggctgaggcaggtgaatcacaaggtcacgagttcgaggccagcctggtgaacatggtgaaactccgtctctactaaaaatacaaaaaattagctgggcctggtggcaggcgcctgtaatcccacctactcgggagggtgaggcaggagaattgcttgaacctgggaggcggaggttgcagtgagccgagatcgcaccactgcactccagtgtgggtgatagtgggagactctgtctcaaaaaaaaaaaaaaaaaaaaaaaaaagaaaaacaaagattcgtgttttgaatttggaaattaccaaaaattgtatgagagaaatagaaataatttataatttcactgcccagggataatcactggtggtattttgtggtctagctccttagatattaatatatgattaatatgatatattttgaaacagtgctttttaaatctatatatattttttaatatttttttgtaaaaacaggctcatactgtacacagtatttataatttatttaaatttaatatgtttttattttataatagatttgggg

SEQ ID NO: 70189 - DNA, 680 bp, Homo sapiens
accgcgcctggcccaattttgcatatttttaatgacacgaactaaacgtttttcttagtattaatcattaaaattaacaaagattcatgttttgctgggcgtggtggctcacgcctgtaatcccagcactttgggaggctgargcaggtgaatcacaaggtcacgagttcgaggccagcctggtgaacatggtgaaactccgtctctactaaaaatacaaaaaattagctgggcctggtggcaggcgcctgtaatcccacctactcgggagggtgaggcaggagaattgcttgaacctgggaggcggaggttgcagtgagccgagatcgcaccactgcactccagtgtgggtgatagtgggagactctgtctcaaaaaaaaaaaaaaaaaaaaaaaaaagaaaaacaaagattcgtgttttgaatttggaaattaccaaaaattgtatgagagaaatagaaataatttataatttcactgcccagggataatcactggtggtattttgtggtctagctccttagatattaatatatgattaatatgatatattttgaaacagtgctttttaaatctatatatattttttaatatttttttgtaaaaacaggctcatactgtacacagtatttataatttatttaaatttaatatgtttttattttataatagatttgggg

SEQ ID NO: 70190 - DNA, 680 bp, Homo sapiens
accgcgcctggcccaattttgcatatttttaatgacacgaactaaacgtttttcttagtattaatcattaaaattaacaaagattcatgttttgctgggcgtggtggctcacgcctgtaatcccagcactttgggaggctgaggcaggtgaatcacaaggtcacgagttcgaggccagcctggtgaacatggtgaaactccgtctctactaaaaatasaaaaaattagctgggcctggtggcaggcgcctgtaatcccacctactcgggagggtgaggcaggagaattgcttgaacctgggaggcggaggttgcagtgagccgagatcgcaccactgcactccagtgtgggtgatagtgggagactctgtctcaaaaaaaaaaaaaaaaaaaaaaaaaagaaaaacaaagattcgtgttttgaatttggaaattaccaaaaattgtatgagagaaatagaaataatttataatttcactgcccagggataatcactggtggtattttgtggtctagctccttagatattaatatatgattaatatgatatattttgaaacagtgctttttaaatctatatatattttttaatatttttttgtaaaaacaggctcatactgtacacagtatttataatttatttaaatttaatatgtttttattttataatagatttgggg

SEQ ID NO: 70191 - DNA, 680 bp, Homo sapiens
accgcgcctggcccaattttgcatatttttaatgacacgaactaaacgtttttcttagtattaatcattaaaattaacaaagattcatgttttgctgggcgtggtggctcacgcctgtaatcccagcactttgggaggctgaggcaggtgaatcacaaggtcacgagttcgaggccagcctggtgaacatggtgaaactccgtctctactaaaaatacaaaaaattagctgggcctggtggcaggcgcctgtaatcccacctactcgggagggtgaggcaggagaattgcttgaacctgggaggcggaggttgcagtgagccgagatcgcaccactgcactccagtgtgggtgatagtgggagactctgtctcaaaaaaaaaaaaaaaaaaaaaaaaaagaaaaacaaagattcgtgttttgaatttggaaattaccaaaaattgtatgagagaaatagaaataatttataatttcactgcccagggataatcactggtggtattttgtggtctagctccttagatattaatatatgattaatatgatatattttgaaacagtgctttttaaatctatatatattttttaatmtttttttgtaaaaacaggctcatactgtacacagtatttataatttatttaaatttaatatgtttttattttataatagatttgggg

SEQ ID NO: 70192 - DNA, 1342 bp, Homo sapiens
gcgattttggctcgctgaaacctctgccccctgggttcaagcagttctcctgcctcagcctctgtaatagctgggattataggcacgcactactacgccttgctagtttttgtatttttagtagagatggggtttcgccatgttggacaagctggtctcgaactcctgacctcaactgatccgcctgcctcggcctttcaaagtgctgggattacaggcatgagcaaccgtacccagccccttgtgtgctcttctagatccccttccacctgcagggccagggaggctcgttgagatttttttttttttttttttttttttgagacagagtctcgctctgttgcccaggctggagtgcagtggcgcaatctcagctcgctgtaagctccgcctcccaggttcatgccattctcctgcctcagcctcccgagtggctgggactacaggcgcccgccaccacacccggctaattttttgtgtttttagtagagacrgggtttcaccgtgttagccagaatggtctcaatctcctgacctcgtgatccacccgcctcggcctcccacagtgctgggattacaggtgggagcccccatgcccggccgacccaccctgagagcatgacctctcagttgtgctggggatgccacaggggcctcagggctgtgtaccctgcggtgtgaggcgtttgcttctcttgagaggtgtcctccttcccccaggatcctccttcccctggggtccacttgttcgtagcttttggtggcttccagaatggtttctaatcatttgtctgatgaggcttatgcacagactcctagagcctatgatttctagagcctgtgatttctggtttcattttggctgtggctgtgcatagcagtgcattttcatgcttgtgtcttctccagcaaccccagaacttgaaggttttttactttaaaaacatatgcagcgtatcttcctttttatattgaaagtggtggctgggcgcagtggctcatgcccgtaatcccagcactttgagaggccaaggcgggcaaatcatgaggtcaggagatcgagaccatcttggccaacgtggtgaaatcccgtctctactaaaaatacaaaaaattagctggatgtggtggtgcgtgcctgtagtcccagctactcgggaggctgaggcaggatgatttgaacccgggaggcggaggttacagtgagccgagatcgcaccactgcactccagcgtggtgacagagcaagagtccatctcaaaaaaaaaaaaaaaaaagtttgaggaaccaggggactaaatggtcacctatccgtgatcctgtccccaccctcgccagccct

SEQ ID NO: 70193 - DNA, 1433 bp, Homo sapiens
ctggaggaacggggccatgaaatcatacctatcatataaacaaatcctgccacaggattgttagggaatgggagagcagcagcagggaagaggtgagtcagggagctgcccagtgctccttagccaggcactagtttggtcctctgaccactcctctttgtagaagagggaaactcacccaagccttagattctcatggatgcttagcccctgataaaaggaataacgttgtgcttatgacctcatgatgatgcagtgtgagagagtgcctttacctcgccatctgcatgggtgtgggctgtggcctccygagagcccagtggagacatgatgagctgccagagaatcatggaagctgctattgggtggggcccgtctgcactgccttaccgctcctcctccatgtcatcctgtccctgagcagtattgcacggtttccaaattcaagggctctggtatagcaggagggagggatgggatgaaaccatcctgtttctgttgtgttggttggaggtggaagagcctcgtggaagtgggctggtcagaagtacatgcttgtgagtgtttatgaatatgcaagtctgtaatttgcacagtaaagggtggatgaaacatccttctagcagttggaaaggtctgtcacatggcatttatgaaatttcccagtacaaaagatggtcagcattcaccatgatgactgaaagccttctaagagtcttaaatgccttcagtctcatcagttattaagttgtagtgtattttattttactccttgaaaaaattggtaattctagttaagcaactctggtaattttcttttaactaagatgtttaatgaaccagaacatccttttgctaaccatgcttggtaaaagaggtatcatccatcaattttccagtattgatcataatggtgatatacaagtaactaaagcataatgataggtatcattttttgaatgccaactgtgaactaggccctgtgtgctaaataattgatatgaattttgttttgttgttccaatgaccctattaagtaggtattattgcccgtaattaacagatagggtttggagagattaaatagtgcatccaagaccatacagaccaagggacagggatagacttgattccatttctgtgctcacctccttcctattacggtgctattggacacctacactgttgacagactttatgggagcatttgcagggatgcactcagcccatgtattgtagcatagttggggagatggtcaaacacagaggagaaaggaaatgcaaacaaggttcttaagtttccttgccattcacatgattcaaatagctgagaagtgctagagccacagtgtgtgtgtgtgtgtgtgtgtgcgtgtgtgtgtgcgcgcgtgtgtgtgtgtgttgcaggaggctttctggaaaagaagcaactt

SEQ ID NO: 70194 - DNA, 1433 bp, Homo sapiens
ctggaggaacggggccatgaaatcatacctatcatataaacaaatcctgccacaggattgttagggaatgggagagcagcagcagggaagaggtgagtcagggagctgcccagtgctccttagccaggcactagtttggtcctctgaccactcctctttgtagaagagggaaactcacccaagccttagattctcatggatgcttagcccctgataaaaggaataacgttgtgcttatgacctcatgatgatgcagtgtgagagagtgcctttacctcgccatctgcatgggtgtgggctgtggcctcccgagagcccagtggagacatgatgagctgccagagaatcatggaagctgctattgggtggggcccgtctgcactgccttaccgctcctcctccatgtcatcctgtccctgagcagtattgcacggtttccaaattcaagggctctggtatagcaggagggagggatgggatgaaaccatcctgtttctgttgtgttggttggaggtggaagagcctcgtggaagtgggctggtcagaagtacatgcttgtgagtgtttatgaatatgcaagtctgtaatttgcacagtaaagggtggatgaaacatccttctagcagttggaaaggtctgtcacatggcatttatgaaatttcccagtacaaaagatggtcagcattcaccatgatgactgaaagccttctaagagtcttaaatgccttcagtctcatcagttattaagttgtagtgtattttattttactccttgaaaaaattggtaattctagttaagcaactctggtaattttcttttaactaagatgtttaatgaaccagaacatccttttgctaaccatgcttggtaaaagaggtatcatccatcaattttccagtattgatcataatggtgatatacaagtaactaaagcataatgataggtatcattttttgaatgccaactgtgaactaggccctgtgtgctaaataattgatatgaattttgttttgttgttccaatgaccctattaagtaggtattattgcccgtaattaacagatagggtttggagagattaaatagtgcatccaagaccatacagaccaagggacagggatagacttgattccatttctgtgctcacctccttcctattacggtgctattggacacctacactgttgacagactttatgggagcatttgcagggatgcactcagcccatgtattgtagcatagttggggagatggtcaaacacagaggagaaaggaaatgcaaacaaggttcttaagtttccttgccattcacatgattcaaatagctgagaagtgctagagccacagtgtgtgtgtgtgtgtgtgtgtgcgtgtgtgtgtgcgcgygtgtgtgtgtgtgttgcaggaggctttctggaaaagaagcaactt

SEQ ID NO: 70195 - DNA, 974 bp, Homo sapiens
ttagcccaatttagccattccacaacatacrtgtatttcaaaacatcatgttgcacttgataaatatatgcaattttgtcaattaaaaaatgatttaaaaaatgtgagctccatgagagtgggaaccttattggcttgtttattgcattcttctcagcacctagaataattcctggcccttgtagtatttttggtagttatttgtccataaataaatgaataaacacagcatcttatttaatcctttgcttgaggacattaagactcagaaatgttaagcaacttgacgaaagtccctgagttattaacggcagattccagatttaaattatctactgagtccaaagttacagatctgaatgctctgctagactcttcatgtcgtattttctttctaggctgcttaaagcttggagagactattttcttaggatcagaaattaagtctattcacttgcaggatacatttttactatccttccgttagtatctcctgtggatggaatcgactttgcttcttaacttaatggtctttctgcacaaagcatttctggtttcatagctggaggcaaagtgcagtagagacctcagaagtccttaatgtgctgttgcatggacaatgagagtataaggcattcccaattccatatccacatccatgcaggggctaaaccatggataaagctgcccagatcccatggaatccagctaaatgacctccagggcccaggactcgggccctctagatttgcctctcaggaaaagagtcttagcagaagaattttcattccaggggaaagtaaatgttttatggattcaggttgacgtgtgtgtgaacgatcctgtatttgaggatttcagcctttaaacagaggcagaggcacaatttgtcaattttggtttcagttttacaagcactatcttttccaaagactaaatttgtgtgagcacgaatgtactaatgaaacatgaca

SEQ ID NO: 70196 - DNA, 974 bp, Homo sapiens
ttagcccaatttagccattccacaacatacatgtatttcaaaacatcatgttgcacttgataaatatatgcaattttgtcaattaaaaaatgatttaaaaaatgtgagctccatgagagtgggaaccttattggcttgtttattgcattcttctcagcacctagaataattcctggcccttgtagtatttttggtagttatttgtccataaataaatgaataaacacagcatcttatttaatcctttgcttgaggacattaagactcagaratgttaagcaacttgacgaaagtccctgagttattaacggcagattccagatttaaattatctactgagtccaaagttacagatctgaatgctctgctagactcttcatgtcgtattttctttctaggctgcttaaagcttggagagactattttcttaggatcagaaattaagtctattcacttgcaggatacatttttactatccttccgttagtatctcctgtggatggaatcgactttgcttcttaacttaatggtctttctgcacaaagcatttctggtttcatagctggaggcaaagtgcagtagagacctcagaagtccttaatgtgctgttgcatggacaatgagagtataaggcattcccaattccatatccacatccatgcaggggctaaaccatggataaagctgcccagatcccatggaatccagctaaatgacctccagggcccaggactcgggccctctagatttgcctctcaggaaaagagtcttagcagaagaattttcattccaggggaaagtaaatgttttatggattcaggttgacgtgtgtgtgaacgatcctgtatttgaggatttcagcctttaaacagaggcagaggcacaatttgtcaattttggtttcagttttacaagcactatcttttccaaagactaaatttgtgtgagcacgaatgtactaatgaaacatgaca

SEQ ID NO: 70197 - DNA, 1091 bp, Homo sapiens
aaatttccatgtttttgcctcaacatcatgagtttgctttaccatctactcctacttctaacccagggttctaattacctatacccaaaatccaaagaataaaacctgagtatcacagcccatctttctgagccagatctcacaagtcatttgtcacaggccagcctctatgtgcctctttgggtataatactcagccttgctctaatcaactctgacaaaaggggggatcatataatataaacatgacctattcaggcagaggggctgcagatggcaaagtgccttacaacagggagtggctgaaatttatccttagcatctgtttaggcttgaaaacaatgtttgtttgggcctatatagttttgttttgttttgttttttttaacatgggaaatgagaacatatgtcatcagtcactacttttgatgagcttcaaagacttaagattttcctacaagtaatctcaagaaactcacccagaaaaacaaactaggactcagcgctgacctcccagcaatcccaataacttgcttgaaagtgaaggaagtggatttcaaacaagtgtaagccaagagaggatttgatgcccacataaaccaggaagaatgatattacagctggcctcaggaataacagaattaggactggggttctctctgcctgtcaagactcctggcctccatctctggcctctgcatcactgtgtgttggtctcattggtctcaaaccggcttatcctgcatagagcactttctccaggccatgtccttatagattcacaatcagagaagacagaggctttcaaaaatcctggggaataactctgattcacttaccttggtcacataccgtatcagagtgctccagaaaaatagaaccagaaggacgtgtgtgtgtgtgygtgcacatgcatttgtgtgtgtaaagagatttattttgaggaattggcttatatgattatggggactggcaagtctgaaatttgtagggcaggccagcagactggaaactcaggcagaagttaatgctgcagttttgagataggatttcttctctggaaaatgtcaattttgcttttaaggtcttcaa

SEQ ID NO: 70198 - DNA, 622 bp, Homo sapiens
ctggaatgtgcagttggcatgtgctcaggaaacctgtgagcactggccatgagcaaaagtccagatgccctttttttttttttttttttttttgagacggagtcttgctctgttgcccaggctggagtgcagtggtgtgatcctggctcactgcaacctccacctcccgggttcaagagattctcctgcctcagcctcccaagtagctgggattacaggcacctgccacctgttataacagtattctctgtaatgatctattttaattttaatttaaaaaaacttttttagagatgagttctcactatgttgtctaagctgactttgaacttcctggctcaagcaatcctyttacctcaacctcccaagcagctggaactacaggtgtgtcactgtgcctggcaggagtttatcttgtcctgcttcatggactgtagtgtccaggggtacctagaattgttcacttacatgctgggagcagtgtcagggcatggtgtcagggaactcaccaggcagtgttcttttatataacaatgcagcctttttttttttttttagacagagtttcaatcttgttgcccaggctggagtgcaatggtgctatctcagctcaccacaacct

SEQ ID NO: 70199 - DNA, 828 bp, Homo sapiens
tggatccttccagtttctagatgaagacacttgggacctggaggccttctgacttttgggtcagagctggcatggagtccaggcacctgctttctgcaggcatgcatgctcctgggacactctgcagggacagagccatccccagcaaggcagactgacagggctggtttccagtcgggtggggccgcatccctccaggggatgtgaggcaggtttgagatgagtctgctccccttctgcctgctgctcctgtctttttttttctttttctttttcttttctttttttttttttgagacggagtctcgctctgtttccaaggctggagtgcagtggcgcgatctcagctcactgcaacctctgcctcccaggttcaagtggtactcctgcctcagcctcccaagtagctgagactacaggcatgcgcccccacacctggcttattttgcgtttttagtagagacagggtttctccatgttggtcaggctggtctccaattcctgacctcaggtgatcctcccaaagtgctgggatcacaggcgtgagccaccgcaactggcctargagtaacttcttaatgaatattttaataatataaatcttagtctgaatttctgactgtgtcgcctagatgccatgtaggggaatgggcaggtcagagggtgtggcctgcggtgtggcgaggcactgaggattaggtgctgcagttttcctccggcccctcctggttccctggtgaacacacatcagcctcagatgggcgaccccctactcatgggagggctgggagtgtgggccttgtagttggattctgcttcagaattgcg

SEQ ID NO: 70200 - DNA, 828 bp, Homo sapiens
tggatccttccagtttctagatgaagacacttgggacctggaggccttctgacttttgggtcagagctggcatggagtccaggcacctgctttctgcaggcatgcatgctcctgggacactctgcagggacagagccatccccagcaaggcagactgacagggctggtttccagtcgggtggggccgcatccctccaggggatgtgaggcaggtttgagatgagtctgctccccttctgcctgctgctcctgtctttttttttctttttctttttcttttctttttttttttttgagacggagtctcgctctgtttccaaggctggagtgcagtggcgcgatctcagctcactgcaacctctgcctcccaggttcaagtggtactcctgcctcagcctcccaagtagctgagactacaggcatgcgcccccacacctggcttattttgcgtttttagtagagacagggtttctccatgttggtcaggctggtctccaattcctgacctcaggtgatcctcccaaagtgctgggatcacaggcgtgagccaccgcaactggcctaggagtaacttcttaatgaatattttaataatataaatcttagtctgaatttctgactgtgtcscctagatgccatgtaggggaatgggcaggtcagagggtgtggcctgcggtgtggcgaggcactgaggattaggtgctgcagttttcctccggcccctcctggttccctggtgaacacacatcagcctcagatgggcgaccccctactcatgggagggctgggagtgtgggccttgtagttggattctgcttcagaattgcg

SEQ ID NO: 70201 - DNA, 828 bp, Homo sapiens
tggatccttccagtttctagatgaagacacttgggacctggaggccttctgacttttgggtcagagctggcatggagtccaggcacctgctttctgcaggcatgcatgctcctgggacactctgcagggacagagccatccccagcaaggcagactgacagggctggtttccagtcgggtggggccgcatccctccaggggatgtgaggcaggtttgagatgagtctgctccccttctgcctgctgctcctgtctttttttttctttttctttttcttttctttttttttttttgagacggagtctcgctctgtttccaaggctggagtgcagtggcgcgatctcagctcactgcaacctctgcctcccaggttcaagtggtactcctgcctcagcctcccaagtagctgagactacaggcatgcgcccccacacctggcttattttgcgtttttagtagagacagggtttctccatgttggtcaggctggtctccaattcctgacctcaggtgatcctcccaaagtgctgggatcacaggcgtgagccaccgcaactggcctaggagtaacttcttaatgaatattttaataatataaatcttagtctgaatttctgactgtgtcgcctagatgccatgtaggggaatgggcargtcagagggtgtggcctgcggtgtggcgaggcactgaggattaggtgctgcagttttcctccggcccctcctggttccctggtgaacacacatcagcctcagatgggcgaccccctactcatgggagggctgggagtgtgggccttgtagttggattctgcttcagaattgcg

SEQ ID NO: 70202 - DNA, 828 bp, Homo sapiens
tggatccttccagtttctagatgaagacacttgggacctggaggccttctgacttttgggtcagagctggcatggagtccaggcacctgctttctgcaggcatgcatgctcctgggacactctgcagggacagagccatccccagcaaggcagactgacagggctggtttccagtcgggtggggccgcatccctccaggggatgtgaggcaggtttgagatgagtctgctccccttctgcctgctgctcctgtctttttttttctttttctttttcttttctttttttttttttgagacggagtctcgctctgtttccaaggctggagtgcagtggcgcgatctcagctcactgcaacctctgcctcccaggttcaagtggtactcctgcctcagcctcccaagtagctgagactacaggcatgcgcccccacacctggcttattttgcgtttttagtagagacagggtttctccatgttggtcaggctggtctccaattcctgacctcaggtgatcctcccaaagtgctgggatcacaggcgtgagccaccgcaactggcctaggagtaacttcttaatgaatattttaataatataaatcttagtctgaatttctgactgtgtcgcctagatgccatgtaggggaatgggcaggtcaragggtgtggcctgcggtgtggcgaggcactgaggattaggtgctgcagttttcctccggcccctcctggttccctggtgaacacacatcagcctcagatgggcgaccccctactcatgggagggctgggagtgtgggccttgtagttggattctgcttcagaattgcg

SEQ ID NO: 70203 - DNA, 844 bp, Homo sapiens
ctgtttgtgtgacaaatatacaacgttaatgttgaagatgtgggttagtgaaattgagacctggcgcttcctgaggctggcagcccggttgagcctgaggaccagacttgaggcagttggcagtccgcgcctcgttgccctctgtctgccctgggtaagtgagaggctccttgggaggccagtggagatggctgtggraggacagattgagtagctgtccttggagctgctcctccctcccttcgtggagaaatagaaacagctttcctccggccctcacctgttgccagggctccacgctggtgggggcgagctgcgttttgctgagttgcaccgtgggagagcgttggtgaccacttgcctgctgtgggccagctccccgtggccaaggaccagcgtgggcagggccttcgggcacgggttgctggtacgagcacaccgagaatcccctccgccatagggcctgccctgtgagctgcccaccagattccacggagtgcttcacactcctgtctggtgtgggtcccgcagcccttgtgggtgggcccatgtcattagcctcattttagagaagagtcttgatgggtcggagagcggtggcttacccacaggtaagctgtaaatctggaactcaactggggcattggttttgctagtccaccacagttgtccttggtggtggcagcctgaggggtaggggaaggtggcggctgtccctccctaacacccccttcctccacctggttttctgtgctgggcctagctttgtggagttttctgaggtgagaggaggtttttaccagaatgttctttgccagtgagcacagctgacctgagggcagga

SEQ ID NO: 70204 - DNA, 563 bp, Homo sapiens
ccttacagggggacacatagacatagacacatagagggaagccgtcttgagaagagatacaggaagcaacggccaccaagaagccatggagaaggagccacctgctagcagcttggtgttggacattatcaatttcggccgtgtaagcctcccartctgtggtcctttgtcatggcccaaacaaatgactacacccaacaggggcaggtgggctgggcaagccaacggcggcaccccagcaggtgcctggacccaaaggctctggtctgggctgtcccttagagccaggtggctctgggcaagcacagtccccggacccagggcttccccatgcttaaacagggctggcacggcgtttccagggtattgagagataggggacctgagccttcctcgtgtctaaatggggctggcacagcatctctggaggatcaaagggagaaacggcagcagggcctccagctctaccacttgagtgggtcaccagccccacatccccaagccgacttgtttgattggcatcaccccagcccacctaaggactctgcacgtctgagagtgca

SEQ ID NO: 70205 - DNA, 1096 bp, Homo sapiens
cccaaagaatgtacagcacttagagtgaacctaatggaaatgatggacattgggtgataatgacatgttaatgtaggtttattacttacagcaaatgtactaccctggttcatgatgttgaaggtaggggagactgtgcctgcgtgtggggaggggtatatgggacttttgatactttccactcaattgtgctatgagcataaaactactctaaaaaataaagtctgtcaataataataataataataataaaaactagaacaacaggtaaatcctaagcaagtctgaataaagtatggacttcaattgacaataatgtatcaatgtttgtcagttgtgacaaacgtaccatagtaatgtaacaggtaaatagggaacccaggtgagaattggaatgataactatctttgcaattctctgtaaacctaaaattattctaaaactttaaaaaaaaatttaaagggaaggtatgaaggggcaaagagaggagaattccacaatttatcartgtatgcgtacactgcctcatttgtgtttagaatgatagcagcggcctccagataattcttctctaattgtgtgtcagacactgtgcttagtccccctaagccttgcctccacatctgtcccatgaggacctgggccgactttcctcctggggttcttgtgcaatgggcctttatgtactcatccccaagaattacagagcccctcagtgctgggagcatggggaggtggaggggcctgaagttactggaacctgctatgcactgcgtggctggggctccatgtcctctgcagtctccccagagccactggaaaaggacatcgtttccttagttcatggagatacgaagaaagcttgggaaacagccttagcacagtgcctggcacgctgtaagctcattggaggaagtgtgccatttctccccgtggacattcataaagatgtgggtggcatgcagggcgtcaggagccaatgacaccaacagagaggggctcgcattggagcctggccttgaaggatgaggcggtgtgtgccaggcagagaaggaagggaaggggatcccaagtgcagggaacagcagaggcaaag

SEQ ID NO: 70206 - DNA, 1096 bp, Homo sapiens
cccaaagaatgtacagcacttagagtgaacctaatggaaatgatggacattgggtgataatgacatgttaatgtaggtttattacttacagcaaatgtactaccctggttcatgatgttgaaggtaggggagactgtgcctgcgtgtggggaggggtatatgggacttttgatactttccactcaattgtgctatgagcataaaactactctaaaaaataaagtctgtcaataataataataataataataaaaactagaacaacaggtaaatcctaagcaagtctgaataaagtatggacttcaattgacaataatgtatcaatgtttgtcagttgtgacaaacgtaccatagtaatgtaacaggtaaatagggaacccaggtgagaattggaatgataactatctttgcaattctctgtaaacctaaaattattctaaaactttaaaaaaaaatttaaagggaaggtatgaaggggcaaagagaggagaattccacaatttatcaatgtatgcgtacactgcctcatttgtgtttagaatgatagcagcggcctccagataattcttctctaattgtgtgtcagacactgtgcttagtccccctaagccttgcctccacatctgtcccatgaggaccygggccgactttcctcctggggttcttgtgcaatgggcctttatgtactcatccccaagaattacagagcccctcagtgctgggagcatggggaggtggaggggcctgaagttactggaacctgctatgcactgcgtggctggggctccatgtcctctgcagtctccccagagccactggaaaaggacatcgtttccttagttcatggagatacgaagaaagcttgggaaacagccttagcacagtgcctggcacgctgtaagctcattggaggaagtgtgccatttctccccgtggacattcataaagatgtgggtggcatgcagggcgtcaggagccaatgacaccaacagagaggggctcgcattggagcctggccttgaaggatgaggcggtgtgtgccaggcagagaaggaagggaaggggatcccaagtgcagggaacagcagaggcaaag

SEQ ID NO: 70207 - DNA, 435 bp, Homo sapiens
ggggcgttttcccataatactctgtgttaatcgctggtgggtttcaatggtacagaaagagggaacctcaatcaccaacccctgttttcttttcacacaagaatgtgagaaatctgtagactggatagtcccttcctttctctgctcttcacggccaagtgagaaattctgcgcatcaagaaaaggggagagaactgagcatgcgtctcctcttagacgcatcctcctccctttcctcagagcctaagcactcacatctcctcgttgtgaaaatgaaggatttgaatctggaaacgggaagctgtgcactccaatcacatgatccgtagtagccgtaactaacttcgttcccgagatgcaccattttactagsaggctgttgcttcatttggaacccattgctttgtccttttcagagaggttttgtcacccaga

SEQ ID NO: 70208 - DNA, 1300 bp, Homo sapiens
tatagctattcctatctgaaaataagattatttcttctagatctatggttaatgctagtggttcgtcacacataacttgtattgtaaatactttgcctccaaataaacttttacctatttttaggaatgaaaaacaaaaagtcaagctttagggaagatgataagttcttgaaatctgacagtttacagataaatgtaagaatatgattgcaagaaaaatgacataaaatgtacattaacataaatctataactgctcaacttgatgaaaaatatcaccataaaatctgccattactgaaccaaccaatatgttttattctatgatatttttgtgagagtgaataaattatctgagaatgtgtttgcatcaaaaatacagaattttgtaataaacacataaatcatgcaagcatttttaagcaagatgcctgatcctaaaatggggggggcattcatattaatttccccccttccagcctygttctagatatggtaccttagagctctggatggtaatggggaaccatcaattatggaaatatagaaaaggatgatgtaaagaaaataactcttattggagaagtcttctatacaacctgccccacccccaaaagcctcaacctctctgagccttgctttcactgaagtcctctttgcagttgtggcctcagtttacactggagtctgctttacaaaacgctcatatttttgtagtcatgggacccatatatcagccaacattcgctacaaaacagagcactaacttaatcctacaagatgtgtttttcttgctgtctctgaggaactggtttgtttcttgtaatgggaaattcataccacataaggaagcttgattccctttttgcttagactaccaggtagctcagaggcaaaataacagtttaattatagaatttagtgatgtgtgcctaaggatcttacattttatctttattttaattatgtcatctatgtagattttcttctattttattgttcaagtttttattaactaatatctttgtgaactgaggcaaagggtagataaacatacagatagagaggtaaacagacatactgatatgtggaataatggtcgaagaaatttctgcagccgaagaagtgagagtggatgcccatagtgaactataaatcagatggcaattatgaagttcatttctcatctgatttctctccaggactcatttcttcatgagtgcctacaaagcatattattatgactgaggccatttttgtaacagatgattgtggtctggtctgtgatccctcaatgcttcc

SEQ ID NO: 70209 - DNA, 1300 bp, Homo sapiens
tatagctattcctatctgaaaataagattatttcttctagatctatggttaatgctagtggttcgtcacacataacttgtattgtaaatactttgcctccaaataaacttttacctatttttaggaatgaaaaacaaaaagtcaagctttagggaagatgataagttcttgaaatctgacagtttacagataaatgtaagaatatgattgcaagaaaaatgacataaaatgtacattaacataaatctataactgctcaacttgatgaaaaatatcaccataaaatctgccattactgaaccaaccaatatgttttattctatgatatttttgtgagagtgaataaattatctgagaatgtgtttgcatcaaaaatacagaattttgtaataaacacataaatcatgcaagcatttttaagcaagatgcctgatcctaaaatggggggggcattcatattaatttccccccttccagccttgttctagatatggtaccttagagctctggatggtaatggggaaccatcaattatggaaatatagaaaaggatgatgtaaagaaaataactcttattggagaagtcttctatacaacctgccccacccccaaaagcctcaacctctctgagccttgctttcactgaagtcctctttgcagttgtggcctcagtttacactggagtctgctttacaaaacgctcatatttttgtagtcatgggacccatatatcagccaacattcgctacaaaacagagcactaacttaatcctacaagatgtgtttttcttgctgtctctgaggaactggtttgtttcttgtaatgggaaattyataccacataaggaagcttgattccctttttgcttagactaccaggtagctcagaggcaaaataacagtttaattatagaatttagtgatgtgtgcctaaggatcttacattttatctttattttaattatgtcatctatgtagattttcttctattttattgttcaagtttttattaactaatatctttgtgaactgaggcaaagggtagataaacatacagatagagaggtaaacagacatactgatatgtggaataatggtcgaagaaatttctgcagccgaagaagtgagagtggatgcccatagtgaactataaatcagatggcaattatgaagttcatttctcatctgatttctctccaggactcatttcttcatgagtgcctacaaagcatattattatgactgaggccatttttgtaacagatgattgtggtctggtctgtgatccctcaatgcttcc

SEQ ID NO: 70210 - DNA, 1300 bp, Homo sapiens
tatagctattcctatctgaaaataagattatttcttctagatctatggttaatgctagtggttcgtcacacataacttgtattgtaaatactttgcctccaaataaacttttacctatttttaggaatgaaaaacaaaaagtcaagctttagggaagatgataagttcttgaaatctgacagtttacagataaatgtaagaatatgattgcaagaaaaatgacataaaatgtacattaacataaatctataactgctcaacttgatgaaaaatatcaccataaaatctgccattactgaaccaaccaatatgttttattctatgatatttttgtgagagtgaataaattatctgagaatgtgtttgcatcaaaaatacagaattttgtaataaacacataaatcatgcaagcatttttaagcaagatgcctgatcctaaaatggggggggcattcatattaatttccccccttccagccttgttctagatatggtaccttagagctctggatggtaatggggaaccatcaattatggaaatatagaaaaggatgatgtaaagaaaataactcttattggagaagtcttctatacaacctgccccacccccaaaagcctcaacctctctgagccttgctttcactgaagtcctctttgcagttgtggcctcagtttacactggagtctgctttacaaaacgctcatatttttgtagtcatgggacccatatatcagccaacattcgctacaaaacagagcactaacttaatcctacaagatgtgtttttcttgctgtctctgaggaactggtttgtttcttgtaatgggaaattcataccacataaggaagcttgattccctttttgcttagactaccaggtagctcagagscaaaataacagtttaattatagaatttagtgatgtgtgcctaaggatcttacattttatctttattttaattatgtcatctatgtagattttcttctattttattgttcaagtttttattaactaatatctttgtgaactgaggcaaagggtagataaacatacagatagagaggtaaacagacatactgatatgtggaataatggtcgaagaaatttctgcagccgaagaagtgagagtggatgcccatagtgaactataaatcagatggcaattatgaagttcatttctcatctgatttctctccaggactcatttcttcatgagtgcctacaaagcatattattatgactgaggccatttttgtaacagatgattgtggtctggtctgtgatccctcaatgcttcc

SEQ ID NO: 70211 - DNA, 643 bp, Homo sapiens
tggggcaactcctcgcacgatgcaatgccaccagttccggccaggtggcgctgcgcggctactgttccgggcggtagcgtccgacycgcgcctccagcaacgggcggggctagagccgcagtgggcggggccacgacgggtgggcggggtcgccccgtcggcggcagcggtttcctgcctctccccactcttgggtcgtcgcagtcccccggccttctctctctgtctggtctgtgggtctctgttggtcacctccttctgtcgcgctggctccgcctgctccagtttcagaatgtaaagagaggcatggtgcagcctgagggaagaggccctaggcgcggtctggttatgcttgaagggccattaatgtccattaggaagccccgcctgcctgagcagctctggaccattaccgggagtcggaatagtggccccacccccagacagggccccaggccacggccacaccccggagccccggtccaggtccaggctcgggctccctgagatcgctgggaccttgctggagggatgcgggttcaaggcccgaaggaaaggtcctgccaaaacaggagtgcacgggcggcccccaccccggtggaccccccaccgacagcccaggggaacggctgagacctgctct

SEQ ID NO: 70212 - DNA, 716 bp, Homo sapiens
tcctcttctgagagccaagtgaagcaaataggaacccaattcaccacccagatccaggcccatctgaatctagccagcccagaagagccctgtagaaccacagctgacctatggaaatgagaagtaaatgtttgttgttgttagcattgagatttggggattactttttatgtggcatcatcacaacaaagcctgactaatatattgtataaagttaattgagtactaacaacatgccaggtattgttctaagtcctttatataaagaatcccatctaatcgttacagcactgcataaggaggtatcataagtatctccattcagctgattagaattgaggcatctggtcaatccccttcatgttattcctcctcacttcctgcatccgaatgaaccaagcctcctgtgttcattagaaccacagaccaagcctgctggagaaagacagggytatgaagatgggaatgaattggcaaacagctttgggatgacaatgttaaggccaggcaaatgctctcagtaacctcaaatgagtgttgatgttcatgaagcctgctcaaaaaagacacagaaattgacgtcttttatctgaggacccttccttagcctcaggacttaaggctatgggagcatgagccacataaccatgagaggcagggggttcagtgagaagaataagctcaagagtctcacctgtgggtcagaatctcagctg

SEQ ID NO: 70213 - DNA, 716 bp, Homo sapiens
tcctcttctgagagccaagtgaagcaaataggaacccaattcaccacccagatccaggcccatctgaatctagccagcccagaagagccctgtagaaccacagctgacctatggaaatgagaagtaaatgtttgttgttgttagcattgagatttggggattactttttatgtggcatcatcacaacaaagcctgactaatatattgtataaagttaattgagtactaacaacatgccaggtattgttctaagtcctttatataaagaatcccatctaatcgttacagcactgcataaggaggtatcataagtatctccattcagctgattagaattgaggcatctggtcaatccccttcatgttattcctcctcacttcctgcatccgaatgaaccaagcctcctgtgttcattagaaccacagaccaagcctgctggagaaagacagggctatgaagatgggaatgaattggcaaacagctttrggatgacaatgttaaggccaggcaaatgctctcagtaacctcaaatgagtgttgatgttcatgaagcctgctcaaaaaagacacagaaattgacgtcttttatctgaggacccttccttagcctcaggacttaaggctatgggagcatgagccacataaccatgagaggcagggggttcagtgagaagaataagctcaagagtctcacctgtgggtcagaatctcagctg

SEQ ID NO: 70214 - DNA, 776 bp, Homo sapiens
cagaattcaaatgaagcaaaacaaaggcaccaggggctcttatgagacagagtgactcaaaatagagggaatgtggggacttggggcataagattgatcatgaatcaccaaatagaaaaaccttgggatggctttcaagaaaaatcctccttgaagttttaactttcacctacaaacaagttttctcactgctctgtacagcagggtaaggacagcagcctcacagcatcagtctgaggatagaatgggttaatgcagccaggcacagtggctcatgcctgtaatcccagcactttaggaggccgaagcaggcggatcatgaggtcaagagatcaagacaccctggccaacacggtgaaaccccgtytatactaaaatacaaaaatactagctgagtgtggtggtgcatgcctgtaggcccagctacttgggaggctgaggcaggaaaattgcttgaacctgggagacggaggttgcagtgagccaagatcacaccactgcactccagcctgggtgaaaaaaaaaaaaaaaaaaaagaatgggttaatgcctgagaactctttggcacagtgcccagcacaaattcagcagtcactcagtgttggctatcatctttggtgatgttggtcccaaacccagacctctgctcttgtcctcggctcatacacccacctgtatagcccatatgcactttaaacatgagtccaaaatggaatccaaaatattagatgccctcgttgccaccaccaggtttgctttcctctcaagccactgag

SEQ ID NO: 70215 - DNA, 776 bp, Homo sapiens
cagaattcaaatgaagcaaaacaaaggcaccaggggctcttatgagacagagtgactcaaaatagagggaatgtggggacttggggcataagattgatcatgaatcaccaaatagaaaaaccttgggatggctttcaagaaaaatcctccttgaagttttaactttcacctacaaacaagttttctcactgctctgtacagcagggtaaggacagcagcctcacagcatcagtctgaggatagaatgggttaatgcagccaggcacagtggctcatgcctgtaatcccagcactttaggaggccgaagcaggcggatcatgaggtcaagagatcaagacaccctggccaacacggtgaaaccccgtttatactaaaatacaaaaatactagctgagtgtggtggtgcatgcctgtaggcccagctacttgggaggctgaggcaggaraattgcttgaacctgggagacggaggttgcagtgagccaagatcacaccactgcactccagcctgggtgaaaaaaaaaaaaaaaaaaaagaatgggttaatgcctgagaactctttggcacagtgcccagcacaaattcagcagtcactcagtgttggctatcatctttggtgatgttggtcccaaacccagacctctgctcttgtcctcggctcatacacccacctgtatagcccatatgcactttaaacatgagtccaaaatggaatccaaaatattagatgccctcgttgccaccaccaggtttgctttcctctcaagccactgag

SEQ ID NO: 70216 - DNA, 725 bp, Homo sapiens
ctatgaggcagaacttctaatgatgaagagtcaggaaattctgccaagccagggtctacagtaaaagcttgagggagttttattttctgggtatgtaacaggtttattgagagaattcacatggcatataattcasccatttaacatgtggaattcaacggtttagtctgttcatagagttatgcaaccattgccaaaatcaattttattttttaaaaaaatttaatattcttcctacatagaaaccttgtgccattgcaatgcctcctctgggtcatggaagcgcttttgttttctcgtttggggattaaagtcttagaaatgtataaggattttttcccacagcattggtaaacttggtatggctcagaaggaaggatttgataaatataatttaaatacatagcttagggtcagaaaaatctcatggttgaaaagaatgttagatgggctttcagggtagtgttcgcccttggcagaaatccgtggtaatgttatcagagtcaggatctgaattgttgaattgtcagtctcatttttttttgttttttgttgtatatgtttaaggtatacaacatgattatttgatattcctatccatagtgaagtgattactacagtcaagcatatttatgtctgtcatctcacatagttgcctttctttttttggatgtggtaagagcacctaaaatctattctcttagcaaatttccagtatacaatac

SEQ ID NO: 70217 - DNA, 725 bp, Homo sapiens
ctatgaggcagaacttctaatgatgaagagtcaggaaattctgccaagccagggtctacagtaaaagcttgagggagttttattttctgggtatgtaacaggtttattgagagaattcacatggcatataattcacccatttaacatgtggaattcaacggtttagtctgttcatagagttatgcaaccattgccaaaatcaattttatttttwaaaaaaatttaatattcttcctacatagaaaccttgtgccattgcaatgcctcctctgggtcatggaagcgcttttgttttctcgtttggggattaaagtcttagaaatgtataaggattttttcccacagcattggtaaacttggtatggctcagaaggaaggatttgataaatataatttaaatacatagcttagggtcagaaaaatctcatggttgaaaagaatgttagatgggctttcagggtagtgttcgcccttggcagaaatccgtggtaatgttatcagagtcaggatctgaattgttgaattgtcagtctcatttttttttgttttttgttgtatatgtttaaggtatacaacatgattatttgatattcctatccatagtgaagtgattactacagtcaagcatatttatgtctgtcatctcacatagttgcctttctttttttggatgtggtaagagcacctaaaatctattctcttagcaaatttccagtatacaatac

SEQ ID NO: 70218 - DNA, 725 bp, Homo sapiens
ctatgaggcagaacttctaatgatgaagagtcaggaaattctgccaagccagggtctacagtaaaagcttgagggagttttattttctgggtatgtaacaggtttattgagagaattcacatggcatataattcacccatttaacatgtggaattcaacggtttagtctgttcatagagttatgcaaccattgccaaaatcaattttattttttaaaaaaatttaatattcttcctacatagaaaccttgtgccattrcaatgcctcctctgggtcatggaagcgcttttgttttctcgtttggggattaaagtcttagaaatgtataaggattttttcccacagcattggtaaacttggtatggctcagaaggaaggatttgataaatataatttaaatacatagcttagggtcagaaaaatctcatggttgaaaagaatgttagatgggctttcagggtagtgttcgcccttggcagaaatccgtggtaatgttatcagagtcaggatctgaattgttgaattgtcagtctcatttttttttgttttttgttgtatatgtttaaggtatacaacatgattatttgatattcctatccatagtgaagtgattactacagtcaagcatatttatgtctgtcatctcacatagttgcctttctttttttggatgtggtaagagcacctaaaatctattctcttagcaaatttccagtatacaatac

SEQ ID NO: 70219 - DNA, 725 bp, Homo sapiens
ctatgaggcagaacttctaatgatgaagagtcaggaaattctgccaagccagggtctacagtaaaagcttgagggagttttattttctgggtatgtaacaggtttattgagagaattcacatggcatataattcacccatttaacatgtggaattcaacggtttagtctgttcatagagttatgcaaccattgccaaaatcaattttattttttaaaaaaatttaatattcttcctacatagaaaccttgtgccattgcaatgcctcctctgggtcatggaagcgcttttgttttctygtttggggattaaagtcttagaaatgtataaggattttttcccacagcattggtaaacttggtatggctcagaaggaaggatttgataaatataatttaaatacatagcttagggtcagaaaaatctcatggttgaaaagaatgttagatgggctttcagggtagtgttcgcccttggcagaaatccgtggtaatgttatcagagtcaggatctgaattgttgaattgtcagtctcatttttttttgttttttgttgtatatgtttaaggtatacaacatgattatttgatattcctatccatagtgaagtgattactacagtcaagcatatttatgtctgtcatctcacatagttgcctttctttttttggatgtggtaagagcacctaaaatctattctcttagcaaatttccagtatacaatac

SEQ ID NO: 70220 - DNA, 725 bp, Homo sapiens
ctatgaggcagaacttctaatgatgaagagtcaggaaattctgccaagccagggtctacagtaaaagcttgagggagttttattttctgggtatgtaacaggtttattgagagaattcacatggcatataattcacccatttaacatgtggaattcaacggtttagtctgttcatagagttatgcaaccattgccaaaatcaattttattttttaaaaaaatttaatattcttcctacatagaaaccttgtgccattgcaatgcctcctctgggtcatggaagcgcttttgttttctcgtttggggattaaagtcttagaaatgtatraggattttttcccacagcattggtaaacttggtatggctcagaaggaaggatttgataaatataatttaaatacatagcttagggtcagaaaaatctcatggttgaaaagaatgttagatgggctttcagggtagtgttcgcccttggcagaaatccgtggtaatgttatcagagtcaggatctgaattgttgaattgtcagtctcatttttttttgttttttgttgtatatgtttaaggtatacaacatgattatttgatattcctatccatagtgaagtgattactacagtcaagcatatttatgtctgtcatctcacatagttgcctttctttttttggatgtggtaagagcacctaaaatctattctcttagcaaatttccagtatacaatac

SEQ ID NO: 70221 - DNA, 690 bp, Homo sapiens
ttgagtggggctagagatggggctgttgctcccaccctgccctgtatgaggaaagatggatgttagggggcggccgtttagaggggtgtgcacgtagatgcacaggcagccaacctgagtgagtgcccggaagacagggcagctttgcatgagctgtgcagacgcacaaagaagacccagggagaactgcggagtcactgctaggcagggatgccagcctgtctggtttcctggaactgtccggcctttacactgcaagtcctgcaccctggggactcctttattcctgggcaaactgggagggttggttccctagggccaggttctgtggttttcaagctttgcaccctgaagttgtcctgtaagagcttcagggctgtgagggaggggagcggtgtgaggagaggccaggcgggtggcattctcacccctcccctccaacatttgttggttttataatttggagttctgtgggagttaaaaaaaaagtgtaaactgcttaaaaaaaaaaaaagaggccaggcgtggtggctcacgcctatgatcccagcacyttgggaggctgaggtgggcagatcacgaggtcaggagatcgagaccatcctggctaacaccgtgaaacccagtctctactaaaaaatacaagaaattagccgggtgtggtggcgggtgcctatagtcccagctact

SEQ ID NO: 70222 - DNA, 599 bp, Homo sapiens
gctagacatgaagagtggaaaccaagtcattttttccagggcacgggcttgaggagagggatggtgggcaggcagttttgcctgggttgagggtatctctcgaggcctggcattgggctttggagatgccatcctggaggttcatcttaataaaaataaacattttaaacgttsacttttattgaggacttagtgtgtgctgaaacctgggaatattgagttatctcatttagccctgaccacgtttgttgttgaatgaatgactatgaaggacgccctgtgatccccatttcacagaggaaaaagctgacagtcctagcagcgcacagctggaagggggcctaggtaaggacctaggccatgggatgcaggccccaggtggtcaagctgaacagcctctcctggcatgtgcctggcatgtcataggccctcagggacttgtgttgagtaggcctgcggctaatagagagtggctgccctacttccttcagccaccaagctgtagatggtagtgacagggcgctggttatagcccccaaaggaagtaagcaaaggtcagggtgatgctctgggcattgcaggttagggttctggctatg

SEQ ID NO: 70223 - DNA, 556 bp, Homo sapiens
aaaaattgcactaaaatattacttattttgactactgagtttttttggtgctcccttcaattttgtatccaaggagtctatctcctgagctcaccttaacctagtcctggccccgaataatgatagttcaagagaagtcaagaggcagaggaggtgagctgaagtagtttaccctacaacacaggcaaaaagagctccaaatcaggaacagagtcaggtttcttgaggcaaccttgtacttttagactgaattgtctggaagactgcccccattttctcttctaaggcytttaactaaaatgttttgaaagagactgaaacttgtgtttgcctaacaaaatgaagtaaaaataaacaaacaaaaccctaaaaacaactcaagagaaaataacaacaaataaccctatcaaaaaataggcaaagagccaggcatggtggcttgcacctgtagtcccagctacttgggaggatggggcaggaagatcacttgagcctaggacttcaagttcagcctgggcaacataaagcccatctctaatttatatatatatatata

SEQ ID NO: 70224 - DNA, 523 bp, Homo sapiens
cttttaatacatattatgctgagactttaagtaaaagttgatctaaaagcttacagcttcttaaaatgctcccaactctggcaggggccttcacaaggttacagttggaagctggagtatgcagtggaagaagggagtaagttcataacactacgctgtttgggtttagacggttgagacatgaccatggatagctacacaggttggtaggtggataactctacttttaaaatagatgagtacataccttaaaagaacaagagtacacaattttaaaaatgtaacaaagccaacagttaacttatatctgtctggtgccacatccctggctactgatccaaggctaccttctcatctaaaagaaagcccctgctaagttatatagaacccaaggcctcccaagtggtagatgttaagttgaatctgcattgttaactgttactaactctttgctaagatgctaagcaagcaaaggaaaatgctggtgacactgccttctggggagaagaaatacatgraaacc

SEQ ID NO: 70225 - DNA, 652 bp, Homo sapiens
tgttgatctgtgaccttacccccaaccctgtgctctctgaaacawgtgctgtgtccactcagggttaaatggattaagggcggtgcaagatgtgctttgttaaacagatgcttgaaggcagcatgctcgttaagagtcatcgccactccctaatctcaagtacccagggacacaaacactgcggagggcgcagggtcctctgcctaggaaaaccagagacctttgttcacttgtttatctgctgaccttccctccactattgtcctatgaccctgccaaatccccctctgcgagaaacacccaagaatgatcaataaaaaaaaataaaaaaataaaaataaaaaaaaagaactgaataaacataccacatttaaattaaaaaaaaaaaaaaaagaaaacagccaatgccaaagagaaagatagaacgaaaatgccctattccatggaacaattaaaaaaaaattaacaactacttattccaatcactaaaagtggatgaccagacgttatggacctcctgatatgatgcaacaggaaggaccattaggaagtgttcctgaaaaaaaaagttttaagaataagtcaaccaccactaggaaacaattaaccaaattcagaatatgggaaattctatataacaaatgaactactt

SEQ ID NO: 70226 - DNA, 652 bp, Homo sapiens
tgttgatctgtgaccttacccccaaccctgtgctctctgaaacatgtgctgtgtccactcagggttaaatggattaagggcggtgcaagatgtgctttgttaaacagatgcttgaaggcagcrtgctcgttaagagtcatcgccactccctaatctcaagtacccagggacacaaacactgcggagggcgcagggtcctctgcctaggaaaaccagagacctttgttcacttgtttatctgctgaccttccctccactattgtcctatgaccctgccaaatccccctctgcgagaaacacccaagaatgatcaataaaaaaaaataaaaaaataaaaataaaaaaaaagaactgaataaacataccacatttaaattaaaaaaaaaaaaaaaagaaaacagccaatgccaaagagaaagatagaacgaaaatgccctattccatggaacaattaaaaaaaaattaacaactacttattccaatcactaaaagtggatgaccagacgttatggacctcctgatatgatgcaacaggaaggaccattaggaagtgttcctgaaaaaaaaagttttaagaataagtcaaccaccactaggaaacaattaaccaaattcagaatatgggaaattctatataacaaatgaactactt

SEQ ID NO: 70227 - DNA, 652 bp, Homo sapiens
tgttgatctgtgaccttacccccaaccctgtgctctctgaaacatgtgctgtgtccactcagggttaaatggattaagggcggtgcaagatgtgctttgttaaacagatgcttgaaggcagcatgctcgttaagagtcatcrccactccctaatctcaagtacccagggacacaaacactgcggagggcgcagggtcctctgcctaggaaaaccagagacctttgttcacttgtttatctgctgaccttccctccactattgtcctatgaccctgccaaatccccctctgcgagaaacacccaagaatgatcaataaaaaaaaataaaaaaataaaaataaaaaaaaagaactgaataaacataccacatttaaattaaaaaaaaaaaaaaaagaaaacagccaatgccaaagagaaagatagaacgaaaatgccctattccatggaacaattaaaaaaaaattaacaactacttattccaatcactaaaagtggatgaccagacgttatggacctcctgatatgatgcaacaggaaggaccattaggaagtgttcctgaaaaaaaaagttttaagaataagtcaaccaccactaggaaacaattaaccaaattcagaatatgggaaattctatataacaaatgaactactt

SEQ ID NO: 70228 - DNA, 652 bp, Homo sapiens
tgttgatctgtgaccttacccccaaccctgtgctctctgaaacatgtgctgtgtccactcagggttaaatggattaagggcggtgcaagatgtgctttgttaaacagatgcttgaaggcagcatgctcgttaagagtcatcgccactccctaatctcaagtacccagggacacaaacactgcggarggcgcagggtcctctgcctaggaaaaccagagacctttgttcacttgtttatctgctgaccttccctccactattgtcctatgaccctgccaaatccccctctgcgagaaacacccaagaatgatcaataaaaaaaaataaaaaaataaaaataaaaaaaaagaactgaataaacataccacatttaaattaaaaaaaaaaaaaaaagaaaacagccaatgccaaagagaaagatagaacgaaaatgccctattccatggaacaattaaaaaaaaattaacaactacttattccaatcactaaaagtggatgaccagacgttatggacctcctgatatgatgcaacaggaaggaccattaggaagtgttcctgaaaaaaaaagttttaagaataagtcaaccaccactaggaaacaattaaccaaattcagaatatgggaaattctatataacaaatgaactactt

SEQ ID NO: 70229 - DNA, 652 bp, Homo sapiens
tgttgatctgtgaccttacccccaaccctgtgctctctgaaacatgtgctgtgtccactcagggttaaatggattaagggcggtgcaagatgtgctttgttaaacagatgcttgaaggcagcatgctcgttaagagtcatcgccactccctaatctcaagtacccagggacacaaacactgcggagggckcagggtcctctgcctaggaaaaccagagacctttgttcacttgtttatctgctgaccttccctccactattgtcctatgaccctgccaaatccccctctgcgagaaacacccaagaatgatcaataaaaaaaaataaaaaaataaaaataaaaaaaaagaactgaataaacataccacatttaaattaaaaaaaaaaaaaaaagaaaacagccaatgccaaagagaaagatagaacgaaaatgccctattccatggaacaattaaaaaaaaattaacaactacttattccaatcactaaaagtggatgaccagacgttatggacctcctgatatgatgcaacaggaaggaccattaggaagtgttcctgaaaaaaaaagttttaagaataagtcaaccaccactaggaaacaattaaccaaattcagaatatgggaaattctatataacaaatgaactactt

SEQ ID NO: 70230 - DNA, 652 bp, Homo sapiens
tgttgatctgtgaccttacccccaaccctgtgctctctgaaacatgtgctgtgtccactcagggttaaatggattaagggcggtgcaagatgtgctttgttaaacagatgcttgaaggcagcatgctcgttaagagtcatcgccactccctaatctcaagtacccagggacacaaacactgcggagggcgcagggtcctctgcctaggaaaaccagagacctttgttcacttgtttatctgctgaccttccctccactattgtcctatgaccctgccaaatccccctctgcgagaaacacccaagaatratcaataaaaaaaaataaaaaaataaaaataaaaaaaaagaactgaataaacataccacatttaaattaaaaaaaaaaaaaaaagaaaacagccaatgccaaagagaaagatagaacgaaaatgccctattccatggaacaattaaaaaaaaattaacaactacttattccaatcactaaaagtggatgaccagacgttatggacctcctgatatgatgcaacaggaaggaccattaggaagtgttcctgaaaaaaaaagttttaagaataagtcaaccaccactaggaaacaattaaccaaattcagaatatgggaaattctatataacaaatgaactactt

SEQ ID NO: 70231 - DNA, 638 bp, Homo sapiens
acccacctctgcctcccaaagtgctgggattgcaggtgtgagccgctgtgccggcccctaacttgtttaagagctgaagtttttttaatcatctgctgtagctgttctgtgaaccaccttcttctttctacaaccaatttctttcccaccaatgcacggttgtgcctgaagtttggcgggtttttcctagttcatgattgtctctttcatcttgtcagagcagaaaaggggccatgcagggggcaggttggcactcagtgttcaagcagagttaggcaaacacacgcggggatgcaagatggcggctctgcgattcttacytcattctttagaacaaaataaatctctttctatgaatttccaggcgtgtacatcctcaggcctattttttcaaaaccaaagagtttatcaatatagccaaagtctatttatcgagagatttcacaaccagtaaaagtggctttaagatagtttttaaatatattttttttctctttacctgatttccattttcccaggtgaggaacttgaagtcagagaggttaagtcacttgctgaaggtcacagggctgggacgggagccagaagtgggtcaggattcaaacccagaaatgtctggatccaaagccaggctccag

SEQ ID NO: 70232 - DNA, 545 bp, Homo sapiens
gagactccttctcaaaattaattaattaattaattaaaaaggaaaaatataataaggacacactccatggcttctgcagtctcttctgagctgatagtcaaggtcctggcatggcttggctctcctccagtgctgggttaggggctctgtgacccagtgccccaccctagcctggcctaactatatcctttgctgaccttgaaccccacacagatcctggcaaagctgcatggctccatgaatacatgtatgtacatgtaggagcttttcatgcactttctcacttaaactttccaaccacctagagagctcagctagagtacctcactttacagatgaagaaacaggccttggaaggtgaagcgactttctctgatgactggaaagtgtggagggaagtcctgcacccsgacctgcctgtatcaaagacttgtctctcacgcctcaagctctgtggttctgtgcacacctcaccaggcccccactcacccatctaacatgtgtttgttctgtgtgcatgtttttcttctgtgttctgggccaca

SEQ ID NO: 70233 - DNA, 701 bp, Homo sapiens
ggattaataatgagatgatggcatccaatatgtgctcaatatatttgtcacctaaggatttcagaaacataagtttccatgtggatttttacacttcacatgttaaaacttggtcatcttatgggtggtttctactttctcttgaaaattaaccacaatttactaattttaataaactaattttggatgcagccctggaaaagggamtatgttgtaggctctctggattctgttatgttcttccaaagtattgagttttgtatttttaagcagtagataactttattatttatttatttatttattttttgagacggagtcttgctcttgtttcccaggctggagtgcagtggtgtaatctcagctcaccacaacctctgcctcccgggttcaagctgttctcctgcctcagcctcctgagtagctgggattacaggcacctggctaatttttgtagttttagtagaaacggggtttcaccatgttggccaggctggtctcgaactcctgacccaggtgatccgcccgcctcggcctcccaaagtgctgggattataggcgtgagccaccgcgactggccgcaggtagataactttaaattgtcactcccgtactggatggcaactgaaacctaagttgacattttagccatagctgaactacttgaaatctactctgtgatgcatggttcaggaaccatg

SEQ ID NO: 70234 - DNA, 768 bp, Homo sapiens
cattccaaagtgagagagtccagtgttggattcacaatcttcaaagacgagggagcactggggacttacagtgagaacttacagtcaacacaaagatttctgaatgtttcaacatgtattaaattgacatttcaccgtgctcgcacgattcaaggttttgagtttcagtaactcattcctgattcagctgaaaatacattagtacaaacctgtgacaggcacccatttagttattctcttcctttttctctcttgtcatttacatttatatttaataaaaccatcctctcaaaacacataatgactttgcctttagatggactcaaacctaatattttaaaaagaggcagtacttgtytgacgcatgaatggtgtcttaatagaagcaaactagctaccaagtgaaactattctaactggatctgagtggaagcagctgtgttctggaccattaaggactgttttctctaacaaaccaggtgtctccaaacagtcagaatgccctgcctgctgggctttgggccagcatgcccaggtgcagaaacgttcttatcctgagagctgacagctgcccaggatctggtggtgaatggacaaaagcccaaccttggcacacccccagccctggggaaggcccgaggggtctcaggttctctgtggcagaggctggcaaatcaccagaggaaacatgtctgctcatcttttattcacttcctcatgaggatgatggctggtggcagctctctctcacaatggttacctccccta

SEQ ID NO: 70235 - DNA, 585 bp, Homo sapiens
ataaggaaagagagaccccaatatataaattggggccaagcacgctcatgcctgtaatcccagcactttgggaggccgaggcaggtggatcacctgaagtcaggagttcaggaccagcttgaccaacatggtgaaaccctgtctctactaaaaatacaaaaattagctgggcgtggtggtgggcgcctataatcccagctactcgcgtggctgaggcaggagaatcgcttgaacacaggaggtggaggttgcagtgagccaagattgcgccattgcactccagcctcggtgacagagcgagattctgtctcaaaaaaaaaaaaatatatacacacacacacacacacacacacacacacacacacayatatgtgtgtgtatatatatacacacacatacatacatttatatatagacatatatgtgtatatatataaatgcacacatatatatgtgtatatataaattggataggtcttcaaacacaatgttaaatttaaacaaatcacagttaaggaagaaaacataatgtatcctatcatgtaaataaaatattaaaaacaaaataggactgtatatgagtgg

SEQ ID NO: 70236 - DNA, 1148 bp, Homo sapiens
taagaaagattgcaagtttaggaagatcaagtatagcaaataaataaatgaatgaacacacaaatgagtaaatgaatgagtgtgtgtgagtgtgtgtgtgtatgtgacagagggagaaagagacagcacagaagtgcgggtcttaccgagccctgtatgccatgttcctaaggaacttgcacgttttccttctggcagcagggaaacactgagggggaaaacatgggacatgatcgctttcacttatctgaaatccacattctcatttgaataaggacagaccacaagttagaagaggactgtgaatctgtgggcagggggaccagttcggagactcctgaaataacggggatgagaatcagggatatggatcagcattatcaagtttcagatagttctgaaatgagagtctttcactattaatggcaagaaatatttccaattataattggcaatggtctgcagaaacaaatgagagcaaaccagaaccttattcagagagggattcccttcctaaatggatttttgaactgtttcatttttttttgttactattggcctgcacaggcctgcctaggtgttactttcattcttgcactgaaatggtcacattaacacaaactcaggcagacactaaactttcagaatgtctttagtttgagagtttaaacataaggaaccattaggttttgcagtggctgccataccaaaacgtaaatcatgccaaaattgtttgaaatcctgtctttagaaggttgtgtgttttgacaaaccttgcagcaaatttggtccagctttcggatttgtaatgaaacctgaaaccaagcattctcgcctgccttggggtctcctagcgcaagttccaagcagccttagtgtaatacctaccctaatctcatcctgggaagcgacattagtgtgttaggctgcgctgctggaagtttggggtggactcagcaaatatttcatgcaattatgaagaaggactgatcargacagcaatacacttttctgtgtctgagtatttttaagagtgtaaattgcagaattagcaatactctatcccctgttggctagtgacttggagatacccaagccatgattggggcagaaagttaattaatctgcttattaaaaagaagaaatgt

SEQ ID NO: 70237 - DNA, 1216 bp, Homo sapiens
tcttaaccgatcctctttcccctccatcattccttccttcacaagagctaaacctcatgtctgagcctgattcccatccttgctggaccgatcaccctctctggtctctgcgcctttgcatgtgtgttttctgtgcttcccctctcaccagggactcatgttccaggcatagggaaagcaagtgcaaagtcaggcagcaaaacacagggtgtggagtctgtaacttctgtcctccttaccggactgtccctggccttgtcctcagcaaactcagcttcagttgtcttctcctctcctcctttgtgccctgtcaacccagggtaaaggtctgtcatcatcccagatgacagtgggcagatgacttgtccatcttccttacggggctgggggctccttgaggacggatccacagttttgcttcccagactccccatcagggtccagggtgtagcaggagcttaatgcactgaagaaacaaatgctccatgttccaagtttcacagcagcaacccaccccacctggcacacttccccaacgtaaggtattcttcctcaactcacatccctgccctcctcatctctctcttataagaactccaaggggatgaggtgatgaacctcaagtaaggtggyagagtgtgcaaaatcccccaatatgggataatgtgaaagccatttagagtttgcatttggacttaatttggtaggcaatcatttgttgagcacttgctgattccaggcaccaggttaagcacaagcgggttaaaaaatgactgagacccccatacccttccaggagtatgtagtcagggcagtgtttgaatggcagatatctgttgttctgggagctcaaggagaccccccccccgcccccgcgccaagctcccctgtggttctgctttgggctcagctttctggtagctccttacttgctgctgagttgcacctgttctttgttgctaaacgtatcttgggcacagctggtcagtctctagtcttcctttcagacctatgccttgcctgaaaattaagacctggttgtgccaaagtccattcattgatatcctctacgcgcagctgtctgtactaggcatgctgtctgcgggagctgtgcagagtgctttccatacatgatcctatttaatcctcacaaccaccctaggctgcaccatcagctgagcagatgattgtgggaggccaggcttccttccagagt

SEQ ID NO: 70238 - DNA, 1216 bp, Homo sapiens
tcttaaccgatcctctttcccctccatcattccttccttcacaagagctaaacctcatgtctgagcctgattcccatccttgctggaccgatcaccctctctggtctctgcgcctttgcatgtgtgttttctgtgcttcccctctcaccagggactcatgttccaggcatagggaaagcaagtgcaaagtcaggcagcaaaacacagggtgtggagtctgtaacttctgtcctccttaccggactgtccctggccttgtcctcagcaaactcagcttcagttgtcttctcctctcctcctttgtgccctgtcaacccagggtaaaggtctgtcatcatcccagatgacagtgggcagatgacttgtccatcttccttacggggctgggggctccttgaggacggatccacagttttgcttcccagactccccatcagggtccagggtgtagcaggagcttaatgcactgaagaaacaaatgctccatgttccaagtttcacagcagcaacccaccccacctggcacacttccccaacgtaaggtattcttcctcaactcacatccctgccctcctcatctctctcttataagaactccaaggggatgaggtgatgaacctcaagtaaggtggtagagtgtgcaaaatcccccaatatgggataatgtgaaagccatttagagtttgcatttggacttaatttggtaggcaatcatttgttgagcacttgctgattccaggcaccagsttaagcacaagcgggttaaaaaatgactgagacccccatacccttccaggagtatgtagtcagggcagtgtttgaatggcagatatctgttgttctgggagctcaaggagaccccccccccgcccccgcgccaagctcccctgtggttctgctttgggctcagctttctggtagctccttacttgctgctgagttgcacctgttctttgttgctaaacgtatcttgggcacagctggtcagtctctagtcttcctttcagacctatgccttgcctgaaaattaagacctggttgtgccaaagtccattcattgatatcctctacgcgcagctgtctgtactaggcatgctgtctgcgggagctgtgcagagtgctttccatacatgatcctatttaatcctcacaaccaccctaggctgcaccatcagctgagcagatgattgtgggaggccaggcttccttccagagt

SEQ ID NO: 70239 - DNA, 569 bp, Homo sapiens
ttgggaagaggaaaggtgcctctcacctgtaaactcatccacttttctccctaccccccacctagcaagctgtgttctctcttgtttcactctccactagcgccttccactgaatgtgcctgtgtgggtgtacctgtacattgcgtgtctgtttctaagcctttttgagcacttacatagcagttactttgtgccagcctctaagtaatatgcaagtataattctcataacaatctygtgagataggtactattattagaccttctcagagctgaggaaactgaggcccaatgatattaaggtcacatgactagtaagaggtagatccagagcttaagtccagacagtctgactccaaagcagtgtcctttaccgctgaactctgctgtccacgtttatcaagtagaaccaggaagagcttccctcagtttgcctgtggtctgctatattgacttggatgagattcagagcatgggaaaggttaagtcccaggtattaggttcatcctctctgctaagtctttctcctcttcatagaaatatacttaagtcttacatcctttataaaaa

SEQ ID NO: 70240 - DNA, 569 bp, Homo sapiens
ttgggaagaggaaaggtgcctctcacctgtaaactcatccacttttctccctaccccccacctagcaagctgtgttctctcttgtttcactctccactagcgccttccactgaatgtgcctgtgtgggtgtacctgtacattgcgtgtctgtttctaagcctttttgagcacttacatagcagttactttgtgccagcctctaagtaatatgcaagtataattctcataacaatcttrtgagataggtactattattagaccttctcagagctgaggaaactgaggcccaatgatattaaggtcacatgactagtaagaggtagatccagagcttaagtccagacagtctgactccaaagcagtgtcctttaccgctgaactctgctgtccacgtttatcaagtagaaccaggaagagcttccctcagtttgcctgtggtctgctatattgacttggatgagattcagagcatgggaaaggttaagtcccaggtattaggttcatcctctctgctaagtctttctcctcttcatagaaatatacttaagtcttacatcctttataaaaa

SEQ ID NO: 70241 - DNA, 569 bp, Homo sapiens
ttgggaagaggaaaggtgcctctcacctgtaaactcatccacttttctccctaccccccacctagcaagctgtgttctctcttgtttcactctccactagcgccttccactgaatgtgcctgtgtgggtgtacctgtacattgcgtgtctgtttctaagcctttttgagcacttacatagcagttactttgtgccagcctctaagtaatatgcaagtataattctcataacaatcttgtgagataggtactattattagaccttctcagagctgaggaaactgaggcccaatgatattaaggtcacatgactagtaagaggtagatccagagcttaagtccrgacagtctgactccaaagcagtgtcctttaccgctgaactctgctgtccacgtttatcaagtagaaccaggaagagcttccctcagtttgcctgtggtctgctatattgacttggatgagattcagagcatgggaaaggttaagtcccaggtattaggttcatcctctctgctaagtctttctcctcttcatagaaatatacttaagtcttacatcctttataaaaa

SEQ ID NO: 70242 - DNA, 569 bp, Homo sapiens
ttgggaagaggaaaggtgcctctcacctgtaaactcatccacttttctccctaccccccacctagcaagctgtgttctctcttgtttcactctccactagcgccttccactgaatgtgcctgtgtgggtgtacctgtacattgcgtgtctgtttctaagcctttttgagcacttacatagcagttactttgtgccagcctctaagtaatatgcaagtataattctcataacaatcttgtgagataggtactattattagaccttctcagagctgaggaaactgaggcccaatgatattaaggtcacatgactagtaagaggtagatccagagcttaagtccagacagtctgactccaaagcagtgtcctttaccgctgaactctgctgtccacgtttatcaagtagaaccaggaagagmttccctcagtttgcctgtggtctgctatattgacttggatgagattcagagcatgggaaaggttaagtcccaggtattaggttcatcctctctgctaagtctttctcctcttcatagaaatatacttaagtcttacatcctttataaaaa

SEQ ID NO: 70243 - DNA, 1683 bp, Homo sapiens
cagagtgtgtgaaagggtgaacgcgtgtgtgagttcagggtttccctctttggaagctgtatggcataagagctgaaacaccatgggctgcgagggcagactgcacgtgttcagaccatggcactgtcatttgagtaagggacccaatcctctatgccgaaaagtgggagaataataaccctccactctcagagccatcatggagacaaaaagagagaaaatgctgagtgccaagcatactacccggcttatggtaccttctcaactgagattagctactagtctcacctgctggaaattgttcttgctaccaacgtggcattcctgatctccaatctttggatagaaagcgctatgacccttccccatgtgtgatggccttcagtgctcaatgctgcccatatcccccgtgttgtgtgacaccacagcacgagtgagacctctgagctgaacgcagcagcctcctgccatcgggcgcaactactctcagtacaaccaaacatggctgccaggcttttcttgaaaaccttctctagctcactctacagactctatcatgaaaacagactttgagatttatgcactcaaaaaatcctccaacagcctgtatacctatatgtataaaaatgcttaaattcaccaggcacagtggctcatgcctgtaatcccagcactttgggagccagaggcaggtggatcatctgaggtcaggagttcaagaccagcatggccaacatggtgaaatcccatctctactaaaaatacgaaagaattagctgggcgtggtggtgggtgcctgtaatctcagctgctcaggaggctgaggcaggagaatcacttgaacccgggaggcggaggttgcagtgagctgagatcgtgccattgcactccagcctggggaacaagagtgaaactctgcctaaaaagaaaaaaaaaaaaaaaaaagcttaaattaagagcatttcaatgaaaggccattcagatttgttctcacggaagggatatgcatcttctacccagaccctcccatatgctctcctctctaggccttggaaccctaatttaaggatattgctgcagtgagatgcttaatggcagaactagggcgcaaccaactcagcacactggtcaactgctaacctttcactaggagcaacacgagagcctcagagttgtgagccctgtgggcaccatgaagattggtggagtaagamcaaaaaaaaaaaaaaagagagagagagagacttcaaagttgctctacactggatcgtggaaaaggagcctcttaccaaaagtggcagcggggcttagagtttgatctaggaaatacacaagagcaaaggggcagtcaggctgcagagctctgaccccgagcacatggtatgcaaacaggagtattcacactctgcagtgcaagagcctgtccttcatcttgggggatgaggccgcagtgatgtccccccgattcagtactatccccaaacaattcaccaccctaaagacgtcctcctgtgaacagcagattatctgaggatccctaaaagtggtccttcacatagggaggctgccattttcggagttggctgttagtgtggcagcaaacagctggcattcctaagtaaaaactcagagccagaactggtgctcttcaaccccgactcagctctgagacacagacctgca

SEQ ID NO: 70244 - DNA, 624 bp, Homo sapiens
cgcaggtattgggtgttagagacagaagagaacacacattcattacactctcctcttggctgctcagcaagcacgtgtgcgcgtatacgcacaaacacacacacaggtatatacaatttcaagcaaatttgatacatttatcaaaatataattatcccaagcacaaccaaaactgcattcacttccttcccaacgggagaaaaatctcaaatcacatcttgctacagtatagcgagggaargaggggcctctgtggtacaagtcccagatctctggttaatggtcatcttctcaacccagttcataaatagttctccatattatgaccaagtaatttagttatttccaatatatccgatatatacctgtagacaaatgccctgaggatgctaccaaaagctcctgtttggaaaaggggaaaggcacacattgccacccagtccaggacgtacatgcttcttattagggtgcagtaaccctgtcccctgggaggctcattcttgtctaatgtcctctgctgaaaaagacaaccctttgggggtttccgcactacctaaggtcagcttcaaaaagggaatgttgcatagccatggtgaacatggaacaagttctaggaagaaatga

SEQ ID NO: 70245 - DNA, 675 bp, Homo sapiens
atctacgacactccatgaatgaccttgggcaggtcagggaaacttatttttcagttctgggtaactgaagcacaatgtcccaactcagcttcttgcttccggggcrcgtcagggtgagtgtgcaagttgatctcagactcctgggggtgagtgtgactacaccactcttctcactttgctcacacctcagagaccaccgtttgccattctggggagtatttttgtgtagactgtcttgttgggcaatcaaggtagggaaaaggagggagtgatagagacagagaaatattcacaccgtaatgagttttccttagggaaagtggggaggagaaagaatgtacactctcgagaggtcaagagaggaagcggatgtgcatgcagttacatattccttgaaatagctcagcaaagatgtttcctttctgaacaagaaagacaaaccggtttcagtgtgtgcttccccctgaagatgataggtgggcagacaggggctgagtctgagggagtttcagtgagaacagcctcattggagagggacatttatgggagtgtgagcaggggtgaagggaacggatgggccatctgcatctgccttagtgctcccaggctggacagccctccgcctgcccatgcacacacattccttagggtaggacttcctttcatctctctact

SEQ ID NO: 70246 - DNA, 675 bp, Homo sapiens
atctacgacactccatgaatgaccttgggcaggtcagggaaacttatttttcagttctgggtaactgaagcacaatgtcccaactcagcttcttgcttccggggcacgtcagggtgagtgtgcaagttgatctcagactcctgggggtgagtgtgactacaccactcttctcactttgctcacacctcagagaccaccgtttgccattctggggagtatttttgtgtagactgtcttgttgggcaatcaaggtagggaaaaggagggagtgatagagacagagaaatattcacaccgtaatgagttttccttagggaaagtggggaggagaaagaatgtacactctcgagaggtcaagagaggaagcggatgtgcatgcagttacatattccttgaaatagctcagcaaagatgtttcctttctgaacaagaaagacaaaccggtttcagtgtgtgcttccccctgaagatgataggtgggcagrcaggggctgagtctgagggagtttcagtgagaacagcctcattggagagggacatttatgggagtgtgagcaggggtgaagggaacggatgggccatctgcatctgccttagtgctcccaggctggacagccctccgcctgcccatgcacacacattccttagggtaggacttcctttcatctctctact

SEQ ID NO: 70247 - DNA, 488 bp, Homo sapiens
ctgggcaagatgtgtttcatactacaccatataagcttataagacacatgttgcctttgatatatgaggttagcagggttccttcttgctttagcagggcaaccatgcaaatacttttcaaattccctacactgtgcaattctccttggtcacattgctcackgtcttcatgtcccttcctgcccctccccaagctcagaaggccttcacacccatccctttctcccctcttaccctacccgaggtggggagcacattcatttctgggaatcgactgctaaggtaccaagtttacccactgttctaggctgccaagacacagctagagaaaaaagcctaattcattgtattcaactggttttaatgagagatcggattgaccgtgcagtggattcaaatcaattgtgcaggaaacagtggttaagacagctgagaaagtgatctgattgaaagaggctaattcactagctccagacggacagtcctac

SEQ ID NO: 70248 - DNA, 981 bp, Homo sapiens
ggctgagtaggatgctagatatgtgacaagaaattactgtaccccaatgtagagcctgctcaactattgggatctcaaagagctccttcctgagggtgagaattaacatctgtatttttgagtgaccttttcctgtgctctgtagattccctggatgtatgatgagttgccataaaataacaatatgccttttactttttgtacttatcatagctataactgtgaagaaaatggcagggcttattttccttgtcttacgggtcaatatatgcagctcaaagaaatttagtaacttgaacaaggtcactgagatgttaataataattwaaaaatcagtaataacagtaatataacctaaatatttattggaatcttgttctgtgccaagagtcatgctgagccttttacatatattttcttatttattctccacagcaatcttagaagtacttatattatccccattttgtgtgaggaatggaaaggttaagtaactttcccaaggtcacatgattagtaagagagaaaaacaagattcaagccaaggcaaatagttaacaacagtaagaactaggaaaccgtaatatccttacccagttaagggtatgaatccaaaatatctgagtggacagtctccttaacaagtacagcttgggaagtcatctcttgtagtgagtgtttccagatagcctcttactggtactaatcctagtcccagagaaagcttttactttgatgcttggatctgaaatctgcacatctattgctcaacagttttcagaggatgggcaatgtgatctgaactaaacctgcaataaggatatatagccactaggtggcagtgggtgtgatcaaatccaaactatagcaaaggtgctgatgagaccaaatttattttccattcattctttaattttcttaaatttattacgtcagaaacctaatatttgcttttaaaatagcattcttaaatcttttgag

SEQ ID NO: 70249 - DNA, 981 bp, Homo sapiens
ggctgagtaggatgctagatatgtgacaagaaattactgtaccccaatgtagagcctgctcaactattgggatctcaaagagctccttcctgagggtgagaattaacatctgtatttttgagtgaccttttcctgtgctctgtagattccctggatgtatgatgagttgccataaaataacaatatgccttttactttttgtacttatcatagctataactgtgaagaaaatggcagggcttattttccttgtcttacgggtcaatatatgcagctcaaagaaatttagtaacttgaacaaggtcactgagatgttaataataatttaaaaatcagtaataacagtaatataacctaaatatttattggaatcttgttctgtgccaagagtcatgctgagccttttacatatattttcttatttattctccacagcaatcttagaagtacttatattatccccattttgtgtgaggaatggaaaggttaagtaactttcccaaggtcacrtgattagtaagagagaaaaacaagattcaagccaaggcaaatagttaacaacagtaagaactaggaaaccgtaatatccttacccagttaagggtatgaatccaaaatatctgagtggacagtctccttaacaagtacagcttgggaagtcatctcttgtagtgagtgtttccagatagcctcttactggtactaatcctagtcccagagaaagcttttactttgatgcttggatctgaaatctgcacatctattgctcaacagttttcagaggatgggcaatgtgatctgaactaaacctgcaataaggatatatagccactaggtggcagtgggtgtgatcaaatccaaactatagcaaaggtgctgatgagaccaaatttattttccattcattctttaattttcttaaatttattacgtcagaaacctaatatttgcttttaaaatagcattcttaaatcttttgag

SEQ ID NO: 70250 - DNA, 2083 bp, Homo sapiens
ccttggcagcctgatgaagcattccagtgtcttagaataatgtttttaaatgcaccaataaaatacataagactacaaaggaaaccaattttattgaaatacaggtaataggctgggtgcggtggctcacacctgtaatcccagcactttgggaggctgaggcaggaggatttcttgagcccaggagttcaaaccagcctgggcaacatggcgaaacactgtctctactaaaagtactaaaacaaacaaacaaacaaacaaacaaacaaaaaaacttagctgggcatggtggcatgtgcctgtaatcccagctacttgggaggctgaagtgggggaatcaccggaaccacccgggaggcagaggttgcagtgagctgagattgcaccattgcactccagcctgggtgacagagtgagaccctgtctcaaaacaaacaaacaaacaaacaaacaaacccttaayttttaaaacctaaacaaataaataaacacagctattaaaatatgaaaatgtgctgggtccagtggtgtgtggctacatggaaggctgaggcaggaggattgctcgagcccaggaatttgaggccagcctggcaacacagtgagactccatctcacaaacaaacaaaaacatgaaagagtgtggagggatggaagtctcttccaggaagaataggcagatgccaaatgcctaattctttgaggactgaatatacaaaggggacaatggccagttcatatgtaaaaatatgtttcacaacttctgtaataaccagccgagaagtcaaacgacaacctctacagcagtaagccctaaacactcaggatttgctcgatgattgccaattcccctgatttttgccccaaactctttactcctacttccaactcaggaccaagcccagaaagcgaaatgtgctcccctaaccagtcacctggggtgctgcttctagttagccgcctatggcttccctgtgcccaacagcatgcactggaagccttcccttttgaccattctaaagctttcccaccccatgcctgcctcaagttgcacgtgatggcggtgactcttcctaccctttgcttgttctcattcaagtgtccttcattgatttgcacaccttgatgtgaatgactttgttgcatcagcttctgttttaagaggccaaagggaacaatgaatttttgagtgctggagaaaacaaaagtggggagaagagtcctgatatcacagcctgggccagggccagccctgcctgtatgcactaaagagcaaaatgcaagctcctctacgaatttgatccttgtgacagccctgagcctcgctgctggattacatccaggaaactttactgtcgaagagggtgacttactttcccattcctggccttcacctagcaggtgccgataaacagggacacgatttagtaatctgggcaaaatccaagttggggactctacgccagggatccccctggcctttgaggctgggtccttcttcttatcctatttccaggcatcccagaggctagaaaaactacctccacacagctgcaggtattcctagggacacagctcaccaatctggtgggtgaccagacattccttcctgttctataggtgggaacatctgaggccctcctaagcacaagagcccatttgaacagagcaatggagaagaagtgaggtatccacacagggctccagaccagtctgtgttttccaggggcccaggaattcagatacgaggcagagggcgaagggagcaagtgtttatcaagccccaggtgccaggtactctacgtatatgtgtgctatctcagctcatcttcacaacaccccttagagatggcagggtttgaagaggctcggtcaggtcacacggcagtacacgctgctgaatggatttgaacccacacctgtttggctccaaaatccatgttttgttcactggactctgctatctcagctgagggccaagaaatctcaaaaggtagaggtggggcccagaacagaggtccaaattccttgtatagttttcatgcccgaagtgaatcatccaagtccctgcctttgaggttca

SEQ ID NO: 70251 - DNA, 2083 bp, Homo sapiens
ccttggcagcctgatgaagcattccagtgtcttagaataatgtttttaaatgcaccaataaaatacataagactacaaaggaaaccaattttattgaaatacaggtaataggctgggtgcggtggctcacacctgtaatcccagcactttgggaggctgaggcaggaggatttcttgagcccaggagttcaaaccagcctgggcaacatggcgaaacactgtctctactaaaagtactaaaacaaacaaacaaacaaacaaacaaacaaaaaaacttagctgggcatggtggcatgtgcctgtaatcccagctacttgggaggctgaagtgggggaatcaccggaaccacccgggaggcagaggttgcagtgagctgagattgcaccattgcactccagcctgggtgacagagtgagaccctgtctcaaaacaaacaaacaaacaaacaaacaaacccttaatttttaaaacctaaacaaataaataaacacagctattaaaatatgaaaakgtgctgggtccagtggtgtgtggctacatggaaggctgaggcaggaggattgctcgagcccaggaatttgaggccagcctggcaacacagtgagactccatctcacaaacaaacaaaaacatgaaagagtgtggagggatggaagtctcttccaggaagaataggcagatgccaaatgcctaattctttgaggactgaatatacaaaggggacaatggccagttcatatgtaaaaatatgtttcacaacttctgtaataaccagccgagaagtcaaacgacaacctctacagcagtaagccctaaacactcaggatttgctcgatgattgccaattcccctgatttttgccccaaactctttactcctacttccaactcaggaccaagcccagaaagcgaaatgtgctcccctaaccagtcacctggggtgctgcttctagttagccgcctatggcttccctgtgcccaacagcatgcactggaagccttcccttttgaccattctaaagctttcccaccccatgcctgcctcaagttgcacgtgatggcggtgactcttcctaccctttgcttgttctcattcaagtgtccttcattgatttgcacaccttgatgtgaatgactttgttgcatcagcttctgttttaagaggccaaagggaacaatgaatttttgagtgctggagaaaacaaaagtggggagaagagtcctgatatcacagcctgggccagggccagccctgcctgtatgcactaaagagcaaaatgcaagctcctctacgaatttgatccttgtgacagccctgagcctcgctgctggattacatccaggaaactttactgtcgaagagggtgacttactttcccattcctggccttcacctagcaggtgccgataaacagggacacgatttagtaatctgggcaaaatccaagttggggactctacgccagggatccccctggcctttgaggctgggtccttcttcttatcctatttccaggcatcccagaggctagaaaaactacctccacacagctgcaggtattcctagggacacagctcaccaatctggtgggtgaccagacattccttcctgttctataggtgggaacatctgaggccctcctaagcacaagagcccatttgaacagagcaatggagaagaagtgaggtatccacacagggctccagaccagtctgtgttttccaggggcccaggaattcagatacgaggcagagggcgaagggagcaagtgtttatcaagccccaggtgccaggtactctacgtatatgtgtgctatctcagctcatcttcacaacaccccttagagatggcagggtttgaagaggctcggtcaggtcacacggcagtacacgctgctgaatggatttgaacccacacctgtttggctccaaaatccatgttttgttcactggactctgctatctcagctgagggccaagaaatctcaaaaggtagaggtggggcccagaacagaggtccaaattccttgtatagttttcatgcccgaagtgaatcatccaagtccctgcctttgaggttca

SEQ ID NO: 70252 - DNA, 723 bp, Homo sapiens
ctgcttgggggttggcaagtagtgatctttgctgtgtgtgttgtggaactaagtttagtaaatgctcatgtttttagataacaccctctatgcccatatgaaaggtcttcttggttgtgaatatggggaataggggatactttcatcttattgtatctgttactatgtgacgaatttcaggcctctgcatgttactatgtgacaaacatcatgtacatcatgatgtctcttaaagcttcctttccattgtgtcatctggtaaatagttactaaatatgtcctgtgtgctggagttgatggtaggcactaagaagatgatgatgaaaaagatgccaggtctttgcccacatggcatttacagtctaaggcatgagagagatatggagcaaatgatcctgtataattgcaactttgytatgaaagaggggcacaggatactttgaggtattacaggacacataacacaggggcatggagctgagtatggggtaagggcattgggaaaaggctttctggaggatatgatatttgaaccaaggctttttgaaagatgtataagaattggccatgcaaagagggcagggaagagctgctgagggagaggagcaaagcctctaaattgggatggagtttggttcactggagggtcggcaggtgggtaggagaactggagcccagagggcaagctgggagtggcatgaggcgaagccagagtacaaatat

SEQ ID NO: 70253 - DNA, 723 bp, Homo sapiens
ctgcttgggggttggcaagtagtgatctttgctgtgtgtgttgtggaactaagtttagtaaatgctcatgtttttagataacaccctctatgcccatatgaaaggtcttcttggttgtgaatatggggaataggggatactttcatcttattgtatctgttactatgtgacgaatttcaggcctctgcatgttactatgtgacaaacatcatgtacatcatgatgtctcttaaagcttcctttccattgtgtcatctggtaaatagttactaaatatgtcctgtgtgctggagttgatggtaggcactaagaagatgatgatgaaaaagatgccaggtctttgcccacatggcatttacagtctaaggcatgagagagatatggagcaaatgatcctgtataattgcaactttgctatgaaagaggggcacaggatrctttgaggtattacaggacacataacacaggggcatggagctgagtatggggtaagggcattgggaaaaggctttctggaggatatgatatttgaaccaaggctttttgaaagatgtataagaattggccatgcaaagagggcagggaagagctgctgagggagaggagcaaagcctctaaattgggatggagtttggttcactggagggtcggcaggtgggtaggagaactggagcccagagggcaagctgggagtggcatgaggcgaagccagagtacaaatat

SEQ ID NO: 70254 - DNA, 710 bp, Homo sapiens
agagacctgctcctgcttgcccggctacaggggccactgtggagtcacactgaggctgtgaccggccataagcccaggagagcccgtggcagctgtgccgaggcgccaggacctctaagcggaagcttcccaagctaggaatggagcaacactgcaatgaaatgtgtccaccaagctcattgttcctcccgggcgcttataaagctcagatgtatagtgacgtatggacaaatacaaaaaagcattttttaaaaaggaaaggcatgagttttcccctttttgataaaaagcagcctgtgatgaagtctggagcacaagagagatgggtctcccatctggaagcctttcgcacgcagctataaaatgtaaaaactgaccgttggtaaaaagtgcttcataacaatatataatttgtgtcttatgcctgtgagaaagaaaggctttttttttttttttttttttyttttttttttttttttttttaatctgcaaagtcctttgcacaagtctcccaactggtttggagttttcccttctgaggtttttcaccctattcttcgtagaccctggggagaaaaaacacatgtgtaagtggctcaggacatgaggcaggccgttcacaagatgctggctaagcggcttcattcacgtctggtctgcagggaatgcccctgtcccagaactgcaggaacccccaggagaagtgggag

SEQ ID NO: 70255 - DNA, 648 bp, Homo sapiens
caataattgaacacctgcagcaaagaccagaagtaagaaaaaggctgagaggcctgggaagatgttagataatgtgcaaacagccttctggaaggagaaacagagagagtgcttgctcccctaccatattcttcagagggggagtcttagaaccacagtgtaataaggaagttgacagtaacaaaataaacgaagccatgacaataagttgtgcagggaagatatgtgagagtgaaatcacagacccctagaaaatgtaaccagagacctcagttttaaaaatcacccactctcccggcctgggcaacagggtgaaaccctgtctctacaaaaaaatacaaaaattagccagatgtggtggtgtgcacctgtagtcccagctacttgggaggctgagatggcaggatcgcttgagcctgggaagtcaaggttgcagtgagctgagattgcaccactgcattccaacctgggtgacagagggagaccctgtctcaagaaaaygaaacaaaacaaaaaaacaaaaaacgaaacgctcactttcttttcttttttaatttttttagttctgaggtacatgagcaggatgtgcaggtttgttacctaggtgaatgtatgccacggtggtttgcggcacctatcaacccatca

SEQ ID NO: 70256 - DNA, 648 bp, Homo sapiens
caataattgaacacctgcagcaaagaccagaagtaagaaaaaggctgagaggcctgggaagatgttagataatgtgcaaacagccttctggaaggagaaacagagagagtgcttgctcccctaccatattcttcagagggggagtcttagaaccacagtgtaataaggaagttgacagtaacaaaataaacgaagccatgacaataagttgtgcagggaagatatgtgagagtgaaatcacagacccctagaaaatgtaaccagagacctcagttttaaaaatcacccactctcccggcctgggcaacagggtgaaaccctgtctctacaaaaaaatacaaaaattagccagatgtggtggtgtgcacctgtagtcccagctacttgggaggctgagatggcaggatcgcttgagcctgggaagtcaaggttgcagtgagctgagattgcaccactgcattccaacctgggtgacagagggagaccctgtctcaagaaaacgaaacaaaacaaaaaaacaaaaaacgaaacgctcactttcttttcttttttaatttttttagttctgaggtacatgagcaggrtgtgcaggtttgttacctaggtgaatgtatgccacggtggtttgcggcacctatcaacccatca

SEQ ID NO: 70257 - DNA, 776 bp, Homo sapiens
cttggaaggcttcagaaaagtagttgcatttgagcggggcctttaaatgtgaataagagcttgccaggtggagaaggaagaaaggcattgcaagcggaggaaacaataaataaaggcccagaagtttgaatgttggacaactattcagaaatagccttgcttcgggatttgggacggcaacctttcacattccttgtgttgctgtcccgaaaataaagtaacaaacaagtatgctggtttggctgtgttcttcctcctgcgtcttttgtaccctccttcctttcagactatccatagtttgtgtcatttctcaaggttcagcccaatcccagctcttcagtgtagactcctcaactgtttgagccctccctgctccctacttttcccaattcctatagcacttaatttcttactacacagtttagcagtaattatatgctgtcttggtatttatctcatttgtgtaactctagccttcccagttctctcctttcaggacaggaatagcatttycctattccgtgtcccacatagggcttgacataaattgtcagcccaaagaatatgtccaaacaatccctgttgacagaacatcttgtactaatgattattacagccaagggtaccagaccccagccaggggatttactgatttgagtggaaatgtattcattgcagatacaaacattcattgagggccctccctgtttgaagctagttgaaaagttttgaaggagagactaggacatctgcccccatgtatagaatggcattat

SEQ ID NO: 70258 - DNA, 714 bp, Homo sapiens
aggttgtagtcagatggcagtcatatgaagactcaagtagggcattggaaaggctgggcctctttctccatgtagtctcaggtcccctctgcgccacatgacctctccagctgtgtcgctgaacttcttacacagtggctcagagcttccaaaagtacacaagtggaagctggcaggaactggcatagcatcacttctgcactctgttggttaaagcaactcacagggtcagcccagaatcagtgtgggaggggaaaacataaggtcacaaatactgggaagtagactttggagacaagcaagtgctgttgtgaagaaagtacagagtgctatgggaacacccagggaaggcccataacctaggcatggaagtcaggaagacttcctggaagcagtgatgctaaattaacctgaatgatgaggcctggaaactaaccaggtgaagaagaggaaaagaaacccagttcaggcaggggacacagctgactgatacaaagttccagaaaggcaaagaaagcacagtttaagatcactgtagctggagccgggagggaggcatggagtcatggcgatggggtggtgataggcctttagtctggagaggtaaatagcgcaaggtcataacgccttgtaagcccgtaaaacatttggactctgtcctgaaggcacgagacatctaggaagggttttggcargggagtgaccaggccagag

SEQ ID NO: 70259 - DNA, 561 bp, Homo sapiens
gagacacgagaattgctttaacctggaggcggaggctgcagtgagccgagatcacgccactgcactccagcctaggtgacagagcgagaatctgtctcgcgaaaaaaagaaaaagaaaagggagtgtaggctgagcagtgtggcgtgtggaggagactgcccctggaatgctggggagaggattcaaggcattttccaggcacactgttcctcggatgggtgaagaggagttccaacatcagacaagcgcggtgactgctaagagcattcaaatttggaattccctctggtggctgaaatcaacatttctcacaaaggaaacctggacaagtccgatctgtaaagagcattatccactccctgtgtatagtttattggtccagaatatcaggttagcaagctgaagtaattaaacatcaagccagctgttttaggcaattaggtaacatttttcatttaggagaccacacaacagaggggagagaatagggagataagacctgtgttttgatttactaaagtctctgcygcagataaagcccagctttttggaacccttca

SEQ ID NO: 70260 - DNA, 1096 bp, Homo sapiens
gaaaagcctgtttgtgccagccacagtggcaagattgttcggagagtccatcctgaaagtccaattaccccaacagcatggccaaggtcagtgtcaatttgcggtgtgccaactgctctagccacttcagtaccagatgtgaatcacacaggggacctgtctttcgggagaactggcatctactggacttgctagcccctctgagctgacaccctcccccactccttgctcccttccccttccttggagagacctgtctaacagaccctcccacagagagcaaataagcacaacatgcagaatcccagacttgcttatggagagttggatccactgtcacctagggggtgaatgagggagaacactgggactcggcaagggccagtacctcttactgacggcctagggcccacattttaggagcaagagatcaaacgattctcccctcctgttttgtttctaataggacacccagaagccacaacaatctgcagaagtacagcctgatgaggttgagatgtggcatgacctacttacctcacatttgacttaaaaacgtatcttttcaacacagggtgccaagatccyttctgtcatatatatatatgcttttttttgagatggagtctcgctctgtcacccaggctggagtgcagtagcgtgatctcaacccactgcaacctccgcctcccaggttcaagagattctcctgcctcagcctcctgagtagctgggactacaggcgcccgccaccatgcccagctaattttttgtatttttagtagagacagggtttcactgtgttggccaggatggtctcgatctcctgacctcgttatctgcccgcctcggcctcccaaagtgctgggattacaggcgtgagccaccgcgcctggcctctgccctatattttaaggggatttaagagcaacaatttaccccccaagttcttcaagcagcctagaaattagtacatactaatttctccaaacactgaataacatgtcctaatatggatttaaaaaacaaatatccaaatgtttcacagaccaaacagcctgactggagatctctaatttggaccgtgctgtgaagg

SEQ ID NO: 70261 - DNA, 1096 bp, Homo sapiens
gaaaagcctgtttgtgccagccacagtggcaagattgttcggagagtccatcctgaaagtccaattaccccaacagcatggccaaggtcagtgtcaatttgcggtgtgccaactgctctagccacttcagtaccagatgtgaatcacacaggggacctgtctttcgggagaactggcatctactggacttgctagcccctctgagctgacaccctcccccactccttgctcccttccccttccttggagagacctgtctaacagaccctcccacagagagcaaataagcacaacatgcagaatcccagacttgcttatggagagttggatccactgtcacctagggggtgaatgagggagaacactgggactcggcaagggccagtacctcttactgacggcctagggcccacattttaggagcaagagatcaaacgattctcccctcctgttttgtttctaataggacacccagaagccacaacaatctgcagaagtacagcctgatgaggttgagatgtggcatgacctacttacctcacatttgacttaaaaacgtatcttttcaacacagggtgccaagatcctttctgtcatatatatatatgcttttttttgagatggagtctcgctctgtcacccaggctggagtgcagtagcgtgatctcaacycactgcaacctccgcctcccaggttcaagagattctcctgcctcagcctcctgagtagctgggactacaggcgcccgccaccatgcccagctaattttttgtatttttagtagagacagggtttcactgtgttggccaggatggtctcgatctcctgacctcgttatctgcccgcctcggcctcccaaagtgctgggattacaggcgtgagccaccgcgcctggcctctgccctatattttaaggggatttaagagcaacaatttaccccccaagttcttcaagcagcctagaaattagtacatactaatttctccaaacactgaataacatgtcctaatatggatttaaaaaacaaatatccaaatgtttcacagaccaaacagcctgactggagatctctaatttggaccgtgctgtgaagg

SEQ ID NO: 70262 - DNA, 1096 bp, Homo sapiens
gaaaagcctgtttgtgccagccacagtggcaagattgttcggagagtccatcctgaaagtccaattaccccaacagcatggccaaggtcagtgtcaatttgcggtgtgccaactgctctagccacttcagtaccagatgtgaatcacacaggggacctgtctttcgggagaactggcatctactggacttgctagcccctctgagctgacaccctcccccactccttgctcccttccccttccttggagagacctgtctaacagaccctcccacagagagcaaataagcacaacatgcagaatcccagacttgcttatggagagttggatccactgtcacctagggggtgaatgagggagaacactgggactcggcaagggccagtacctcttactgacggcctagggcccacattttaggagcaagagatcaaacgattctcccctcctgttttgtttctaataggacacccagaagccacaacaatctgcagaagtacagcctgatgaggttgagatgtggcatgacctacttacctcacatttgacttaaaaacgtatcttttcaacacagggtgccaagatcctttctgtcatatatatatatgcttttttttgagatggagtctcgctctgtcacccaggctggagtgcagtagcgtgatctcaacccactgcaacctccgcctcccaggttcaagagattctcctgcctcagcctcctgagtagctgggactacaggcgcccgccaccatgcccagctaattttttstatttttagtagagacagggtttcactgtgttggccaggatggtctcgatctcctgacctcgttatctgcccgcctcggcctcccaaagtgctgggattacaggcgtgagccaccgcgcctggcctctgccctatattttaaggggatttaagagcaacaatttaccccccaagttcttcaagcagcctagaaattagtacatactaatttctccaaacactgaataacatgtcctaatatggatttaaaaaacaaatatccaaatgtttcacagaccaaacagcctgactggagatctctaatttggaccgtgctgtgaagg

SEQ ID NO: 70263 - DNA, 615 bp, Homo sapiens
aggactagaactcagagttcatgcccccaactttgacctctttctactttatattagaagcatattgtgtgtttagaatgaacagtgattcaacttgaatgtgtactgctgaaaatttcaaaggacattttaataaaggaaggaagaaacaaaggatggagagaaagaaaaaatgtaaatatagtcacgtgtcgctcagagacaggaatacattccgagaaacacatcttaaggcaacttctatgtgggaacatcatagagcatccttgcacraacacagatggtagagccgactacatccctgagctccatggtccagccttttgctcctaggctacaaacctgtgcagcacgtgactgtcctgaatgttgcaggcagttgtcacacgatggtaagtatttgtgcatctaaacatagctaaacatagaaatcatgcagtaaaaatacagtataaagataaaaaatgggccgggcacagtggctcatgcctgtaaatcccagcactttgggaggctgaggctggcggatcgctggaggtcgggagtttgagaccagcctgaccaacatggtgaaaccccgtctctactaaaaatacaaaaattagctaggcatag

SEQ ID NO: 70264 - DNA, 615 bp, Homo sapiens
aggactagaactcagagttcatgcccccaactttgacctctttctactttatattagaagcatattgtgtgtttagaatgaacagtgattcaacttgaatgtgtactgctgaaaatttcaaaggacattttaataaaggaaggaagaaacaaaggatggagagaaagaaaaaatgtaaatatagtcacgtgtcgctcagagacaggaatacattccgagaaacacatcttaaggcaacttctatgtgggaacatcatagagcatccttgcacgaacacagatggtagagccractacatccctgagctccatggtccagccttttgctcctaggctacaaacctgtgcagcacgtgactgtcctgaatgttgcaggcagttgtcacacgatggtaagtatttgtgcatctaaacatagctaaacatagaaatcatgcagtaaaaatacagtataaagataaaaaatgggccgggcacagtggctcatgcctgtaaatcccagcactttgggaggctgaggctggcggatcgctggaggtcgggagtttgagaccagcctgaccaacatggtgaaaccccgtctctactaaaaatacaaaaattagctaggcatag

SEQ ID NO: 70265 - DNA, 615 bp, Homo sapiens
aggactagaactcagagttcatgcccccaactttgacctctttctactttatattagaagcatattgtgtgtttagaatgaacagtgattcaacttgaatgtgtactgctgaaaatttcaaaggacattttaataaaggaaggaagaaacaaaggatggagagaaagaaaaaatgtaaatatagtcacgtgtcgctcagagacaggaatacattccgagaaacacatcttaaggcaacttctatgtgggaacatcatagagcatccttgcacgaacacagatggtagagccgactacatccctgrgctccatggtccagccttttgctcctaggctacaaacctgtgcagcacgtgactgtcctgaatgttgcaggcagttgtcacacgatggtaagtatttgtgcatctaaacatagctaaacatagaaatcatgcagtaaaaatacagtataaagataaaaaatgggccgggcacagtggctcatgcctgtaaatcccagcactttgggaggctgaggctggcggatcgctggaggtcgggagtttgagaccagcctgaccaacatggtgaaaccccgtctctactaaaaatacaaaaattagctaggcatag

SEQ ID NO: 70266 - DNA, 615 bp, Homo sapiens
aggactagaactcagagttcatgcccccaactttgacctctttctactttatattagaagcatattgtgtgtttagaatgaacagtgattcaacttgaatgtgtactgctgaaaatttcaaaggacattttaataaaggaaggaagaaacaaaggatggagagaaagaaaaaatgtaaatatagtcacgtgtcgctcagagacaggaatacattccgagaaacacatcttaaggcaacttctatgtgggaacatcatagagcatccttgcacgaacacagatggtagagccgactacatccctgagctccatggtccagccttttgctcctaggctacaaacctgtgcagcaygtgactgtcctgaatgttgcaggcagttgtcacacgatggtaagtatttgtgcatctaaacatagctaaacatagaaatcatgcagtaaaaatacagtataaagataaaaaatgggccgggcacagtggctcatgcctgtaaatcccagcactttgggaggctgaggctggcggatcgctggaggtcgggagtttgagaccagcctgaccaacatggtgaaaccccgtctctactaaaaatacaaaaattagctaggcatag

SEQ ID NO: 70267 - DNA, 652 bp, Homo sapiens
aaagacagtataaattattaatatatacatttttaaaactgtaatacatcttgattccattggcatataatgttaatcatcatactaggtagtattttgagacttattattgaattcgtgactaccttggcactataacagatagtcctggtacaaaaaaaaacaaaaacaaaaacaaaaacagtgctcttataaaaatgtaaacacaaagaatatttgatttgaaactgttttgtaatgttggttgacacttgccgtagaaatctgcaattgatttccaatcaatggaattgacatttattcattttgtaatgtaaatattctctaaaggagagggaattttatactaaaatatttctgtacaaagattaataataaagaaacctccttggagcctcagtttgcctcttaaaagtttgtagatattttctggacttgccttatctggtcatcagtgatgactatcacataaaaaatccggctggrcgtggtggctcacgcctgtaatcctagcactttgggaggccaaggcgggcagatcacgaggtcagtagttcaagaccggcctggccaacatggtgaaaccccgtctctactaaaaacacaaaaataaattagtcgggcgtggtggcacgtgcctgtaatcccagct

SEQ ID NO: 70268 - DNA, 769 bp, Homo sapiens
tgccaactgcaaagctagcctctgctattccctaggcctggggccttggccaagttctttaacatctcttgggttcagcatctttgtctgcaaaacagctaagccagggtctcaatctcaaatgcctcaggaaccacacaagtggtcaaatgagtgaggagggtctgtgccccccaactgaggcctcttgtcaaaggccttcaagagagcaggcctaggtggccagatgttttgatttattaagagagtccacaaatctggcttttctatgaagtctcctgactttgaaatgctaattttagaaatattcagcaggccaaactttgggtttattgagagtttattgagaggactagaaggcaatgcatacaaggtcatgttgcacggtgattaagaatatgtactctaggataaatagctaatgcatgtggggcttaataccaaggtgatgggttgataggtgcagcaaaccaccatagcacacgtttgcctgtgtaacaaacctgcacgtcttacacatgtatcctgaaacttaagataaaataaaattttttttaaagaaaataaaaaaraatacctgctctacagcctgactacctggctttgcctgcaggctctgctgcttattacctgggtgaccttggacatttcacttagcttctctaagcctcagttttcttatctgcaaaatggagataatattttatccattgcatagagtcataatgagggtttacatagttaatatttgtaaagatttaggaaagtg

SEQ ID NO: 70269 - DNA, 769 bp, Homo sapiens
tgccaactgcaaagctagcctctgctattccctaggcctggggccttggccaagttctttaacatctcttgggttcagcatctttgtctgcaaaacagctaagccagggtctcaatctcaaatgcctcaggaaccacacaagtggtcaaatgagtgaggagggtctgtgccccccaactgaggcctcttgtcaaaggccttcaagagagcaggcctaggtggccagatgttttgatttattaagagagtccacaaatctggcttttctatgaagtctcctgactttgaaatgctaattttagaaatattcagcaggccaaactttgggtttattgagagtttattgagaggactagaaggcaatgcatacaaggtcatgttgcacggtgattaagaatatgtactctaggataaatagctaatgcatgtggggcttaataccaaggtgatgggttgataggtgcagcaaaccaccatagcacacgtttgcctgtgtaacaaacctgcacgtcttacacatgtatcctgaaacttaagataaaataaaattttttttaaagaaaataaaaaagratacctgctctacagcctgactacctggctttgcctgcaggctctgctgcttattacctgggtgaccttggacatttcacttagcttctctaagcctcagttttcttatctgcaaaatggagataatattttatccattgcatagagtcataatgagggtttacatagttaatatttgtaaagatttaggaaagtg

SEQ ID NO: 70270 - DNA, 681 bp, Homo sapiens
gtggtttacaaattggattcttagctgaagacttggggtctgcaaacatttttacccattgggtggattcatgagaatcgcttttcctctgaagggggtccctacattatttaagtttgagaaacattaagcttgtttttaacaataatagaaaacagtagctgagtgattcctttcctsctacattctcagcaacctgttaagtcgggtatttttattagctccattttctagaggaggaactgaagtttatacagtttgggaaggcaagtaggtggtagagttgggatgtgaatgcgtgcattcactataatccacagtcttagccatcaaaccagtgtcccaaaatgtacttttccacaaacctctttatttatttctgcagtttcaaataccagaatgatttttgacatatttttataccctagctctgtgattcatttaatgttttaaattgattccattttgactgacatttattttaattggaaactatgattatttttcttaaaatccaatgaaagtaaaacaatgttactaaattctatgcagattcctaaaaggctccaagtgtgtgacttgctctgtctttgttaaaaaggagatacaaaaatattagaagttaaatatatatgtgtgtggcaaacagactttttgcttgttgaattccaaaatgttgca

SEQ ID NO: 70271 - DNA, 681 bp, Homo sapiens
gtggtttacaaattggattcttagctgaagacttggggtctgcaaacatttttacccattgggtggattcatgagaatcgcttttcctctgaagggggtccctacattatttaagtttgagaaacattaagcttgtttttaacaataatagaaaacagtagctgagtgattcctttcctcctacattctcagcaacctsttaagtcgggtatttttattagctccattttctagaggaggaactgaagtttatacagtttgggaaggcaagtaggtggtagagttgggatgtgaatgcgtgcattcactataatccacagtcttagccatcaaaccagtgtcccaaaatgtacttttccacaaacctctttatttatttctgcagtttcaaataccagaatgatttttgacatatttttataccctagctctgtgattcatttaatgttttaaattgattccattttgactgacatttattttaattggaaactatgattatttttcttaaaatccaatgaaagtaaaacaatgttactaaattctatgcagattcctaaaaggctccaagtgtgtgacttgctctgtctttgttaaaaaggagatacaaaaatattagaagttaaatatatatgtgtgtggcaaacagactttttgcttgttgaattccaaaatgttgca

SEQ ID NO: 70272 - DNA, 681 bp, Homo sapiens
gtggtttacaaattggattcttagctgaagacttggggtctgcaaacatttttacccattgggtggattcatgagaatcgcttttcctctgaagggggtccctacattatttaagtttgagaaacattaagcttgtttttaacaataatagaaaacagtagctgagtgattcctttcctcctacattctcagcaacctgttaagtcgggtatttttattagctccattttctagaggaggaactgaagtttatacagtttgggaaggcaagtaggtggtagagttgggatgtgaatgcgtgcrttcactataatccacagtcttagccatcaaaccagtgtcccaaaatgtacttttccacaaacctctttatttatttctgcagtttcaaataccagaatgatttttgacatatttttataccctagctctgtgattcatttaatgttttaaattgattccattttgactgacatttattttaattggaaactatgattatttttcttaaaatccaatgaaagtaaaacaatgttactaaattctatgcagattcctaaaaggctccaagtgtgtgacttgctctgtctttgttaaaaaggagatacaaaaatattagaagttaaatatatatgtgtgtggcaaacagactttttgcttgttgaattccaaaatgttgca

SEQ ID NO: 70273 - DNA, 681 bp, Homo sapiens
gtggtttacaaattggattcttagctgaagacttggggtctgcaaacatttttacccattgggtggattcatgagaatcgcttttcctctgaagggggtccctacattatttaagtttgagaaacattaagcttgtttttaacaataatagaaaacagtagctgagtgattcctttcctcctacattctcagcaacctgttaagtcgggtatttttattagctccattttctagaggaggaactgaagtttatacagtttgggaaggcaagtaggtggtagagttgggatgtgaatgcgtgcattcactataatccacagtcttagccatcaaaccagtgtcccaaaatgtacttttccacaaacctctttatttatttctgcagtttcaaataccagaatgatttttgacrtatttttataccctagctctgtgattcatttaatgttttaaattgattccattttgactgacatttattttaattggaaactatgattatttttcttaaaatccaatgaaagtaaaacaatgttactaaattctatgcagattcctaaaaggctccaagtgtgtgacttgctctgtctttgttaaaaaggagatacaaaaatattagaagttaaatatatatgtgtgtggcaaacagactttttgcttgttgaattccaaaatgttgca

SEQ ID NO: 70274 - DNA, 674 bp, Homo sapiens
ataaattgttagaatcataagtacattgagtgttcagtcaaaggaatgaaaaaattataatactattatgaaattcaagacatctaaaaagaagagagaaaattctgagggaaggagacacagaagattcctttctctacagaaatatggagagagagagagagatgggggtataaaaaaatcaacaatcacactggcataaaatttttatcaaaaattatgaatcaataatcaacacattaatgattttaaatttccaagcaataattctgtgtctggccaaatcatcaattaaatatgaaggaaaactaaatgcattttaggcagagacacagaaattggcttttttgtgaactctcctttaggaagacatttcaggatatattgtagcaaagagagggaataaaaagggagacaagtgatctgttaaataatgcactcaaccaagagaggtatgaagacaagatgacagttttgtacagacctaaagatcatttagtccagatggaagcagaaagctagagggcttcaggttagaaaakatggtaaagtgaattattgattgagattttgaaaatatggtaaagccaactaatggagtctaaaatgatgactctatttggtcttgattttaggaacataactgttttcaatggtacaggaagtgcaacatt

SEQ ID NO: 70275 - DNA, 760 bp, Homo sapiens
ggatccacttttcccagcttagtactaaacaagttgagtagaacraagagtaaacacaagtaccaaaaatatcacagttattattaataaatgccacattgaagcacatttttttggttggagagctcagtgggcctgctaactaaatcccagaattcagcagtcttacccacctagcagtggaccatgcagacttcctttcactctcctactttgcaggatggtaaggaccatgctgtatgcctaagagaagtcttaggcctaaagaactctagctctctgcagacagaatgctctaataccgttttcaagactgcaagttatttaaagtcacttcttgtcttcaaaggcaaaggaacaaaaaggtcaacagaatccacttgccctgtgaaaaattccgttccccgcaaggaaaagaggaagcaatattttccaccagacttgccctgtctgataagtcttggtaagccaccttattgattgtcttcaactgagaagacaatcaattttgagaaaactggaccaaccctactagacagacttcggtggagaggcagatgcctcagcactggtaaaaatatcaaaaaggagtgaagctgggcacttattatctggaatccttcctcttttcttgtcttgtggacttgggcagctcacgtgacctctctgggcactggtttcatcacctgcagccacacaatgatggatttgggctagatggccaccaagtatttttcagctctaacagtctgcaaatgac

SEQ ID NO: 70276 - DNA, 897 bp, Homo sapiens
tgcataaaatatatggatacatgtacattatatagatatatacgtgatttattagagaaaatgctatgttaggttaagtgttttgtgtgttttaatacatctcattgtaagaaccctttaagttaatggtgcaattatccccagtttatgggtgaggtawctgaaagaggttaggagaggttctaaatgctttctgaaagcagaggggtctaggaatctgctttttcaagctcaccaggttctaagaaaatctgtagcgcataggttggatgaacactgtctcagcagtaaaatgcttttgcttgtgtgtgcgcatgtgtgtatgcgtgagtgtgcgcccacaaaaactacatttccttccaaaatggctacttcccaggaagtagaaacaggcttcagaagacataggtaaaaaaagttgtcaggatgttgagtgggaacttaaagatagtggtccaagctaactgaactgtatctgtaatattttagtttaacgtggagaagattttactgttcaatatattgctttaagaagtacatagctggccaggcatcgtggctcgtgcctgtcatcccagcactttgggaggctaaggtaggtggattacctgaggccaggagtttgagaaccagcctggccaacatggtgaaaccccatctctactacaaatagaaaaactagctggatatggtagcacgtgcctgtagtcccagctactagggaggctgaggcaggagaatcacttgaacctgggaggcagaggtagcagtgagcggagatcatgccactgcactccaggcttggtgacagagcgagactccatctcaaaaaagaaaaagccagtgggatgaagcaatggctacccctcaggcattgtccacagaaaatgccagcca

SEQ ID NO: 70277 - DNA, 704 bp, Homo sapiens
cctcaggtgatccgcctgccttggcctcccaaagtgctgcgattacaggtgtgagccactgcgcccggtcaaaaccatattttataatgtgtttatacccagagttatttcatttgatctacaatcaagcattgtgggataggtattaggttcctcatctgtaaaataagggtgagacgtggagaagtaaaatgacttgtggggggattggggactgagagagggtatggactcaggtctataggaccctggtgcccaggagagaggagatgctgagttgctcctcccaccaatctcctctttccttgattccttggggatcaagagacattctctccccctggaatggatgagtggattttcttctctggtaccatgtgggcaccagagacttttcctgctcaggaagcttggcaggggtgtggtgggggatgttcctcagagatggtccttgaaatccccccaagtgttctttacaggggtctcctcagagccagccctgggactaaaactcctaggaagctcaacctacttcaggccagtgacttgtgagaccagggagtcaagagtgggaagagctatggaaagaagcagccattgaagtaggaatcacccactctctgaggtggtggagcctgaagaggataccaggggstttttctttcggtttcaggggtaggaggggccaggagccccaaatcagg

SEQ ID NO: 70278 - DNA, 632 bp, Homo sapiens
tgtacagtcatgcactgaataacatttcaatcaatgaggaaacacatgtgcaacagtgatcctgtaagattataatggagcatatatagagatctaatatatggcacttaatgttggcatggcagatcaagtaggggaaatgactgatattcagtaacagtgctgggacatttcattttccataataaaatatataaatgaaaatatatatcccatctaggtttgttgaagtacaccctatgatgtccacacaagaatgaaattgccgaatgatgcacttcttaaaacatgtccccatcattaagtgacccatgactgtatacacacacaaatatggtgacattttaatcaaatgattgcagtattcctgaaacacagaacattttgcaaacaatttaactacattcataacattaggtatcctttgaattgcggtgttctatgacagcgcaactacaaccaacccccatacatctcctgcaaagaaggctagaggcaagtyagggtacaccagcatctttaaggactgcttctcaatcctggacctacactggaatcacctggggagctttaaagaactaacagtgcctggaccccacctgacataactggtcttaggattaattaggatt

SEQ ID NO: 70279 - DNA, 397 bp, Homo sapiens
gataaagaaaatcaggcctgtccggaacatctcggtactttcatctggtgctggtctttcacagcccccttcatttccctgctgtcctttgcccgccctccctccctccagcctgccttcctccgggtcctccctcaagtcgcaattctttgccttgtgcctgcaatggactcaagccctggtgctcgaggcggcttggccgggctcaggyggctccgttccaggagagccatgtggtgtggctggcggctcctcacccctgcggcctcacagggctgcccactgggccaggccagctctgccagcacaccttcgaggaggccatctctggcgcgacaagaagcggttgagagaatgctgttctctggagagcagccgcattctcccattcattcac

SEQ ID NO: 70280 - DNA, 664 bp, Homo sapiens
aagatgagctgagcggacacctgctgctgctgctgctgctactgctgctgacacaggtgttggtcatcctcgcctggagcatttttcctgcctttctgctggctggaaataaagggctsacttgcagggccctgtgggagttgacttaacccactgcagtgagctgattttgttgggcagtttatggaagaaattctgtcccttattcattgatgctcttcttgggacccagttccaggactgtgacttccaggacccaattacaatgacattcttaggtgtcatacttaaaatgtgcccgcattttcttttctgagaatagagaacctatctcatgttcagaaatgacctaatgttttagccaggcacagtggctcacgcctataatcccagaactttgggaggctgagatgggttgatcacctaaggtcaggagttcgagaccagcctggccaacataacgaaaccccgtctctactaaaaatacaaaaattagccgggtatgatggtgggtgcctgtaatcccagctactcaggaggctgaggcaggagaattgcttgaacccgagaggcggaggttgcagtgagccaaggtggcaccatttcactccagcctgggcaataagagtgaaactttgtctcaaaaaaaagaaaaaaagaaaaa

SEQ ID NO: 70281 - DNA, 664 bp, Homo sapiens
aagatgagctgagcggacacctgctgctgctgctgctgctactgctgctgacacaggtgttggtcatcctcgcctggagcatttttcctgcctttctgctggctggaaataaagggctcacttgcagggccctgtgggagttgacttaacccactgcagtgagctgattttgttgggcagtttatggaagaaattctgtcccttattcattgatgctcttcttgggacccagttccaggactgtgacttccaggacccaattacaatgacattcttaggtgtcatacttaaaatgtgcccgcattttcttttctgaraatagagaacctatctcatgttcagaaatgacctaatgttttagccaggcacagtggctcacgcctataatcccagaactttgggaggctgagatgggttgatcacctaaggtcaggagttcgagaccagcctggccaacataacgaaaccccgtctctactaaaaatacaaaaattagccgggtatgatggtgggtgcctgtaatcccagctactcaggaggctgaggcaggagaattgcttgaacccgagaggcggaggttgcagtgagccaaggtggcaccatttcactccagcctgggcaataagagtgaaactttgtctcaaaaaaaagaaaaaaagaaaaa

SEQ ID NO: 70282 - DNA, 670 bp, Homo sapiens
ccgcctcaaaaataaataagtataacaacaacaatcaaattgatggtattggttaaacctagtgttttctgaatggctaattcaggtttcgaaaggccagtgatcctatgcaaacagtaacattaatttcagagtagaatataaggtcaaagagkcatgaatcgtgcaatgtaactttctccaccgcccgcattttctgcccagtcatttgtgtggcttccgcctagagctgctgccttttcatcttcttcacccttcttggggataaaggcatttggccccaggtatcaagttttatggctcaagcaagagcataaagagaagctttcaaatacatctgaatagcataatttatagccaagagagaaagtaataaagttttcctgttctgggtttgtcctctctgagagaaaaggtgcttgataaattctcccttttgtgcaatttggaaaaatagtcactctttagctgccttagagtaaagaccagtcttctgcctggggcaggagtgatttaatagtatccagaaaggggataaaattcactgaaactttaatgtctctcgggctcatctccatcaaagacaacagctataagacaaacttgattcctccaggaactgaggtttaagttggagtaactaggcagaaaggtctaagttgagtggaaa

SEQ ID NO: 70283 - DNA, 670 bp, Homo sapiens
ccgcctcaaaaataaataagtataacaacaacaatcaaattgatggtattggttaaacctagtgttttctgaatggctaattcaggtttcgaaaggccagtgatcctatgcaaacagtaacattaatttcagagtagaatataaggtcaaagaggcatgaatcgtgcaatgtaactttctccaccgcccgcattttctgcccagtcatttgtgtggcttccgcctagagctgctgccttttcatcttcttcacccttcttggggataaaggcatttggccccaggtatcaagttttatggctcaagcaagagcataaagagaagctttcaaatacatctgaatagcataatttatagccaagagagaaagtaataaagttttcctgttctgrgtttgtcctctctgagagaaaaggtgcttgataaattctcccttttgtgcaatttggaaaaatagtcactctttagctgccttagagtaaagaccagtcttctgcctggggcaggagtgatttaatagtatccagaaaggggataaaattcactgaaactttaatgtctctcgggctcatctccatcaaagacaacagctataagacaaacttgattcctccaggaactgaggtttaagttggagtaactaggcagaaaggtctaagttgagtggaaa

SEQ ID NO: 70284 - DNA, 688 bp, Homo sapiens
tgcataacgggttatggagcctgtggtaagctacaatatacatgttccacctaaaggtaataaattcattgttcaaatactgagccatggccagacacggtgggtcatgcctgtaatcccagcactttgggaggccaaggcaggaggattgcttgaagccagaggttcragaccagactgggcaacaaagtgagaccccatctctagaaaaaaattttaaaatgagccaggtgtggtggcatgcacctgtagtcccagctactcaggaggctgaggcaggaggattgtttgagcctacaactgtactccagcctgggtgacagagcaagaccctgtttctaaaattaaaaaaaaaaagtaagaaaaaaagaagctgagccaaagcacaattgcaggatgaaaacagccctggggtcttgagtatgcaacccactctgaattccagaacaatagcaatgatcatccgagttttggattatgggggatttttattttattcttcatcttcttctatagtttccaaattttctccaatgatgataaaccacttttataaccagagggaaaaaagttaaaagtgtgtggctgttggaatgtaggaaactattggtcaagcacaccaagaagtcgaaggcatagtcttaaggcagacagatgcttgttctggtttcattctgttgccctagaa

SEQ ID NO: 70285 - DNA, 819 bp, Homo sapiens
ttctggctccctaacaacctgagttccaagcaggagygtcttcataggaacagcccatttctcagagtgaaaagctgggggctggaaggttgtctcatacagtgagctagtggcagggatggggcgctccagagcccctagaaatttctgactctgcctctatgagcccttggaagttaagtattagccagggttctctcgagacacagaactgataagatgtgtgtgtgtgtggagagagaggaaggaattgatttattttaaggaattggctcacatgattgtgggggctggcgagtctgaaatctgcagggcaggctgggaagctggggacccaggaaggagctggcagtgctgtctggagtctgaaggcagaatttcttcttcctcagggacctctcttttctcttggagccttcaactgattgaatgaggctcacccatattatggaaagtaatcagcttttatccatttatgcttttgagacagagtctctctgtcacccaggctacagtgtggtggtgtgatcctagctcactgcagcctggaacttctgtactcctgtagtcccgctatttgggaggctgatcctcctgcctcagccccctgaatagctgagactacaggtacgtgctaccacaccagctaattaaaaaaaaaaattttgtagaaacgggctgagcacggtgattcacgactataatcccagcactttgggaggctgaggtgggcggatcacctgaggtccagagtttgagaccggcctggtcaacatggtgaaactccctctctactaaaaatataaaaattagctgggt

SEQ ID NO: 70286 - DNA, 819 bp, Homo sapiens
ttctggctccctaacaacctgagttccaagcaggagtgtcttcataggaacagcccatttctcagagtgaaaagctgggggctggaaggttgtctcatacagtgagctagtggcagggatggggcgctccagagcccctagaaatttctgactctgcctctatgagcccttggaagttaagtattagccagggttctctcgagacacagaactgataagatgtgtgtgtgtgtggagagagaggaaggaattgatttattttaaggaattggctcacatgattgtgggggctggcgagtctgaaatctgcagggcaggctgggaasctggggacccaggaaggagctggcagtgctgtctggagtctgaaggcagaatttcttcttcctcagggacctctcttttctcttggagccttcaactgattgaatgaggctcacccatattatggaaagtaatcagcttttatccatttatgcttttgagacagagtctctctgtcacccaggctacagtgtggtggtgtgatcctagctcactgcagcctggaacttctgtactcctgtagtcccgctatttgggaggctgatcctcctgcctcagccccctgaatagctgagactacaggtacgtgctaccacaccagctaattaaaaaaaaaaattttgtagaaacgggctgagcacggtgattcacgactataatcccagcactttgggaggctgaggtgggcggatcacctgaggtccagagtttgagaccggcctggtcaacatggtgaaactccctctctactaaaaatataaaaattagctgggt

SEQ ID NO: 70287 - DNA, 819 bp, Homo sapiens
ttctggctccctaacaacctgagttccaagcaggagtgtcttcataggaacagcccatttctcagagtgaaaagctgggggctggaaggttgtctcatacagtgagctagtggcagggatggggcgctccagagcccctagaaatttctgactctgcctctatgagcccttggaagttaagtattagccagggttctctcgagacacagaactgataagatgtgtgtgtgtgtggagagagaggaaggaattgatttattttaaggaattggctcacatgattgtgggggctggcgagtctgaaatctgcagggcaggctgggaagctggggacccaggaaggagctggcagtgctgtctggagtctgaaggcagaatttcttcttcctcagggacctctcttttctcttggagccttcaactgattgaatgaggctcacccatattatggaaagtaatcagcttttatccatttatgcttttgagacagagtctctctgtcacccaggctacagtgyggtggtgtgatcctagctcactgcagcctggaacttctgtactcctgtagtcccgctatttgggaggctgatcctcctgcctcagccccctgaatagctgagactacaggtacgtgctaccacaccagctaattaaaaaaaaaaattttgtagaaacgggctgagcacggtgattcacgactataatcccagcactttgggaggctgaggtgggcggatcacctgaggtccagagtttgagaccggcctggtcaacatggtgaaactccctctctactaaaaatataaaaattagctgggt

SEQ ID NO: 70288 - DNA, 646 bp, Homo sapiens
agtagctgggaccacaggcgcccaccaccacgcctggctaattttttgtatttttagtagagacggggtttcaccgtgttagccaggatggtctcgatctcctgaccttgtgatccgcccgccttggcctcccaaagtgctgggattacaggygtgagccactgcgcccggccatgcctggctgatttttgtagttttagtagagaccgggggttttaccatgttgggcaggctggcctcaaactcctgagctcaagtgatctacccgcctgggcttcccgaagttctgggattacaggcataagccaccatgcctagcctcagatgttaatcacatctgaaaaataccttcacagcagcatctagactagtgtttgacccaaaattgggcaccacaacctagctaggctgacacataaaattaaccatcacaagctaagcgtcttcaccactttaaatctctaggtcagaggcaaggccaaggccaaggccagacctccaagaatctggattcagacctcttgctgccctccctctgggtgagcagagatgagtcatgctggatgaggaatccagctccaatccagctagctttcaacttcaggcaggaaggggagaccaggcgggatagaggaggagggccgta

SEQ ID NO: 70289 - DNA, 646 bp, Homo sapiens
agtagctgggaccacaggcgcccaccaccacgcctggctaattttttgtatttttagtagagacggggtttcaccgtgttagccaggatggtctcgatctcctgaccttgtgatccgcccgccttggcctcccaaagtgctgggattacaggcgtgagccactgcgcccggccatgcctggctgatttttgtagttttagtagagacmgggggttttaccatgttgggcaggctggcctcaaactcctgagctcaagtgatctacccgcctgggcttcccgaagttctgggattacaggcataagccaccatgcctagcctcagatgttaatcacatctgaaaaataccttcacagcagcatctagactagtgtttgacccaaaattgggcaccacaacctagctaggctgacacataaaattaaccatcacaagctaagcgtcttcaccactttaaatctctaggtcagaggcaaggccaaggccaaggccagacctccaagaatctggattcagacctcttgctgccctccctctgggtgagcagagatgagtcatgctggatgaggaatccagctccaatccagctagctttcaacttcaggcaggaaggggagaccaggcgggatagaggaggagggccgta

SEQ ID NO: 70290 - DNA, 646 bp, Homo sapiens
agtagctgggaccacaggcgcccaccaccacgcctggctaattttttgtatttttagtagagacggggtttcaccgtgttagccaggatggtctcgatctcctgaccttgtgatccgcccgccttggcctcccaaagtgctgggattacaggcgtgagccactgcgcccggccatgcctggctgatttttgtagttttagtagagaccgggggttttaccatgttgggcaggctggcctcaaactcctgagctcaagtgatctacccgcctgggcttcccgaagttctgggattacaggcataagccaccatgcctagcctcagatgttaatcacatctgaaaaataccttcacagcagcatctagactagtgtttgacccaaaattgggcaccacaacctagctaggctgacacataaaattaaccatcacaagctaagcgtcttyaccactttaaatctctaggtcagaggcaaggccaaggccaaggccagacctccaagaatctggattcagacctcttgctgccctccctctgggtgagcagagatgagtcatgctggatgaggaatccagctccaatccagctagctttcaacttcaggcaggaaggggagaccaggcgggatagaggaggagggccgta

SEQ ID NO: 70291 - DNA, 1440 bp, Homo sapiens
tgtgggaacatacggcaaggagaatttacctagtgtgggttactgggaggtcctctggaggaggtggcatttatgctgtgtgtgtcacactggagcatggaacataagctgcaaagcaagggtctggcttctgctcacaccaccttgcagagattgtcatggggctcttattccagccaactcctctttctgggactgtggtcagaatcaccctaccttcaccaacctttccagaaacaytctctttccaaaagtttatatatcacattttctcttaagttgacatccctacatcccaggaggcccctgtttcctttttgcacacagaacactgattccttagatttcccagatatgcctaaactggcatcctcttagttgagccactcagatgggaaccccctaccccagatggagaaaagggtacacacctgggagctcagaccggttcaacggtcaggttatgggaaggagaaaagaccaacacaagctcatccgggtctagggaggcgccgagtgaagcctcgggcagtgttaggggtcatggccgtgcccatggactggctggatctgagagacatggccatgaccatgctgccccagagcaccagctccttcagagtgtggacgctgaccacgtggtcccaggtagggaggcttttgcggagtttggggtgcggcgccttttctgtgtaaaggaaaacagcccagccttttagagtttacatttcaccagagttaaatgtttcccttgaggtggttttaggggctctgtttcagcccagagctccttcatagacaggccataaaaggcccctgcctgtgtgccactggcccggggagtcttcccgaggagcctcttgaaggggctctctgcccgtggcctcctcagccttccatcctgcctggggtctgttcttgctcccctccctccgttgcggactctgggatgttgtctcttccctggacttccagctacattttcatcctggaaacgcagccctcgctctgaatccagcccactcccatgcccagccccttaaccctgagcccccagccctgtcctaagcgtgggggtctttgctctggaaaacacaggacaggcttctggggggtggggtgtcgaggagatggggcctggagagacattcattggtgacaagaactccaggtgaaagtaaggacctgcggtgaaaacccagattggagtgagatgggtatgtggggtggggaaagggggctgggccaccagagagtgctgctgctgcgtagtaagctggacaggggctcaggctctggagcatccaacgggagctgaagggacgacccctgcatccctcgtgccttccaagattgggtggagaacagatccccagatccgagaagctgcagcgctgacccagatccgagaagctgcagcgctgacccagatcactggcg

SEQ ID NO: 70292 - DNA, 1440 bp, Homo sapiens
tgtgggaacatacggcaaggagaatttacctagtgtgggttactgggaggtcctctggaggaggtggcatttatgctgtgtgtgtcacactggagcatggaacataagctgcaaagcaagggtctggcttctgctcacaccaccttgcagagattgtcatggggctcttattccagccaactcctctttctgggactgtggtcagaatcaccctaccttcaccaacctttccagaaacattctctttccaaaagtttatatatcacattttctcttaagttgacatccctacatcccaggaggcccctgtttcctttttgcacacagawcactgattccttagatttcccagatatgcctaaactggcatcctcttagttgagccactcagatgggaaccccctaccccagatggagaaaagggtacacacctgggagctcagaccggttcaacggtcaggttatgggaaggagaaaagaccaacacaagctcatccgggtctagggaggcgccgagtgaagcctcgggcagtgttaggggtcatggccgtgcccatggactggctggatctgagagacatggccatgaccatgctgccccagagcaccagctccttcagagtgtggacgctgaccacgtggtcccaggtagggaggcttttgcggagtttggggtgcggcgccttttctgtgtaaaggaaaacagcccagccttttagagtttacatttcaccagagttaaatgtttcccttgaggtggttttaggggctctgtttcagcccagagctccttcatagacaggccataaaaggcccctgcctgtgtgccactggcccggggagtcttcccgaggagcctcttgaaggggctctctgcccgtggcctcctcagccttccatcctgcctggggtctgttcttgctcccctccctccgttgcggactctgggatgttgtctcttccctggacttccagctacattttcatcctggaaacgcagccctcgctctgaatccagcccactcccatgcccagccccttaaccctgagcccccagccctgtcctaagcgtgggggtctttgctctggaaaacacaggacaggcttctggggggtggggtgtcgaggagatggggcctggagagacattcattggtgacaagaactccaggtgaaagtaaggacctgcggtgaaaacccagattggagtgagatgggtatgtggggtggggaaagggggctgggccaccagagagtgctgctgctgcgtagtaagctggacaggggctcaggctctggagcatccaacgggagctgaagggacgacccctgcatccctcgtgccttccaagattgggtggagaacagatccccagatccgagaagctgcagcgctgacccagatccgagaagctgcagcgctgacccagatcactggcg

SEQ ID NO: 70293 - DNA, 1037 bp, Homo sapiens
aatttgggcatactctaatgtatccagagtttgttgttgctgttgttgttgttgttttgttgtttttgagacagagtctcgctctgttgcccaggcaggagtgcagtggcgcgatctcagctcactgcaatctctgcctyccaggttcacaccattctcctgcctcagcctcccgaatagctgggactacaggcgcccgctgccatgcccagctaattttttgtatttttagtagagacggggtttcaccatgttagccagattggtctcaatctcctgaccttgtgatctgcccgcctcggcctcccaaagtgctgggattacaggggtgagccacggtgcccagcctgtatccagagttttaatcctttcctcccagatgttgaggaaattatatctctaattcatatttagtgggggaaggcctttacataacagaaagaaagcaggaaagctatttctatcccatagtaaatttcttcttatattttaattttggtgctcttcagctccataatcccttagacttgaaactggaaaaatctttggcttcttccgctccctatccctctacatctagttttttgacaggtcctacatatttcttcactctttgctgtttcattggtgtctcccttgttcaggccttcatcacattttctgggactattatagtgagtagtagtcttcagggtatctccagtctgtcttccctctccagtgagccaagcctagtattaggtccacttcagtgggtcatcactgcctgtcactcaaaggaaatataaaccaagtactcagcctgacattcagactgtcctggcagaaatagccaattttatatatttatatattttttgatttttaaaatcattctgtaatagctacaacagttaaaatttgtaactacatatactttgttttcattttctaaaaatgtatacacagtaaaagtgggagagagatagccaggacatatatgcttgtgtgtttcaattgatgtagtttaattagttgttggatttggcagtagttat

SEQ ID NO: 70294 - DNA, 349 bp, Homo sapiens
ggcatggtggcacgcgcctgtatttccagctacttgggaggctgaggtgggagaatcacttaagcccaggaagtggaggttgcagtgaactgagrttatgccactgcactccaacgtgggtgacagcgagatcctgtctgaaaaaaaaaatcaatgaatcaaagaatggtgaccccagtaaatacctgatactttatttatttggctcaatgaaaataaaaaagagaattttatgcaaaaatttcagacaactgaattttgccaaatgattccatttactaaggattccatctttggttctaatgtagtatatattccctgtggaggaaatggatttctccaaataact

SEQ ID NO: 70295 - DNA, 560 bp, Homo sapiens
gtgatccacccgccatggcctcccaaagtgctggcattacaggcgtgagccaccgtgcccagccaaggaaagtgacttttaaatcagaaatcacatgatctgtgatggaatttaggaaagttgatattagttggttggattagcacaatcaacagactatgccctgtatgccaaatgcagtctaaggcaagtttttgtaagtaaagttttattggaacacagtcatactcattcacttgaatattgtctgtggctgctttagtactataatggcaagagttgtgtagttgagacggagactgtgtggcctgcaaagcctaaatatttgccatctggccytttacagaaaaagtttgccaacccctggattagaggagtggaggcagaaatcctgttcattgttgttctggttagggtataaacccatgccttcctgtcaaatgaaatgaaggccagaattgtgatagccctagtagaaaaaaagaggcaggctgggcgcagtggcttacgcctgtaatcccagcactttgggaggccgagacgggcggatcacaaggtca

SEQ ID NO: 70296 - DNA, 613 bp, Homo sapiens
atagtcctttaacaaacatttacagccatgagctcgcattttatgaacatggacttagatgtkgtatgactagggatggttcataaccctgaaggtgaggctacaacacagggctgggtttgagtagagcttggaagcatatacagaggaggccctgccccatgcttctgccatgaaatcttgtacacacccagagatttgctcattttctgtaggaagcctcaacaatcccttggctatgcagttccacagaccacctgctcctccattcagatacttccagcaaagcctggaaggcagtttcagagtttgtgctgaaatagtcttagagcaaacatgcagcctctaattgagcaagatcaccatgtgtcttgctgtgtagatcatctatttacacattattctgagtcccggctccttttcgtcttgtgtctccctgaccttaactctaaaaataacttgttgaggtccattgggtatacacagatctggggagaaaggacttttaggactctgcattatgaggaagctgaggacaagtatcactggaggaaacatagtttggctggagaactgttaagaacattctggggagaggctcccaaagctcaga

SEQ ID NO: 70297 - DNA, 613 bp, Homo sapiens
atagtcctttaacaaacatttacagccatgagctcgcattttatgaacatggacttagatgtggtatgactagggatggttcataaccctgaaggtgaggctacaacacagggctgggtttgagtagagcttggaagcatatacagaggaggccctgccccatgcttctgccatgaaatcttgtacacacccagagatttgctcattttctgtaggaagcctcaacaatcccttggctatgcagttccacagaccacctgctcctccattcagatacttccagcaaagcctggaaggcagtttcagagtttgtgctgaaatagtcttagagcaaacatgcagcctctaattgarcaagatcaccatgtgtcttgctgtgtagatcatctatttacacattattctgagtcccggctccttttcgtcttgtgtctccctgaccttaactctaaaaataacttgttgaggtccattgggtatacacagatctggggagaaaggacttttaggactctgcattatgaggaagctgaggacaagtatcactggaggaaacatagtttggctggagaactgttaagaacattctggggagaggctcccaaagctcaga

SEQ ID NO: 70298 - DNA, 766 bp, Homo sapiens
catatcagattcagatagtgaaaactctttccaggagtccaaactagaaagccagaaagacttggaggaggaagaggatgaggaagtaaggwgatacattatggagaaaattgtacaagctaacaagcttctatagaatcaagaacccgtgaatgataaaagggagtgaaaatttaagctcaaggacaaattagttgatctggaagttcctccactaaaagacactaatacttacaaaagttattttgaaaatgaaagaaatatatttgggaaactgtcacagtgatgtatttccaatgatttgggacaagaaaatatgctcctgtcacttattaatggaagctgtgaaataaacaaggataggacaatactggtagagagagatggaaaatttgaacttctgaatttacaagacattgaagagtcaggggtatttgcctcccattaataatgcaaatagtacagaaaatgaccctcagcaggtgttacccagatcttccaactcctgtgtcagtggcatcaagaaagaagattctgcagcaaagattgatgttgtcactcactcatcaacaggagagccgttggcttatatccctccacttataagttggcttatatcccaccactcaaccgcaagacttgtccaagctctgctgccatctcagatcgaagtaaagggaatgggaaatctaatcaggacagtctgcacatatctcatcagtgacctcaacatactgtctttccccttgacagaaagaactacaaa

SEQ ID NO: 70299 - DNA, 766 bp, Homo sapiens
catatcagattcagatagtgaaaactctttccaggagtccaaactagaaagccagaaagacttggaggaggaagaggatgaggaagtaaggtgatacattatggagaaaattgtacaagctaacaagcttctatagaatcaagaacccgtgaatgataaaagggagtgaaaatttaagctcaaggacaaattagttgatctggaagttcctccactaaaagacactaatacttacaaaagttattttgaaaatgaaagaaatatatttgggaaactgtcacagtgatgtatttccaatgatttgggacaagaaaatatgctcctgtcacttaytaatggaagctgtgaaataaacaaggataggacaatactggtagagagagatggaaaatttgaacttctgaatttacaagacattgaagagtcaggggtatttgcctcccattaataatgcaaatagtacagaaaatgaccctcagcaggtgttacccagatcttccaactcctgtgtcagtggcatcaagaaagaagattctgcagcaaagattgatgttgtcactcactcatcaacaggagagccgttggcttatatccctccacttataagttggcttatatcccaccactcaaccgcaagacttgtccaagctctgctgccatctcagatcgaagtaaagggaatgggaaatctaatcaggacagtctgcacatatctcatcagtgacctcaacatactgtctttccccttgacagaaagaactacaaa

SEQ ID NO: 70300 - DNA, 763 bp, Homo sapiens
gttgccaggctggagtgccgtggtgcaatctcagctcactgcaacctccgcctcccaggttcaagcgattctcctgccttagcctcctgtgtagctgggacaacaagtgtgtaccaccacacccagctaatttttgtatttttagaaattgggtttcaccatgttggctgggatagtctcgatctcttgaccttgtgatctgcccaccacggcctcccaaagtgctgggattacaggtgtgagccaccatgcctggccatgtcacaggttttaactttttacttttggcagcttcttacttcagtttgggtagacttgattctgctatgggaagaaatcaatccctgaataccagaggattagagcaataagggtttgtttctcacttatgctactattgcttcggctgggggccaagcttcctgccaccttaccctgtaatgcarctcactctgacagagcagccaccatcttgaacaaagctggtcattgtggctggcgtgaagaaagctctgggggctttcccatgaggaattaaatattttggttcagaagtgacacataccacttctgcttataactcactgtccagaactacttgcctggtaccacacagccacaagtgagtgagacagtaaaattctccatgttcctgaaaagtagagagctggagacatttggaaaacagcattaatgactatcacaggaggagaattggatgaagatgtaggctgcaaacttaggatactaacaagctctcttg

SEQ ID NO: 70301 - DNA, 2925 bp, Homo sapiens
tcttgtgtgatgtccttggtattcatcgtttttctcctggcctgattcttatttgctgaggactcagagtctgagataaatcttgctgttttgagacaaggtctggttctgtcacccaagctgcagtgcagtggtgcaatctcagctcactgcaacctccacctcctgggctcaagccatcctcccacttcaagagaagaaaatgcccccagcccagtggtgttctgctggagatcagcaggaaaccctactccatagtcaagtcagccgttagcctttcaggaagttcttcctatggtgaggcctcctcaagatatatatatatatatacgtatatatatatatttattttaagaggtagtctcgctctgtcaccctggctggagtgcagtggcgcgatcttggctcactgcaacctacccctcccaggttccagcgattctcttgcctcaggctcccaaatagttgggattacaggcacctaccaccacacccagctaatttttgtatttttagtagagatgaagtttcgcgtgttacaggccaggctggcctcaaactcctgccctcaagcaatgcattcgccttggcctcccaaagtactgggattacaggcataagccactgcgcccggccctcaagagattttaaaaactgaccacttgtcttcttcttcttcttcttcttttatttatttatttacttatttatttagagaaccaggctggggtgcattggcacaatcatagctcactgcagccttgacctcttgggctcaagggatcctcatgcctcggcctcctaagtagctgggactacaggtgcacaccaccacagccagctaattgttaaactttttgtagagatggtgtcttgctatgttgcctaggcctggtctcgaactcctggcctcaatccaacctcctgcctctgcctcctgaggctgtgtgattacagatgtgaattgctgtgcccagcccttatcttctattactatatttcaagctggtcatggtcaaaattgttcaacctggttttcccccataaaattaagtcactttcttcaaccctcttccatcagattttattcatctcttagttttcttctctgtcctatattttctctatctcaaaatgtagcacctagaattcgacctgatattccctgataggggttgcggagagtacagattgctgcccaagagtgttttgttgttattgttgttttccttttttgttttttaaatgaagcttttggtgtcctctaaatcctctttgtaggaacttgccagaaactgttaaatctgataggattgaatctggcatgctccagtcatctgagcaagagtttgtttagggcttgtgaatgtgcccttgatcgggatgtgaggttggaatgcaggacgatgcttttggtctggacattggaacgcagcagtcggccctgggcaggggttggggcccggatggggtcggctcctcgcaggaacagtgatcctgtctctccccagacaccccccacccacaacatactccctccttgtctgcggcttacccagcacactccctctgctctttgccctgctggaagagctcatgcccataatatcaactgcaggactcctggaccaggcctgccttgctgccttccagaacacacctgccgcccccatccccctgatcaatagctgatggtgcccacatctatacgcccagctctcgcctcccctgagctccctggcctgtgggttgtctacgtgcacctcagcccaacacgctgacaagtgcctcatttctgctgcccctccacccggcattcctcatctcatcccggatccacccccccgacgctcagctgctcagaccaaaagcccagacatgtccttgttgtccccgcctccctcacgccctgaagacctgctgtctgcaattctggtcacctctctccagagtgtgttccgagagcagccctccctcctctcatctttctggctcctgcttcggtggctgttcagtgacctcctcactggtctccctgtttcccgtcctccccacccctgccaggctcttccagcaaccagcatgaccttcctagcgcagagagcacaccccccggcccctgctcacagccctccgcgtgcaattccaaacttcccacagccccaggyccaggagcaccctgcctactcggcatctgctcccagccccccacagccacagactcctttctggtgcttagacctgccagccctgcgcccacatcaggaccctgcccagcacacccctccctgcctgagcctccgcgcagtcggtcctcacctctctcctctctatgtccttgcccccgtgagcagatgtaaagtcccccgcctgccgcccgcccactctctctctctctccagtgtatcatcacgtttggctttcttcatagcacttcatccggtctgaggtcatcttttatttcagtgtggcttgtctgccgcagtggaacgcctgttccggagagcagggcccttgcccgccacatcccagctcctgcaacaggcccgcacgcagtaggcacctgttgaataaatacgccacaatgccacaaaaagaaagaacagaaatcgctgtgggctcctgcctagaggcaggtcctgtctctttgtctcccacctggggcagcaggaaggtatcttgtttctgtccctgcccaggcctgtagcccagcgccctgcacagccgcctgcagttcttgccctcgtgctgttatgttatgccccagagaggaagactgctctgtaaggtagtgagtttcctgtgccagaagcgttcagacagagacgggataccagcagttcatccaagtttccatcagcgactgtttttccttaggcggaagccacactagatcagtggttttctaacattttctaaaacact

SEQ ID NO: 70302 - DNA, 516 bp, Homo sapiens
tcactgaagctggagyacagtggcacgatcgctgctcactgcagccttgacctcccaggctcaagggatctttccacctcagcctactaactacaaatacgccaccaccccggctaatttatttttttactttttatcgagacaaggtctggctctgttgctctggctggtctcaaactcctgggctcaagtgatcctcccacctcagcctcccaaagtgctgggattacaggagtgagccactatgtctgtccttgaaagcctttttaatgtgccaaaacaagatgggtaaatgtatccaggttgaagttagaaggcctctagacaataactattctgttttactccctgttccccaagagctttggattcactggaattgcctctaagaagaggctgtacacatggttgaagcaggaatcccagtattgaggctgtttttgatggggccaaggaatgtcggtcatatttgtgtgcaggtctattttctctctccactttttctgacttgggctg

SEQ ID NO: 70303 - DNA, 545 bp, Homo sapiens
ctgtgacctttgtcacttttttcctccacatattcatgtatgaaaatgactcagccctaacaccctgtggtttatttttagtaggggcaacagagccagttgaaaacctaagcatagtaactattgcccatcaacagcctcacacatcagaagcagggaacaaatatttattcatttcaactaatatgtgtgactcaaggggcacaagagagtctgcccctttcaagatatatatttgctctttctttctttctgccacagtattggaacctcccaatgggagaatgactcctttggacttgaaatttcagtatkaggagacccgtagccagcagtgagtggagtccatttcactcattttataactgaggaatcatccacagtcacatgtaagtttgtggctatgttggactctcagcccagtgcctcattgtatctccattgttccacattccttagtcaaaagctaaataatagcacatgtttgacacgagaccatagttccagaagaagaggacatattcagggctgatatcccattataa

SEQ ID NO: 70304 - DNA, 1467 bp, Homo sapiens
caagaatggattaatgggttgggaatgctgggttttggccttcattctggtgctgtggtcctgtttcctcatttgtaaaatgaagggggttgtaaagatatattctctaaaacccctaatgctatggctgtggcattaagtcaaactattatttcttactgctttgtaccggacatcactttcacattagtaaaacttttcatcagtgtagtttctcccaagcttgattattgagaaagatagtgccttgtttttaacatcctgtatcctagttccaccgcagtgtttggtacacagtagatgtttaaaagaagcttattaaatcaaatggtggccaggctcatggggctcacgcctttaatcccagcactttgggaggctgaggtgggcagattacttgaggtcaggagttggagaccagcctggccaacatggtgaaaccccatctctagtaaaaaaaaatacagaaattagctgggtgtggtggcacgcacctgtagtcccagctatttaggaggttgaggtaggagaattgcttgcctgggaagtggaggttgcagtgagccaaggtcgcaccactgcactccatcctgggcgaaagagcaagactccataccaaaaaaaaaaaaaaaaatcaaatggggctgggtgtggtggctcatggccataatcccagcactttggtaggctgaggtgggcagatcacttgaggacaagagttcgagaccagcgtgggcaacatagcgaaaccccatctctaaaaaaaccccacaaaaaccaaaacaaatgaaaataaaataaatcaaatgggatagaaattatagtccttgcttttggatcctttcccacattgacatattagttcatagatcaggggactggggaggaattgggtttttaccagagggagacctggagctgacctgacagatttaaaccagctttatgggataatccgcttgagacggatgacgctgtaggcaagtgattcactgctgtttcattcctctacctgcctatccccagaaccatggccaactgtgagcgtaccttcattgcgatcaaaccagatggggtccagcggggtcttgtgggagagattatcaagcgttttgagcagaaaggattccgccttgttggtctgaaattcatgcaagtaagtggacttcattgttcccattttgattccttcatagtataggagaacactgtgattaacctgtttctcccygtctttcttatttaaagttctccacggtagagtgaacacaagtgtcttgagacctggaaactcctcagtgccctagcgtttggctacatcttggaacaaaccaagttatttaggattttccaaaatagtctctgtaataggaggtgcattgctacgggaaaagcagtgcagagttccacatatgactgcatctctgtaatttctgactgagagctgagcatgtttgagttcttggt

SEQ ID NO: 70305 - DNA, 660 bp, Homo sapiens
ttgattttagatcagaagaatcctggaacacatgaatgatgaagccctttggtagacagattcatgatgtatttaaaacattgctgtcttatccgttattcttctctctgtgtagaaatatacaagttgatgagggcagatattttcataatcctagttctgtttagcaaatggaagtccattactggcagtgtgagggtaaaaagtgaaatgggtaacagattaaagaaaagtggcagagaggtagcaacaaataggttcagaacatgtttggaagattatagagggggcacaatggttcagaatgcctgcaatcctggcactttcagaggctgctgtgggcatattgcttgcacctaggagttttagagcagcctgggcaacatggcaagaccccatctctacaaaaaatttaaaagttagccaggcatggtggcccaaccctgtagtcccagctacttgggaggctgaggtgggaggatcgcatgagcccaggagatcaaggctgcagtgagctgtgttcgcactactgcactccagcctgggtggcagagtgacactctgtctttaaaaaaaaaaaaaaaaaaaaaatwagaggaggtaaaaaaaaaaaaaatattcaagcctgatttagcttgttgaatgagaattcaattttgc

SEQ ID NO: 70306 - DNA, 1232 bp, Homo sapiens
accaagctctggggatggaaagcagccctttctgaatcactcacccatcctgctcccagcaagaaaaaagcatcagctctgtgacaggagctaattcccctaagctgcgctatcacttaccattcacttggcgatttgtcatttactaaccccagacagtctttcatggtttaatttctcttacgtgtcttgtcccttagtctacgttgtatcacgcaagccatatgaaacatctcagtgaatatgcacttatgggcaccatcagattcttgtccattctgttgctcaccagggaaaaggaaaagggaaaggaacccacctgagaaatagttcgttaaaggattttgggaacattatgttagggaggcctttgaattgaatgcttgggtgctaggtccttatccaactctcctcaagggcttgtcaaatgagcaacataaaaagccaagttccaatgagaacacatggacacagggaggggaacatcacacaccacggcctgtgggcggggagggggggcgcggggggcgggggcaaggagagagcgagcattaggacaaacacctaatgcatgtggggcttaaaacctaaatgatgggttgataggtgcagcaaactaccatggcacatgtatgcctatgtaacaaacctgcacgttcagcacatgtatcccagaacttaaagtaaaattttaaaaaaaaatttttaaaggccaagttcaagggaaatctgcaaaaccccatggtagccactgacctctgccatgaggctagacccccaagggaacagtggccaaggtcaccactgtttcaccacaaccattggctccctgcccttctcccatcctgcactcaggtgagccagtctgctgtaaagaaagggtgcctatccatggggggttccgtggagctctgtttacctcagagagggaagactgagaggcagagtaggaaagtaacttacacgaggacatgcagagaattgggccaaaccarggactgccccctggattcttggacctcactaaagcacttgaaataagtcctcattccttagcctatcaatgactcaagaaagagagacttgagagagcagttctcatcaaaacggggaaagacacgtgtgtacttattgcaaaccccagctctgagcttggtgtcactggggcatagtgggtgggcaccccaactctaaaaccagggccatcatctgacaactaacttctctgggat

SEQ ID NO: 70307 - DNA, 1232 bp, Homo sapiens
accaagctctggggatggaaagcagccctttctgaatcactcacccatcctgctcccagcaagaaaaaagcatcagctctgtgacaggagctaattcccctaagctgcgctatcacttaccattcacttggcgatttgtcatttactaaccccagacagtctttcatggtttaatttctcttacgtgtcttgtcccttagtctacgttgtatcacgcaagccatatgaaacatctcagtgaatatgcacttatgggcaccatcagattcttgtccattctgttgctcaccagggaaaaggaaaagggaaaggaacccacctgagaaatagttcgttaaaggattttgggaacattatgttagggaggcctttgaattgaatgcttgggtgctaggtccttatccaactctcctcaagggcttgtcaaatgagcaacataaaaagccaagttccaatgagaacacatggacacagggaggggaacatcacacaccacggcctgtgggcggggagggggggcgcggggggcgggggcaaggagagagcgagcattaggacaaacacctaatgcatgtggggcttaaaacctaaatgatgggttgataggtgcagcaaactaccatggcacatgtatgcctatgtaacaaacctgcacgttcagcacatgtatcccagaacttaaagtaaaattttaaaaaaaaatttttaaaggccaagttcaagggaaatctgcaaaaccccatggtagccactgacctctgccatgaggctagacccccaagggaacagtggccaaggtcaccactgtttcaccacaaccattggctccctgcccttctcccatcctgcactcaggtgagccagtctgctgtaaagaaagggtgcctatccatggggggttccgtggagctctgtttacctcagagagggaagactgagaggcagagtaggaaagtaacttacacgaggacatgcagagaattgggccaaaccagggactgccccctggattcttggacctcastaaagcacttgaaataagtcctcattccttagcctatcaatgactcaagaaagagagacttgagagagcagttctcatcaaaacggggaaagacacgtgtgtacttattgcaaaccccagctctgagcttggtgtcactggggcatagtgggtgggcaccccaactctaaaaccagggccatcatctgacaactaacttctctgggat

SEQ ID NO: 70308 - DNA, 633 bp, Homo sapiens
cacagatgctgtgagagcctggagtatgcagtgacttggggactgggcttaggttccatgtcatattcttaccttcattctgcaaaaatattttgagcattcgtaatccactgtataagaatttagagataagagacwcagcccatacccttaagtaaggagctcacagttgaatgggagatgaatatgagcaaaaagaatacaaaccaaaggtgatgagtgttttggtagagggatgcccaggtgccatggggcacagggaaggtgacacccatacaggctggggtgcgaaatgggagtagagctgttcagaaaggaccattcactcaccaggaccacacctggaggcagtggttcttgagctgcatcttgaagaaggaatggagatagttaaggcaataagggggaggagaacattccacatggagggagaaaggcacatgaaggcatggagaagtgacagggaaagggcatttcctcatcatctttcacctcatctccctcatcgtaattgtaaccgtccatccatccatccatccatccatccatccatccatccatccatccatctatccatccatccttcttcagtctccaagcgtctgctgagctctgatgcccatgccctgtggt

SEQ ID NO: 70309 - DNA, 670 bp, Homo sapiens
ctaggaatgtccccctcccttctcctttgtcagctgcttgggagcaaacacaatagctaagcttcagatctctggctctgctttctctcctcctgctgcctgccactgagatgtgcttgctttccctcctcctcccctgcacccgcctgatgtctccagggaagatgcctggtcttctttaatgaactggaaatgtgattaagatgggccacaattgggcctgcacaccaacccaggcatggtgaggtcatggctggatgggctggggcagctgctctcccgcagctcctggcacsgccgacaggagttgaaagaagacaggagtagctgatgcagggccttggagccagggagatgctggaagtgtgcaaattagctggcccttgttttgcatccctgccagaatggtttagcagagaactgaggagccagtaccgattgcaggcaaatgagaatagttataagcatttgatttcctggtgtcatctcatttgatttcattttgcagaaaccatctagggtaggtccaagtactgctgtctgtgtcagttaggagtaggttcagctgtgagtgacaggacttatacaatctaagtttatttatctctcatgtaaagaagtttggggtaggatgtccagggccatgcaagatctcatggtgttgggatcc

SEQ ID NO: 70310 - DNA, 658 bp, Homo sapiens
ggcaactctgagtctcttgaatttagtcacagactctaggggaccaaaggacagtgtggaaggtaggtccattctctccttcactaatcatctctttgcttttcctaccttcgaggcaaaaggagcctatcctgtcggccccccatggtcaagctggtgtgtcccgctgacaacctgcgggctgaagggctcgagtgtrccaaaacgtgccagaactatgacctggagtgcatgagcatgggctgtgtctctggctgcctctgccccccgggcatggtgagtcaccaggcacagagctggtgcctgcccttcagttttcttgtaggcagggatgagtgagggggctgtgcagccagagagaggaagaaacaagggctaaacacggatagcaatggaggtggtgctggtaatgggggcatggaggaggggaggctcttctgtctcctccctgccaaagtcagggagggagttgttaggaaaatgcctggggttgatcctcacaggatctgacaaaaatataagaacttagcttacaggagtgccataggaagcaaagaatttccagaaaatacgtactagtaaaaacaagcattcccactagaattttcccaggggccgccttccatgctatgaaaatggagggacacatatatatttg

SEQ ID NO: 70311 - DNA, 658 bp, Homo sapiens
ggcaactctgagtctcttgaatttagtcacagactctaggggaccaaaggacagtgtggaaggtaggtccattctctccttcactaatcatctctttgcttttcctaccttcgaggcaaaaggagcctatcctgtcggccccccatggtcaagctggtgtgtcccgctgacaacctgcgggctgaagggctcgagtgtaccaaaacgtgccagaactaygacctggagtgcatgagcatgggctgtgtctctggctgcctctgccccccgggcatggtgagtcaccaggcacagagctggtgcctgcccttcagttttcttgtaggcagggatgagtgagggggctgtgcagccagagagaggaagaaacaagggctaaacacggatagcaatggaggtggtgctggtaatgggggcatggaggaggggaggctcttctgtctcctccctgccaaagtcagggagggagttgttaggaaaatgcctggggttgatcctcacaggatctgacaaaaatataagaacttagcttacaggagtgccataggaagcaaagaatttccagaaaatacgtactagtaaaaacaagcattcccactagaattttcccaggggccgccttccatgctatgaaaatggagggacacatatatatttg

SEQ ID NO: 70312 - DNA, 628 bp, Homo sapiens
catgtgaagcaytgtgcgtgactggtggggctaactgggctctggaggcggtagctctggggccctaacccctttctgcctcatgctaattgacctatggcatgtccagtgacatcatgactgagaaaatgatttgaaagtagtaatcgctgtcaggaattgtctcctggttcaacccactcctgccttaggcccactaagatcatacccacatgctctgacccaacacctcagagaaagcctccattagggtggctgcccctcccagtggctgcccaattgagttaactctgcccctgaatgtcctgcttcagcaggcaaagcagtggtgcccaaggttggcctttcatccaccccaaaccactcagccctgggcactggaggctgcagggagaagggtaggggctgggcttgggctaggatagacaagtcaggagaatctcaggcagcaactgatgaaggaagctgcaggatgcaagggaggcgagggtggagaaaactgtgtgggttgggcgggcgcggtggctcacgcctctaatctcagcactttgggaggctgaggcaggtggttcacccaaggtcaggagttcgagaccagcctggccaacatggtgaaacccgtctctac

SEQ ID NO: 70313 - DNA, 728 bp, Homo sapiens
ctctcctccgcagggctgcaccggcccccacagcacctttttgccagctagggaaagacgtctctcctccaggcaacatgcagcctcaccagagtgcacggtgtagcagagtggggtgtgatctctctcccaggtgcctttgtgcagtgagcaacctacacaaacatgctcagtgaacctagaaagtccctacagatctgcctggaagggggctcagagaagggaagtgatgcatctgagaggactcagtgtgtggggactgaagctgggagggcccctgggatgtctgtcagcctgcctcagagtggacacgagtgggggcatgcaaaggagtggagcaggrcaaatgggtgcctgccatggatcggcggggaggacccacggtctccatcttgccctgccacccacttgaggttccctgaattcccacactgttccaggctcccagaggggtcagacttggactcacctgcatgggaaaggccctttcttctcctctgagcctcagtattctcctgcggataatgggattataatagcccccaccccagcctcaagagggctctaccagctcatgatgatgatgatgatgactgttcagtccagcgggacagcagccaaagcactgcctctcctcaccccacccctacctagcctcaggtgatgtccaggctttcctggcaggggcagagcagaaccacccgcccacctgcctgccccaagtccca

SEQ ID NO: 70314 - DNA, 728 bp, Homo sapiens
ctctcctccgcagggctgcaccggcccccacagcacctttttgccagctagggaaagacgtctctcctccaggcaacatgcagcctcaccagagtgcacggtgtagcagagtggggtgtgatctctctcccaggtgcctttgtgcagtgagcaacctacacaaacatgctcagtgaacctagaaagtccctacagatctgcctggaagggggctcagagaagggaagtgatgcatctgagaggactcagtgtgtggggactgaagctgggagggcccctgggatgtctgtcagcctgcctcagagtggacacgagtgggggcatgcaaaggagtggagcaggacaaatgggtgcctgccatggatcggcggggaggacccacggtctccatcttgccctgccacccacttgaggttccctgaattcccacactgttccaggctcccagaggggtcagacttggactcacctgcatgggaaaggccctttcttctcctctgagcctcagtattctcctgcggataatgggattataatagcccccaccccagcctcaagagggctctaccagctcatgatgatgatgatgatgactgttcagtccagcgggacagcagccaaagcactgcctctcctcaccccacccctacctagcctcaggtgatgtccaggctttcctrgcaggggcagagcagaaccacccgcccacctgcctgccccaagtccca

SEQ ID NO: 70315 - DNA, 569 bp, Homo sapiens
tttctttcagtttcaacctttttttcataggtagaaatgaraaaaataatacttcttacttagtgtggaccaaaagttagcttttgattgcagatggaatcggcctccctaaatttttatcctgtcattctttaattttttttgagacaaggtctcactctggcacaatcatggctcactgcagcctcaacctctctgggctcaggtgatccttccacttcagcctcctgagtagctgggactacaggtatgtgccgccacgccaggctaatttctatattttttgttgagaaggtgttttgccctgttgcccaggctggtctcgaactcctggcctcaactgatctgcgtgcctcagcctcctaaagtgcttggattacagacatgagccaccatgccaggccaattctttaattttttgtcgagtttttctaaatgcttattaataagttccaaggcagtttttcattctccgccaaggtaaagactgagcaattaatgggaatgagatttaaagaaaaacgaaaacaaaaaaaccctggtactgtgttttcagaggcaattatatt

SEQ ID NO: 70316 - DNA, 589 bp, Homo sapiens
tcccaagtagctgggactataggcatgcaccatcacgcccggctgattttttgatgttttatagagatgaggtctcactatgttgctcagactggtctcaacctcccaggctcctcccacctcagcctcccaacgtgctgggattataggcatgagccaccatgcccggcaagtatgccattctttactgaataatatgatttgaaatccagttgatttttaatctgtatcttatcataggtttaacatatttaaaatttgtatgtatacactttactttcttctcctttatacccattaagctcgacacagcactctgagcagttgcctgaaggacctctcctcgcttgtacttgcatccacagtggactctatatgcttagcacaagctaagacctactgctaaggtttagagaaaaagaaagagaatcaccaataacaayaaagttgtttaaaggtaagtaaaatatcctagtaatcaaatgagccaagatttaagataaacaactttgatataaaacacctaaaatccacttgcctcccagacttgtggtccataccagaatataaactaggaatcgagtgggaa

SEQ ID NO: 70317 - DNA, 905 bp, Homo sapiens
catatgattatttagaaaacctgatttcaaaacctgatgtcttactctctatgtgacttaggcagggacacagaatcttcgtgtttcctcatctatcaaatggagactaatctttatttgcctaacagcgttgctgtgaagatcagatgagaagtttatagttatttaaaaggacatttgaacacattaatagctgcagagggggaggacatatcgttaggaacaaagctttgcaattcactagctctagattcaaattcaggttctgcagtttagctgtgacttagtttcatgcttctcaaactttcttgtgcgcatgaatcacctggaagctgtgttaaatttttgcatgttctgattcagaagatctggagtgaggcctgagactctgcatttctaggcaattcctgtgctgctggtccacactgggaggagcaaggagtgaaactccctaacacaatgattctcaacttgcattgccaatttagaagcatctgggagctctacaaagtcccaatayccaggttgcatctcagatcaattaaataaaaatctctggggataaaaggcaacatcagtattagtgctgagacttaatttttttaccctgtaaattaaaaaaatcatagtcctcctttataggcttgtgctgggattccaggtttataatactcttgctgtattctgtttcattaaaaaaaaactctcaacaatttaaaggtattgtagttcttttgtgtttataaagcactgtacatgtattgtctcactaaattctccaaaaagtattgtgaaatacttgcattttctagactttgggggctaagtagcctagataagggtccagagctaggagatagtatcactgggacttgagcctaagcctcctcctgcatttcaatgaa

SEQ ID NO: 70318 - DNA, 905 bp, Homo sapiens
catatgattatttagaaaacctgatttcaaaacctgatgtcttactctctatgtgacttaggcagggacacagaatcttcgtgtttcctcatctatcaaatggagactaatctttatttgcctaacagcgttgctgtgaagatcagatgagaagtttatagttatttaaaaggacatttgaacacattaatagctgcagagggggaggacatatcgttaggaacaaagctttgcaattcactagctctagattcaaattcaggttctgcagtttagctgtgacttagtttcatgcttctcaaactttcttgtgcgcatgaatcacctggaagctgtgttaaatttttgcatgttctgattcagaagatctggagtgaggcctgagactctgcatttctaggcaattcctgtgctgctggtccacactgggaggagcaaggagtgaaactccctaacacaatgattctcaacttgcattgccaatttagaagcatctgggagctctacaaagtcccaatacccaggttgcrtctcagatcaattaaataaaaatctctggggataaaaggcaacatcagtattagtgctgagacttaatttttttaccctgtaaattaaaaaaatcatagtcctcctttataggcttgtgctgggattccaggtttataatactcttgctgtattctgtttcattaaaaaaaaactctcaacaatttaaaggtattgtagttcttttgtgtttataaagcactgtacatgtattgtctcactaaattctccaaaaagtattgtgaaatacttgcattttctagactttgggggctaagtagcctagataagggtccagagctaggagatagtatcactgggacttgagcctaagcctcctcctgcatttcaatgaa

SEQ ID NO: 70319 - DNA, 905 bp, Homo sapiens
catatgattatttagaaaacctgatttcaaaacctgatgtcttactctctatgtgacttaggcagggacacagaatcttcgtgtttcctcatctatcaaatggagactaatctttatttgcctaacagcgttgctgtgaagatcagatgagaagtttatagttatttaaaaggacatttgaacacattaatagctgcagagggggaggacatatcgttaggaacaaagctttgcaattcactagctctagattcaaattcaggttctgcagtttagctgtgacttagtttcatgcttctcaaactttcttgtgcgcatgaatcacctggaagctgtgttaaatttttgcatgttctgattcagaagatctggagtgaggcctgagactctgcatttctaggcaattcctgtgctgctggtccacactgggaggagcaaggagtgaaactccctaacacaatgattctcaacttgcattgccaatttagaagcatctgggagctctacaaagtcccaatacccaggttgcatctcagatcaattaaataaaaatctctggggayaaaaggcaacatcagtattagtgctgagacttaatttttttaccctgtaaattaaaaaaatcatagtcctcctttataggcttgtgctgggattccaggtttataatactcttgctgtattctgtttcattaaaaaaaaactctcaacaatttaaaggtattgtagttcttttgtgtttataaagcactgtacatgtattgtctcactaaattctccaaaaagtattgtgaaatacttgcattttctagactttgggggctaagtagcctagataagggtccagagctaggagatagtatcactgggacttgagcctaagcctcctcctgcatttcaatgaa

SEQ ID NO: 70320 - DNA, 905 bp, Homo sapiens
catatgattatttagaaaacctgatttcaaaacctgatgtcttactctctatgtgacttaggcagggacacagaatcttcgtgtttcctcatctatcaaatggagactaatctttatttgcctaacagcgttgctgtgaagatcagatgagaagtttatagttatttaaaaggacatttgaacacattaatagctgcagagggggaggacatatcgttaggaacaaagctttgcaattcactagctctagattcaaattcaggttctgcagtttagctgtgacttagtttcatgcttctcaaactttcttgtgcgcatgaatcacctggaagctgtgttaaatttttgcatgttctgattcagaagatctggagtgaggcctgagactctgcatttctaggcaattcctgtgctgctggtccacactgggaggagcaaggagtgaaactccctaacacaatgattctcaacttgcattgccaatttagaagcatctgggagctctacaaagtcccaatacccaggttgcatctcagatcaattaaataaaaatctctggggataaaaggcaacatcagtattagtgcygagacttaatttttttaccctgtaaattaaaaaaatcatagtcctcctttataggcttgtgctgggattccaggtttataatactcttgctgtattctgtttcattaaaaaaaaactctcaacaatttaaaggtattgtagttcttttgtgtttataaagcactgtacatgtattgtctcactaaattctccaaaaagtattgtgaaatacttgcattttctagactttgggggctaagtagcctagataagggtccagagctaggagatagtatcactgggacttgagcctaagcctcctcctgcatttcaatgaa

SEQ ID NO: 70321 - DNA, 905 bp, Homo sapiens
catatgattatttagaaaacctgatttcaaaacctgatgtcttactctctatgtgacttaggcagggacacagaatcttcgtgtttcctcatctatcaaatggagactaatctttatttgcctaacagcgttgctgtgaagatcagatgagaagtttatagttatttaaaaggacatttgaacacattaatagctgcagagggggaggacatatcgttaggaacaaagctttgcaattcactagctctagattcaaattcaggttctgcagtttagctgtgacttagtttcatgcttctcaaactttcttgtgcgcatgaatcacctggaagctgtgttaaatttttgcatgttctgattcagaagatctggagtgaggcctgagactctgcatttctaggcaattcctgtgctgctggtccacactgggaggagcaaggagtgaaactccctaacacaatgattctcaacttgcattgccaatttagaagcatctgggagctctacaaagtcccaatacccaggttgcatctcagatcaattaaataaaaatctctggggataaaaggcaacatcagtattagtgctgagacttaatttttttaccctgtaaattaaaaaaatcatagtcctcctttataggcttgtgctgggattccaggtttataatactcttgctgtattctgtttcattaaaaaaaaactctcaacaatttaaaggtattgtagttcttttgtgtttataaagcactgtacatgtattgtctcactaaattctccaaaaagtattgtgaaatacttgcattttctagactttgggggctargtagcctagataagggtccagagctaggagatagtatcactgggacttgagcctaagcctcctcctgcatttcaatgaa

SEQ ID NO: 70322 - DNA, 859 bp, Homo sapiens
tgcataaaatactggtgtaactcaataaaataaggagtagttaccctatggaaaaatgagcaatatattaaaaaaacagcagccaacaacaacaaaagtggccaaagaaaagtttcccattcaattgaacaaataaaatattaaacaacaagctgctaccatatttctcctatcagcgtggcacaaattcataagcttactaattaatatccagtgttatcaaggatgcaagaaaacatattctyataatcggagtagaaatttttggacagcaatttgactaggtatcaaatgaaatatccatatatcctttgacttagcaactttctattggggtttttcttattgacagaactttgtacggtcctacaaatgtatgtacaagaatgtttactacaagcaacactaataggaaaaaagagaggaaatctatatttgcataaataagaaatagtttaaataaaatacagaccctctatgaaatggaacactaaaagtagaggttgtcacagaaaccctccttcaaagggataagaactaggaggggccttaactgattgttcggatttggccaggtagatgagaggagaggaggggaagggtattcaagagtggtttgtagtgaagaccgctcctctcccaacaatcctccagattcaaccccatctagccccatggctgcacaatctggagggtagatcggaggcagcagcaatagtagaaggataagcaaggatttaaagtgaatctacccagaatcagaatgcacagcaattaggagctatggtgacaatgggggggttctatttttcctactcgcaatagctcattgggcacctgctggccaggcaatgcactc

SEQ ID NO: 70323 - DNA, 605 bp, Homo sapiens
tgaggagatctgggttcaaggtttgggtctttgacttactagctgtgtagggttggagaaagcacttcaattctcaatgcttcagtatcttcagctaaaaaaatggagatgwtgataatgatgatgcctacatctcaagcttgttgtgagacttagagtgagaaagactgagatctgtggtatgggaattatctagatagattcaatgactactttcaagttcactactgagcaggctcaatcaaaggtcacagagcatcgtgtggtaggcagctcctaggacagctcccagcagtcacctcttggtattcataccctgtgtaatcctctccccttgagtattgcctggacctaatgatttctttttttttttctgagacagagtctcactgctctgtcacccaggctggagtgcagtagtgtgatctcggctcactgcagcctccgcatccccagttcaagcgattctcctgcctcagcctcccaagtagctgggacaacagacatgcaccaccatgtttttttagtagaaaccgggttttgccatgttggccaggtctcaaactcccaagctcaagtgatctgctcaccatggcctcccaaag

SEQ ID NO: 70324 - DNA, 698 bp, Homo sapiens
caccgcaacctccacctcccaggttcgagcaattatcctgcctcagcctcccgagtagctgggattacaggcacgtgccaccatgcctggctaattttgtatttttagtagagatggggtttctccatgttggccaggctggtctcgaactcccgacctcaggtgatctgctcgcctcagcctcccaaagtgctgggattacaggcrtgagccaccgtgcctggcctatttctttatatttgagagagggtcttgctctgttgcccaggttggagtgtagtggtagtcatagctcagttactttgagctcctgggctcaagcgatcttccagcctcagcctcctgagtagctgggactataggcacataccaccaggtcctgctaattttattttttgtagagatggcatttcactgtgttgccaggctggtcttgaactcttaggctcatgcagtcctcctgccttggcctctcaaagtgctgggattacaggcctgagccaccacatccagccacatttaggaactttagcaattaagagaactggactgccctctcagacctccaagtggaaagacttcattgaagtcagcagggtttccattaagtgagaagacacactgttaggaaagtgtggtcctagtaactgcatcttatttccaagaagcccgcaggctttcctggcacctggtctaag

SEQ ID NO: 70325 - DNA, 564 bp, Homo sapiens
tcgggaggctgaggcgggatcatcagttgaacttgggaggcggaggttgcgttgagccaagattgcaccactgcactccagcctgggcaacagagcaagactccatctcaaaaaaaaaaaaagaaaaaaatggaatgttggccgggcgcgcagtggctcacaccggtaatcccagcactttgggaggccraggcgggtggatcacctgagggtcgggagttcgagaccagcctgaccattgtggagaaaccccatctctcctaaaaatacagaattagccgggcgtggcggtgcatgcctgtaatcccagctactccggaggctgaggcaggagaatttcttgaacccgggaggcggaggttgtggtgagctgagaccaggccattgcactccagcctggacaatgagtgaaaccccgtctcaaaaaaaaaaagaatgttaataacaatacttcattagatagtttcttgttgaagcaatttgtaattcccggaaagttgttagccatgcttcaagtttacaaataggtgaagttttaaggtatctagagtttaagtagttgga

SEQ ID NO: 70326 - DNA, 1465 bp, Homo sapiens
tttttctttttattaattagtcatgcctttagtattgagttgttttcggcaaagctgcaactaacagttgtgtagattgtcggtgcatgaattggttgcatggtgggtgatcgtgggtgtgagtgagctgagaaagctcagtttcctttgctcgtcatggcctcttcttttgagcctctcacagcacaacatgataacaacatgacaggaatatgagataaggagtttgtggaacaaagacacaagctacaagtcacattggattttcaggctaagaacctttattatgcagacaacaaatattccataatgtggcctatactaggtaagtacaaatacaggtgaagcatctttgtatggtacacacttcaatttgatcactctgtctaccctgtgtacaaatggaatgcactggacttttatttgtcttactgatattggcccattattattcagtctcctgttgtagcaattgtcactatcttcctcttaaagcttccatttgcttgtgctgaccatttcctatcttctctccaattgctaaagctcttatattctttgttgagcaggtgatcaacttaggtgacaaattcacacttctcaccagctcccttaaaactactgacagcaactgatgtctatggagtgacttactgtatctgtcaagagctctgctaggcacttaacatacattatgtcatttaatcaaaacaatgccttactttaactattattattgttcctgttgcatagacaaaagcccgagactcagtaatactctgtgacttgcccaaggtcacagagctaggcagggatggacctgggttcaatgacaggctgtatgacttcaagtcttatactttttgatttgagacactgccttagaacactttgtcatatcagaaagggagttcagctcaaaccctcttttgtgttagcaatattgaaatttacttatgatttaatatagttatttggggggrtattattttgtgtatgtggcttttttttacttgtatatttcatttaatttttttattatgaactcactgtttactattgttctatttttcccatcatgatcaacaatagaagtatgaaaactagatgcatagttagattttttaccatgaacagcagaactcaattcaaactgcttaagaaatacagatctttagcacttcacattttagtaagtccacaggatgatggttgctgggagtggttgatgttggactcgttgataccaaatttgaaatattccaggaggtaagggtctggcatccttgatgatggcttcctctcccagctgggagcaagatggctgagaaagccctaggcatcgtacctagacacacgatacccagagaggaggggtcttctcctctcgtgtctccttgggagtgggagagcattttccaggtgcattccagccaaattttcatcttttttcactggctacaat

SEQ ID NO: 70327 - DNA, 3497 bp, Homo sapiens
acgggccttgggggagccaagtatgagctctaagacctgctatctccaggtagatagtgtgaggatcaaattagaggacacccagctggtgtcctggagaattgcttggtcagtgtgaggggaaaacccacacacattttggtcataaggggtgacttgcatgtgagagtagagtagggaaagtactttggtttttctctttgcaattgttatgtggtctcagaagcctctacccatggactcagatgccccatttcctcagggtgagggcagacgtagtcaagacagtttctgaatgttcataaaagttagtaataatgacatggtcctggaagctgaggctttctttggcaagagctggctttataggggaatgcttcttgagcccaaagaggctcaggatctggtaaacttggaggatagaattccttccataaaccataatacaccatgatgtgagagaacttttccagacccaaagcagatataggctaatagctggccataagagaaagactagagaggataagatttgcagttaggtgctggtaggtacctgaaaaggaatcacgtataaacttcttcactgaatcaagccccagaagagaccagagaatcctctgataatttgaggaagccacaagcaacctgtctcttacatttcaggtaaagtccaagaaagccaggagccttctactgggtctcccttttccagcttgtgaggtaaaacctcaaaaaatagaatcaatggtgtggcacggcttagagaagaagggggcacccagtgtcacttccctcttgagtctcccatgacctcagagtggtgccagagtgggtgtgggctacccgcacctccaagatgggtgtggcagggagtgtgggcaggttgggagacccagatgaaaaagctcacttgctgccagagagaggtgggaacacttcggcagtgcttgttactgaaccagacttgctttgcctattgcacagtatgccaatcactgagatgatgagttttgcattgcagaaagggtttattcacaaggcagccaagtgaagagactggagaacargactcaaatctacctctctgaagatgggggttttagggatatttatgggccaggggagcaaggtggtatgaagcgtagggaaaggtgactgggggtaatgaaaagtgaggcaattggtgatcttcacaagcatagtcaagcttcatggctctttataggatgcatgttcataaaatagcatggttagcatgatctaaaggtatatttttaggccctctgatctcaaatggtcacctatcggacactcatgcaggcttatttgaagggtcggtggtctcagtaggcttgaagtgggtaagaactgactctacgttcctgaaaaacaacttaggcaactgttaccatggtgactcatacatcagagatgtcgtctataaggaagctagtgggaatttagatatatattgtttcgctacatcacttttagctaaatgggttttaaaatcgactaaaagcaagtgaccgaaaacaagtgaggtaagttaagtttgtggatccaaacagattagccttaggtttcacaggtgtggtgggggtacagccacaggcaaaaccagatgggaggagtcccatcagcattggattcctaggtgcacgggacagggacggactgtggtgtgcgacacccccgtgcaccaacacctgacaccgggtcactggccataagaagggaaggaaggatggtggcggaaaatcctggcagggctgggggtttatccaaaagacactacattgactctagaagcaactgagtttctctttaattggagagtttttatttttctgttttttgtttgtttgtttttgtttttgttttttgaaatggagtcttgctctgtcaccaggctagagtgcagtggcgccatctcggctcactgcaacctcagcctcccagattgaagcaatcctcttgccccagcctccatagtagctgggaccacaggcacatgccaccacgcccagctaattttttgtatttttagtagagacagggtttcaccatgttggccaggaaactctcgatctcttgaccttgtgatccgtcagcctcgtcctcccaaagtgctgggattacaggcaggagccaacgtggctggccaagagtttttgtttttctatcatcatcagaagggggatttgagagcttcattatgttcaatgatagagaaattaagagttcttttttcgttctgcccaagttcatgaccatgacatttacaccctctacatatggtcatcagtctgtaggtgaaattggcaactggatagtactcgctactattcctctggaccagctgagtcgtgggcctctaaatagctgtcatgagggagttcttaaaggtagagaatttaatatctgagcttctgtgtgtgcgtgtatatgtgcgtgtgcatgtgtagtgtatgtgcatcttgtgtacgtgtgtggtgtgcatctgtgtatgtatgtgtggtgtgtgcatgtgtggtatgcatatctgtgtgtgagtgcatgtgtgtgtatgtcaatgttgtcttcagtttcatgtcaagtatttcacgtatgcctacattttctatcatctttgtctcactttcacttgaggcaaatgatcaaaagctgattgatcatttgaagacatgaattgaaaggggctaaaaaagtgttacttttctgaataatatttttggctacttaaaaaaagtaaagtctttttaaaatggaggtgatagtagccttttacttcctgttgtcagattatattggaacatttattttttcacctctaagttcacagggcaaaggggttatggcttggctggacatttttcaggagatgagaagaccaaagttggtgaagattacacgtggcttgagaatatgcaatatgaagacatgttgagaaaatgatgtgataaaaagaatagtctaaagaaagtaagattcagaagggttatgaagacagttttcaagtttctgaaggtgaatggaaggtaaattaaacttgatttgtatattctcaaatcaaaaaagtagaaacaaaatgagacaactttctgcgttaaatagggcagtactttccatcattcgagacaagtcagacaatttcaggtgaattgcattccctaggagacagggtgagtggaacttcatcctaggatgccatggagaggcaaccagtagaagaaagcttcactggggctcctgtggttcctttcatcactgcaattttgtgatttgatgaaatttccatactatgtaaacttaaacaggaccatgacccactttttccctccttttacatctttttcctggcctgttaacaaagatttaatgacctactaatgcttgaggcattcttgaaaaaccgctgtcggattagcacttggttttaaaaaaatgaatttctttctttggtttgttgccttttcccccaagtaagatgc

SEQ ID NO: 70328 - DNA, 673 bp, Homo sapiens
gatcataggtaaaatgatgaaaattatatayatgaaataaaaacagagaatattccacaaatcatttttttaatctgacatatcccaatacaaaaccagacagacattacatgaaataaaatgagaattacaggattattttattcacaaattagataaaaagttaaaacaaagagtttgtaattcaatgcaacactatacaaaagcataaagcactagaactatgtagaaatagtctcagtctacacaataattatttgatagaagaaaattgataactgtagtagttataaatttataacagtaactgctacagttataaattttcttatatgaaattattattaaaaattagtacattcaaagagaaaaattgtaatctcaacaaatgcagaatacagaaaaaaagatacaaattcaaaacctgttgaaataaaaaagaaggactagttatataggaataaaaacagtctttttaaatgtataaaacattagcataaaactcctacagcaaatatatgaaatggaaaaacattagacatatttttccaaaataagaaatgttacgtggatgcacactagtattcaacattgtattgaaggttctagccactgcaataaaaacaattgaggcataaaactttaaaatatggaggaaaacctgtcattattt

SEQ ID NO: 70329 - DNA, 673 bp, Homo sapiens
gatcataggtaaaatgatgaaaattatatacatgaaataaaaacagagaatattccacaaatcatttttttaatctgacatatcccaatacaaaaccagacagacattacatgaaawaaaatgagaattacaggattattttattcacaaattagataaaaagttaaaacaaagagtttgtaattcaatgcaacactatacaaaagcataaagcactagaactatgtagaaatagtctcagtctacacaataattatttgatagaagaaaattgataactgtagtagttataaatttataacagtaactgctacagttataaattttcttatatgaaattattattaaaaattagtacattcaaagagaaaaattgtaatctcaacaaatgcagaatacagaaaaaaagatacaaattcaaaacctgttgaaataaaaaagaaggactagttatataggaataaaaacagtctttttaaatgtataaaacattagcataaaactcctacagcaaatatatgaaatggaaaaacattagacatatttttccaaaataagaaatgttacgtggatgcacactagtattcaacattgtattgaaggttctagccactgcaataaaaacaattgaggcataaaactttaaaatatggaggaaaacctgtcattattt

SEQ ID NO: 70330 - DNA, 673 bp, Homo sapiens
gatcataggtaaaatgatgaaaattatatacatgaaataaaaacagagaatattccacaaatcatttttttaatctgacatatcccaatacaaaaccagacagacattacatgaaataaaatgagaattacaggattattttattcacaaattagataaaaagttaaaacaaagagtttgtaattcaatgcaacactatacaaaarcataaagcactagaactatgtagaaatagtctcagtctacacaataattatttgatagaagaaaattgataactgtagtagttataaatttataacagtaactgctacagttataaattttcttatatgaaattattattaaaaattagtacattcaaagagaaaaattgtaatctcaacaaatgcagaatacagaaaaaaagatacaaattcaaaacctgttgaaataaaaaagaaggactagttatataggaataaaaacagtctttttaaatgtataaaacattagcataaaactcctacagcaaatatatgaaatggaaaaacattagacatatttttccaaaataagaaatgttacgtggatgcacactagtattcaacattgtattgaaggttctagccactgcaataaaaacaattgaggcataaaactttaaaatatggaggaaaacctgtcattattt

SEQ ID NO: 70331 - DNA, 673 bp, Homo sapiens
gatcataggtaaaatgatgaaaattatatacatgaaataaaaacagagaatattccacaaatcatttttttaatctgacatatcccaatacaaaaccagacagacattacatgaaataaaatgagaattacaggattattttattcacaaattagataaaaagttaaaacaaagagtttgtaattcaatgcaacactatacaaaagcataaagcactagaactatgtagaaatagtctcagtctacacaataattatttgatagaagaaaattgataactgtagtagttataaatttataacagtaactgctacagttataaattttcttatatgaaattattattaaaaattagtacattcaaagagaaaaattgtaatctcaacaaatgcagaatacagaaaaaaagatacaaattcaaaaccygttgaaataaaaaagaaggactagttatataggaataaaaacagtctttttaaatgtataaaacattagcataaaactcctacagcaaatatatgaaatggaaaaacattagacatatttttccaaaataagaaatgttacgtggatgcacactagtattcaacattgtattgaaggttctagccactgcaataaaaacaattgaggcataaaactttaaaatatggaggaaaacctgtcattattt

SEQ ID NO: 70332 - DNA, 673 bp, Homo sapiens
gatcataggtaaaatgatgaaaattatatacatgaaataaaaacagagaatattccacaaatcatttttttaatctgacatatcccaatacaaaaccagacagacattacatgaaataaaatgagaattacaggattattttattcacaaattagataaaaagttaaaacaaagagtttgtaattcaatgcaacactatacaaaagcataaagcactagaactatgtagaaatagtctcagtctacacaataattatttgatagaagaaaattgataactgtagtagttataaatttataacagtaactgctacagttataaattttcttatatgaaattattattaaaaattagtacattcaaagagaaaaattgtaatctcaacaaatgcagaatacagaaaaaaagatacaaattcaaaacctgttgaaataaaaaagaagkactagttatataggaataaaaacagtctttttaaatgtataaaacattagcataaaactcctacagcaaatatatgaaatggaaaaacattagacatatttttccaaaataagaaatgttacgtggatgcacactagtattcaacattgtattgaaggttctagccactgcaataaaaacaattgaggcataaaactttaaaatatggaggaaaacctgtcattattt

SEQ ID NO: 70333 - DNA, 1217 bp, Homo sapiens
ggatccatattccttcttttgtatttatgcctctagaatcaatatttctaacyacaagatttttttctggtcacaatgcatcctccctgtcagcagggtcattgctgtgttttcacagcaggatactcagtatgtgtttgtatattacaagaagcactgattcaacttccattacacacttgctatgtcattatggggaaaagttaaatatgagaccttgaaagtattatcacagatggcttttctttctctctttttgttcctatactcatctaaattctggagatagtccagtcattttcacattatgttctttggaggggaagtttaggatttccaataggtgcataaaaagaacattcataataaggctagcaataaacaggaaaggatgttgtcttggaaaaggcatttttctaggccagtactaaagaaacgagaatccctaagtaaaagtgggcagctggctccttggtctctaaccagcctccactggtgttgaaattcttttagggtgtatgtcttttatggcttctttgggtccctctggctcccttcaatgagaaccaccaattattgtctctctctcaccctcccaggctcacttttcctctctgattccccagaagctttttatcccctgcctccttttagaactcaacttttctctttcatgcaacttggcagaagccccaaaaggctgaagattatggtctttctgtgtatttgtgtgtgaatctttgtaattatattctcaatcagaaaggaggaattttctttacacctaagccctgaagctcccctctaaaatttacaacttgcttctgactcaacctgctttaagttactaacttactaaattccaggtctagaagaacataattactttcaaagcatagttagaatatactaatactaaataggactatgaaatgtttgccccagttttattccatcatatcagtcaaaagagtcaaagggaacttcatatattcttagcatccctgaatccacaagtctaccaagaggggtgtcatttctgtatttaatttcccttggtttcttgggtaaaattaaattttgaatgtaaaataaaaccaacaatgatgattcagctgtcactgagtgtctactctgaaagattctgtgctaggcactaggggaaatagaaaaaggaataaaacacagccattattttcgataagcttagagtctat

SEQ ID NO: 70334 - DNA, 766 bp, Homo sapiens
gcttaaatgatgtaaagaaaattgaactctcttctttggcaataagaaaccactgaaattttcagctatgttttaatacacttccttgataacagaaaattcactatcaccattggtgtagaattttgttaaaatatgaatatctatccaagcctcccttgaggtgcagaaggcctttttaaaactcataaacaaagaaagaaatcataaagggaaagaaattgataggatagtgatggaggagagaatgaagccaggcatccttggtggatgttaatgttctgtttcatggtgtgggatgccaactgcctctagcatcgtaatgatggatgctcagagcttgatgctggacagggtgttaggcaacatataccagagtctttttgttctctgaatggcattaccatccatggggggaatatctggcctctctcaaaaatccaagcatagtctttacaggcattctgtcggcacaacagcagactgttagcatacaaacagtcattaaccacaggctgtgggcaaagctaatccggagtgtgttgcaatccactggaaccaggaaatctgagctgctgctaataggtttccagccgctgagtccttaacyggttttggcccagcttcccatccatgataacagggctcaatctttcttctgctctgttgtttggtttctgttagaggatttttttcattgggtggaagagaaatcatggattaaaattgattttcctccaaaaagtagaatgtcagagctgaacaa

SEQ ID NO: 70335 - DNA, 1082 bp, Homo sapiens
gctgaggtgggctgacctcttgagttcaggagttcaagaccagcctgggcaacatggcaaaaccctgtctttactaaaaaagtamaaaaaggagccaggtatggtggcacgtgcctgtagtcccagctacttgggaggctgaggtgggaggatcgcttgagcctgggaggccgaggctgccatgagctgtgatctctccagtgcactccagcttgggtgatggagtgagaccctgtctcaaaaaaacaaaaccactttcacagccatcatttcatcaaatcttttcaatatgtatgaagtggatattattattatgtcaacttttaaggcacttcttagattctcagctaactttactgaaaaatgctttcatttcaccatgttgagtcataaaatataagatctctaagggaccttaaagatcattgagtcctatgccttccttttacagataaaataaacggagatagtctcaccttaacagatgactataatgagatctggacgggcaaagtgacttaagctgcgacatattcctttttttttttttttttttttttgagacggagtctcgctctgtggcccaggtgggagtgcagtggcgcaatctcggctcactgcaagctccgcctcccaggttcacgccattctcctgcctcagcctcccgagtagctgggactacaggcgcccgccaccgcacccagctaattttttgtatttttagtagagacggggtttcaccgtgttagccaggatggtctcgatctcctgacctcgtgatctgcccgcctcggcctcccaaagtgctgggattacaagcgtgagccaccgcgcccggccatattcttaataaatatcagagtttaagttgtaatagaatctgccttctgagtcctattttgatattctagccactaccctagtgcctctaggacaagaagtttgagtaaccgtcaccctcatttttgaggaattgtatttattcacttttcagaagggtcagttctgacaccgttttgcaaatctgttcttgtcattgtcttcttcctgatttgtattctttttttctcctttgccttca

SEQ ID NO: 70336 - DNA, 1082 bp, Homo sapiens
gctgaggtgggctgacctcttgagttcaggagttcaagaccagcctgggcaacatggcaaaaccctgtctttactaaaaaagtaaaaaaakgagccaggtatggtggcacgtgcctgtagtcccagctacttgggaggctgaggtgggaggatcgcttgagcctgggaggccgaggctgccatgagctgtgatctctccagtgcactccagcttgggtgatggagtgagaccctgtctcaaaaaaacaaaaccactttcacagccatcatttcatcaaatcttttcaatatgtatgaagtggatattattattatgtcaacttttaaggcacttcttagattctcagctaactttactgaaaaatgctttcatttcaccatgttgagtcataaaatataagatctctaagggaccttaaagatcattgagtcctatgccttccttttacagataaaataaacggagatagtctcaccttaacagatgactataatgagatctggacgggcaaagtgacttaagctgcgacatattcctttttttttttttttttttttttgagacggagtctcgctctgtggcccaggtgggagtgcagtggcgcaatctcggctcactgcaagctccgcctcccaggttcacgccattctcctgcctcagcctcccgagtagctgggactacaggcgcccgccaccgcacccagctaattttttgtatttttagtagagacggggtttcaccgtgttagccaggatggtctcgatctcctgacctcgtgatctgcccgcctcggcctcccaaagtgctgggattacaagcgtgagccaccgcgcccggccatattcttaataaatatcagagtttaagttgtaatagaatctgccttctgagtcctattttgatattctagccactaccctagtgcctctaggacaagaagtttgagtaaccgtcaccctcatttttgaggaattgtatttattcacttttcagaagggtcagttctgacaccgttttgcaaatctgttcttgtcattgtcttcttcctgatttgtattctttttttctcctttgccttca

SEQ ID NO: 70337 - DNA, 1723 bp, Homo sapiens
aggcacacaggttaagttttgttttaatgtctcttaaattgcttcaaacggagagcaggactccattctcccttatcaccctggaactccctaacacacactttttccgtattttccttgttatgaaagatggatcaagctgtcctctggactgcctcccattctggatttctctgtttgctttctcctgctgccatttaacttgtttcttctccttctatgttccccacagaaacaatgtgtgagatttggttaaattcagatttaatgttttttttttttttttgcaagagcacttcctaagttatgctgtgtacttccattgtgccatattggcaggcacactatgttttagtaatggcaaaattggtgaagatggataaagatgggggcagcctcattcctccactgcaatggtccctgacaacctttcatttaatagtttcatccattgatgatcgttgcctgcagtgatgacttcatttgtgcatatacaatggtacttgtcaagttagattgcattacactgaattcttcacttaaaaaatttttcttcatctacaagggctatttagttatcctgaaatatagttcacaacaggaagtcgggtagcacacttgattattcccttttaaagaccaattttcagaattaagagttaatgctttctctctttaaaacaaaaaactcaaaaaaatatggctaagttttaagattttgtaatgctgggtggtaaaaagtataaaactataaaaatattaaaaggtatttataactattctctaaacctttctaaacttcaaaacattttatgctgaaatatttaattaaacaagaaaaaaagtcctattttgtaaagttcaaaatatgcttagtgttcaaatgacatttaaaaagaagcttgacctaagctttaggagtaaaagttatctaaaagttttagttggatgattggaatttgttttaaaagtttaaaaaagggaaaacagaaataagctaataatatataccagaagagtgaggagacacaaagaaaatgcaaccactcaaccctgtggggaatggagggagcgtgtgggatccactgcccagcccagggagtctccctacrgtccaactgcctttctcagatcagaaggcaaaagagcagtctagcaagcaaacaaacagcaacaacaacaaaagtactgaaagttttctagaaaggccagactcaggagcagagaagaggcacagtgggcagtgccagtgagaggcatgagtcctgagtcagctgggatgtccagggagctggccaagggcctcaagaggagggtagaaggaaaatggtatcctgacacctgctggaaagagcactggcagaaaaggctccaggaatgcattcaagggacttctatttagggacctaagaaggaaatgcaagcatcaatttagttaagcagagctggattcagatgaaacttgaggaaaagcaatgagactagaatagggttgaagaactagggctgagtagtctggaaaaccagagtttgaatcccgattctacacttcccagttgggtagccctaagcctgttacttaaccacggtaagtttcagtttccttatttacaaaataggataaaaatacctcttcatagagtgttgtaaggattaagtgggatgactgtgtcataacataacaaagtagtgtttgaacaagcatagtttgtattctcactag

SEQ ID NO: 70338 - DNA, 652 bp, Homo sapiens
tctgggtcrcttaatagacctaccagcttcttgccaatacagtcaggatattgatttctccctcatacctttcccctcttcctcctcccttttctctattgtggccctaatttttaaaaggctgcatttggctctccgtatggaattcttctccccttgatttttggcccatttccttccattctagtgcctgtgtcgtccaaagctatatgaagctcatcttggaggaccctggctcaccctttctccacttccctgccacccgctgtacactgtcatgcccagtcggcccacaggtgtttgagtctgttttccctgaaggttggttagggttcttgttgacattcttggctttcctggactctgggctctctgaggacagggattgtgtcttctcatttttctgcctccctcataacttagtgtaaagctttatacctggagaaatcatccttgttggcaggtagcttagccacaaaaaggagcctcccagaagtgccccagcaaaggcctgcacctctcaccttgagaagcagaaagcaacttctgccccttgacttgcctgcaagtctgcaagtctttgctgcctcctgctctccatagaggtgacttggttgaggaacttgccaggccagagacctgggatgcattg

SEQ ID NO: 70339 - DNA, 652 bp, Homo sapiens
tctgggtcgcttaatagacctaccagcttcttgccaatacagtcaggatattgatttctccctcatacctttcccctcttcctcctcccttttctctattgtggccctaatttttaaaaggctgcatttggctctccgtatggaattcttctccccttgatttttggcccatttccttccattctagtgcctgtgtcgtccaaagctatatgaagctcatcttggaggaccctggctcaccctttctccacttccctgccacccgctgtacactgtcatgcccagtcggcccacaggtgtttgagtctgttttccctgaaggtyggttagggttcttgttgacattcttggctttcctggactctgggctctctgaggacagggattgtgtcttctcatttttctgcctccctcataacttagtgtaaagctttatacctggagaaatcatccttgttggcaggtagcttagccacaaaaaggagcctcccagaagtgccccagcaaaggcctgcacctctcaccttgagaagcagaaagcaacttctgccccttgacttgcctgcaagtctgcaagtctttgctgcctcctgctctccatagaggtgacttggttgaggaacttgccaggccagagacctgggatgcattg

SEQ ID NO: 70340 - DNA, 652 bp, Homo sapiens
tctgggtcgcttaatagacctaccagcttcttgccaatacagtcaggatattgatttctccctcatacctttcccctcttcctcctcccttttctctattgtggccctaatttttaaaaggctgcatttggctctccgtatggaattcttctccccttgatttttggcccatttccttccattctagtgcctgtgtcgtccaaagctatatgaagctcatcttggaggaccctggctcaccctttctccacttccctgccacccgctgtacactgtcatgcccagtcggcccacaggtgtttgagtctgttttccctgaaggttggttagggttcttgttgacattcttggctttcctggactctgggctctctgaggacagggattgtgtcttctcatttttctgcctccctcataacttagtgtaaagctttatacctggagaaatcrtccttgttggcaggtagcttagccacaaaaaggagcctcccagaagtgccccagcaaaggcctgcacctctcaccttgagaagcagaaagcaacttctgccccttgacttgcctgcaagtctgcaagtctttgctgcctcctgctctccatagaggtgacttggttgaggaacttgccaggccagagacctgggatgcattg

SEQ ID NO: 70341 - DNA, 1259 bp, Homo sapiens
ggggtgcattaaaaataacaactccccaccatgtgccagacaccatactagatgctttggccatgtcaccctgtaacattcacatccaccctgtttcacagaagaagaagttgaagctcagagaggtcaagttacccaccaaaagtcacacagctagcaagtggccaagccctgctccaaaaggatgcttgtctttccccaaagttggagctcattcctttaagcaacagtgcttcagacggtctgggagatgtagaggagataagattattttcaaatagattttgaagaaggctgtgggaggctaaaggagggaagacagacagcagagctataatgcagctttgggcactctttaagaatgggtggcttcactggagagaggaggctgagctgtgcaccactgtcacaagcaaagsagaaaccatgtcaaggctgagtgtatcccgcaggtgatcaggagaggactctaatagtaacaagcactgattgtgcccaggaaggcccgtggatgtcagagattccactggctgggagcctaggcagggtgaagtcctgggggaagcaagagcgatggcagtggttcagcctgtaccatgtgcacatgtgagtgtgaactgtgtgctccagttcaggtagctatttaatgtcaagtgaagtccttgggacaaaaggcatcacgactcttctttctaacaaacacaagttccttggatccaagatttaagagggaaagaataatccctcctccccccaaatctctctcaacttccttaaaaactccttccccagtcgggtgtggtggctcacgcctgtaatcccagcactttgggaggctgaggtgggtggattacctgagatcaggagatcgagaccatcctggccaacatgttgaaaccccgtctctactaaaaaattcgaaaactagccaggcgtggtggcaggctcctgtagtcccagctactcaggaggctgaggcaggagaatagcttaaacccaggaggcggaggctgcagtgagccaagacggtgccactggactccagcctggtgaaagagcaagactctgtctcaaaaataaaaacaaacaaaacaaacaacaacgaaaaaaactccttccccaggtttaaaaattgttgctgctggaagacctagcacatccagttgggatttctcctactgaaattaatgtcatgaaacacacaaggagaaaacaggttcccagctaactcctggtctatagtctccaggagcttggcc

SEQ ID NO: 70342 - DNA, 1248 bp, Homo sapiens
gccaatctaaaaagaccacatattgtgtgattccaagtatatgacattctggaaaaggcaaaatctagcaatagtgaaaaggaatcagtggttggcatggatttggaagaaaggaaagggaaagttgaataggtggtgcacaagagatttttagggcagtgagactattctgtatgatactgtaattgtgaatacataatactatgtgattattaaaacccactacattttacagcacaaagagtaaactgtaatgtatgccaattgaacaaaacatcatgtaagaagtctgagaatcacagggtggaatacagaatgtgacaaaacaatctaactattccaagtgtaggaaacaaccttactgaagtgtgtgggggaaaaggtgctgatctaagtcactttggaaataaatgaagtctatacaactaaaaaaaaaaaaaaatccaagttctataaattttgccataaatgttggctcaaatttttccatgtctcttcttyccaaatgctagttatagtccagaccattattgcatatttagaactacatcagttgtctaataagctttgctaacatcttgtttgcctctcattcattcaaagccctgaattgagcatgatgaagctaaaatccagatctatgtttgctattggtctccttgttaagaatccttttctcaatctattactatcattaggacacagttgaagttccttaatgcgactcacacaggcactcatcacctggctcttgcagagtttccatcaccagctttcactctttcctttctcatcctcaacagccagcatcacaaagcacacacctttgtcatatcatgcactctgtcttgctttcctggctacccacacgagactctgtctgctaggttttatcttaaatggtttgtcccctgggaagccttccataataagcctctatagcagtgctttctcaagcagaggcattttcattcccaagggagcatttagcaatatctggaaatggtttttgttgtcacaactgggagatgctactggcttctaatgggtagaggccagggatgctgctggacatcctaccattcacagacgggtcccctccccttgcaaagaatgatcagatccggagtgccagtagtgctgagaacccctgccacagaccagtctaggtgcctgaaccttctgatgcaaaggccatgccagcttgattcattcctatacctttcctccccatcccagtgcatcagc

SEQ ID NO: 70343 - DNA, 757 bp, Homo sapiens
cgccaattgatgtaaaggttggttttttaaaaaattttaatttcactgcttcctcattcctctgtgtgtgtatacacactcgctagtgatttcttttcttagaatagaaattatgaatatcattttaaaaagagctgtttctgctaaccttacaaaatatatttaatttgctgtttaaatgaaatagcaaactttctcaaacttacagatgcctcttgagccttggatttccatttctatttgctgcgtttctgagtctctgttatcactatttggtgtgaaaacatacacgtcattttggcttatgattcagaaaagacagttttttttatcacagtttctccagagttcacgttaataatgcaacatttgaacttctgcttctagtcaagatggagtaacggggaccaaatttacagggacaaaactgtaaaayagcagttttcaagacattggacattgggcaatggacaatcatcgctgagaaacaggaaacaaactaagtgagccctataattgccccaggcaattgaatccaattatatataaaatggaaaatacatcatgaacaagtggggttcatcccaggaatgcaagattggtttagcattcaaaacttaatcaataaaactcaacagactaggaatagaagggaacctcctcaacctaataaaaggcatttatgaaaaaacctaccgttaacctcattaatgatgaaagactgaatgttttctgcctaagatcaggaacaaggcaa

SEQ ID NO: 70344 - DNA, 558 bp, Homo sapiens
gcaattctccatctcagcctcctgaattgctggaattataggtgcccgccaccatgcctggctaattttttttgtatttttagtacagacggggtttcaccatgttggccaggctggtcttgaactcctgaccttgtgatctgcccrcctcggcctcccaaagtgctaggattacaggcgtgagccaccatgcccggctgataatcacatttttttaaaaaaaacaaaaccattaggtggagagcaatacacaaaggatagtgaagctggaagggaggagtttgggtccttgataacttccttaaaatgccccaatagccctgcaagctaagactacatattacaaggaaaaaataaataaaatcctatttaataacccaccatttggtagtttttgctacaggcagccaaggcaatctaacccgcagggaggcacccaggagtatgtgctacatagaggggcgtgggtgttctacctcagcaaagctgaaagtgacctttgctaatccagccagctctccaggactcagggggaaaactcattcaccatatagaaag

SEQ ID NO: 70345 - DNA, 536 bp, Homo sapiens
tggaggaacttctgatcttacatggttgaaaatgaaagatttattaagagaagatgcaaggctctgcctctttcatkacattttctagggtagttaggcccaagtatttacctagtaaatacattttatcttaaaatacttgcctttttattgcatttatggtattatactttaaaaaataattttgtatatttctaaatctattacctagtgacttcattctagcattgcaaagaaggaattacacaatatttgtcttaacgggcagacattgggtctaatggggctgagaacctaacactgacttagagctactgacttaggcaaacagacgtgttacatggagggtgctgggctctccaggagcacgtaagtggaaggagatcaggatggtaatgcggagagtaaggcaacaggtagcaagacgccagtgaggcgtgtgctcggcagctcaaaactttaatttccctggtaatgcgtcctcctagggtattcctttttatgattgctaatacactcataagtcagagaggaca

SEQ ID NO: 70346 - DNA, 536 bp, Homo sapiens
tggaggaacttctgatcttacatggttgaaaatgaaagatttattaagagaagatgcaaggctctgcctctttcatgacattttctagggtagttaggcccaagtatttacctagtaaatacattttatcttaaaatacttgcctttttattgcatttatggtattatactttaaaaaataattttgtatatttctaaatctattacctagtgacttcattctagcattgcaaagaaggaattacacaatatttgtcttaacgggcagacattgggtctaatggggctgagaacctaacactgacttagagctactgacttaggcaaacagacgtgttacatggagggtgctgggctctccaggagcasgtaagtggaaggagatcaggatggtaatgcggagagtaaggcaacaggtagcaagacgccagtgaggcgtgtgctcggcagctcaaaactttaatttccctggtaatgcgtcctcctagggtattcctttttatgattgctaatacactcataagtcagagaggaca

SEQ ID NO: 70347 - DNA, 536 bp, Homo sapiens
tggaggaacttctgatcttacatggttgaaaatgaaagatttattaagagaagatgcaaggctctgcctctttcatgacattttctagggtagttaggcccaagtatttacctagtaaatacattttatcttaaaatacttgcctttttattgcatttatggtattatactttaaaaaataattttgtatatttctaaatctattacctagtgacttcattctagcattgcaaagaaggaattacacaatatttgtcttaacgggcagacattgggtctaatggggctgagaacctaacactgacttagagctactgacttaggcaaacagacgtgttacatggagggtgctgggctctccaggagcacgtaagtggaaggagatcaggatggtaatgcggagagtaaggcaacaggtagcaagacgccagtgaggcgtgtgctcggcagctcaaaactttaatttccctggtaatgcgtcctcctagggtattcctttttatgattgctaatacackcataagtcagagaggaca

SEQ ID NO: 70348 - DNA, 587 bp, Homo sapiens
ttttatgatatttcaatacctccaaaacttgctggctggggagagaacgcccctccctgtgctagccaatttttagaggtagcaaagggctcagccaggagcacrtctttcttccacaaaccagttaatcctgagtctagagctccaaccacctccttatctaattcacacaccaagccatatttcccctgccttacatcaccccagggccaggtaccaggcaccttatagaccaaagcacactggaattaattcaaaccagtctgtcttaagctgcctaccctaccctgccttggctctcccgtggaaaccccaataaaggctctggtctaggctctttctcctcattcctttctgcctcctggcccacatcggtgctccccacgtggtcttgcacagaatgacatgcttccttctctgggaaacgtaagtaatacaaatctttagtggcactgtcccctctgtattgtcactcagttgtgcctgtaaattaaatcccaggtatcatcttaatacacaagctccatgaaagcaggggccagtttgtctggattcccctagattcacactcccataggattgaagtg

SEQ ID NO: 70349 - DNA, 704 bp, Homo sapiens
aacagcatcttgcagctaacactggggcatgggagtgagggaaacaaacatggtacccactcttctgtcctaatgtttagaatcatggggcagaaaagcatcctagaactcatctagcccaactgtcattttacagaaaacaggacagagagaaaatgaccagcctaaagctcttggctactcagggcagctgggacaggggtctggtttcccggcatggagccacagtgtctggatgtgctggaactcggcacrtccccctgagagttagctgcagaggtggcgtatgggagaggaggctggaaaataggcttggaggtttcgtccaggcacacagattctctccccctaatcctcagcccctccttttctccctttcagcagcagttataaaatccaggaaataaatgtggattgatggcctacaaagggcttagttagtgctgtgacctgctgagttatgtaactgctatttattatcggccttggatgaagtttccattgaagcaactcactaagctgattccgtgacatttcttttagccttgttcagaagcagcagccgcagaaattcttctgaaacttcaaagactagaaattgatagcgtggatgcttttaaagattcccttctttcatcctttttttactttttctttttcttttttcttttgagatggagtctcgctctgtcacccaggctgga

SEQ ID NO: 70350 - DNA, 990 bp, Homo sapiens
gtttttttcttatagccacactttttaaaaaggaaaaacaagcaaaataaactgtaatactataacttatttagcccaatatatctaaaatattatttcaacacatcattgatataagtattagaaatattttgcgtttcttcctacaagtttgaaatccagtgtatatttcacatttacagaatgtctcaatttggactagtcacatttcaagtgctaatagccacatggggccagtggctaccacctggacagagcagtgttagggtcagtgtgatgacaggaaaagcgcttcgcttggatgctcctgtaaaatgtcagcttttcccctcctcccttccctccatcttctcctcctcctcctcctcttccctattttcatttttatattcagtccatactcatgcaccctccccagacctcaaaaactaaaacaaggccaggcacagtggctcacgcctgtaatcccagcactttaggaggccaaggcaggtggatcacttgagggcaggagttcaagaccagcctggccaacatggtgaaaccctgtctctgctaaacacaaaaattagctaggcgtgatggcgggcgcctgtaatcccagctattcgagaagccaaggcaggagaatcgcttgaaccctggaggcggaggttgcagtgagccaagatctcaccackgcactctagcctgggtgaccgagcgagacttcgtctcaagaaaaaaaactttacatttgcccagcacttaacaatattcaaagcactctggcctccactttctcctttaatctttaccatggtcctgtgggccagaaacgagcctccacggtttgaaatgatttcctcgcagcagttcagctggtaaggggcagagcggggactctggctctgtcccaaacctttccttgctgtatcacagccacctccctcacctggacaacattccccaaggcccctcattatcccaagggtgggactcccttgccac

SEQ ID NO: 70351 - DNA, 990 bp, Homo sapiens
gtttttttcttatagccacactttttaaaaaggaaaaacaagcaaaataaactgtaatactataacttatttagcccaatatatctaaaatattatttcaacacatcattgatataagtattagaaatattttgcgtttcttcctacaagtttgaaatccagtgtatatttcacatttacagaatgtctcaatttggactagtcacatttcaagtgctaatagccacatggggccagtggctaccacctggacagagcagtgttagggtcagtgtgatgacaggaaaagcgcttcgcttggatgctcctgtaaaatgtcagcttttcccctcctcccttccctccatcttctcctcctcctcctcctcttccctattttcatttttatattcagtccatactcatgcaccctccccagacctcaaaaactaaaacaaggccaggcacagtggctcacgcctgtaatcccagcactttaggaggccaaggcaggtggatcacttgagggcaggagttcaagaccagcctggccaacatggtgaaaccctgtctctgctaaacacaaaaattagctaggcgtgatggcgggcgcctgtaatcccagctattcgagaagccaaggcaggagaatcgcttgaaccctggaggcggaggttgcagtgagccaagatctcaccactgcactmtagcctgggtgaccgagcgagacttcgtctcaagaaaaaaaactttacatttgcccagcacttaacaatattcaaagcactctggcctccactttctcctttaatctttaccatggtcctgtgggccagaaacgagcctccacggtttgaaatgatttcctcgcagcagttcagctggtaaggggcagagcggggactctggctctgtcccaaacctttccttgctgtatcacagccacctccctcacctggacaacattccccaaggcccctcattatcccaagggtgggactcccttgccac

SEQ ID NO: 70352 - DNA, 990 bp, Homo sapiens
gtttttttcttatagccacactttttaaaaaggaaaaacaagcaaaataaactgtaatactataacttatttagcccaatatatctaaaatattatttcaacacatcattgatataagtattagaaatattttgcgtttcttcctacaagtttgaaatccagtgtatatttcacatttacagaatgtctcaatttggactagtcacatttcaagtgctaatagccacatggggccagtggctaccacctggacagagcagtgttagggtcagtgtgatgacaggaaaagcgcttcgcttggatgctcctgtaaaatgtcagcttttcccctcctcccttccctccatcttctcctcctcctcctcctcttccctattttcatttttatattcagtccatactcatgcaccctccccagacctcaaaaactaaaacaaggccaggcacagtggctcacgcctgtaatcccagcactttaggaggccaaggcaggtggatcacttgagggcaggagttcaagaccagcctggccaacatggtgaaaccctgtctctgctaaacacaaaaattagctaggcgtgatggcgggcgcctgtaatcccagctattcgagaagccaaggcaggagaatcgcttgaaccctggaggcggaggttgcagtgagccaagatctcaccactgcactckagcctgggtgaccgagcgagacttcgtctcaagaaaaaaaactttacatttgcccagcacttaacaatattcaaagcactctggcctccactttctcctttaatctttaccatggtcctgtgggccagaaacgagcctccacggtttgaaatgatttcctcgcagcagttcagctggtaaggggcagagcggggactctggctctgtcccaaacctttccttgctgtatcacagccacctccctcacctggacaacattccccaaggcccctcattatcccaagggtgggactcccttgccac

SEQ ID NO: 70353 - DNA, 990 bp, Homo sapiens
gtttttttcttatagccacactttttaaaaaggaaaaacaagcaaaataaactgtaatactataacttatttagcccaatatatctaaaatattatttcaacacatcattgatataagtattagaaatattttgcgtttcttcctacaagtttgaaatccagtgtatatttcacatttacagaatgtctcaatttggactagtcacatttcaagtgctaatagccacatggggccagtggctaccacctggacagagcagtgttagggtcagtgtgatgacaggaaaagcgcttcgcttggatgctcctgtaaaatgtcagcttttcccctcctcccttccctccatcttctcctcctcctcctcctcttccctattttcatttttatattcagtccatactcatgcaccctccccagacctcaaaaactaaaacaaggccaggcacagtggctcacgcctgtaatcccagcactttaggaggccaaggcaggtggatcacttgagggcaggagttcaagaccagcctggccaacatggtgaaaccctgtctctgctaaacacaaaaattagctaggcgtgatggcgggcgcctgtaatcccagctattcgagaagccaaggcaggagaatcgcttgaaccctggaggcggaggttgcagtgagccaagatctcaccactgcactctagcctgggtgaccgagcgagacttcgtctcaagaaaaaaaactttacatttgcccagcacttaacaatattcaaagcactctggcctccactttctcctttaatctttaccatggtcctgtgggccagaaacgagcctccacggtttgaaatgatttcctcgcagcagttcagctggtaaggggcagagcrgggactctggctctgtcccaaacctttccttgctgtatcacagccacctccctcacctggacaacattccccaaggcccctcattatcccaagggtgggactcccttgccac

SEQ ID NO: 70354 - DNA, 827 bp, Homo sapiens
ggatccttaatgctgaacaaattttaaggtggagcccattgactgacatggttgagttcaggaagcaatgagctgaaaatggtggaaaagactgtcctattaaaaaaaaaaaggatggaaaatttaagcaaaaatgtttctatcagataatgtggatttcatattgtmctttttattatttatcttctgctaaactcatgtgttattctaacactttgagtagctccatttgctaaatatttggttattatctcactattttgaaactctgtcttgttaattatgtcattcattttagataatcaaaagagaacttacagtttcaaggcccatccatactttgacctgccttccaaccctaactaacttcatctcctttctttgtcacttaaactatattttcaaggtcacattttgccttcccccaaacccatcctaaactcccaaactcaagtcttgcagttttccacttttccagtcggagctgagcattgctggagaaaatcatttatcatgcttgccgaatgcaatagatagaacagtgtgtatatgtatttaatttgcatctgtcaatatactacaggattaatgtccttggggattcaagacacatgaaaattgtataggtaatgttgttttggcttagaaaaaataaactctacattcttaaaaaatgtcccatgttacatttttctcaactaggattctgattaaattttactcctattattcaaattgaaaatctttctcaacaccctagagagtaggtattctacgttgctaatcagaagactgatattcttaaagctcagctgaacatgtgttag

SEQ ID NO: 70355 - DNA, 827 bp, Homo sapiens
ggatccttaatgctgaacaaattttaaggtggagcccattgactgacatggttgagttcaggaagcaatgagctgaaaatggtggaaaagactgtcctattaaaaaaaaaaaggatggaaaatttaagcaaaaatgtttctatcagataatgtggatttcatattgtcctttttattatttatcttctgctaaactcatgtgttattctaacactttgagtagctccatttgctaaatatttggttattatctcactattttgaaactctgtcttgttaattatgtcattcattttagataatcaaaagagaacttacagtttcaaggcccatccatactttgacctgccttccaaccctaactaacttcatctcctttctttgtcacttaaactatattttcaaggtcacattttgccttcccccaaacccatcctaaactcccaaactcaagtcttgcagttttccacttttccagtcggagctgagcattgctggagaaaatcatttatcatgcttgccgaatgcaatagatagaacagtgtgtatatgtatttaatttgcatctgtcaatatactacaggattaatgtccttggggattcaagacacatgaaaattgtataggtaatgttgktttggcttagaaaaaataaactctacattcttaaaaaatgtcccatgttacatttttctcaactaggattctgattaaattttactcctattattcaaattgaaaatctttctcaacaccctagagagtaggtattctacgttgctaatcagaagactgatattcttaaagctcagctgaacatgtgttag

SEQ ID NO: 70356 - DNA, 1310 bp, Homo sapiens
cgaggtcgggagatggaaaccatcctggctaacacggtgaaaccctgtctctactaaaaatacaaaaaattagccgggcatggtggccagcacctgtagtcccagctatccgggaggctgaggcaggagaattgcttgaacctgcaaggcagagcttgcagtgagccgatattgtgccactgcactccagcctgggcaacaaagcaagactctgtctcaaaacaaaamcaaaaaaaaacaaaaaaaagcaaaagcaagcaaaccctttctaattaaccacatcaagtttctgtttactgaaatcatcattaaaagtctaagactcccagattatccatcagcactagagctcttatccgcatgtagtcttctcatccttagatctttgccttccactttgttcaaccccacccatctgacaaccagagaaagccgagccttagctaataattcaacttcatttggaaggtgtaagtctagggcagtgagcgtaagaaaaaggggaagaaggtaaggaaagatatgaaacagattttatgtgcgctgctgggctggctgctgctccatcatgagctgagaaaaaagcaagccggttgctaagccagtatgttcactcacttcataggatttctctggaatggctgcaagtgggtacttgcagatgtagtccatgaaagaaagaaagaaaagtaaatttatcttccaagcaatatcctatttctattttcctgttgtataaggtttagcccacagtgtattagttttcatgctttttaaagatttcccccttgggaaaatggatccgataactgattgtgtgttgttaagtcacaaattgagggccagcccttatcaataaggcttggcaggcagagaataaaggccaccagacccagggctatacctgggattacagtccttttggagagctctgcaagagcaccagcaaagggggatatggcagtacagcctggcaggtgggtggtggctttctaaagaaggagatggggccaggtgcagtggctcacgcctgtaatcccagcaattttggaggctgaggagggcggatcacctgaagtcaggagtttgagaccagcctgaccaatatggtgaaacccgtctctacaaaaaaaacaaaaatcagccgggtttggtgggaggcatctgtagtcccagctactcggggggggtgagacgggagaattgcttgaacccgggaggcgaaggttgcagtgagccaagatcatgccactgcaccccagcctggacaacagagcgagactccatctcgaaaaaaaaaaaggaggtgg

SEQ ID NO: 70357 - DNA, 2136 bp, Homo sapiens
aaatggtttgctttggaagaaatggctttaatttactgcaaagtttagggtggccctgcaggtatggggtgctggccccccaaggtgtccaggaagggatggggcagcaaggtgatgtcaagtacaacctcccagctctgcagcaactcaggaccatgagttaatgacagagaagtgtggagagcctcctcccatgtgccctggagcctcagctgctgcagagcctacacagaggtcctggcattccgactaatcgggcattcttcccagttctgctgccagcttgcccggtcagagctgaggccacagaggacccagtattgtcaccagaggcaccctgccccaactctgagtctcttctctctgactctggagctgagccagcgtcttgagcccatgacctgtgcagtactcaggccccacattcctaaatccaggccctgccctggatttagatgctccgctgtcctgtcttgaaattcctaattcattttttaatgaggaactttgtgttttcatttttattttaccctgggacctgccatggcttggagaaatcacactctgattgccatactgctgtggggctcaggtctcgaggcagcgcctcaccccaggagacaccgggggaaggtgagctgacttggagccaccttcccggctgaggaagctgtatggtttgaatgtcccctccaaaactcaagttgaaccttaatcccaaatgcaacagtattgagaggtgaggcttttaagaggtgactggatcctgagggttctgcctttatgaatggataaaagggctactggattaatgcaaggggaactggtggctttagaagaagggagacctgagcatagcacatttgacacactcagcccctcaccatgggacactctgtgccacctgaagactctgctgagagtccccaccagcaagaaggctctcaccagatgcagcccttcaaccttggacttctcatcctctagaactgtaagagacaattcccttttctttataaattacccagttattctgttctaagcaaccaaagacagatcaatacagaaacctcatctcaagctgttcatgcatggctgcagagaactcatcgagggcctagctggagccagaaatgcagggagagcccagagcctgcaaggagrgagaaaggcactctccagcacaggcagacacagagctgaaagagcggagtagccaggggctgggtgccatgggcttcctggaggaggaggctcccagatctaggacagaactgaacaagtaaacagggtttggagaagccagggaggctggggtgggggggccagggggtgggcagggaagcaaaaggagaatcagcagggtggagggccctagattgtgccagacaggggccactccagctgctgcaggagtgacttcactcaccctcccggggttatgcacctgccacctcccagacatccccagccccgcatctccctgcacaatgcctgctctgattctccttgcagccagggtgagaggcagtcagcgaacaatgctatctgcacgtggtggcgcccaaaatacggctgtcatttatttcgttatatgaaattagagcacgccttgtagccataatgaatcatttccttcctgcctgggccacggtgtcaggcaggagctcggcatcccccattcagggcctttcacttcatcgcaggctaataataacccacgcgggtgaacacacatcttcccgagacaatggagggcctggatgggcattggggtcatgagtgcagtgcccacagcaggaggggagaagggccgggatggggcctgggctggacactgtggctgaaggaagacagtgcccatggggaggggaaggaaggcatctgggtgggcaccccaagtgggagctggggcacccaggtcccttttctagctgatcccctcaacaaggacaggaaatagctccctcccccaacccccagctattctaccaggattttttcccaatcatgcctaggtccagctcagaggccctaaccagagccctccacagctggcctcactcttcactcagcccccaattttcaaagcactggctccttccacagcttcatcccagccccatcctggcctgg

SEQ ID NO: 70358 - DNA, 2136 bp, Homo sapiens
aaatggtttgctttggaagaaatggctttaatttactgcaaagtttagggtggccctgcaggtatggggtgctggccccccaaggtgtccaggaagggatggggcagcaaggtgatgtcaagtacaacctcccagctctgcagcaactcaggaccatgagttaatgacagagaagtgtggagagcctcctcccatgtgccctggagcctcagctgctgcagagcctacacagaggtcctggcattccgactaatcgggcattcttcccagttctgctgccagcttgcccggtcagagctgaggccacagaggacccagtattgtcaccagaggcaccctgccccaactctgagtctcttctctctgactctggagctgagccagcgtcttgagcccatgacctgtgcagtactcaggccccacattcctaaatccaggccctgccctggatttagatgctccgctgtcctgtcttgaaattcctaattcattttttaatgaggaactttgtgttttcatttttattttaccctgggacctgccatggcttggagaaatcacactctgattgccatactgctgtggggctcaggtctcgaggcagcgcctcaccccaggagacaccgggggaaggtgagctgacttggagccaccttcccggctgaggaagctgtatggtttgaatgtcccctccaaaactcaagttgaaccttaatcccaaatgcaacagtattgagaggtgaggcttttaagaggtgactggatcctgagggttctgcctttatgaatggataaaagggctactggattaatgcaaggggaactggtggctttagaagaagggagacctgagcatagcacatttgacacactcagcccctcaccatgggacactctgtgccacctgaagactctgctgagagtccccaccagcaagaaggctctcaccagatgcagcccttcaaccttggacttctcatcctctagaactgtaagagacaattcccttttctttataaattacccagttattctgttctaagcaaccaaagacagatcaatacagaaacctcatctcaagctgttcatgcatggctgcagagaactcatcgagggcctagctggagccagaaatgcagggagagcccagagcctgcaaggagggagaaaggcactctccagcacaggcagacacagagctgaaagagcggagtagccaggggctgggtgccatgggcttcctggaggaggaggctcccagatctaggacagaactgaacaagtaaacagggtttggagaagccagggaggctggggtgggggggccagggggtgggcagggaagcaaaaggagaatcagcagggtggagggccctagattgtgccagacaggggccactccagctgctgcaggagtgacttcactcaccctcccggggttatgcacctgccacctcccagacatccccagccccgcatctccctgcacaatgcctgctctgattctccttgcagccagggtgagaggcagtcagcgaacaatgctatctgcacgtggtggcgcccaaaatacggctgtcatttatttcgttatatgaaattagagcacgccttgtagccataatgaatcatttccttcctgcctgggccacggtgtcaggcaggagctcggcatcccccattcagggcctttcacttcatcgcaggctaataataacccacgcgggtgaacacacatcttcccgagacaatggagggcctggatgggcattggggkcatgagtgcagtgcccacagcaggaggggagaagggccgggatggggcctgggctggacactgtggctgaaggaagacagtgcccatggggaggggaaggaaggcatctgggtgggcaccccaagtgggagctggggcacccaggtcccttttctagctgatcccctcaacaaggacaggaaatagctccctcccccaacccccagctattctaccaggattttttcccaatcatgcctaggtccagctcagaggccctaaccagagccctccacagctggcctcactcttcactcagcccccaattttcaaagcactggctccttccacagcttcatcccagccccatcctggcctgg

SEQ ID NO: 70359 - DNA, 786 bp, Homo sapiens
cccgctgcatctccgcgcctgtgggtgcatgtcgcgtgctcatctgttgcacacagctcactcgtatgtcctgcactggtacatgcatctgtaatacagtttctacgtctatttaaggctaggagccgaatgtgccccattgtcagtgggtccacgtttctccccggctcctctgggctaaggcagtgtggcccgargcttaaaaagttactcggtactgtttttaagaacacttttatagagttagtggaaggcaagttaagagccaatcactgatccccaagtgtttcttgagcatctggtctggggggaccactttgatcggacccacccttggaaagctcaggggtaggcccaggtgggatgctcaccctgtcactgagggttttggttggcatcgttgtttttgaatgtagcacaagcgatgagcaaactctataagagtgttttaaaaattaacttcccaggaagtgagttaaaaacaataaaagccctttcttgagttaaaaagaaaaaaaaaaggtttgtgcgtacattttctgcatctggatatacgttctttctcagcagctggaacagctggctttgttgaattttctggaagcgtctgaggcaccctaagtccctgagcaggacagtggtgagaagtggtcttggcggagggagggagagggaagggctggctcaggaggtgaccgggctgcagtccagggtacagctgaggctcctgggcgggtccgtggccactccttgggaagaactgcctgtttcacaggggctcaggat

SEQ ID NO: 70360 - DNA, 786 bp, Homo sapiens
cccgctgcatctccgcgcctgtgggtgcatgtcgcgtgctcatctgttgcacacagctcactcgtatgtcctgcactggtacatgcatctgtaatacagtttctacgtctatttaaggctaggagccgaatgtgccccattgtcagtgggtccacgtttctccccggctcctctgggctaaggcagtgtggcccgaagcttaaaaagttactyggtactgtttttaagaacacttttatagagttagtggaaggcaagttaagagccaatcactgatccccaagtgtttcttgagcatctggtctggggggaccactttgatcggacccacccttggaaagctcaggggtaggcccaggtgggatgctcaccctgtcactgagggttttggttggcatcgttgtttttgaatgtagcacaagcgatgagcaaactctataagagtgttttaaaaattaacttcccaggaagtgagttaaaaacaataaaagccctttcttgagttaaaaagaaaaaaaaaaggtttgtgcgtacattttctgcatctggatatacgttctttctcagcagctggaacagctggctttgttgaattttctggaagcgtctgaggcaccctaagtccctgagcaggacagtggtgagaagtggtcttggcggagggagggagagggaagggctggctcaggaggtgaccgggctgcagtccagggtacagctgaggctcctgggcgggtccgtggccactccttgggaagaactgcctgtttcacaggggctcaggat

SEQ ID NO: 70361 - DNA, 786 bp, Homo sapiens
cccgctgcatctccgcgcctgtgggtgcatgtcgcgtgctcatctgttgcacacagctcactcgtatgtcctgcactggtacatgcatctgtaatacagtttctacgtctatttaaggctaggagccgaatgtgccccattgtcagtgggtccacgtttctccccggctcctctgggctaaggcagtgtggcccgaagcttaaaaagttactcggtactgtttttaagaacacttttatagagttagtggaaggcaagttaagagccaatcactgatccccaagtgtttcttgagcatctggtctggggggaccactttgatcggacccacccttggaaagctcaggggtaggcccaggtgggatgctcaccctgtcactgagggttttggttggcatcgttgtttttgaatgtagcacaagcgatgagcaaactctataagagtgttttaaaaattaacttcccaggaagtgagttaaaaacaataaaagccctttcttgagttaaaaagaaaaaaaaaaggtttgtgcgtacattttctgcatctggatatacrttctttctcagcagctggaacagctggctttgttgaattttctggaagcgtctgaggcaccctaagtccctgagcaggacagtggtgagaagtggtcttggcggagggagggagagggaagggctggctcaggaggtgaccgggctgcagtccagggtacagctgaggctcctgggcgggtccgtggccactccttgggaagaactgcctgtttcacaggggctcaggat

SEQ ID NO: 70362 - DNA, 654 bp, Homo sapiens
tgggtcagggtgggtcagagagcagaaggggagatgatccaggtagacaggtagagaaaggtgaactgagccgggcgcggtggctcacacttctaatcccagcactttgggaggccgargtgggtggatcacctgaggtcaggagttcgagaccagcctggccaacatggtgaaaccccgcctctactgaaaatacaaaaattagctgggcgtggtggcaggcaccggtaattccagctacccgggaggctgaggcaggagaatcgcttgaacctgggaggcggaggttgcagtaagccaagatcccgccactgcgctccagcctgggcgagagagcaagactccatctcaaaaaaaaaaaataaaataaaataaaataagagaaaggagaacttgagagaccagccggggcaggcaggaggcatcatggggacctttgtggggaagtccaggactggagctggcacgtgtaccccatgacacgcttcccaaccccaggcctcgcccctgcccagaataaagaaaggtgagggttacaggcatcccccgggaagagcccagcacaagcccacccatgcgcaccatgaggttagtgctgtcctgattcgaggctggggcatggctggggtgacctcgaaagcacactgctccatt

SEQ ID NO: 70363 - DNA, 654 bp, Homo sapiens
tgggtcagggtgggtcagagagcagaaggggagatgatccaggtagacaggtagagaaaggtgaactgagccgggcgcggtggctcacacttctaatcccagcactttgggaggccgaagtgggtggatcacctgaggtcaggagttcgagaccagcctggccaacatggtgaaacccygcctctactgaaaatacaaaaattagctgggcgtggtggcaggcaccggtaattccagctacccgggaggctgaggcaggagaatcgcttgaacctgggaggcggaggttgcagtaagccaagatcccgccactgcgctccagcctgggcgagagagcaagactccatctcaaaaaaaaaaaataaaataaaataaaataagagaaaggagaacttgagagaccagccggggcaggcaggaggcatcatggggacctttgtggggaagtccaggactggagctggcacgtgtaccccatgacacgcttcccaaccccaggcctcgcccctgcccagaataaagaaaggtgagggttacaggcatcccccgggaagagcccagcacaagcccacccatgcgcaccatgaggttagtgctgtcctgattcgaggctggggcatggctggggtgacctcgaaagcacactgctccatt

SEQ ID NO: 70364 - DNA, 654 bp, Homo sapiens
tgggtcagggtgggtcagagagcagaaggggagatgatccaggtagacaggtagagaaaggtgaactgagccgggcgcggtggctcacacttctaatcccagcactttgggaggccgaagtgggtggatcacctgaggtcaggagttcgagaccagcctggccaacatggtgaaaccccgcctctactgaaaatacaaaaattagctgggcgtggtggcaggcaccggtaattccagctacccgggaggctgaggcaggagaatcgcttgaacctgggaggcggaggttgcagtaagccaagatcccgccactgcgctccagcctgggcgagagagcaagactccatctcaaaaaaawaaaataaaataaaataaaataagagaaaggagaacttgagagaccagccggggcaggcaggaggcatcatggggacctttgtggggaagtccaggactggagctggcacgtgtaccccatgacacgcttcccaaccccaggcctcgcccctgcccagaataaagaaaggtgagggttacaggcatcccccgggaagagcccagcacaagcccacccatgcgcaccatgaggttagtgctgtcctgattcgaggctggggcatggctggggtgacctcgaaagcacactgctccatt

SEQ ID NO: 70365 - DNA, 1118 bp, Homo sapiens
ttcaccaccgttcaattctagaacattccctcccctcccagtcctggcaaacactagtctrctttctgactttttggatttgcatatcctggacatttcatatcattggaaccatacaatatgtggccttttgtttctttccctcatgataatgtttcaaagttcatctgtgcagtagagtatatcagaattctattccttttgatagccagataatattctattatatggatatacagtactgcattttatttattcatcaggtagttggaatccattgtttttgaatcattgtcaatcttcaatgataaaaagtctgaaattataatttggtacagagcagtttttgatatatactttagacattaaaaaatgtgtgtatgtgtatgtgtgtatgttttaatttttatatgttttaatcttgcatttcaaaactctaaaaaattattagttctaaaacactgtgattatccaaaggttttgaatgagagattatgtataatatcctaaaattaagaaggaagaggatttggtcatctgtaaaggaaaatttttaacatatccttttttcctaggtaaacattcactagacccttttttttccctctccttgtatctctaaataaaaggcatctcactgacaagaattttaattctttatctttcttccctcatctgattggtcaggatgcccagtgtgttctaccttattaatagctcccatttgttctttcctttctgttctcaccaccagaaactgagttcaactttattccatatgataacagagcgacttactttacgtgtatcagagaacttatcaatctttgtacttgtctccttccagccacaagccagtaagctcttggaaagcaggaagtgtcattttgctcttggctttcctccatagtggctggcaaagagtttgtactcaactgttggctgaaaaaaatgatgatgaacaagtggtatgaataatattagcacttaatttttttcctcttctttagtatagtgtttctcaatgtttcttagcagaaaacctcaagattttcaaaagaggatgttattatttttgagttacaaaaaatttcagaaactatactgttaaaaattat

SEQ ID NO: 70366 - DNA, 1118 bp, Homo sapiens
ttcaccaccgttcaattctagaacattccctcccctcccagtcctggcaaacactagtctgctttctgactttttggatttgcatatcctggacatttcatatcattggaaccatacaatatgtggccttttgtttctttccctcatgataatgtttcaaagttcatctgtgcagtagagtatatcagaattctattccttttgatagccagataatattctattatatggatatacagtactgcattttatttattcatcaggtagttggaatccattgtttttgaatcattgtcaatcttcaatgataaaaagtctgaaattataatttggtacagagcagtttttgatatatactttagacattaaaaaatgtgtgtatgtgtatgtgtgtatgttttaatttttatatgttttaatcttgcatttcaaaactctaaaaaattattagttctaaaacactgtgattatccaaaggttttgaatgagagattatgtataatatcctaaaattaagaaggaagaggatttggtcatctgtaaaggaaaatttttaacatatccttttttcctaggtaaacattcactagacccttttttttccctctccttgtatctctaaataaaaggcatctcactgacaagaattttaattctttatctttcttccctcatctgattggtcaggatgcccagtgtgttctaccttattaatagctcccatttgttctttcctttctgttctcaccaccagaaactgagttcaactttattccatatgataacagagcgacttactttacgtgtatcagagaacttatcaatctttgtacttgtctccttccagccacaagccagtaagctsttggaaagcaggaagtgtcattttgctcttggctttcctccatagtggctggcaaagagtttgtactcaactgttggctgaaaaaaatgatgatgaacaagtggtatgaataatattagcacttaatttttttcctcttctttagtatagtgtttctcaatgtttcttagcagaaaacctcaagattttcaaaagaggatgttattatttttgagttacaaaaaatttcagaaactatactgttaaaaattat

SEQ ID NO: 70367 - DNA, 950 bp, Homo sapiens
attttttaaaagttatactctattataatcctctgtattatgtttatatttatgcttgttcttatagtttatatatttaattttctgagaacaaattgattttacaaggtaatgagatcaccaaaagtgtgagcacagtccamagctataaataggtcccagctaatagcaaagaggtaaacaatccacatgcaaatagtcaagaatccattctatgtatttctttaaccttctccttttctctatacagagtcagaacttcttgttctaacacaaggacttcataaaaagacatatccaaataaaaataattaaataaaatgttgttctctgtgtaaagctgctgtcgtctgtttggagagaggtaagatttctgttagaacaggtctgaatgaagaacatgagctactgagattctaggaaaaatgagtggaccatacgaagaaatgtctaaaactacagagtaaagagtaaactactcttataaaggtatttctctctttctctctctccatctttctttctctcatttactctttcccacgtgcacgtgtgtatgcacacacacacacacacacacacacattcacacaggaaaaacaataacccagcttcctattactaaagacaaaggtataaactaatgcacatggaggatctgttactgtggcaacagcaaccccatgtgctttgtttgaactcaacaaacaataaaaaatccttgaaatttcgccttcatcatcttcattgaaaacattttctgagctctgatgaatcatgaaaagcaccatttgattgctattgggttacagagtatggagaaaccaatttgtttttgttctttcaaggttatgattcaaataggaatgtcaagaccagctgaagaataatgatggggctgatttatgccgatacatcaatcacaaattctcaagaagaagaaaatgatg

SEQ ID NO: 70368 - DNA, 1316 bp, Homo sapiens
aaattgcaccaggctctgtgctagactctgggggagacagagactaaggatgaatttccccccacttactcctaccttcagggactatgacggtgttgagatacatctcagattagttcattaatgctgactcacgtcataacactcattccaagatgagtgaggtcgggggcgaccgtggacagtctcacactggaggtaggactaagtgcagttgggctgtgggaggagagtcggtgttttagggagcacagagaagcaaaggcaatgagtgtggatatcagagagaagaatcccgagggctgagggctgatattaaggcagagggagatcacactgccaggaaagctagggctaattggataatccaggaactaaaggcttcaatggaatagtccagagacagcaaaaatgaggtacacctgctgctacatctttgttctgaatggcagacatcattaatcaaccacctcctacagagcctgggtctttttcaacccagtgatccaggaagccaccacaaagcaatcagagtgtgcatacatgatgaaccctatttgccattgttgaaatagtcattctctctcctgcggacaaaagacaaaaatattcagtaggctccagataaggtgaatcatagggtaaaatagagaactctggagctagatttcctgaggttggaacctggtttatctacataccaactgtaggaccttgtgcaagatatgtgatctctctgttcctcagtttccatgtctgaaaaataggaataataggattgctaagaggcatgtatgagataataccttctaaacatagcaatgcccagcacatcactatttcattccagcgctcctactcttcacttcttaatctttccccattgcagcaatcaaccaacctccaattggattgaaacaagaaaatagacttagcaaaggtgggtaaagcatgtgaatgttacagttttgctgtgtagacaaggacagagcccacaacttcaaacagcctctggggagaaaagtcattaccaatcatgccaatccctagctgagcaccytagagacatgcctagcaaaaagtgaggtgtcctatctctagatttggaggacagcacattgatgtgttcctttcctctatgatttttagaaacgctcatgattactcagttccactgactatgttatctgtttggttaatttgatgtcctaacattgggaggacaacactagaaatgaagcaccaaggggagaagaaaatcaatctcacaagtaaagcctctgtgatttccagatttcataatagggagccaggga

SEQ ID NO: 70369 - DNA, 520 bp, Homo sapiens
cctcatggcctaattgcatcttgaaggtcacacttctcaataatgtcacaacggcaattcaatttcaacacaagttttgaggggacaaatattcaaaccatggcaactatattgtgtcaagttttgatatgccatcaagttttagggttcagcaaaaaaggttgcctaatttagttggcagaaattctatagctataatgggttttctgtctttcaaaatggatattttactttcaatttagcccactgaaggataagtcattttcctttgttggggaagcttgttaagttcagtttgagtctcagcagtgactgtagcaacagtgtttagagagtaattttgtttcccccaattactgtcatttcaacataattccatttgcaaggcaaaggatggtctccytccacctgggaaaggtcccctggaatcacagtcatggtagtcacattggagctgggggctgagagcctttctaatttcactttcttctggcagacaagtgatcacttgttggtataa

SEQ ID NO: 70370 - DNA, 683 bp, Homo sapiens
tttgcagtgggactccatctcaaaaacaaacaaacaaaaaaacaaccattccaggcaaaaagaaggaagacccaggttaaaaggcaaatgttaaaaggctactttcagcatgagagaaaaagacagggtgctgggggagcagtaaaattcagggaccaccacatggaaattctaattcagcaccaaacaaatgtgaagctcagaggtaagataagcttaaaaagccacctatgaaataggagagaatactaggaagtccagctcaggaaaaatgcaactgacatttgtgtatcacttcttatagcttgcgatgagatcaagactatacatgttatctcattaaatttgtcacagcaacccaatcgagtaggttaaataattttacagatgatgaaatgagacctcaagagacctcgtaactttctcaaggctacagagctggtaaatagtgggtccaaaatgatctgctcctyattgtcctaatttccttattactgattctttcagagatataatatgtgttcctcatgaaaaaaatctgtaatcctcaccatcgaaggccactactgcatatacttgattccaaaccaggagcacaaaggtgcgcattcttctcgggtccattgcagtacactgttcagcaagctgcagtcctagctgcgcctttagtacgggggaagcgg

SEQ ID NO: 70371 - DNA, 1368 bp, Homo sapiens
aggcgtggtaggcaggggttcctctaacatgtttattctccctagaagggcattccctcctatgctgcccatttacccaactaatccttgcgtataagtcaagactcagctccaagggtacatccctaggaagctttgcctgattctccaatagaattgacactacccctcctgkggcctcattgtgccctgaacatcagtaatagtaataaatcagacactgactgttctatacactttcaacttactgaatataaaaaagttttgttgttattaaatgaaagtattacaaaataattttatcttcaaagaaccacttgagagcagaaagtcaggtagaaaagaaagaagaggaaatcctacctacagcatgtttcttccaaagcagccggtccctatttctcctgcttcaaaacaatggaaaactcccacattggaaactctcgctagacggcattctgaaatgatcagtcattccgtgctgtccttgctgttccgcttcatcacacttgaagctttgccggctgggatttttgctgccttggcaaacatgatgatggtgtcaaacctaatgtttcctaaatttttgcagaaatgcacagaagacttccatgggagcctattgtcaattatctggaaaaagagaagtttgcagacattagaagcaagaactgtgtgaggatcggctctgggttttaatgagaaggattcaaattagaatgtcggctatttcctatagtttgctaaaaataacctgggtgcctgcttccttcacttgtgcttcattttcagtgcctgctcatcctgaagattcagaagagatggaaaatgttccttaggatccagtacccgtgctatttgttcagataaatgtgatttagctttgatctgctctcctgtgcaccaatgggtatgctacctttaggctcctgtcagatatacactagaggaagcttccaggtgataaggcgaacacaaacatcaatccctgttgatttcacctcttaaatctcctcccatcactgccaccaacttgtcccaagctgccatcatttcttgcatgggccactgcaaaaccctcctgcctgctcttcccaccttgaatctgcctttcccaccccggccctcatactgtaactaagaacaatctccccacataaatctgaacatatccccccaccaccactgatcaatggctccccatttcttttatgataaagactaaaatccttaacatggtctacaagcaaggacctccctgacctgtgcccgagaccctctccagccctgcctctccactttctacagccttgcccctctccccttggttcttcctactccaacccatggtccttacaccagtgactt

SEQ ID NO: 70372 - DNA, 516 bp, Homo sapiens
ccctatcttcatttatgtttgatggttacctgtcaggtgagcagaataagtcttgttgttcctggttaatgaaaaaggaatcgagaccctgagaggtagaggggtttgcctgtgtttacatcgtaggtctccatggagcagtccagacctcttcccagaactcatgctggccttgctacccagaattcctgcctttagggaatgacccttcccctggccctgccttggttctggtgtgtgtgcctcaccctcaatgccctgccacatgtgggctgggccagtcagatrcactcctgggaatttgaatcttacacagagacacagaggaacccaaggtggatagaggcttgagccgagtccgtttctgttacctgcacaccaaaaaccctaactgacagaaatttctactagacagaaggttgaaggccacaggccagcagaaaaatgtaggatatttggaattagttattgggatctagatgagtagagagtagttaaactcccatttacattctg

SEQ ID NO: 70373 - DNA, 573 bp, Homo sapiens
gtggaacaataataacatcccaactaccttgaaatcttgtttaaaatgaagactcctggaggaacagaattgagagcatacttcagcaaaggagmtctccataaatatgataaagtcatttcaatatccactgccttctcttagctgttcccaggtgcttatgtcctcatgtgtcccttgtgtccacagatacccaagcacttgttagcttacacatagctctagtcatgacctttgggttagcagcaaacagctggtccagaacccttcaccccagaaccagctgaatccacaccaacatctgtctgtctatctctatctatctatctctcaactatctatctatctatctaatctatgtattatctattataaatctgtctgtcatctatctagccatcacctatcagtctgtctacctatttttctatcaacctattagctatctattcattatttatcacctatttatcatctatctatccatctattatctgtttatctgtctatcatctgtctatctacctaatctatgtattattatctattatcaaactacctatcatctatcca

SEQ ID NO: 70374 - DNA, 573 bp, Homo sapiens
gtggaacaataataacatcccaactaccttgaaatcttgtttaaaatgaagactcctggaggaacagaattgagagcatacttcagcaaaggagctctccataaatatgataaagtcatttcaatatccactgccttctcttagctgttcccaggtgcttatgtcctcatgtgtcccttgtgtccacagatacccaagcacttgttagcttacacatagctctagtcatgacctttgggttagcagcaaacagctggtccagaacccttcaccccagaaccagctgaatccacaccaacatctgyctgtctatctctatctatctatctctcaactatctatctatctatctaatctatgtattatctattataaatctgtctgtcatctatctagccatcacctatcagtctgtctacctatttttctatcaacctattagctatctattcattatttatcacctatttatcatctatctatccatctattatctgtttatctgtctatcatctgtctatctacctaatctatgtattattatctattatcaaactacctatcatctatcca

SEQ ID NO: 70375 - DNA, 573 bp, Homo sapiens
gtggaacaataataacatcccaactaccttgaaatcttgtttaaaatgaagactcctggaggaacagaattgagagcatacttcagcaaaggagctctccataaatatgataaagtcatttcaatatccactgccttctcttagctgttcccaggtgcttatgtcctcatgtgtcccttgtgtccacagatacccaagcacttgttagcttacacatagctctagtcatgacctttgggttagcagcaaacagctggtccagaacccttcaccccagaaccagctgaatccacaccaacatctgtctgtctatctctatctatctatctmtcaactatctatctatctatctaatctatgtattatctattataaatctgtctgtcatctatctagccatcacctatcagtctgtctacctatttttctatcaacctattagctatctattcattatttatcacctatttatcatctatctatccatctattatctgtttatctgtctatcatctgtctatctacctaatctatgtattattatctattatcaaactacctatcatctatcca

SEQ ID NO: 70376 - DNA, 573 bp, Homo sapiens
gtggaacaataataacatcccaactaccttgaaatcttgtttaaaatgaagactcctggaggaacagaattgagagcatacttcagcaaaggagctctccataaatatgataaagtcatttcaatatccactgccttctcttagctgttcccaggtgcttatgtcctcatgtgtcccttgtgtccacagatacccaagcacttgttagcttacacatagctctagtcatgacctttgggttagcagcaaacagctggtccagaacccttcaccccagaaccagctgaatccacaccaacatctgtctgtctatctctatctatctatctctcaactatctatctatctatctaatctatgtattatctattataaatctgtctgtcatctatctakccatcacctatcagtctgtctacctatttttctatcaacctattagctatctattcattatttatcacctatttatcatctatctatccatctattatctgtttatctgtctatcatctgtctatctacctaatctatgtattattatctattatcaaactacctatcatctatcca

SEQ ID NO: 70377 - DNA, 1014 bp, Homo sapiens
tgcggacaaaccgccccagggcgtacctagcaccgaagcatcaggcgccactaggtctccagctccttctcggatgacgtccttcagcacgccccggtcccccgagatgtccagcatcctctgacttaaccgctcgtacagggactgatggagaatgaaagccaggcctcagagccgcagacccacccggccacccctcagcgtctacgcccccgaaacgtctgggccctcacctggccgggggcgtcgtccccttccaggactccctggtttaacgcgcttccccccatgtcctagctgccctccctgtggcgtgagccttcggcctggtgcgccccgctgcccttcctggctgtgactctggtggggttccgaaggcccctttatgcccggcagacccctaccgacggcggcattmcattctggggccacgaggaggcactcatcgtttcgttccaaccgccgccaacggccctggccctcgcgagctctggaactacagaggtcgcacggtgagttgccaggtgtggcccgtaatcggagcgcacaaaacatgatgggacacgtaacgggaccacacagggcacattgggcacttgcaggggcgcgaggtggcggcacgtaatgggagcgcgctgagcatgatggggcatgtgcgggagcgccaggcggggcatgtaaccagagcgtgcggggcatgatggggcacggacatggggggttaggtggggcacgtaattggagctcgcggggcaggatggggcatctaactggagcgacagagagcacgatggggcacttacaggggccggaggctgggtacgtaatgagagcgagcgggaaatgatggggcacctaacgagcacgcagagcatgatggggcacgggtgcgaggtggggcgcacagtgggagcgcgtggggcatgatgggacacatggcgaggccgtcagggcacaggggaagcacttttggaacacgtgagtgacagggctgccgcccttgaaggagccctc

SEQ ID NO: 70378 - DNA, 692 bp, Homo sapiens
tcaggcttggcaggaagaaaacggcaggagcagcacccactggggtctccaaggcaaagctagattcaagggcatttaaaaaggagggaatcctgcaaggaaccggtgagggacacagcagcaagaaatggggaaacagagtccccagaagggaccagaggaagagaaccacttctcacagctaagccaagcaagataaagctttagggataacccatttcccaaatcccatcaggtgcacaccaccgatccaggcgggctggaccctgccccctccagcgacgacggctctcggggaaaggtggaaggggcgcctgcctaagggtgcgctaagcgggagtcagggcagcggacactatgtacaggtccttagttctccagcctccccagtggaactgttcaagtagaggtcccgggctttggccctccgcatcctgcttccccttccctgaggcttgtgcttcctccagaagggaaagggccccagggctgccactgccccctggcggctgaagccagagatccggggtaggtttgctttacgcagctggaagggtccaaggctctttctagcacrtgccaaggtccagatttagggaaggggtggggggaacagggacaggggacaaaggctactttttgcgggtgtgctgccttcgggcctgcagtcgctgtcgagcccctggggtctt

SEQ ID NO: 70379 - DNA, 546 bp, Homo sapiens
gaggtgttgatcttgccagtgaacctctggtacagcgaagccatcgggcaccgcgctcctgctggctgtctttggggctttttaatattttgctttctctccggttcccactccccaccccgctccagattaaaaaaaaaaaaaggcggtggggaggcagcagcagcagcagcagcaaggcaagcccagcgccggcrgccgctcctcccgcgcgccactcgcgagtctccgctggcgactctgcctggctcagcctcctccgccccctccccggcggctcgcgaagccggggctctggctgtgctttctctctttcctgtttttataatttttttccccaactccttgccacagccacgtacggcctaatcaaagagattgaaggaagaaaaaaaaccaaaaacataaagcgagggaaatgcctaggccccagaatttggcaccacctagagaccggcacacattccgagcgctctcctcgctccccgcccccaggcccctcgcgcagctcctcctccaccccggcccctccgcccccttccccac

SEQ ID NO: 70380 - DNA, 973 bp, Homo sapiens
tgcatgtgtgtgaataatgtgaatatagaattaccaagtataccggggaaggaggaggtagggggagagagctatgacttcaagttaagaaaattggaaaatcttgtgaaaaagaaggtatgggacctgtattttaaataatggacagtatttcaagagataaatatgagggatgagaatttcagggacagaatgggccccttatagggtgaggaactgccttacagaagcaaggaaacaaaaacgtttagagcttttttggaggaagagcaagtaccccatttagtcatagtgtcaattgcatgtaggagaagagggtgaggatgatggaataattagagcataaaggacttcagccaattctgtgattaaactgacaatgaacatctgatagsctggaattgacatgattaggcctgggctctccatagtgatctgatggcagtgggtaggacggattagatgctggagaggagaacagcaggtgtggggcacaccaggggactgttccaatcatggaggatgcaagtgatggctataggaagaaaagggcattagttataggacaccacacttacactggagaaagaattgtcaaaatgtggtcactttactatatgtagtaaatgaaagagatattataagtgtcaaagatggataactagaagaacagggatattaataaaaatcagaagtcaggaataggaactagtgtgtgtaaggaagcccagtgaagtaagttattgttgataaaatgtgataggacatttaagtggggtttaaaagacaattgcaaatgaacagatagagctgagagcaaagtagaggtggccttatagatttgggaggtactatggtctgaatgtgccccccaaaatttatgtgctggaaacttaatccccaatgcaacagtgtttggggggtggggccttttgggaggtgttcaaatcatgaggctccacccttataaatg

SEQ ID NO: 70381 - DNA, 785 bp, Homo sapiens
tgcagaggagcaaagtccagactctgattgtcagagcagtcttccacggtcacctgtctcctaaccccagcccaatttcattttccagcctctgcccacaacacttccccagcacaccctcccaaccctggcccaccagtctgttttccacctcaaaggggccgtgcttgttcctttcacccgttatcccccatctctaggtccccagaatcactcactctagaatccttccagtgaaaactgcaggctccaccttgcctctcgtttgaccattcttgggttttcggggtgartctcttcccttcaatagctcccacccttcatttgcgcagtacgcagtacttaacttttctccacaggttccaaaggctgatttcttgcaagcaaaggccacctgatgtgtctttttttacaaatctctgctgaacaggtaacaggtgcccaataaaactttgtgagttggcagtctaagggcatctaccctcaaaacagctaacgtagcattttatgggagtggaaacggagttgtgtggaaagacgaccaggcactttcgtttttgagatggagtctagctctgtcccccaggatggagtacagtggtgcgatctcagctcactgtgggcatgcaccacaaagcctggctaatttttgtatttttagtagagacagggtttcaccatgttggccaggatggtctccatctcctgaccgcgtgatacacccacctcggcctcccaaagtgctaggattacaggcgtgagccaccacacccggcccaggtatt

SEQ ID NO: 70382 - DNA, 859 bp, Homo sapiens
ccagaactggattaaagtttgagggaggaaaatgaacattctgcaatgacaaatattctgggattctttaggttctattccttcatcctatctagtccattttagtataagtcattaatgaattctagctctttggtgaaggaatcataggggccaatgattcataactgaatcaatacaaacagcccagtctctaactaaacatttaatgattactcagtgttttttaggcaactgcacttttttccctgtgagcacgtttcacacttccaggacaagattagatagagttctttcccttatcagtccagkttctgcctgggtcttagccttttatctctgttctcttaattgagctttggttatgttcattgctgttattactgttgttgttatcatttcctagcagtctggtgggttgagttgacagcctttagtgctgcctccagatttcagcttagtacttttcaaatttggatttttgttctagatatctttggaatgccatcaaagcagagattttctgatcttttcctgatagattctgaattagtgggtcatagttgggtttgagaatctgtatattttaaaagtgatttccaccctagttataaccctacccacaagtgtgcaggctcatacttgccctatgtcttgaacctaatgtgttaggattatataattaatgaaatttcctctagccctacaatggccccagccaatccctaaccctcaaacataaagtcactgtcttccacaaattactctattctccaagagaacaatgatctggagccaccgaggtgagcattgttcatgaatggaagcccagagagagcatttactccttgtttctaat

SEQ ID NO: 70383 - DNA, 659 bp, Homo sapiens
tatgcctgtaatcccagcatttgggaggctgaggcaggcagatcgcttgagcccaggagtttgagaccagcctaggcaacatggcgaaaccctgtctctacaaaaatacaaaaaattagctgggcctggtattgtgtgtgtgcctgtaatcccagctacttggtgagggctgaggtgagaggatcacctgagctttggatgcagaggttgcaatgagctgtgatggcaccattgccctccagcctgggtgacagagtaacaccctgcctcaaagtaaataaataaaatgttacacttttatagggcagctctgttacaatcttatgtggccaccattgtatatgcagtccattgttgaccaaaatgccttatgtaacacatgatttcatagggaaagaaagcctcttccttttggtcaatgaaagaaggtggagtgaagaaaggtgagagtaaggagaggaaatataagatgtttttgttctgatttcaggtatagaggaacctagggacagagggactccagatttttagccatgtggatacctagaccgaggaaacctcttgctggaatttggttcctttttgatgtggaaggagyccataattcccagctctctgggggtgtgggaaggcagctgacctgtgagtcagtgggccag

SEQ ID NO: 70384 - DNA, 611 bp, Homo sapiens
gattatcataagccattttgtgataaaaatgtrtgtgtgtgtgtgtgtgtgtgtgtttatgatgttttcaggcaattttcaaataataggctcttagaagtaaaattactaatccaggaattattttgtttcaaatctctttacttgtttagggaaggatatggctactttgaaatggaaacaaaagattttaaataagaaacaatgaataacattatccacagaaaatcagagattgaaccgtcaacattaacatggcatttatcttttatttttatttacattatttttttagacaggatcttgttctcttgcccaagctggagtgcagtgttgtgatcatatttcactgcagactggacctcccaggctcaattgatcctcccaccttagcctgagtagctggaaccatgggcagggaccagtacacctagttaatttttgattatttgtagagacagaatctccctatgttgcccacgctgggtcttgaaatcctggcctcaagcagtcctcctgcctcagactcccaaagtgctgggattacaggtgtgagccaccgtgcctggccagtatctttgttgaagtcttcataaaatcttaacagattt

SEQ ID NO: 70385 - DNA, 532 bp, Homo sapiens
agagcaatggggaaagataacaataaaaacatctacggtcatatcacaaaggcccactactattcacattatcatatgctcacttgtagatattttcattttggatacatgaatattaatatgattttatggactatagatatatttacatgtatagtgttctgtattctttcagttcagcttatattctgagcaacttcccatgtcwttggagaattttttctttacatatattttttgagacaagatcttgttctgtcacccaccctggagtgcagtggcacactcatggctcactgcagcctcaacctctgaggctcaagcaatcctttcatccccagcctcttgagtaactgggaatacaggtgcacaccaccatgcctggctaattttgtattttttgtagagacggggtttcaccatgttgcccaggctggcctccgacttctgagctcaagcagtccacccacctcagcttcccaaagtgctgggattacaggcgtgagccactgcacccaaccaaaacatgttt

SEQ ID NO: 70386 - DNA, 554 bp, Homo sapiens
atttaacttcaaatatgccaaaagcgtaaagagtcagccactatgcaaaaggacttagtatacatgtatatagccatgaagaattcagatattagaatttatatctctttagttcaaagcaatgcatttcaatcttagtgggccatttactttcacgtgcaatatactattgcacacttttgaaaatgagatgaaagtcaataaaagaaagatgaacatccaattcccaaaacttaaaaaaaaatcaattcaargtgtatgcctatttgatgataggaggttagagaaaacctccgtattgtgaaagctttcattatttgatttttcgtatgtaataagcagtataaaatgatggacatgcctcctgtctccaataccacacaaaagtaagtaagagaaaaaacctttctgttccatctccctacaataattgcttcagaaaccacagttaatcttgggatacaccattattctgctgcttgctagtggaccatacaatgtgagaaagttatttttatcttgagtggcaacaattcagcaggatagacttgcca

SEQ ID NO: 70387 - DNA, 854 bp, Homo sapiens
gcatctgagatcgagctggaagagcatcccaaactgataccttcgatgcaaggaaagtcttcctcttggtgggatgcacagggatagttaagactggaggcagcagtgccaggtagagtggctttctcatgaggatcatcagcatcaggggtaacagcatggtgacaagatgaaaaattaaaggtataagaaatcgaggggcttattctagagcattcatgaaattgctaagaatactgtgagtcaggttagtttctagcagtaataatatgggctgatgttataataatttgggttaaaaaaatgaaagtgtaatctcatttttatgtcataggctttttaagtcatgaggctgccaacataaaagacatgccattgctttaaaaatgtgtttaaccgccgggcacagtggctcacgcctgtaatcccagcactttgtgaggccgaggggggcagatcacgaggtcaggagatcgagaccatcctggctaacacggtgaaaccccgtctccactaaaaaatacaaaaaaaaattagccgggcgtggtggcgggcgcctgtagtcccagctactcaggaggcttaggcaggagaatggcatcaacctgggaggcggagcttgcagtgagccgagatcgcgccactgcactccagcctaggggacagagcgagattccgtctcaaaaaamaaaatgtgtttaacctgcattgccaatgagtatcgttaattgtgtatgtataattattaggtataaacacgtatttcttatgtatacatatgcactagaaatattcattgactgttttcctgctttgccaaatcagtgacacccagtctctagaagttattgtat

SEQ ID NO: 70388 - DNA, 2401 bp, Homo sapiens
cattgtcatctttaaagttatataatagattgggagtaattttgtgtccatgatttattgtttcgtactttggcattttaacatatagtcataatttccaagattaatcagtccacatgtactaaattttacttctatacttatatttcaaatatggtttcccctttttgctcctttaacaaaatatttaatgagggaaacaggaatatcaatacaagagtggatagcgaaatagcactttatgattctgtaactcaaatttgttttgaagaggatttctaaatttcaagtatcttcagccgtagtgtaagatttcaaataaagctttattggagaagataaaggtattaaggacaagttatttggactgacaagatgggaatatttaaagtatacataacagattctgaaaaactaggacatgtgcttcagatgtaagatttcttactgtaattcttaaaggctaagacatttgtctagtatagcacaagataagtttgagtttcattgctgccagctctttatggcagtcttctgtgaacactcttggtcctaaaaaatacagcatgtgtaaagtttactgacaagtgaggatacatagattgtcgggttgcggacagtaagttcaaacttatcaaaatctgtccaactgtattcttgcattcatttgtattggttattagtacagtcttcttggatgtagaaatgcaacattcattgcattcattttatgaattatataattttgttttaaaagtcctagatgcttggccagttttgaaactttcatcatcttgtagaaatctattacaggatttattctgcaagcaagtttcccttcaaggaagattttagtttttaacttctaaattgtttgatgattcagattgtgcatgcaagcctatcccaggttttagtagctaaatgagctattatgcagacaagcctgagctttggaaggcaacttggttgtactagtgagaatatttaaatagtagtttatttctgcttgttccacccagtctttaactcactcctgccagccaccagttttcctgccatgccatgaaagcctgtcatttacaaccgatgactattttagaaccaaaccgtagtgaaataaggctggagtcggggggatgtagggagctgagactgcccagggctgtgtgaggacttattagaccctttttctttctctcttttttttctgtaggtaacatgtgcaccctgtaatagacattgcaaagagtacaaaatgggagtatagtgaaagttaaattttcttctctcctgttttcttgttcctttccccacaggcagttgcctttaccagttttcttatgcatctttccagagatccaatatgcaaatagaatcacacattttttacataaataatacctaatatgccccctgttatttattttgtcttttccattaacaatatattatagttggttccatattagtacatagcgatttattggccttattggctgcattttgtatctgtactgtaattccagttctttcctggagtttgaagttatttttagtcatttgctacaaacaatgtcacaatgaatctccatgcccgtaagtctttgtatgtataaatatacaataaggctgggtgcagtggctcatacctgtactcccagcactttgggaggctgaggcaggtggatcacttgagtccaggaattctagactagcctggacaacatggcaaaactctgtccctacaaaaaatataaaaatcagccaggtgtggtagcatgtgcctgtagtcccagctacttaggaggctgaggtgggaaggtcgcttgagcccgggaggttgaggctgcagtgagctgtgattgtgccactgccctccagtctgggtgacagaaccagaccttgtctcaaaaaaaaaaagtgtatatctatctatatctgtatttatatcaatatagatatatgtatttatataratctatctatgtatatatatgataaacacctagaataaagttgccactggtcactctgaaacttctgaaaaataaccaatggcttccaagttcagttcaaccagttaactcaatgaacacattactcatgtattgatcctgggggctttcaacaatcagacatggcctctgccttaaataggttagggccactttcatgtgatggttatgcttcaagacaaagtgctgggtgacaaatcagaggtgccattgaatcttgaggaagtccacaacagggaaaaataacttgtaacttcagtaatcaaggagaaattagaggatgggttgagattagaattagatatgggaagtggcagagaagggcatgtggggagggtgcctggaagcatggatgcaccaaagtgcatgaaggacatactgca

SEQ ID NO: 70389 - DNA, 1115 bp, Homo sapiens
tccccaaccagtgtgatacatttgttgcagttaatgaacttggaataacacatcattacccaaatttcatcatttacatgaaagttcactcttggtgttgtaaatctctctttaaagatatgrccttgctgtattattatttgccaagggatcaaggacctgctcagggccaccagtgtcagcaactagattctgaataaatatttgattaataaatgaattactacaagttattgatagaatataggcagaatgtttttttgttttttttctcttcagattttataggttcttaacaaaaaaccaaaatgaagacataatgtttttaatgtaatggtaaagaggaaacttctgtgttttgaatactctacttgaattgtcattgctgtaaagagaaataattttgattatttttgtttttactcaggtatgaagaatttattctcaaattaatactcatgcttatgagtgtataaatgctcatatattgatttaataaaggtttctgttacttgataggatgggctacttgcattgtacaatttttttttaacattttcccctgtctttcacagttcttttattcttacacagagttagaaagatgtaagactaaattcaccacctaaatttaataaataatattttgtaaatatatttatatcatttgaccccataattctatttttcacaattattataaggagataatccaaaaggcggaaaactaagtgcccagtcacgtcttttgtggtattatttataaacataaatcttaatctaaaatttctttaagatgagcagtgttgcaaagaatctgattatggggatgtgatgtgtctcattcctttttttttttttttttttgagatagagtctcactatgttgccaggctggactgcagtggtgtgatctcagctcactgcaacctccacctcccaggttcaagtgattctcctgcctcagcctcccaagtagctgggattacaggcacgtgccaccacacctagctaattttgtatttttagtagaggcggggtttcaccatgttgatcaggatggtctcaatctcttgaccttgtgatccaccccgctcggcctcccaaagtgctgg

SEQ ID NO: 70390 - DNA, 2262 bp, Homo sapiens
ttatttgtatatgcaggtaggcttgtgtatcagctgggttcaatcagaaaagcagagtcactgtttatctgtatttcttcatatctgcaaggctgttcttcatgttttatgctggagcttaaggctcacaaagcaagagtcaagaaagcaagatggatgtggaatgggggagaccaagagcaggctggaacccactagtgtgagctgggccttcacctggatggacagatgactggtcttcagggagcaggtaagtctaccattggtagactcccgtcattcttgtcgcttccaaccctgatgaagtcggtggcctaatgaagccaggggtccctccctatgaagataaatgcacacaactgtcccaggagctggaacagctggaggaggattccagagaaggcggaatgcttgcaggccccgctgactcacaccaacaggtgaggggaagggggaagacacgggtccctccttatgaagctaaaagcacacacatgacccaggagctggagcagctggaggaggtcccggggaaggcagaatgcttgccaacaggtgagggggagaggggagccaggtactccttgatgatgcactagaactgccaaatggctgtggcttcccctctgccctcaaaatctcccgtttgtcttttgtggtccaacctaatgagaaacatacagaagagggaatcctgggaacatakttcagcttagtcaagttgacacattataaagccatgatttcaaaataggtttcaaaaaatgttggccctttacctctaaattcttcagccttcatgcccaaggcccactcttacatgacagaagagaacagtagaccaaggaacgtacaacggcaaatgctcagctctcatgagtggcatggatgtaagtgtttgcagcaaggccatgcatgattgcagtttgatgctgctctcatttaatacaataccttctttttaaaaaaaagattttgttagattcatctggtctggtatggagatgatttttattttcctctactaaatgtaggatgaaaccatcaaaattgttttgacacataacgaaactttaaaaaatttcttcaggaaaaagcagcacaaaacttgtggtggggacactgctttccaactagtagcttaagctttaggattagcctattgacaaatatttttttctcctgttctcaagctattacagcaaaatttccattctggaaaaggcaaaccattccaaatctttcttcttaagatcagtactagagaccggacgcggtggctcaagcctgtaaacccagcactttgggaggctgaggcaggcggatcacgaggtcaggagattgagaccatcctggctaacacggtgaaaccccgtctctactaaaaatacaaaaaaattagccgggcgtggtggcgggcgcctgtagtcccagctactcgggaggctgaggcaggagaatggcgtgaacccgggaggcggagcttgcagtgagccgagatcgcaccactgcactccagcctgggcaacagagtgagactccgtctcaaaaaaaaaaaaaaaaaaaaaaaaaaaaaaaagatcagtactagagctcttatgaaatatcactctaccctgttctgctttcttctcttggtactgcttgcatagccattgctagaagaaagactaaaactattaaaaaatttatgtattttctctcattagagtcaaaatatccctttagccacagaaacttgagctgaattagaaacagcagatgaagaatttgtaaccaagcaaaactccatagcaacaagtaattaaagttgattataattgcaagacatttattaaggatttctttaattcctaaggaaaattcaacatgaaaggacatgtctcaggatttcaaggcacgtaagttggcaacaagtaaaaatcattcatgttagattcagtcattcaaaaaggggtgcatattttaagcttgagaaaaagctttgctgtgagaaatccagcaaagtccactgtcccatttaagcccaggttgaattctgcatataagctggttgcaaccttgagtagattcttcctcagtgacaacttcattcctggtggtatgatttccagacagtgagcaaaagcttatttaacccacaaatacccaaattacagctctaatcatactatttttactacatctagctgcactgttttgtgaaaaatacattgtgacttccaagttgcaatgtcaaaaacatctttccagaacccaaga

SEQ ID NO: 70391 - DNA, 673 bp, Homo sapiens
ccacctaccagcttggacttttatgtgagagagaaataaatatctactttaagttatcattgtttatctgtgttaatacaaccaaagcaatatttaacctgacagagtactcttccaattgtattacccaatatggccctataggggtatgtagaagtctcaggctgtcaccccctttgctggatgtttttaatactgaagctgggagaagttctttctgctgaggtcactaaaagcagacaatgtaagggcctggcacggtggctcacacctgtaatctcagcactttgggaggccaaggcagatggatcacaaggtcaggtttcaagaccagcctggccaacatggtgaaaccccatttctactaaaaatacaaaaaytggcctggcatggtgccatgtgcctgtaatcccagctactcacgaggctgaggcaggagaatcgcttgaacccaggaggcggaggttgcaatgagctgggatcacgccactgcactcctgcctgggagacagagcgagactccatctcaaaaaaaacaaaaaaaaaagtggacaatgtaagcctttagctgcctgaggtcactgttcttaccacatggaagaagcctatctgcaaaaacaaagtacagtgccaacaaatgaagatgatgagatgggagggaatatcctaaaaa

SEQ ID NO: 70392 - DNA, 584 bp, Homo sapiens
agaggagagtgatttacatttgtagccagcagttctgcagagcacagtttgtggccttgcattccttacaattctgagcttcctgattgttctgcacttttgtgtgcccattaagatcctgtcatgctgtgaaattccttgtatctatgaatcctgtctcttggaggggtttgtcctcctttcctctccatttgtctcagctggagaatggcctttaacattcctttaaggcccgtggtcccacagggaccactatggcccttacagcatgctcctcaaaaccttgcttttcctcagtatttgaaatttctaggccttgcaaactcagcagcagcgcagacatgttcctttctgtcacctatttgtgtcaaaatgggctatgtctctagtgttgcattttcctctrtggtacatctgttctttcaggcagcctcagctgacttgttaacctgcttaagttggatcttttcctttctacatcaggtagctgacctttttagattagaatacctttctttttcttttccttatgattttggtgtttgttttgcttgcatacatattcctctaatgcctttcctaca

SEQ ID NO: 70393 - DNA, 2048 bp, Homo sapiens
aaaccaaagaacaaattaaaaaacctaaaactgaatatagaaaatgttgctcctttatgttccgctctctttcatctttctcagatattgcctacatgggagcacaaacccagtcaatatcatggaaatgtaggctatgaagtctttatttatgaactctgggtataggagatttattattttacagtggaaagaaaaactagctgagctgtattctacagtgatgatatgtaattcatattatcaagtagagtyaacctgagtacttaattccaccatattataataaaaaattaaaatactgaccatgattttatgggctggttgttgatgaaagatgtgattgcagagaaaatttcaaataaatttattcattaatatatcttaccaaatttaatagaaaattgaaacaattttcttggcagctattgatgtatgaaaaaatatatagtcaatagtattttggggattcagaatactatctggagaaaagccatgaacttttgcaacactaacttaaatatgacatctatgtatttgagatggtgacaagaagcggtggcagaaaagcatggcactataaaggatgttgtctggtaaagacttagcaagagtcgtccttggtttaagtttgcaagcggcattacaaggtcaaaacatgatgaacctagtaggtttttgtctttatatttctagtaatctgtagaaagggctggctacaaagaaagatttgggaagcaactatatatggaggacttcaaaatatgcatctccagcttcaacttctagaagcctgtgttaatctacccatccaactatttatcatcatcattatccatttgaaaatgcttatgtaaacatcctggactctattatagtgtaaaggctgatatatagattttaacctctctacttaccccttaaaaacagtaaatatctactaagagagaaataaagccacccataacctacacctacaacattatgaggagaaacaaaatagtatgaacttcaaaagttatatataagtagggatgtgaatgctccaatccagtgcagccagctagtgccagagtggagactgtgcagaaaggagggtagggtgtagcaggtgtgaggtaaggtgggaaaacagaaaaaataatgctcagaaaggtaaattcccatcccgagtgaagaaatgtttctagcaaacctgcttgattagaacacaagtatgaagaattgaaagaaagggggttgacagtgagcagaataacattcttgggaaggcccagcttctgaagaagagggggatgatgttagtgggagagggggctgttccttggagacttggctatgaaggaaaaaagtatgaggtgaatatcaaatatctgcagataagttcataagacacaccaactactctgcaaaaaataataataataataaaaaataaaaaataaaaataaaaaaggcatccactgaggaatctgtacttcatgaaagcaacagaagggggtgctcatgaactaaaaaatgtagtaatccaccaagtcctttacttttgcttacatgaaactgttatcgctggtctaggaacaaaagaaatatcaaactaaacaaaaaaaaagagcagactatttatagaaagttactataagaaaataatcagaaaatgatagccaaaacaattcagctaatgaaaatttctctcaagagaaaacaaaaacaaaattgcaaacaagaaagttgtaataaaacctagagatattttgaaacaaatacttataaataaaaacaccactttgaatcacatatttaaaagctttgaacattaatggacaaagaacagacagatagtaaaagatagttgacaaaaatgatgaaataaaatttaaaaaaatctgaaatgaccaaattacaaactgccaaagagaaaatagagtgaacctaaaatataaggactattgaggaaagccatgacaatagccaagagaatgtaaatgaaataaacaaaaaggtaaaaagaatcagagaggtcaataatatagaaggtaggtagagat

SEQ ID NO: 70394 - DNA, 2048 bp, Homo sapiens
aaaccaaagaacaaattaaaaaacctaaaactgaatatagaaaatgttgctcctttatgttccgctctctttcatctttctcagatattgcctacatgggagcacaaacccagtcaatatcatggaaatgtaggctatgaagtctttatttatgaactctgggtataggagatttattattttacagtggaaagaaaaactagctgagctgtattctacagtgatgatatgtaattcatattatcaagtagagttaacctgagtacttaattccaccatattataataaaaaattaaaatactgaccatgattttatgggctggttgttgatgaaagatgtgattgcagagaaaatttcaaataaatttattcattaatatatcttaccaaatttaatagaaaattgaaacaattttcttggcagctattgatgtatgaaaaaatatatagtcaatagtattttggggattcagaatactatctggagaaaagccatgaacttttgcaacactaacttaaatatgacatctatgtatttgagatggtgacaagaagcggtggcagaaaagcatggcactataaaggatgttgtctggtaaagacttagcaagagtcgtcyttggtttaagtttgcaagcggcattacaaggtcaaaacatgatgaacctagtaggtttttgtctttatatttctagtaatctgtagaaagggctggctacaaagaaagatttgggaagcaactatatatggaggacttcaaaatatgcatctccagcttcaacttctagaagcctgtgttaatctacccatccaactatttatcatcatcattatccatttgaaaatgcttatgtaaacatcctggactctattatagtgtaaaggctgatatatagattttaacctctctacttaccccttaaaaacagtaaatatctactaagagagaaataaagccacccataacctacacctacaacattatgaggagaaacaaaatagtatgaacttcaaaagttatatataagtagggatgtgaatgctccaatccagtgcagccagctagtgccagagtggagactgtgcagaaaggagggtagggtgtagcaggtgtgaggtaaggtgggaaaacagaaaaaataatgctcagaaaggtaaattcccatcccgagtgaagaaatgtttctagcaaacctgcttgattagaacacaagtatgaagaattgaaagaaagggggttgacagtgagcagaataacattcttgggaaggcccagcttctgaagaagagggggatgatgttagtgggagagggggctgttccttggagacttggctatgaaggaaaaaagtatgaggtgaatatcaaatatctgcagataagttcataagacacaccaactactctgcaaaaaataataataataataaaaaataaaaaataaaaataaaaaaggcatccactgaggaatctgtacttcatgaaagcaacagaagggggtgctcatgaactaaaaaatgtagtaatccaccaagtcctttacttttgcttacatgaaactgttatcgctggtctaggaacaaaagaaatatcaaactaaacaaaaaaaaagagcagactatttatagaaagttactataagaaaataatcagaaaatgatagccaaaacaattcagctaatgaaaatttctctcaagagaaaacaaaaacaaaattgcaaacaagaaagttgtaataaaacctagagatattttgaaacaaatacttataaataaaaacaccactttgaatcacatatttaaaagctttgaacattaatggacaaagaacagacagatagtaaaagatagttgacaaaaatgatgaaataaaatttaaaaaaatctgaaatgaccaaattacaaactgccaaagagaaaatagagtgaacctaaaatataaggactattgaggaaagccatgacaatagccaagagaatgtaaatgaaataaacaaaaaggtaaaaagaatcagagaggtcaataatatagaaggtaggtagagat

SEQ ID NO: 70395 - DNA, 682 bp, Homo sapiens
cttccttacaccttagacaaatctttaggaattaatattctcagtgagttgtatgaggacatggcgtctatgtaagagaaccatctccaatgagtagattccttccagataaaatacacaatgcttgattctgtttctgatgctaagtaactcctaatgagccaaccctcccacagagaataatcataaactctggacaaaatatttttaaaactcctacataaaggtactgaagagtgaccaaaagtgaacaaagagtggagggagtttcaacacatagaaggaaggaatggcactgggtgagtgtcctgttttttaaaagctttttattttgagggttggctccagttgacaccatcctaaaactctaacagaaagtagcagtcttggccaggtgcagtggctcatgcctgtaatcccaacactttgggaggctgaggtgagtgggtcacttgaggtcaggattttgataccagcctggccaatayggtgaaactctgtctctactaaaaatacaaaaattagctgggcatggtggtgggtgcctgtaattccagctactcaggaggctgaggcaggagaattgattgaacctgggagacagaggttgtggtgagcctggattgtgtcaactgcactccagcctgggcaacagagtgatactctgtctcaaaaaaaaaaa

SEQ ID NO: 70396 - DNA, 2084 bp, Homo sapiens
tgaatgacagaagacttctcattaaaaacaacagagacgagaagacagtaactatgagccagaaatatacatgcagcaaaaatatccttcaaaaataaagataaaatttcagacaaacaaaaataactcatcaccagcacccatgtactgtaaacattgctaaaggaagttctttagaccaaagatgggcagggtattgtggtgttgtataccatatgttgatgttatacttgacaatttatagcatacagggtgggggagttggtaaatgaacaaagatacctacaagatttctacattttacatgaagtggtacaatataactttaagtagactgaaaaaataaggatgtaaagcagacaaaaaatgagaggtatagcaaaatgctaacaaaaatttatatacatatatatgtgtgtatatatatacacacayatatagtttgttttttgaggtggggatctcactctgtagcccaggttgaagtgcagtggtgcaatcctaaatcactgcaaccttgaactcctagtgtcaagagatcctcctgcctctgcctaccaagtatctgggatcacaggcacatgccaccatgcccagctacatttttaaaattaaaatataattcttaaaattcaatagaattagtaagagacagactggtacatgcataaaaatgactgaaaactaggagatgtgtgagaaattacttaagaactaagtgggaaaagaaaaagaaatgaatataataaacaaaatgtcaaggaagacagatccaagaaatactacatagatgtaagaggtggttgcagttggactcttaatgtcttaagttttgtctggggttctaaaaaagatatatatctgatacaaagtcaatatgtggcaagcatatatatgcagttttctaaggaatttgtaggaaccagttccacaacattgaacctttcagccatcatgaatataaagagcggacaagttgcagagagaagaaaaaaaatggatgaagagatttcattggagaacactgtttccctgctgggtatccccattccttcttgggaggaagattgaggacactaaatttcactcctaagcagtaagaagcctgcaaggagatcactcacagagtagtgtcattatatttaacaaatacagacacactgtgacaggtactgttctaagtgtttcacatgctttacttcatttaatccttaaaataaacctttaaggtaggcactgttactatttctgtgtattagatgaagaaacaagcatggagaggttaaataagttgcctcagtttctcatacagttcaaagtggtgccaggtttcaaattcagcctgtctagctccagagtgtacactcttgaatgctgtgctatgcatctggaaaaggagtcccttgcatctgggagatgcatggctcatgcatgagaacatcaacactgactgtggaatgggctgtgcctccaggtcaagaactctagtgagcaagacaggagttgaccccagtatttcatcaattataagatgaatgatttttcccaatttgtcatccttgcaatcaagatacatgttataattgatgacaggtcttagtttaattggtagagagttttttcttattataaaataatgagagtcttaaacctgatggtatctaatatttgatgacagtggacatatggaaaaggtaatgccatctgatgaaactactggcccggctgtgagacacacatatgcagccataacaacgtaaacactcctgattggctttctgctttgagaatcaacaatgagacaaatagggagacaattctggtcacatagcaaattagaaatattagcaaaccgagtattttgaagataaaaatgtagctgttgagaagtggttgatgggaagtgtgaagaaaaactggtgaaaagtgtagggactttcttccaaagagaaaaatagatggcatgctcaaactgggtaaccaggagtggtgttcttgaaagtatgagcaagttttagtaaaaccaacaatgaatagtgccaaatcctaggcttggaaacatcagggtgacattgccactctta

SEQ ID NO: 70397 - DNA, 2084 bp, Homo sapiens
tgaatgacagaagacttctcattaaaaacaacagagacgagaagacagtaactatgagccagaaatatacatgcagcaaaaatatccttcaaaaataaagataaaatttcagacaaacaaaaataactcatcaccagcacccatgtactgtaaacattgctaaaggaagttctttagaccaaagatgggcagggtattgtggtgttgtataccatatgttgatgttatacttgacaatttatagcatacagggtgggggagttggtaaatgaacaaagatacctacaagatttctacattttacatgaagtggtacaatataactttaagtagactgaaaaaataaggatgtaaagcagacaaaaaatgagaggtatagcaaaatgctaacaaaaatttatatacatatatatgtgtgtatatatatacacacatatatagtttgttttttgaggtggggatctcactctgtagcccaggttgaagtgcagtggtgcaatcctaaatcactgcaaccttgaactcctagtgtcaagagatcctcctgcctctgcctaccaagtatctgggatcacaggcacatgccaccatgcccagctacatttttaaaattaaaatataattcttaaaattcartagaattagtaagagacagactggtacatgcataaaaatgactgaaaactaggagatgtgtgagaaattacttaagaactaagtgggaaaagaaaaagaaatgaatataataaacaaaatgtcaaggaagacagatccaagaaatactacatagatgtaagaggtggttgcagttggactcttaatgtcttaagttttgtctggggttctaaaaaagatatatatctgatacaaagtcaatatgtggcaagcatatatatgcagttttctaaggaatttgtaggaaccagttccacaacattgaacctttcagccatcatgaatataaagagcggacaagttgcagagagaagaaaaaaaatggatgaagagatttcattggagaacactgtttccctgctgggtatccccattccttcttgggaggaagattgaggacactaaatttcactcctaagcagtaagaagcctgcaaggagatcactcacagagtagtgtcattatatttaacaaatacagacacactgtgacaggtactgttctaagtgtttcacatgctttacttcatttaatccttaaaataaacctttaaggtaggcactgttactatttctgtgtattagatgaagaaacaagcatggagaggttaaataagttgcctcagtttctcatacagttcaaagtggtgccaggtttcaaattcagcctgtctagctccagagtgtacactcttgaatgctgtgctatgcatctggaaaaggagtcccttgcatctgggagatgcatggctcatgcatgagaacatcaacactgactgtggaatgggctgtgcctccaggtcaagaactctagtgagcaagacaggagttgaccccagtatttcatcaattataagatgaatgatttttcccaatttgtcatccttgcaatcaagatacatgttataattgatgacaggtcttagtttaattggtagagagttttttcttattataaaataatgagagtcttaaacctgatggtatctaatatttgatgacagtggacatatggaaaaggtaatgccatctgatgaaactactggcccggctgtgagacacacatatgcagccataacaacgtaaacactcctgattggctttctgctttgagaatcaacaatgagacaaatagggagacaattctggtcacatagcaaattagaaatattagcaaaccgagtattttgaagataaaaatgtagctgttgagaagtggttgatgggaagtgtgaagaaaaactggtgaaaagtgtagggactttcttccaaagagaaaaatagatggcatgctcaaactgggtaaccaggagtggtgttcttgaaagtatgagcaagttttagtaaaaccaacaatgaatagtgccaaatcctaggcttggaaacatcagggtgacattgccactctta

SEQ ID NO: 70398 - DNA, 2084 bp, Homo sapiens
tgaatgacagaagacttctcattaaaaacaacagagacgagaagacagtaactatgagccagaaatatacatgcagcaaaaatatccttcaaaaataaagataaaatttcagacaaacaaaaataactcatcaccagcacccatgtactgtaaacattgctaaaggaagttctttagaccaaagatgggcagggtattgtggtgttgtataccatatgttgatgttatacttgacaatttatagcatacagggtgggggagttggtaaatgaacaaagatacctacaagatttctacattttacatgaagtggtacaatataactttaagtagactgaaaaaataaggatgtaaagcagacaaaaaatgagaggtatagcaaaatgctaacaaaaatttatatacatatatatgtgtgtatatatatacacacatatatagtttgttttttgaggtggggatctcactctgtagcccaggttgaagtgcagtggtgcaatcctaaatcactgcaaccttgaactcctagtgtcaagagatcctcctgcctctgcctaccaagtatctgggatcacaggcacatgccaccatgcccagctacatttttaaaattaaaatataattcttaaaattcaatagaattagtaagagacagactggtacatgcataaaaatgactgaaaactaggagatgtgtgagaaattacttaagaactaagtgggaaaagaaaaagaaatgaatataataaacaaaatgtcaaggaagacagatccaagaaatactacatagatgtaagaggtggttgcagttggactcttaatgtcttaagttttgtctggggttctaaaaaagatatatatctgatacaaagtcaatatgtggcaagcatatatatgcagttttctaaggaatttgtaggaaccagttccacaacattgaacctttcagccatcatgaatataaagagcggacaagttgcagagagaagaaaaaaaatggatgaagagatttcattggagaacactgtttccctgctgggtatccccattccttcttgggaggaagattgaggacactaaatttcactcctaagcagtaagaagcctgcaaggagatcactcacagagtagtgtcattatatttaacaaatacagacacactgtgacaggtactgttctaagtgtttcacatgctttacttcatttaatccttaaaataaacctttaaggtaggcactrttactatttctgtgtattagatgaagaaacaagcatggagaggttaaataagttgcctcagtttctcatacagttcaaagtggtgccaggtttcaaattcagcctgtctagctccagagtgtacactcttgaatgctgtgctatgcatctggaaaaggagtcccttgcatctgggagatgcatggctcatgcatgagaacatcaacactgactgtggaatgggctgtgcctccaggtcaagaactctagtgagcaagacaggagttgaccccagtatttcatcaattataagatgaatgatttttcccaatttgtcatccttgcaatcaagatacatgttataattgatgacaggtcttagtttaattggtagagagttttttcttattataaaataatgagagtcttaaacctgatggtatctaatatttgatgacagtggacatatggaaaaggtaatgccatctgatgaaactactggcccggctgtgagacacacatatgcagccataacaacgtaaacactcctgattggctttctgctttgagaatcaacaatgagacaaatagggagacaattctggtcacatagcaaattagaaatattagcaaaccgagtattttgaagataaaaatgtagctgttgagaagtggttgatgggaagtgtgaagaaaaactggtgaaaagtgtagggactttcttccaaagagaaaaatagatggcatgctcaaactgggtaaccaggagtggtgttcttgaaagtatgagcaagttttagtaaaaccaacaatgaatagtgccaaatcctaggcttggaaacatcagggtgacattgccactctta

SEQ ID NO: 70399 - DNA, 2084 bp, Homo sapiens
tgaatgacagaagacttctcattaaaaacaacagagacgagaagacagtaactatgagccagaaatatacatgcagcaaaaatatccttcaaaaataaagataaaatttcagacaaacaaaaataactcatcaccagcacccatgtactgtaaacattgctaaaggaagttctttagaccaaagatgggcagggtattgtggtgttgtataccatatgttgatgttatacttgacaatttatagcatacagggtgggggagttggtaaatgaacaaagatacctacaagatttctacattttacatgaagtggtacaatataactttaagtagactgaaaaaataaggatgtaaagcagacaaaaaatgagaggtatagcaaaatgctaacaaaaatttatatacatatatatgtgtgtatatatatacacacatatatagtttgttttttgaggtggggatctcactctgtagcccaggttgaagtgcagtggtgcaatcctaaatcactgcaaccttgaactcctagtgtcaagagatcctcctgcctctgcctaccaagtatctgggatcacaggcacatgccaccatgcccagctacatttttaaaattaaaatataattcttaaaattcaatagaattagtaagagacagactggtacatgcataaaaatgactgaaaactaggagatgtgtgagaaattacttaagaactaagtgggaaaagaaaaagaaatgaatataataaacaaaatgtcaaggaagacagatccaagaaatactacatagatgtaagaggtggttgcagttggactcttaatgtcttaagttttgtctggggttctaaaaaagatatatatctgatacaaagtcaatatgtggcaagcatatatatgcagttttctaaggaatttgtaggaaccagttccacaacattgaacctttcagccatcatgaatataaagagcggacaagttgcagagagaagaaaaaaaatggatgaagagatttcattggagaacactgtttccctgctgggtatccccattccttcttgggaggaagattgaggacactaaatttcactcctaagcagtaagaagcctgcaaggagatcactcacagagtagtgtcattatatttaacaaatacagacacactgtgacaggtactgttctaagtgtttcacatgctttacttcatttaatccttaaaataaacctttaaggtaggcactgttactatttctgtgtattagatgaagaaacaagcatggagaggttaaataagttgcctcagtttctcatacagttcaaagtggtgccaggtttcaaattcagcctgtctagctccagagtgtacactcttgaatgctgtgctatgcatctggaaaaggagtcccttgcatctgggagatgcatggctcatgcatgagaacatcaacactgactgtggaatgggctgtgcctccaggtcaagaactctagtgagcaagacaggagttgaccccagtatttcatcaattataagatgaatgatttttcccaatttgtcatccttgcaatcaagatacatgttataattgatgacaggtcttagtttaattggtagagagttttttcttattataaaataatgagagtcttaaacctgatggtatctaatatttgatgacagtggacatatggaaaaggtaatgccatctgatgaaactactggcccggctgtgagacacacatatgcagccataacaacgtaaacactcctgattggctttctgctttgagaatcaacaatgagacaaatagggagacaattctggtcacatagcaaattagaaatattagcaaaccgagtattttgaagataaaaatgtagctgttgagaagtggttgatgggaagtgtgaagaaaaactggtgaaaagtgtagggactttcttccaaagagaaaaatagatggcatgctcaaactgggtaaccaggagtggtgttcttgaaagtatgagcaagttttagtaaaaccaacaatgaatrgtgccaaatcctaggcttggaaacatcagggtgacattgccactctta

SEQ ID NO: 70400 - DNA, 2414 bp, Homo sapiens
aagttccttatggaaatattccatattccctgtgaagtaccttaagcagttaggattgttcacatttttcagatgctgaactttggctcagaggagtaaagtgacttgccatgaacaaccagctggtaggcaccagggttgggagttgaatgcaggtcaggtatatcaaagtttaagaactccttccctctaccacacaatgttctttaccccagatattacggagtcttagattgtcatttagtctaaaccatccaatgcttaaaatacctatacagtatccaataccttcttgtgcatcttcttgtgtatctagggcaggtgaagaagtaacttcataaatgctttccaataaaattatgctttacaggggaaggctagatctagttccttttactttggtgagattatgggagtaaaagtgagggcgaggctcaactttagctcaataacttgttaaaaaaactctccatgcagagtttcagatttacacttattctagtaattaaacaaatatttattgagcacccattatgtgtccagggcttgaagtaagacagaaaaagcctctacaaaaggcagatatgagagacacttaataggtatatatactccatgaatgcagtaattttctcctgttgtatttaataccatataccagatccttagaacagttcctggtacgtatggatgctcagtaaacattatggaattaattgattaactgagataatttcacgtttttaaaggttataaaaaacaaaatgggttagtagagtgtagagcgttgtggcacagtgagctgcattatagtgggtggccaggaaaggttctctgaggagagagcattgaacatcattgtcatctggtttgagaacagtcatggatcatttttttgaaattacttcagaaacagccactgaggaaaactcctgattcgggggccccatttatattttttatcacaaggaaccctagagtgtcctttggagtatggcgggaatgaacaccacacctcactgagggtccattgctagtgttttccatcaccattagccaagggattaatttatttttaagctataggctgaagccttgagaatgtaatttagtttcagtttaattttatagtaattttcttaaagagaataaaggcgacttctagaaagtgtatagaaattagcaaaattctaaaagttatataatccagaacttagtccttagaaacaagggtgatctaggtttgctgaacacatactgtagatattttcccatttagtctttggacatggatatagggctgactagtgaaaaatcaaagatttgacatgcatgctttaatggaaaaaacatgaagataggatcaggtcataagtattacttgtgtaatctacggtaagttattggaggccctcatacctcaatgttcccatcttcatgatgggcgtaataaaatctacccagcttggcagttgtaaggattatagacaatgtgttcagaataccatgaacaataatggcaagcagtaaatggcagttagttattagtactatggacgcatcttgaagtcatttttaaattctcttatgctatttctgtggacaaagatgtgaagatgtgagtgattatcaatgtatagtccttggtactctcttaagcaaaataagacattaagtaattttttaaaatggagattctttgagtcttatgaacaatggttgtgtaattacataggctttcattcttagacatgaccaagatcattactaataacatactaagtgaccaattgaaggctaataccagtagcgtgttagagtttactgagaattcttttttttttttttttyctgagacagagtctcgctctgttgcccaggctggagtgcagtggtgcaatcttggctcactgcaagctctgcctcctgggttcacgccaatctcctgcctcagcctcccgagtacctgggactacaggggcctgccaccacgcctggctaattttttttgtatttttggtagagacggggtttcactgtggtctcgctctcctgacctcctgatctgcccgcctcagcctcccaaagtgctgggattacaggtgtgagccaccgcacccagccgagtttactgagaattctaattccgttttctgttaaaaggtctagctgctatgcaatgctatgacaatgttgcaaggttcctactgtacatgcaaaaatataaattattggaattcttacagttttcaagaattatgatttgttaatatattaataacatcttaaattgaccatggtttttaatcgtgcctctttttgattaatttaaatgtaagttattgctaatttctctctctaaaaaattattgtatttatggttatcccttcagggtctagtagtgaatatatgc

SEQ ID NO: 70401 - DNA, 2414 bp, Homo sapiens
aagttccttatggaaatattccatattccctgtgaagtaccttaagcagttaggattgttcacatttttcagatgctgaactttggctcagaggagtaaagtgacttgccatgaacaaccagctggtaggcaccagggttgggagttgaatgcaggtcaggtatatcaaagtttaagaactccttccctctaccacacaatgttctttaccccagatattacggagtcttagattgtcatttagtctaaaccatccaatgcttaaaatacctatacagtatccaataccttcttgtgcatcttcttgtgtatctagggcaggtgaagaagtaacttcataaatgctttccaataaaattatgctttacaggggaaggctagatctagttccttttactttggtgagattatgggagtaaaagtgagggcgaggctcaactttagctcaataacttgttaaaaaaactctccatgcagagtttcagatttacacttattctagtaattaaacaaatatttattgagcacccattatgtgtccagggcttgaagtaagacagaaaaagcctctacaaaaggcagatatgagagacacttaataggtatatatactccatgaatgcagtaattttctcctgttgtatttaataccatataccagatccttagaacagttcctggtacgtatggatgctcagtaaacattatggaattaattgattaactgagataatttcacgtttttaaaggttataaaaaacaaaatgggttagtagagtgtagagcgttgtggcacagtgagctgcattatagtgggtggccaggaaaggttctctgaggagagagcattgaacatcattgtcatctggtttgagaacagtcatggatcatttttttgaaattacttcagaaacagccactgaggaaaactcctgattcgggggccccatttatattttttatcacaaggaaccctagagtgtcctttggagtatggcgggaatgaacaccacacctcactgagggtccattgctagtgttttccatcaccattagccaagggattaatttatttttaagctataggctgaagccttgagaatgtaatttagtttcagtttaattttatagtaattttcttaaagagaataaaggcgacttctagaaagtgtatagaaattagcaaaattctaaaagttatataatccagaacttagtccttagaaacaagggtgatctaggtttgctgaacacatactgtagatattttcccatttagtctttggacatggatatagggctgactagtgaaaaatcaaagatttgacatgcatgctttaatggaaaaaacatgaagataggatcaggtcataagtattacttgtgtaatctacggtaagttattggaggccctcatacctcaatgttcccatcttcatgatgggcgtaataaaatctacccagcttggcagttgtaaggattatagacaatgtgttcagaataccatgaacaataatggcaagcagtaaatggcagttagttattagtactatggacgcatcttgaagtcatttttaaattctcttatgctatttctgtggacaaagatgtgaagatgtgagtgattatcaatgtatagtccttggtactctcttaagcaaaataagacattaagtaattttttaaaatggagattctttgagtcttatgaacaatggttgtgtaattacataggctttcattcttagacatgaccaagatcattactaataacatactaagtgaccaattgaaggctaataccagtagcgtgttagagtttactgagaattctttttttttttttttttctgagacagagtctcgctctgttgcccaggctggagtgcagtggtgcaatcttggctcactgcaagctctgcctcctgggttcacgccaatctcctgcctcagcctcccgagtacctgggactacaggggcctgccaccacgcctggctaattttttttgtatttttggtagagacggggtttcactgtggtctcgctctcctgacctcctgatctgcccgcctcagcctcccaaagtgctgggattacaggtgtgagccaccgcacccagccgagtttactgagaattctaattccgttttctgttaaaaggtctagctgctatgcaatgctatgacaatgttgcaaggttcctactgtacatgcaaaaatataaattattggaattcttacagttttcaagaattatgatttgttaatatattaataacatmttaaattgaccatggtttttaatcgtgcctctttttgattaatttaaatgtaagttattgctaatttctctctctaaaaaattattgtatttatggttatcccttcagggtctagtagtgaatatatgc

SEQ ID NO: 70402 - DNA, 2414 bp, Homo sapiens
aagttccttatggaaatattccatattccctgtgaagtaccttaagcagttaggattgttcacatttttcagatgctgaactttggctcagaggagtaaagtgacttgccatgaacaaccagctggtaggcaccagggttgggagttgaatgcaggtcaggtatatcaaagtttaagaactccttccctctaccacacaatgttctttaccccagatattacggagtcttagattgtcatttagtctaaaccatccaatgcttaaaatacctatacagtatccaataccttcttgtgcatcttcttgtgtatctagggcaggtgaagaagtaacttcataaatgctttccaataaaattatgctttacaggggaaggctagatctagttccttttactttggtgagattatgggagtaaaagtgagggcgaggctcaactttagctcaataacttgttaaaaaaactctccatgcagagtttcagatttacacttattctagtaattaaacaaatatttattgagcacccattatgtgtccagggcttgaagtaagacagaaaaagcctctacaaaaggcagatatgagagacacttaataggtatatatactccatgaatgcagtaattttctcctgttgtatttaataccatataccagatccttagaacagttcctggtacgtatggatgctcagtaaacattatggaattaattgattaactgagataatttcacgtttttaaaggttataaaaaacaaaatgggttagtagagtgtagagcgttgtggcacagtgagctgcattatagtgggtggccaggaaaggttctctgaggagagagcattgaacatcattgtcatctggtttgagaacagtcatggatcatttttttgaaattacttcagaaacagccactgaggaaaactcctgattcgggggccccatttatattttttatcacaaggaaccctagagtgtcctttggagtatggcgggaatgaacaccacacctcactgagggtccattgctagtgttttccatcaccattagccaagggattaatttatttttaagctataggctgaagccttgagaatgtaatttagtttcagtttaattttatagtaattttcttaaagagaataaaggcgacttctagaaagtgtatagaaattagcaaaattctaaaagttatataatccagaacttagtccttagaaacaagggtgatctaggtttgctgaacacatactgtagatattttcccatttagtctttggacatggatatagggctgactagtgaaaaatcaaagatttgacatgcatgctttaatggaaaaaacatgaagataggatcaggtcataagtattacttgtgtaatctacggtaagttattggaggccctcatacctcaatgttcccatcttcatgatgggcgtaataaaatctacccagcttggcagttgtaaggattatagacaatgtgttcagaataccatgaacaataatggcaagcagtaaatggcagttagttattagtactatggacgcatcttgaagtcatttttaaattctcttatgctatttctgtggacaaagatgtgaagatgtgagtgattatcaatgtatagtccttggtactctcttaagcaaaataagacattaagtaattttttaaaatggagattctttgagtcttatgaacaatggttgtgtaattacataggctttcattcttagacatgaccaagatcattactaataacatactaagtgaccaattgaaggctaataccagtagcgtgttagagtttactgagaattctttttttttttttttttctgagacagagtctcgctctgttgcccaggctggagtgcagtggtgcaatcttggctcactgcaagctctgcctcctgggttcacgccaatctcctgcctcagcctcccgagtacctgggactacaggggcctgccaccacgcctggctaattttttttgtatttttggtagagacggggtttcactgtggtctcgctctcctgacctcctgatctgcccgcctcagcctcccaaagtgctgggattacaggtgtgagccaccgcacccagccgagtttactgagaattctaattccgttttctgttaaaaggtctagctgctatgcaatgctatgacaatgttgcaaggttcctactgtacatgcaaaaatataaattattggaattcttacagttttcaagaattatgatttgttaatatattaataacatcwtaaattgaccatggtttttaatcgtgcctctttttgattaatttaaatgtaagttattgctaatttctctctctaaaaaattattgtatttatggttatcccttcagggtctagtagtgaatatatgc

SEQ ID NO: 70403 - DNA, 2414 bp, Homo sapiens
aagttccttatggaaatattccatattccctgtgaagtaccttaagcagttaggattgttcacatttttcagatgctgaactttggctcagaggagtaaagtgacttgccatgaacaaccagctggtaggcaccagggttgggagttgaatgcaggtcaggtatatcaaagtttaagaactccttccctctaccacacaatgttctttaccccagatattacggagtcttagattgtcatttagtctaaaccatccaatgcttaaaatacctatacagtatccaataccttcttgtgcatcttcttgtgtatctagggcaggtgaagaagtaacttcataaatgctttccaataaaattatgctttacaggggaaggctagatctagttccttttactttggtgagattatgggagtaaaagtgagggcgaggctcaactttagctcaataacttgttaaaaaaactctccatgcagagtttcagatttacacttattctagtaattaaacaaatatttattgagcacccattatgtgtccagggcttgaagtaagacagaaaaagcctctacaaaaggcagatatgagagacacttaataggtatatatactccatgaatgcagtaattttctcctgttgtatttaataccatataccagatccttagaacagttcctggtacgtatggatgctcagtaaacattatggaattaattgattaactgagataatttcacgtttttaaaggttataaaaaacaaaatgggttagtagagtgtagagcgttgtggcacagtgagctgcattatagtgggtggccaggaaaggttctctgaggagagagcattgaacatcattgtcatctggtttgagaacagtcatggatcatttttttgaaattacttcagaaacagccactgaggaaaactcctgattcgggggccccatttatattttttatcacaaggaaccctagagtgtcctttggagtatggcgggaatgaacaccacacctcactgagggtccattgctagtgttttccatcaccattagccaagggattaatttatttttaagctataggctgaagccttgagaatgtaatttagtttcagtttaattttatagtaattttcttaaagagaataaaggcgacttctagaaagtgtatagaaattagcaaaattctaaaagttatataatccagaacttagtccttagaaacaagggtgatctaggtttgctgaacacatactgtagatattttcccatttagtctttggacatggatatagggctgactagtgaaaaatcaaagatttgacatgcatgctttaatggaaaaaacatgaagataggatcaggtcataagtattacttgtgtaatctacggtaagttattggaggccctcatacctcaatgttcccatcttcatgatgggcgtaataaaatctacccagcttggcagttgtaaggattatagacaatgtgttcagaataccatgaacaataatggcaagcagtaaatggcagttagttattagtactatggacgcatcttgaagtcatttttaaattctcttatgctatttctgtggacaaagatgtgaagatgtgagtgattatcaatgtatagtccttggtactctcttaagcaaaataagacattaagtaattttttaaaatggagattctttgagtcttatgaacaatggttgtgtaattacataggctttcattcttagacatgaccaagatcattactaataacatactaagtgaccaattgaaggctaataccagtagcgtgttagagtttactgagaattctttttttttttttttttctgagacagagtctcgctctgttgcccaggctggagtgcagtggtgcaatcttggctcactgcaagctctgcctcctgggttcacgccaatctcctgcctcagcctcccgagtacctgggactacaggggcctgccaccacgcctggctaattttttttgtatttttggtagagacggggtttcactgtggtctcgctctcctgacctcctgatctgcccgcctcagcctcccaaagtgctgggattacaggtgtgagccaccgcacccagccgagtttactgagaattctaattccgttttctgttaaaaggtctagctgctatgcaatgctatgacaatgttgcaaggttcctactgtacatgcaaaaatataaattattggaattcttacagttttcaagaattatgatttgttaatatattaataacatctyaaattgaccatggtttttaatcgtgcctctttttgattaatttaaatgtaagttattgctaatttctctctctaaaaaattattgtatttatggttatcccttcagggtctagtagtgaatatatgc

SEQ ID NO: 70404 - DNA, 651 bp, Homo sapiens
tgcctcctttggaggggctaatcagaaactcaaaataatgcaaccatttgtctcttatctacctatgacctggcagccccctccctgcatgagtcttcccacttttgttttgagttgtcccgccttttcaaactgaaccagtgttcatcttacataygttgattgatgtttcatgtctctccaaaatgtataaaaccgaactgctctgaccaccttggacacatgtcatcaggacctcctgaagctgtgccacgggtgcgcgtcctcaaccttggcaaaataaactttctaaattaactaagacctgtctcagatattcggggctcaccgacctatgatttgatacttaaactgctcagcttttaagtctctaaaattcacatcttagctcaggaagaaaaatataaccttacataaaaatatagtcaatcaaacttaagatacccaatttgcctaccccaaattcttattctggcaggcataattatatttggttttgttaagactaaaacacacacacacaaattgcacctagttacagatgttctaaattgcatggaacaacttactcttctatttttggttcagctaatgagctttctcaaaggaaatgactacaatgagttaaaagaaatcaagtaaaatgtgatt

SEQ ID NO: 70405 - DNA, 651 bp, Homo sapiens
tgcctcctttggaggggctaatcagaaactcaaaataatgcaaccatttgtctcttatctacctatgacctggcagccccctccctgcatgagtcttcccacttttgttttgagttgtcccgccttttcaaactgaaccagtgttcatcttacatacgttgattgatgtttcatgtctctccaaaatgtataaaaccgaactgctctgaccaccttggacacatgtcatcaggacctcctgaagctgtgccacgggtgcgcgtcctcaaccttggcaaaataaactttctaaattaactaagacctgtctcagatattcggggytcaccgacctatgatttgatacttaaactgctcagcttttaagtctctaaaattcacatcttagctcaggaagaaaaatataaccttacataaaaatatagtcaatcaaacttaagatacccaatttgcctaccccaaattcttattctggcaggcataattatatttggttttgttaagactaaaacacacacacacaaattgcacctagttacagatgttctaaattgcatggaacaacttactcttctatttttggttcagctaatgagctttctcaaaggaaatgactacaatgagttaaaagaaatcaagtaaaatgtgatt

SEQ ID NO: 70406 - DNA, 651 bp, Homo sapiens
tgcctcctttggaggggctaatcagaaactcaaaataatgcaaccatttgtctcttatctacctatgacctggcagccccctccctgcatgagtcttcccacttttgttttgagttgtcccgccttttcaaactgaaccagtgttcatcttacatacgttgattgatgtttcatgtctctccaaaatgtataaaaccgaactgctctgaccaccttggacacatgtcatcaggacctcctgaagctgtgccacgggtgcgcgtcctcaaccttggcaaaataaactttctaaattaactaagacctgtctcagatattcggggctcaccgacctatgatttgatacttaaactgctcagcttttaagtctctaaaattcacatcttagctcaggaagaaaaatataaccttacataaaaawatagtcaatcaaacttaagatacccaatttgcctaccccaaattcttattctggcaggcataattatatttggttttgttaagactaaaacacacacacacaaattgcacctagttacagatgttctaaattgcatggaacaacttactcttctatttttggttcagctaatgagctttctcaaaggaaatgactacaatgagttaaaagaaatcaagtaaaatgtgatt

SEQ ID NO: 70407 - DNA, 651 bp, Homo sapiens
tgcctcctttggaggggctaatcagaaactcaaaataatgcaaccatttgtctcttatctacctatgacctggcagccccctccctgcatgagtcttcccacttttgttttgagttgtcccgccttttcaaactgaaccagtgttcatcttacatacgttgattgatgtttcatgtctctccaaaatgtataaaaccgaactgctctgaccaccttggacacatgtcatcaggacctcctgaagctgtgccacgggtgcgcgtcctcaaccttggcaaaataaactttctaaattaactaagacctgtctcagatattcggggctcaccgacctatgatttgatacttaaactgctcagcttttaagtctctaaaattcacatcttagctcaggaagaaaaatataaccttacataaaaatatagtcaatcaaacttaagatacccaatttgcctaccccaaattcttwttctggcaggcataattatatttggttttgttaagactaaaacacacacacacaaattgcacctagttacagatgttctaaattgcatggaacaacttactcttctatttttggttcagctaatgagctttctcaaaggaaatgactacaatgagttaaaagaaatcaagtaaaatgtgatt

SEQ ID NO: 70408 - DNA, 649 bp, Homo sapiens
atttgaatgtttatcatatcatcagtgtggcctaggctgttgcctagcagttatctagagacctacttcacgttttattttaatttaataaggtaaatcgaagacttttgtttgcttgcttgcttgtttagttcacagattaggaataaatctggactggaacttgtaacaattaactagggcatttgaaagtccaagccagcctctttatgaattacattttgaaaagacaagctgctatctcattggtaactttcaggagaccactcttggaattaaatttagaaaacatttatcagttatgttgcccaaaatcacaatggacagggcactttctgcatagctaatacacaagcggcatccgcctgcaaatcacagagcacccctactatagcataactaggacaggagtcagggagacgaaccgatttaacatttcatggagaattcaaagctatgcttctctaactttcctmcccatttcttcccagcttcccttcccccgcaccacacacccagaagccactcaatttgccaaccatgtccagtttaacttactgcagtgtgatgcaggcgaaagctgagcgcatctctgaagcgagagccactgcttttccggagaggaactgggactagccagttctcagga

SEQ ID NO: 70409 - DNA, 862 bp, Homo sapiens
tgcataaacttgtgcacaaatgttcatagtaacattattcatactaaacaagaactgtaaagaatccaaatgttagggttaaaataaaaatcctcccccagttgactctactgcacagcaaaggctaagaagtgtttatgagagcaccactggttcttaatgtatgggcccccagacctgcagctttcagcatcacctggaaacttgttagaaatgcaaattctgagcctttcccaccagcccaactgaagaagaaattctgggactggggcccagcaatttgtgttttactaagccctccaggtgattttggtaccggtctaatcactttattaggggatcaaagaaggctttcttgaagatgttttacctattctgaggcttacagtaggtgtagaaagggaaggaggtgtgggyctgtttgcctaagtcaataaccttgacatcctctctgtcttctctaccttcaaactgaatggttcattccgtgctgagattctgcatttctaacaagctggcaactgatgtccatggtgctgaccgttaagaacagtctcttggtaaaggggatgtagagcatttcaggcaggtgagcactgaagatgaaaatgcttggagaaatacattaagtgtcagagaggtatgggataagactttaaaaagaaaaaaagcaaaatcatgcaaagccttgcaaggcctctaatttatcctaagttaaagcaaatcattaatgatttcagcagtatagtgatttgacttgatttgcattttaaaaaattactccagccactgaattgaaaataaactcgaaagaaaccaaatttgaaggttagaagattaggaggctattatagacatccag

SEQ ID NO: 70410 - DNA, 1160 bp, Homo sapiens
tattcttttattcttgggattcataacttggtcaagatatttaatttgtttatagcacactgatggacacagtctactatttttctcatctattttacatctaattactaatagtgattttcccatcttgtttctttattatttgttccctaactggctttagaattaacactattcatagctgataaagtgagttgcctagctttctgtattttgctccattctcttgaatattttaaataagtccaataaccttctttgaaggtttagtaggacttccctgtgaaacaatctgtatatagttgggcagagatagaatttttacaactgttttaacttcttacttgcagtaagtcttttccatcgacatttttttttttataatttcaagattgtttacatctctactatagctgcagtggcatatttatctgtcataacactgtcttgctcttaattaacattgtctgttttttttctctgttcaaagaaacagctgcttttggcaggctgggtcctcagcagtggcagctgccaggtcagccttggtgagtggtgactcaattgctctgtccatgcagtgtccatcccagccaccacggccactttgtgcagggactcatgagcaagccttgtgcggctgagtggcatcatccatcaagccatctcgctcacctggttacagggagccccagccccttggagaccctctggcaggcatccatatgcaacctctatcttcacatgctcttcccatggaaagtggtcagtgcacacttctctcttccatcccccaattttccaactttattttccccaagttccagactggccaggcaacccatgagtcactgcccttgattcattcattcatgcactactggggcataatttctaccctctacctcctgtggtcttgtttgggttttgattcctagttcctggctcgacagccctttccaaagctgttctggtgtcagctcccaagcctactgctcttgtagattctcctttttatatctgagtcaygggcatttatttcctggaattaaaaaaaaaattcactggtattttcaatgcagcatttctaaggacttggagtaggagaaattctatattagcttagagagaattgtttcaaaacaccagaaatgtaaact

SEQ ID NO: 70411 - DNA, 947 bp, Homo sapiens
tggggcgacagctgagaagttaaaacgtgcatcatatttttttttgctgaaagggcccaagaaaatgtcaaaggttacaaaatacaagaaccaccctgtgatggcatcagcccagcagctgtggaaaggagaatcctataagctgcctgcttcttttaaaaaccatctcattggacggttccatctcagtaattaaaggaaggtactgacggcaggggaaagacggtggctctgatgaccaaacacgccatgtggaaatcacgtggagagtgacggtgtctctgcaatggagggggagaaagagacgggattttccctgcrtgccttttgcagaggcatcctggagtgccccaattttgccaactgcattccagagctcttttcctcacatgcccagatggagcaaaagtctttgtaatgacttcaagctcagccaaaagtaaacacactctccactttttccatggaccaattctaaccccaaattgccagagctggcccctcaacaatccaaatggaaagccgcctttcccaataaaataaggcccttctaactcaataatacatgttggctgcaaaagcaaatgttcctaaaagcttcctagaaattatttatcgtgcagcaacactccagatcacctgagcaaaccccaccaatggaacaaagacattcaaaggaaatacaacacaatccaagaacagatgttcgctgcagcgaacacctgcactcacaacttttgcagcacattttgtagcagtcacgggatttgctactaaacacacacacacacacacacacacacacacacacacacacagagctcaccaccacctaactggaatattcttttggaaaacaggccggaatgagacaggtgctgatttgaataaagagtaaaacagcactcgggatgtgagctctgcagggctcctgcacatgccaaaca

SEQ ID NO: 70412 - DNA, 947 bp, Homo sapiens
tggggcgacagctgagaagttaaaacgtgcatcatatttttttttgctgaaagggcccaagaaaatgtcaaaggttacaaaatacaagaaccaccctgtgatggcatcagcccagcagctgtggaaaggagaatcctataagctgcctgcttcttttaaaaaccatctcattggacggttccatctcagtaattaaaggaaggtactgacggcaggggaaagacggtggctctgatgaccaaacacgccatgtggaaatcacgtggagagtgacggtgtctctgcaatggagggggagaaagagacgggattttccctgcatgccttttgcagaggcatcctggagtgccccaattttgccaactgcattccagagctcttttcctcacatgcccagatggagcaaaagtctttgtaatgacttcaagctcagccaaaagtaaacacactctccactttttccatggaccaattctaaccccaaattgccagagctggcccctcaacaatccaaatggaaagccgcctttcccaataaaataaggcccttctaactcaataatacatgttggctgcaaaagcaaaygttcctaaaagcttcctagaaattatttatcgtgcagcaacactccagatcacctgagcaaaccccaccaatggaacaaagacattcaaaggaaatacaacacaatccaagaacagatgttcgctgcagcgaacacctgcactcacaacttttgcagcacattttgtagcagtcacgggatttgctactaaacacacacacacacacacacacacacacacacacacacacagagctcaccaccacctaactggaatattcttttggaaaacaggccggaatgagacaggtgctgatttgaataaagagtaaaacagcactcgggatgtgagctctgcagggctcctgcacatgccaaaca

SEQ ID NO: 70413 - DNA, 1518 bp, Homo sapiens
ctaagctatgggtcagggagtcccaaacaaacagcagtgttattctggaactacttggatgagggtattttcctaactagagcttactgggattgtgcaagtggcagggactactctctaggtcacccgacgtaaggggccagttgtatttgaagggtgagccaagactagaacagaggtgaagggaggtgaaaaggtgaccaaacagctgggtgctgcaaagtgcctgacagcaggaggtggacacaggttcttatgtaacagcagtaagtgccatatgctaacagcctgccatgtgccagctgtacccagggtctctgaacctagcagtgtccctatgcacatctcacaggtgaggaaaatgagatctagtaagtgacaagtgtctaagccaggattttaatccaggtctgaagaacttcagaatccatgttttattcatgtcacttctgaatttgggcccattagcagggccaatgtgctggcatcttagcagcagctaaagcaggcatctgcagcccccycttggtcttgccacacagtcctggctacactgacattctaattgggaggaaggtcagatttctccattctccatatccaaattcatcttgtccactttgattcttggatttgatcacttcccaccccacctcttacttaactgttccctgggcaaaattccagccttagccagaagggcactgttcctactaaagtcagaagtcagaacttcctcccttcagcctctccaagctccttcacagccggctcctagactcagcctgctgctgacatgcacagacagtgccctggcccgtcactgaagctccctgggatcccacaacccatctgactcgacactgatttttacagctttgcaaatagttgccttagttcccttcccctgaatgcattataaagttaaagggagaaaaagaagtctttaaaaaatcccccagctatcttaattaacatgcagaatgcttttctggcagtgcacaggctgtgataaaacgggaagcttcttaacacaacatatatttaatctgtggcattcgcttccacatgaaattcaatcagatattttaagggagttaacaagggctctcagatcgaactgtgaataaatgcaggtgtgataaatacactcaagctactgagatgttttatcaaatgataaaggtgttgagtggggtggggttgaaggacaaaccttaattctaattctgtacgttgtcaaagagggtaggagaatttattagacaatgccagggcgatctaatgacccattgcctctgaaaaatcaattaaacttgctcatttgttctgtttttccaggaatctttaattcaagtctgccgtatgccaggcacgagggaggcagtgaccaaccaataacgcagttccagtctctgccctcagccccagctctgcctgatgaaactcacaatctaatagggaaaggtggataataaacaagtaaacaaatgcaaatgataatttccaattgggtta

SEQ ID NO: 70414 - DNA, 707 bp, Homo sapiens
tttataaaatagtgccatgtgaacatggatgaaaayggaaggcattgtgctcagtgaaataagccagtcacatcaggacaaactgtgtgattccatgaaggagctgcctagaatagtgaaattcataaacagatggtagaatagatgtgagcaggggctgggaaatggggtatggagagtcagtgttgaatggatgtggagtttccgtttgggatgatgagaaagttctggagatggaacgtgacacaacattgtggatacactcaaggccactgaactacttaaaaatggtaacttttaacacacacgtgaatgccatgtgtagagggacacatacaaagggaagctgattgaagacagggagaatgccatccacaagccaggaatgccaaagactgcagcaaacccctagatgccagcggagaggcatgggacggaccccctcacagtgctcagaaggagcctggaggcttctggcttccagagctgtgagacagtacatttctgctgtgtaagccccctagtctgtggcattctgttactgcagccccagaaaatgaatacaatgcatctctgtggctcattggtgcctcctctccaggccctctggtttctggaatgcagggaagagtggggaggggctggcctgtgacgcctctttctgcttttgcctttttcccttcgtttgttcttggttgctccttccc

SEQ ID NO: 70415 - DNA, 707 bp, Homo sapiens
tttataaaatagtgccatgtgaacatggatgaaaacggaaggcattgtgctcagtgaaataagccagtcacatcaggacaaactgtgtgattccatgaaggagctgcctagaatagtgaaattcataaacagatggtagaatagatrtgagcaggggctgggaaatggggtatggagagtcagtgttgaatggatgtggagtttccgtttgggatgatgagaaagttctggagatggaacgtgacacaacattgtggatacactcaaggccactgaactacttaaaaatggtaacttttaacacacacgtgaatgccatgtgtagagggacacatacaaagggaagctgattgaagacagggagaatgccatccacaagccaggaatgccaaagactgcagcaaacccctagatgccagcggagaggcatgggacggaccccctcacagtgctcagaaggagcctggaggcttctggcttccagagctgtgagacagtacatttctgctgtgtaagccccctagtctgtggcattctgttactgcagccccagaaaatgaatacaatgcatctctgtggctcattggtgcctcctctccaggccctctggtttctggaatgcagggaagagtggggaggggctggcctgtgacgcctctttctgcttttgcctttttcccttcgtttgttcttggttgctccttccc

SEQ ID NO: 70416 - DNA, 707 bp, Homo sapiens
tttataaaatagtgccatgtgaacatggatgaaaacggaaggcattgtgctcagtgaaataagccagtcacatcaggacaaactgtgtgattccatgaaggagctgcctagaatagtgaaattcataaacagatggtagaatagatgtgagcaggggctgggraatggggtatggagagtcagtgttgaatggatgtggagtttccgtttgggatgatgagaaagttctggagatggaacgtgacacaacattgtggatacactcaaggccactgaactacttaaaaatggtaacttttaacacacacgtgaatgccatgtgtagagggacacatacaaagggaagctgattgaagacagggagaatgccatccacaagccaggaatgccaaagactgcagcaaacccctagatgccagcggagaggcatgggacggaccccctcacagtgctcagaaggagcctggaggcttctggcttccagagctgtgagacagtacatttctgctgtgtaagccccctagtctgtggcattctgttactgcagccccagaaaatgaatacaatgcatctctgtggctcattggtgcctcctctccaggccctctggtttctggaatgcagggaagagtggggaggggctggcctgtgacgcctctttctgcttttgcctttttcccttcgtttgttcttggttgctccttccc

SEQ ID NO: 70417 - DNA, 707 bp, Homo sapiens
tttataaaatagtgccatgtgaacatggatgaaaacggaaggcattgtgctcagtgaaataagccagtcacatcaggacaaactgtgtgattccatgaaggagctgcctagaatagtgaaattcataaacagatggtagaatagatgtgagcaggggctgggaaatggggtatggagagtcagtgttsaatggatgtggagtttccgtttgggatgatgagaaagttctggagatggaacgtgacacaacattgtggatacactcaaggccactgaactacttaaaaatggtaacttttaacacacacgtgaatgccatgtgtagagggacacatacaaagggaagctgattgaagacagggagaatgccatccacaagccaggaatgccaaagactgcagcaaacccctagatgccagcggagaggcatgggacggaccccctcacagtgctcagaaggagcctggaggcttctggcttccagagctgtgagacagtacatttctgctgtgtaagccccctagtctgtggcattctgttactgcagccccagaaaatgaatacaatgcatctctgtggctcattggtgcctcctctccaggccctctggtttctggaatgcagggaagagtggggaggggctggcctgtgacgcctctttctgcttttgcctttttcccttcgtttgttcttggttgctccttccc

SEQ ID NO: 70418 - DNA, 707 bp, Homo sapiens
tttataaaatagtgccatgtgaacatggatgaaaacggaaggcattgtgctcagtgaaataagccagtcacatcaggacaaactgtgtgattccatgaaggagctgcctagaatagtgaaattcataaacagatggtagaatagatgtgagcaggggctgggaaatggggtatggagagtcagtgttgaatggatgtggagtttccgtttgggatgatgagaaagttctggagatggaacgtgacacaacattgtggatacactcaaggccactgaactacttaaaaatggtaacttttaacacacacgtgaatgccatgtgtagagggacacatacaaagggaagctgattgaagacagggagaatgccatccacaagccaggaatgccaaagactgcagcaaacccctagatgccagcrgagaggcatgggacggaccccctcacagtgctcagaaggagcctggaggcttctggcttccagagctgtgagacagtacatttctgctgtgtaagccccctagtctgtggcattctgttactgcagccccagaaaatgaatacaatgcatctctgtggctcattggtgcctcctctccaggccctctggtttctggaatgcagggaagagtggggaggggctggcctgtgacgcctctttctgcttttgcctttttcccttcgtttgttcttggttgctccttccc

SEQ ID NO: 70419 - DNA, 420 bp, Homo sapiens
ccccgcctccacaagcagttcttcagctayaccaagagccattctgagttctatcctgtcttctctcctgtgctcttatcctgctgaatggcacaaagacaccaactcagcttcagacagacttttgtagaattgtcgatctaacagttgttattgtgacatccagcaacttcctcagcctctctagcttctgctttccttatttggaaaacaagccctggttactttacctaaagacagtcaaaagtcaagccaaatggctaagtttgcccagtacactgggagccatcctgccaaatgagcgagccaccaaattatctgattcttttaagtattctgttctcattagccagctttcatcttgtctacataataggattttatgaaatatgcaacttgtgtctgccttagcactctgct

SEQ ID NO: 70420 - DNA, 420 bp, Homo sapiens
ccccgcctccacaagcagttcttcagctataccaagagccattctgagttctatcctgtcttctctcctgtgctcttatcctgctgaatggcacaaagacaccaactcagcttcagacagacttttgtagaatwgtcgatctaacagttgttattgtgacatccagcaacttcctcagcctctctagcttctgctttccttatttggaaaacaagccctggttactttacctaaagacagtcaaaagtcaagccaaatggctaagtttgcccagtacactgggagccatcctgccaaatgagcgagccaccaaattatctgattcttttaagtattctgttctcattagccagctttcatcttgtctacataataggattttatgaaatatgcaacttgtgtctgccttagcactctgct

SEQ ID NO: 70421 - DNA, 420 bp, Homo sapiens
ccccgcctccacaagcagttcttcagctataccaagagccattctgagttctatcctgtcttctctcctgtgctcttatcctgctgaatggcacaaagacaccaactcagcttcagacagacttttgtagaattgtcgatctaacmgttgttattgtgacatccagcaacttcctcagcctctctagcttctgctttccttatttggaaaacaagccctggttactttacctaaagacagtcaaaagtcaagccaaatggctaagtttgcccagtacactgggagccatcctgccaaatgagcgagccaccaaattatctgattcttttaagtattctgttctcattagccagctttcatcttgtctacataataggattttatgaaatatgcaacttgtgtctgccttagcactctgct

SEQ ID NO: 70422 - DNA, 869 bp, Homo sapiens
ctgggtttgttccatgtagttttactgggcggcggcggtrctaagagcctgtccctctttaacctacgatgggacttgaagttttcttacgatccgattattctgaaatacagggaatgtgacttgtgggggaccgaaggcttcgtgggtttgtggggttgtctgccaacttggtgctaattgggaataatctgagaagcaagtcgcctactcacctcccaccctatgtccctcctcccgcagcctttttccccagcctagtgcctccacagggccactttcaaagcttgcaatttatttggaaagggtcccccgcagaggcgcatggcagcaggagccgggggcgtgtgccttgccctgcgagtgcggctggagctgcgcccccagaggcgctgcatctccgcgcctgcagcgcgagaaaaggcagcaggcagcttggtacctccagggctgcggagtctctaaggaggctgcaagagcccagagtcgccgctgattggctcctcccgcggccttgggaccacccttctcaccaccgttgcctcccgcctacaccacccacctccttaatcaaagccaatgattgcatccttcccgctctattgtggctagtggaaagcaggggcccctgcgggattgcccaggcagtgcaacagtccctgtctggaactagttaaatccttcctccagattcagacgccagcattcctttcagaaaaacaaaagtgtatgttccctcccctccttcagatccgtaccccagcttttctttcatgaacaatgagttctcttatactcctccttcccatattaaactcttcccctttcccaccttccacacgcatatccctcaatctcaatagctccag

SEQ ID NO: 70423 - DNA, 869 bp, Homo sapiens
ctgggtttgttccatgtagttttactgggcggcggcggtactaagagcctgtccctctttaacctacgatgggacttgaagttttcttacgatccgattattctgaaatacagggaatgtgacttgtgggggaccgaaggcttcgtgggtttgtggggttgtctgccaacttggtgctaattgggaataatctgagaagcaagtcgcctactcacctcccaccctatgtccctcctcccgcagcctttttccccagcctagtgcctccacagggccactttcaaagcttgcaatttatttggaaagggtcccccgcagaggcgcatggcagcaggagccgggggcgtgtgccttgccctgcgagtgcggctggagctgcgcccccagaggcgctgcatctccgcgcctgcagcgcgagaaaaggcagcaggcagcttggtacctccagggctgcggagtctctaaggaggctgcaagagcccagagtcgccgctgattggctcctcccgcggccttgggaccacccttctcaccaccgttgcctcccgcctacaccacccacctccttaatcaaagccaatgattgcatccttcccgctctattgtggctagtggaaagcaggggcccctgcgggaytgcccaggcagtgcaacagtccctgtctggaactagttaaatccttcctccagattcagacgccagcattcctttcagaaaaacaaaagtgtatgttccctcccctccttcagatccgtaccccagcttttctttcatgaacaatgagttctcttatactcctccttcccatattaaactcttcccctttcccaccttccacacgcatatccctcaatctcaatagctccag

SEQ ID NO: 70424 - DNA, 879 bp, Homo sapiens
tggatagaaatgcaaattctcaggcctcttacgcctactgagtccataactcgggggttcagagcccaggaatctgcattttgacaagttctccagctgattctgatccacaatgaagaatgaggactgasctagacaaagcatgccctggtattttgttcctattaataaccagaaacagctgggcacagtggctcacacctgttatcccagcactttgggaggccgaggcaggcagatcacctgaggtcaagagtttgagaccagcctgaccaacatggagaaaccccatctctactaaaaatataaaattagccgggcgtggtggcacatgcctgtaatcccagctactcaggaggctggagattcgcttgaacccgggaggcggaggttgcagtgagccaagatcacgccattgcactccagcctgggcgacaagagggaaactgaaaaaaaaaaaaaaaacagagacttttcccattaaagagctaaacaaaaggaagtggaaagatacttcttccttgttccaagcaatatgtacccaatatgattccaatcaataacatttatgtattgactggaatgagaaatgccttctcccaggtttgtctctaaggagattcccctactccccccatcgtcatccacttcgtcatctaaacccgccttggaatggagtcactgaagcatctccaagagatgaagcagtacttggaaattaaaagcagtgaggactctgtcaccagcaggcgaggtggcctcacagagccccctgagctggcaccggctggcacaaggtaagcaggaccaaaaaagaaaccagacaccaggcaagtgactgttgacacaggaaatgtaagccttagccctgtgcttgca

SEQ ID NO: 70425 - DNA, 879 bp, Homo sapiens
tggatagaaatgcaaattctcaggcctcttacgcctactgagtccataactcgggggttcagagcccaggaatctgcattttgacaagttctccagctgattctgatccacaatgaagaatgaggactgacctagacaaagcatgccctggtattttgttcctattaataaccagaaacagctgggcacagtggctcacacctgttatcccagcactttgggaggccgaggcaggcrgatcacctgaggtcaagagtttgagaccagcctgaccaacatggagaaaccccatctctactaaaaatataaaattagccgggcgtggtggcacatgcctgtaatcccagctactcaggaggctggagattcgcttgaacccgggaggcggaggttgcagtgagccaagatcacgccattgcactccagcctgggcgacaagagggaaactgaaaaaaaaaaaaaaaacagagacttttcccattaaagagctaaacaaaaggaagtggaaagatacttcttccttgttccaagcaatatgtacccaatatgattccaatcaataacatttatgtattgactggaatgagaaatgccttctcccaggtttgtctctaaggagattcccctactccccccatcgtcatccacttcgtcatctaaacccgccttggaatggagtcactgaagcatctccaagagatgaagcagtacttggaaattaaaagcagtgaggactctgtcaccagcaggcgaggtggcctcacagagccccctgagctggcaccggctggcacaaggtaagcaggaccaaaaaagaaaccagacaccaggcaagtgactgttgacacaggaaatgtaagccttagccctgtgcttgca

SEQ ID NO: 70426 - DNA, 1140 bp, Homo sapiens
ttttcagcatgaattatatttcagaagcttctattgaaggtctatcaatacactgtaagtaaaagagagtttcatagttcaatgggtttgggaaatgctgcatcatagttatctatgatgacaacatcgcttcatcacagttatctccatggactttaagaattatcttttctggctgggcgcagtgactcacgcctgtaatcccagcactttgggaggccgaggcaggtggatcacaaggtcaggagttcaagaccagcctggctaagatggtgaaaccccgtctctactaaaaatacaaaaaaacaaaaaaaaattagccgggtgtggtggcaggcacctgtaatcccagctactcggaaggctgaggaagagaattgcttgaactcaggaagtggaggttgcagtgagccgagattgtgccactgcactccagcctgggggacagagcgagactccgtcaaaaaaaaaaaattatcttttctactcaaggctgtctccccaaatgagaaagctatgccatgtggggggttttctacctttattgttggccttactttaaatactgaaacctaagcttgtctgaaatattcagcagcccacttccctctcacacagaatagatttccatagggtgagaattcaagagaaactttttaattgtacagcaaagtgtttactttgccaccaacctgccctrtagcttaagcatatggctaccttttctatcaacagctgggcttctgtaggtttggcactcggtataccatcccagcgcagtcaaaaacctgcaggtgaccattaacctttgagacagacaatagagggaacatgataacaatttgatctaattttctaagctccatcactgtatgcacttaaattatcaaaatcacaaaacaaaaacaaacacctatgtacctgaactgctttattttacccaagtagaaatgctttcataattacaatttaatatgcaatcagccttatttgaacatcaatataaaatatagttttgtgagataaagattctacatctgttgtaaaagcactattaaaatatgaaaataaattatattgtcataaaaatcatatattaaattgctctgagagcttggtataagaaaaaatattatgtcg

SEQ ID NO: 70427 - DNA, 722 bp, Homo sapiens
tttttttttttgagacagagtctcactttgttgcccaggctggagtgcaatggcatgatctcggctcactgccatctccgcctcacaggttcaagcaattttcctgcctcagcctcccaggtagctgggattacaggcatataccaccacaccagctaattttcatatttttagtagggatggggtttcgccatattgtccaggctggtctcgaactccggagctcaggtgatccgcccaccttggcctcccaaagtgctaggattataggcatgagccactgtgccaggccaattttttaattttttgtagatacgggatctccctatgttgcccaagctggtctccaattcctgggctcaagcaatcctcctgcctcagcctcccaaagtgctgggattacagatgtgaggcaccatacccagccaaaaggaacaaatttttcaaagttctgagataactgctttataaaaagtgcatttctgtgcccatcagtggagcacaccattgtccaccttcccatacctacaccaagacagccktctagatttttttaaatgctctatcctacagctctttcaaacttgtagtgcactgggaggatataaggcagtagggaaacagtgatggagcacaaaaacccctttcctctagtcaggcttatccttgccactaagaaacagtctcaagaatctgggaaagaaactaaatagcaaggatcc

SEQ ID NO: 70428 - DNA, 768 bp, Homo sapiens
gagtagaggcagcatctagaggaaaacaaaagtatgtggctatcaaattccaaagaagccccattttattacagagaaaatacaaagccgtttcctcacagggaaaagtacagtttcccttctccagggtgacagatgagccttttccgaagttctcagctttctcttctatcgaaacttcccatgtcggttaaagtgtttgtagagatagcggatgcgtttattaaggttgtgcaggtcatcagcgaacattctacttccaaccattttcctctttcggatacaacgttgcaattcattccctttccaacctcgaagccatatgggccccctgatcagttctttggggtgcttttcaaagtttcctgtgtaatgtgagagaacacattagatccaagacaagagaactcatcctacaccagctaagctttcaacccacggttgcatcttgctgagcagcacctatagacaaggaacattacagtacagaacaatagcacagactctggagccagactgcttggggttaaaattctgatgctgccatttattaactytggaaaaactgtttatttttacttatgaagtaaaaattatacgaggggactcagaacagtgccaaacacaatgtaaacagctacataagtgtttgctcttactattgagcacagtaccactctctacacaggaggaaaagatagtcgttacagcctaattgccattctgaaattgtgtaccacgtcgaaggtcaagtcttacccaggatcc

SEQ ID NO: 70429 - DNA, 768 bp, Homo sapiens
gagtagaggcagcatctagaggaaaacaaaagtatgtggctatcaaattccaaagaagccccattttattacagagaaaatacaaagccgtttcctcacagggaaaagtacagtttcccttctccagggtgacagatgagccttttccgaagttctcagctttctcttctatcgaaacttcccatgtcggttaaagtgtttgtagagatagcggatgcgtttattaaggttgtgcaggtcatcagcgaacattctacttccaaccattttcctctttcggatacaacgttgcaattcattccctttccaacctcgaagccatatgggccccctgatcagttctttggggtgcttttcaaagtttcctgtgtaatgtgagagaacacattagatccaagacaagagaactcatcctacaccagctaagctttcaacccacggttgcatcttgctgagcagcacctatagacaaggaacattacagtacagaacaatagcacagactctggagccagactgcttggggttaaaattctgatgctgccatttattaactttggaaaaaytgtttatttttacttatgaagtaaaaattatacgaggggactcagaacagtgccaaacacaatgtaaacagctacataagtgtttgctcttactattgagcacagtaccactctctacacaggaggaaaagatagtcgttacagcctaattgccattctgaaattgtgtaccacgtcgaaggtcaagtcttacccaggatcc

SEQ ID NO: 70430 - DNA, 764 bp, Homo sapiens
tcgtgcctcagtctcccaaatagctgggattacaggctggtgccacctacattttttatagagatgggattttcccatgttggccaggctggtcttgaacttctgacctcagatgatcctgcggtggctcacacctgtaatcccagcactttgagaggcaaatgtgggtggatcacctgaggtcaggagtttgagaccagcctgaccaacatgatgaaaccccctctctacttaaaatacaaaaatagcagagtgttgtggtgcatccctgtaatcccaggtactcaggaggttggggcaggagaatcacctaagcccaggagacagaggttgcagtgagcagagatcacaccactgtactccagcctgggggacagagtgagactctgtctcaaaaaaaaaaaaaaaagaaagaaagaaactgggcagcagcttctgcttctggttttattggtatcaaaggaaaagaaaattcataacayttccacattcttcaaacattctatgctataaattactgtaggaatcagcatataggcacattgtgcattgggtttcgtcctgaatgagcccagatgatagcctagcacgataagttttaaaatcttagggtgataaactccaatactggagtgaaaagcaagtgatgaagtgtgaggtatgggaaaccacagggaccgtgctgaaaccagaagcccctgcagggtagaaatgtgcactctcagctgtgctgattgttgcccaataggaactcaggccgaggg

SEQ ID NO: 70431 - DNA, 750 bp, Homo sapiens
atttcacttttctcctttgttaaaagccttctgatgactcccccatttctgttgcagcaaaaggcaaaatcctgtaaatgcaacttgatgtcctagaatggattctggaacagaaaaaggacataagtagaaaagctgtggaaatttcagtaaaatccatggtttagttaatagacaccagtgttaccttcctcgttccgataaatgcacrtagttgggtaagatgttagtgttagaggaagcggggaaaaggatataagaggaccctgtgtactatctttgcaacttttttgtaaatctaaagttattcaaaaagttaaaaaagattttttgtttaaagctaaagttcttagagcagactacaaagacctgcgtgacctgtttctgtgccctcgtcaggtctctgacgtcatctccttttctcttccccttgaacgttctgtaccagcctcacgcttcatcactttctcaccgcaggacctttgcactggctgtgtctgggactgggctattattgcctgagctctccctgtggcccactcttctttgtcaaattgtgattcaaatgtcaccttcataaaagccatccattgaaaatgtcaagcctacctccacggtcccttcctcctgctcagtatttatctcatggtgcctatgcttccaacatgctctgcagtgctctgattgattaggttatgcttcatcttcctcctgctctcctaaaacttacgttccttgagaggagggatt

SEQ ID NO: 70432 - DNA, 1856 bp, Homo sapiens
ttcatggtgtcactcagttatcgtgaaagttactgcaggctacaatgctaagtcatagaggtattcaaaatattcacaggaatcagagaagggatcctgagtctctctagtcttacagaggtagggtagacggcaaggagcaagatcttgccaaaaaattgtactaccggtcatcagaccttgatccaaatctactagtttcagggctcttgtttttaaaaggacaagttctcactctgctacccaggctagagtgcagtggtgtgatcacggctcactgcaaattcttgggctcaagggatcctcccacctcagcctcccaagtagctgggactacaggcacaagccaccatgcttggctaatttttaagtctttttttttaatagagatggggtctcaatttgttgtccaggctgctcacaaattcctggcctcaagcaaccctcccgccttggcctcccaatgtgctgggattacagcatgagatgtgagctattgcacccatccagcaccacccccccccttttttttgtgacacagtcttagtctgtcacccagactgcagtgaagtggcatgatctcggctcattgcaacctttctcctgggttcaagcgattcttctgcctcagcttcctgactagctgggactacatgcattcaccacttcactttaaagtcaagattttcaagcaactgacaagatgtcaattkggcaagatgatagatacacttaatacctgtcaattaagagaacacaccatgcatttagtgcacaaactcaaccttgttcatcacaaatagcatctgtgtccctttttttaaaagtatgcaagatttatttgtttctgtaaattttgtctataaaagtgccaggaacatacagattcatagacccccttgcaatgactttcaagcctccttagtttacaaccactattctaaagaaatgcagttttatgcactaaaaatctgttatttcctgccaaacaccggtggtcatggagccgttcttgttataggatacatttagtggcaggaatcacattgtgaagcatctgtaaacattctcattggctccctgcactggagcttagggaatttaggagggtttcctcttttgggtcatagttactgcaagaaactacagtttaactccaattcggtacttctcacgttatttggacatgagacatcttctttccttttggtgctctatcctgtctttgtcttcccactttgacaggggtttacagtgaggacaattacagagaaaaacagtcacaaagatctttgtgcttttccccccctttgtctcttgttaaatataggcatgggatttcaaagtcaaaagcaaaacaagacaaaaaagcaacctccttcttcaaactgcctaaaacttggcagtgatcattacaacgtctgtaaccactaataattcgaccataccatctgcaaccgttacatgcctaatggttactgcagatgactcattttatttctaatttgtatcttcagcacatcatgaagattggaatcctgattaccttttccaccttgtgcttcatattctttactttctactcatcggaagcatttgttcccatgtttggcattaaatcttctagctcatcttttttttttttttttctcatttgagatggaacattccttgtgcaagatatatggctacagtatacaaagcagaagccatcgtcttttaaaaataccggttgaggttcaagtgaatggatctgttctgtgcagtggcattgatattaaatggttcattggaagggatgttagttttataggtggctactttttccttgagctttgtcttcacgttaggtatca

SEQ ID NO: 70433 - DNA, 1076 bp, Homo sapiens
atgaacgggaccccagagattttaccttttggycttcgttctgccagagctccggcttggtcctaaggggtctcctgactactccaatgccaggtgttctccccagccatccccaagcgagaagctggccagccttctggattccctcctctgccttctccagcagcagtccgtctcccagcacagccttccttaggcacacaaaggagaagacagagatcatttttggcagacgtaaggagcagcatttgtcgaactctgggccctgcaactctgtgaacagacctgcatgctgtacaaaattattagaagccctgtgtctcagggctcaaggaggttgggcagggaggtgagagtgaataaaaatgaggaggccgcaaactgcttttgcccaagggctggttttaatgagcttgtccctaatgagttgtccctgcaactagcttcaggcctaaacagatgaggcagggattctgctaaatttttgataggatttgcactggttttatgagaaagcaagcagtagagagtgcaaagttgggtcatgaatcttttacgagggtggatggttgtccgtcttgtcaaccggaacgagaaagacctggttgctaatagaaaccatggcctcagacgtcgatcgtcacccaccagatcagctaatttggtcagggtggctgggtgatttgttttttttctgattcaggacctggcctatggcccctgagaaggatttatctgaaaactccatcaaggagatgatttgagccattgcctgttcctgactaatgatcttttgtggaactcaagccatattggggatttatacctttctcccatagtgcactgggaaggaaacaccatcaaacactttaattaacatcctttttactttgggcagccccattcgtatcaaaaccacaaaccttacccttcagttgcacgagaacactcttaccaaggataaaatgtgattttcgattcctatggagatgtttctaatgtttctaacacccgtcaattctaggatcgcgtggtacaggagatttcatgtactaccaccttttttttaaatatta

SEQ ID NO: 70434 - DNA, 1076 bp, Homo sapiens
atgaacgggaccccagagattttaccttttggccttcgttctgccagagctccggcttggtcctaaggggtctcctgactactccaatgccaggtgttctccccagccatccccaagcgagaagctggccagccttctggattccctcctctgccttctccagcagcagtccgtctcccagcacagccttccttaggcacacaaaggagaagacagagatcatttttggcagacgtaaggagcagcatttgtcgaactctgggccctgcaactctgtgaacagacctgcatgctgtacaaaattattagaagccctgtgtctcagggctcaaggaggttgggcagggaggtgagagtgaataaaaatgaggaggccgcaaactgcttttgcccaagggctggttttaatgagcttgtccctaatgagttgtccctgcaactagcttcaggcctaaacagatgaggcagggattctgctaaatttttgataggatttgcactggttttatgagaaagcaagcagtagagagtgcaaagttgggtcatgaatcttttacgagggtggatggttgtccgtcttgtcaaccggaacgagaaagacctggttgctaatagaaaccatggcctcagacgtcgatcgtcacccaccagatcagctaatttggtcagggtggctgggtgatttgttttttttctgattcaggacctggcctatggcccctgagaaggatttatctgaaaactccatcaaggagatgatttgagccattgcctgttcctgactaatgatcttttgtggaactcaagccatattggggatttatacctttytcccatagtgcactgggaaggaaacaccatcaaacactttaattaacatcctttttactttgggcagccccattcgtatcaaaaccacaaaccttacccttcagttgcacgagaacactcttaccaaggataaaatgtgattttcgattcctatggagatgtttctaatgtttctaacacccgtcaattctaggatcgcgtggtacaggagatttcatgtactaccaccttttttttaaatatta

SEQ ID NO: 70435 - DNA, 647 bp, Homo sapiens
agtcttctgaagataggttgtttaaactgtggcaggaggtctggggtcagcctctgarcagggatttaggagattgtctggctcctcacccttgtttctccaagcatcaagagcaaactctttcttttgggtggatgccactgatggctgaccaagagtcaagggtggggaggttgcgaggatcacagggtcccgtccaaatgacctgattcaggaatttcgggtcttgagccatggtcccagcaaggctgagtaattttttttttttgaggcagagtctcattctgtcacccaggctggagtgcagtgttgccatctcggctcgctgcaagctccaccgcccaggttcacaccattttcctgcctcagcctcctgagtagctggggctacaggtgcccagcaccatgcccggctaatttttttgaatttttagtagagacggggtttgaccgtgttagccaggatggtctcaatctcctgacctcatgatctacccgacttggcctcccaaaatgctgggattacaagcgtgagccacctaattttttttttaattcttagtagagacagggtttcaccatgtcggtcaggctggtctcgaacccctgacctcatgatctgcccgcctcggcctcccaaagtgctg

SEQ ID NO: 70436 - DNA, 647 bp, Homo sapiens
agtcttctgaagataggttgtttaaactgtggcaggaggtctggggtcagcctctgagcagggatttaggagattstctggctcctcacccttgtttctccaagcatcaagagcaaactctttcttttgggtggatgccactgatggctgaccaagagtcaagggtggggaggttgcgaggatcacagggtcccgtccaaatgacctgattcaggaatttcgggtcttgagccatggtcccagcaaggctgagtaattttttttttttgaggcagagtctcattctgtcacccaggctggagtgcagtgttgccatctcggctcgctgcaagctccaccgcccaggttcacaccattttcctgcctcagcctcctgagtagctggggctacaggtgcccagcaccatgcccggctaatttttttgaatttttagtagagacggggtttgaccgtgttagccaggatggtctcaatctcctgacctcatgatctacccgacttggcctcccaaaatgctgggattacaagcgtgagccacctaattttttttttaattcttagtagagacagggtttcaccatgtcggtcaggctggtctcgaacccctgacctcatgatctgcccgcctcggcctcccaaagtgctg

SEQ ID NO: 70437 - DNA, 647 bp, Homo sapiens
agtcttctgaagataggttgtttaaactgtggcaggaggtctggggtcagcctctgagcagggatttaggagattgtctggctcctcacccttgtttctccaagcatcaagagcaaactctttcttttgggtggatgccactgatggctgaccaagagtcaagggtggggaggttgcgaggatcacagggtcccgtccaaatgacctgattcaggaatttcgggtcttgagccatggtcccagcaaggctgagtaattttttttttttgaggcagagtctcaytctgtcacccaggctggagtgcagtgttgccatctcggctcgctgcaagctccaccgcccaggttcacaccattttcctgcctcagcctcctgagtagctggggctacaggtgcccagcaccatgcccggctaatttttttgaatttttagtagagacggggtttgaccgtgttagccaggatggtctcaatctcctgacctcatgatctacccgacttggcctcccaaaatgctgggattacaagcgtgagccacctaattttttttttaattcttagtagagacagggtttcaccatgtcggtcaggctggtctcgaacccctgacctcatgatctgcccgcctcggcctcccaaagtgctg

SEQ ID NO: 70438 - DNA, 522 bp, Homo sapiens
gacaaggctcagcgcctttctccatcccctgcctttccccacctgaggagtccacaccmgcctcctgcctgagtgtctgatgcagaactttcagctgctcagaagctcagcctcaccagacacttcaaatactttcccaccaagggtctgggacatcccatgaagccctcgcagccccagcaccgggaggtcagcttcaaagataatgtgtgactgggggccagctcccgctcagagaaggcttagcactttgggggtgactccccggaagaaaggccttctcatcgcagaggggaaggacgtcccttttgaaagacagaccttgttttcctcctcctcccaccgcctgtttcatctgtttcatgtcaactcagtctgggtccaggaagatgtacgtgggtggggctgggaggggtgggaatttggcacgcgcggactctcctggtgtgtgattgcctcaggtgcttttgtttgcaccttggcaatgctcgtggcgctgggtaggttcactggagactgttt

SEQ ID NO: 70439 - DNA, 522 bp, Homo sapiens
gacaaggctcagcgcctttctccatcccctgcctttccccacctgaggagtccacaccagcctcctgcctgagtgtctgatrcagaactttcagctgctcagaagctcagcctcaccagacacttcaaatactttcccaccaagggtctgggacatcccatgaagccctcgcagccccagcaccgggaggtcagcttcaaagataatgtgtgactgggggccagctcccgctcagagaaggcttagcactttgggggtgactccccggaagaaaggccttctcatcgcagaggggaaggacgtcccttttgaaagacagaccttgttttcctcctcctcccaccgcctgtttcatctgtttcatgtcaactcagtctgggtccaggaagatgtacgtgggtggggctgggaggggtgggaatttggcacgcgcggactctcctggtgtgtgattgcctcaggtgcttttgtttgcaccttggcaatgctcgtggcgctgggtaggttcactggagactgttt

SEQ ID NO: 70440 - DNA, 522 bp, Homo sapiens
gacaaggctcagcgcctttctccatcccctgcctttccccacctgaggagtccacaccagcctcctgcctgagtgtctgatgcagaactttcagctgctcagaagctcagcctcaccagacacttcaaatactttcccaccaagggtctgggacatcccatgaagccctcgcagccccagcaccgggaggtcagcttcaaagataatgtgtgactgggggccagctcccgctcagagaaggcttagcactttgggggtgactccccggaagaaaggccttctcatcgcagaggggaaggacgtcccttttgaaagacagaccttgttttcctcctcctcccaccgcctgtttcatctgtttcatgtcawctcagtctgggtccaggaagatgtacgtgggtggggctgggaggggtgggaatttggcacgcgcggactctcctggtgtgtgattgcctcaggtgcttttgtttgcaccttggcaatgctcgtggcgctgggtaggttcactggagactgttt

SEQ ID NO: 70441 - DNA, 549 bp, Homo sapiens
tccccataatayccacatttcaaaggagagaccaggtgaagtaattggatcttggggtggtttctcccatgctgttctcatgatagtaagttcttacaaggtctgatggttttgtaaggggctcttcccccttcactcagcacttttccttcctgcagccttgtaaagaaggtatcttgctttccctttgccttctgccataattgtaagtttcctgaggcctcccggccatacttaactgtgagtcaattaaacctctttcctttataagttacccggtctcaggcagttctttaaagcagtatgaaaatggactaatacaatccctctttgcctgtgctgtcaagtattcctcacattaccacccttctccactttgagtactcctgaaccttgtcaagacccagttctaacttcctttcttcctttagccttgtagtgagatgcctggccctggaagactgctttaggctgcaagtgacagaaagtctgactcaaagtggctcaagcagtaagaagtttgttacgtcacttaacacaataagtggt

SEQ ID NO: 70442 - DNA, 2350 bp, Homo sapiens
gataaagcaaccattctctgggaaccaggaaaagcaaaaacaaaattgctctatagaaatacttttacaaccatcctcacaaggaacttccacagaaaaagagatatccattgaataacagattcctaaccaaaattagaaacaacaggaggaaataaatcaatgtaggagtagtcagaagctaaaattaaattgataatgtatgctgtaagaatcaaaaataatatatactcttgaaaaagacaacatatttataataaaaatgtaacagaagagatagaaatcacaatcataatgaaagaacaagacctcctatgggaaaaagaaaaatcagatttaaaaagaaaccagaatagactgataaaaatgaaaattataagaataaaattaaaatgcagtgggtgtattaaacaacagctatgattagctaaagagggcattagggaattggaaaacagatgtgaagaagccacatagaattcaacacacagaaacatatagaaaaatttaaaagatgaagagatatggaacatagaaagaaatagattaccatccaagaaacaacttgttagagtatatacttgtggcttgttagtcttcccttatgtcttcgatgatggtatttaattgacttcctgttttgtttttgtgatgtctgagttacttacatattcagaagtagattacagtcatcccacattatccacaggggactggtttcagaaccccactctgataccaaaatctgtagttgctcaagtcctttatataaaataacgtagtatagttgaccctccatagccatagtttccccattcatggagcgcttactgtgctacactgatccaattttgattctgttaattcgtgtaagcatagtacaagtttaactatttattaagtgaatataaatagaactctaggaaactagaggaagcaaagataaatcatgacaaacaaaaatatgatagaaagtggtggaagtatgaccaaatataccagtaatcaggatgaaaattggaattaaacttccatattaaaaataatatcaggtaccatttaaaaataaccttataatgaaaaattataaattcatatgaatttatgaatgaaaaattataaattcttatgaaagaggaaagcaccaagacaagtgtagaaatataaggaatgatgactaatcatgccagctgacatcaggacccatacaagtataagttatagacaactagaccagtggcagaagggaaagcctagaatcacatgcattatgtgcraagttggaatacgaagaacgtggcattaaaattaatatggacttaagaataggctatttaacaaattttggtaattcaactggctgtgggaaataattggatccctacttcatattaatacaattcaagaatttcatacagataaaataccaaaatgtgaaaagaaaagttataaaatttagagagaagtataatatttttataatcttagcacagaggaggattaaggaaataaggtacaaaatctatcagctatcatggaaaagttagttaagtagataaatgtgacatattaacattttaaatcgtctgtataagcaaagttaaatgcctgagactgggagaagatatttgctgggcacataagtgatataatattagtatccagaactctgtcactttgataaaaaaataggcaaataatataaactaaaaactcacagtagaagatacccaagcaagtaactagatgctcattttcacttgtgattcagagaaatgcgtatttgaaaaacaaagatatctattcacatcagcaaaatcttgcaattaattgggcaaatatgtcaaagaagaaaatggatgaataattgtggtacatttatacaatataatccttaagatcaaataaataaactatacctacatatatgaacatgaatatatttcaaaatataattaaaaaagcagtttgcaaaggacacatatagtatgtgcaataattatgaacacatgtatgtaccaagagtaaaaggtgatgtactaacgtcagtgtagtgatcccttctagtgaccaagaaaacacagaacacaaaaaacaaacaacaaactggaatgaagaagtatatagacgtataatgacactttttctaagaacaaaacctctgagacaatacttgattattttttgttgctgccatttgtctttggaactgacatcatgccggggttgggtcatgaagctgatgacttgatgtaagttgcatggatgttgttagtttcctcttcaattgccttttagctccttaaaagcaaatggaatttgtccccaatagtatattttcaatgactga

SEQ ID NO: 70443 - DNA, 626 bp, Homo sapiens
atgaacacttcaggagacaccatttttctccatcacttttttctcctccaccccttcctccttattacaataagaataattatcattattactagaaacttcatgactatggaggagggtagatccttgaacacttcaggagacaccatttttgtggtcatgttagagatggatgagacacagacaaagggcatgtgaggggtacacaaatgcgtggtgaggggaacatcaggaatgctcccccacatacgtgcctacactttcaactgctagagcacatttacaaacatcattgaaacacaaataaaagactgtgaatggatggctgcttttaaatgaaaaataatttagttgaggtaagtgtgatctcagcaggggactaaacctggcacttaaaggagcatagcatcaattcatgtgggcaaaagaaagtcgactgaatctccttctaccctctgaaagacacagaagctcttaagcctccacrccatactacagagactctcgggaagccagattcagatgaatatggtaagatgaagtggaaaggattgcccgtgtacgtgtgtgtgctacaaatggcattctaaacatccttttaagcagagagcatccccaaaggatgg

SEQ ID NO: 70444 - DNA, 762 bp, Homo sapiens
gcttggctgtggctaagacaatgagactactccatcctcttgctcctgctgactgactctcctgtggccacagaaacaagacagtgacgtcacggtctccaaaacacaagacagcaagggtcctcatagcatgtggggactgaactagaaagcctcacagatattcccattttcttgggagaactctggaaatgtgtaacatttcctaggatcagtcatgggtgtccattggaggcagaagactaaaaagagcctcttgtgtaatgtctagcaacacccagtcttggtccagaccctctacattaggcttctttggtctgatgctggacttgtcccatgcttacccctcaactccatgacctatccaagaaaaacatgtccaaggcctgaatgcaacgcattccctatcctacccgaggcttkaattttgagcactcttgattgaagttttattaatctaatgataatgtatgtttttcattaaatacatgcataaatctctttttctcttaccttttttttttttttttgatacagggtcttgctctgttacccaggctggaatgcagtggtgtgatcatggttcactgcagcctcaacctcctgggctcaagcaatcctacgacctcagcaacccaagtaagtgggaccacaggcatgcaccatcatgcctggcgaattcctttttttttttcattttatttgtagagaagagaggtcttactatgttgcatacactggtcttgaactcctgggctcaag

SEQ ID NO: 70445 - DNA, 1677 bp, Homo sapiens
cttgctctgtcacccaggctgcagtgcattggtgcgatctcagctcactgcaacttccacctcccggattcaagtaattctactgcctcagcctcccaagtagctgggactacaggtgcacgccaccatgaccagctaattttttgtattttagcagagacggggtttcactgtgttgcccaggctgctcatgaactcctgagctcaggcaatccacctgcctcagcctcccaaaactgctgggattacaagcgtgagctactgtgcaaggccctcatgttaaaaaacagctttattgaaatatatttggtacacaataaattgcacatttaatttataaaatctgatatataagtatatagatggtattgatataaacttgatatatacacaaggaacactacaatatttatttcccaagatgcaataatccaaatgttatgaatctgtagtaaggtaataactctgtatataawtatatgttttttcacacaaaaagctcattacagagctaattataaaagtaaaaaaaaagtaagaacttaaatatctacaaaaaatgagaaaaaggtcaaaacaaccatgcaatagtcacaaggtagaaagttacagagccattaaaacaacatttgaaaagaatttgggataacatgaccataactatattattaaaatgcatggataaaagactaagaagaagtataacatggctttgacagagttttcatttgactcaggagactttgagccaattttgaaatctgactttgttggcattttccaccacgtctatgacaaaaacgcattcgtttaatggtcagaactttttattttctttgacaaaaaaaatcctgtcttcattccaattcttctgtagtccttagacaataattcatttccacatgccagctgaatgtcaccatatctttagcaaacccttcggtgacagtgacatggtcagagtcttgtgagtcataatgttgaggtcagaatattgcctataccacctaaccaaacaaatggccattggccagccatttaatttccctgattatcattttcctatctgtacatcaagggcaataataatatttattggagagaagaccaaatgtaacaagagcaaaagtggttttaaacagtaacacgcttaatagtgctagttttctcaccacgatacacagctgtgagatttttaaacagttagtttctccttcccaaactgatcttttcaccaaggacttaggggtcattaaggctccttggggatcgtggctgagctgttttggtagacaagcatttggctaagaacctaatcacagaggactggtggagtatatacatacttacacacacacacattatctaatacattaatatatcatatatatcatatatatatctaatacacataatatatatattagatacctagttgtttatccaggaaagttactttgaaatatgtcttaactgcatatattctcctcttattctagctcgtttcttttgcataatttctcatcctttcagaatcacaaaaaaaaagcaattttcccactgctattctggggggtaaatttaaggttctttgcaagaagcaatattctttcttcccccactcccaccagcagccaagtgcctgtaattcagttcagttagttctcttttattcac

SEQ ID NO: 70446 - DNA, 1272 bp, Homo sapiens
ttccggaaattcacagtcaccagaaaataacacaagggcccagagatgtgtcctgggctctcatcttctctcactctgagtacttcttgagtctatcatccaatgccatggcttccattggcaagggaccctatggccactccatcacaggctctgtaatacgtagttttccttttgcttccataacaccactatttcctgctgattttctgacatctctagctactggtgcttagactgtctyataaatcctttctcctctgggaaacgtctcaatgtttggggtccaaagacgtcttggattttcttttcttttcattctttaaactctacctagaggactccatcaattcccatggcttaaaacctgtttatactccaaggctcccaaatcaccaatcccctctcacttctcagtgtgagattcttatactcagctgcctacttaacatctatcttctcctaagtgtcttccaaacatctcagacatcatacctacaagttaatacatcatcttctcactaagacccaatactttctcttttttctaattctgccatctcattaaatggtacatgaatccaactagaaggtaccagaatgaaacttgagtccacgttgcttcctctcataacttcattcttcatgtacaattgatctacaagttaaatagtttatcttgctctgtgtctcacggatccattcagttgtcttcattcccatagccattattcccacccaaagtgcccatcagcctgcaaccgccctctaactgatgttcctctcctctctccttccaccgcaatccattctccacactgcagggagagttatctttctaaatagaaaatttgatccacttcaatggttcccaattgtccttaaagtaaaagctaaactccttaacttgccttaacagggccctaagttatctggtctctaggttcattgactgtggctcttcccaatcatcaatgataaacttgaataatcgcagccactctagaggctgagatgggaatattgcttgagcccagaacttcagaacagcagtaagctatgaccatgccaatgcactccagcctggaagacagggtgagacacccatatctagggggaaaaacaaagcttgaatagatgcacactcttacacacgcacacacatacacacacactaatccatgttcttttctaaaaatacacaattctcttttacagaaatacataattcttctatctgaaaggacttggtcttaatagtatttatatctt

SEQ ID NO: 70447 - DNA, 1272 bp, Homo sapiens
ttccggaaattcacagtcaccagaaaataacacaagggcccagagatgtgtcctgggctctcatcttctctcactctgagtacttcttgagtctatcatccaatgccatggcttccattggcaagggaccctatggccactccatcacaggctctgtaatacgtagttttccttttgcttccataacaccactatttcctgctgattttctgacatctctagctactggtgcttagactgtcttataaatcctttctcctctgggaaacgtctcaatgtttggggtccaaagacgtcttggattttcttttcttttcattcttyaaactctacctagaggactccatcaattcccatggcttaaaacctgtttatactccaaggctcccaaatcaccaatcccctctcacttctcagtgtgagattcttatactcagctgcctacttaacatctatcttctcctaagtgtcttccaaacatctcagacatcatacctacaagttaatacatcatcttctcactaagacccaatactttctcttttttctaattctgccatctcattaaatggtacatgaatccaactagaaggtaccagaatgaaacttgagtccacgttgcttcctctcataacttcattcttcatgtacaattgatctacaagttaaatagtttatcttgctctgtgtctcacggatccattcagttgtcttcattcccatagccattattcccacccaaagtgcccatcagcctgcaaccgccctctaactgatgttcctctcctctctccttccaccgcaatccattctccacactgcagggagagttatctttctaaatagaaaatttgatccacttcaatggttcccaattgtccttaaagtaaaagctaaactccttaacttgccttaacagggccctaagttatctggtctctaggttcattgactgtggctcttcccaatcatcaatgataaacttgaataatcgcagccactctagaggctgagatgggaatattgcttgagcccagaacttcagaacagcagtaagctatgaccatgccaatgcactccagcctggaagacagggtgagacacccatatctagggggaaaaacaaagcttgaatagatgcacactcttacacacgcacacacatacacacacactaatccatgttcttttctaaaaatacacaattctcttttacagaaatacataattcttctatctgaaaggacttggtcttaatagtatttatatctt

SEQ ID NO: 70448 - DNA, 1272 bp, Homo sapiens
ttccggaaattcacagtcaccagaaaataacacaagggcccagagatgtgtcctgggctctcatcttctctcactctgagtacttcttgagtctatcatccaatgccatggcttccattggcaagggaccctatggccactccatcacaggctctgtaatacgtagttttccttttgcttccataacaccactatttcctgctgattttctgacatctctagctactggtgcttagactgtcttataaatcctttctcctctgggaaacgtctcaatgtttggggtccaaagacgtcttggattttcttttcttttcattctttaaactctacctagaggactccatcaattcccatggcttaaaacctgtttatactccaaggctcccaaatcaccaatcccctctcacttctcagtgtgagattcttatactcagctgcctacttaacatctaycttctcctaagtgtcttccaaacatctcagacatcatacctacaagttaatacatcatcttctcactaagacccaatactttctcttttttctaattctgccatctcattaaatggtacatgaatccaactagaaggtaccagaatgaaacttgagtccacgttgcttcctctcataacttcattcttcatgtacaattgatctacaagttaaatagtttatcttgctctgtgtctcacggatccattcagttgtcttcattcccatagccattattcccacccaaagtgcccatcagcctgcaaccgccctctaactgatgttcctctcctctctccttccaccgcaatccattctccacactgcagggagagttatctttctaaatagaaaatttgatccacttcaatggttcccaattgtccttaaagtaaaagctaaactccttaacttgccttaacagggccctaagttatctggtctctaggttcattgactgtggctcttcccaatcatcaatgataaacttgaataatcgcagccactctagaggctgagatgggaatattgcttgagcccagaacttcagaacagcagtaagctatgaccatgccaatgcactccagcctggaagacagggtgagacacccatatctagggggaaaaacaaagcttgaatagatgcacactcttacacacgcacacacatacacacacactaatccatgttcttttctaaaaatacacaattctcttttacagaaatacataattcttctatctgaaaggacttggtcttaatagtatttatatctt

SEQ ID NO: 70449 - DNA, 1272 bp, Homo sapiens
ttccggaaattcacagtcaccagaaaataacacaagggcccagagatgtgtcctgggctctcatcttctctcactctgagtacttcttgagtctatcatccaatgccatggcttccattggcaagggaccctatggccactccatcacaggctctgtaatacgtagttttccttttgcttccataacaccactatttcctgctgattttctgacatctctagctactggtgcttagactgtcttataaatcctttctcctctgggaaacgtctcaatgtttggggtccaaagacgtcttggattttcttttcttttcattctttaaactctacctagaggactccatcaattcccatggcttaaaacctgtttatactccaaggctcccaaatcaccaatcccctctcacttctcagtgtgagattcttatactcagctgcctacttaacatctatcttctcctaagtgtcttccaaacatctcagacatcatacctacaagttaatacatcatcttctcactaagacccaatactttctcttttttctaattctgccatctcattaaatggtacatgaatccaactasaaggtaccagaatgaaacttgagtccacgttgcttcctctcataacttcattcttcatgtacaattgatctacaagttaaatagtttatcttgctctgtgtctcacggatccattcagttgtcttcattcccatagccattattcccacccaaagtgcccatcagcctgcaaccgccctctaactgatgttcctctcctctctccttccaccgcaatccattctccacactgcagggagagttatctttctaaatagaaaatttgatccacttcaatggttcccaattgtccttaaagtaaaagctaaactccttaacttgccttaacagggccctaagttatctggtctctaggttcattgactgtggctcttcccaatcatcaatgataaacttgaataatcgcagccactctagaggctgagatgggaatattgcttgagcccagaacttcagaacagcagtaagctatgaccatgccaatgcactccagcctggaagacagggtgagacacccatatctagggggaaaaacaaagcttgaatagatgcacactcttacacacgcacacacatacacacacactaatccatgttcttttctaaaaatacacaattctcttttacagaaatacataattcttctatctgaaaggacttggtcttaatagtatttatatctt

SEQ ID NO: 70450 - DNA, 1272 bp, Homo sapiens
ttccggaaattcacagtcaccagaaaataacacaagggcccagagatgtgtcctgggctctcatcttctctcactctgagtacttcttgagtctatcatccaatgccatggcttccattggcaagggaccctatggccactccatcacaggctctgtaatacgtagttttccttttgcttccataacaccactatttcctgctgattttctgacatctctagctactggtgcttagactgtcttataaatcctttctcctctgggaaacgtctcaatgtttggggtccaaagacgtcttggattttcttttcttttcattctttaaactctacctagaggactccatcaattcccatggcttaaaacctgtttatactccaaggctcccaaatcaccaatcccctctcacttctcagtgtgagattcttatactcagctgcctacttaacatctatcttctcctaagtgtcttccaaacatctcagacatcatacctacaagttaatacatcatcttctcactaagacccaatactttctcttttttctaattctgccatctcattaaatggtacatgaatccaactagaaggtaccagaatgaaacttgagtccacgttgcttcctctcataacttcattcttcatgtacaattgatctacaagttaaatagtttatcttgctctgtgtctcacggatccattcagttgtcttcattcccatagccattattcccacccaaagtgcccatcagcctgcaaccgccctctaactgatgttcctctcctctctccttccaccgcaatccattctccacactgcagggagagttatctttctaaatagaaaatttgatccacttcaatggttcccaattgtccttaaagtaaaagctaaactccttaacttgccttaacagggccctaagttatctggtctctaggttcattgactgtggctcttcccaatcatcaatgataaacttgaataatcgcagccactctagaggctgagatgggaatattgcttgagcccagaasttcagaacagcagtaagctatgaccatgccaatgcactccagcctggaagacagggtgagacacccatatctagggggaaaaacaaagcttgaatagatgcacactcttacacacgcacacacatacacacacactaatccatgttcttttctaaaaatacacaattctcttttacagaaatacataattcttctatctgaaaggacttggtcttaatagtatttatatctt

SEQ ID NO: 70451 - DNA, 1272 bp, Homo sapiens
ttccggaaattcacagtcaccagaaaataacacaagggcccagagatgtgtcctgggctctcatcttctctcactctgagtacttcttgagtctatcatccaatgccatggcttccattggcaagggaccctatggccactccatcacaggctctgtaatacgtagttttccttttgcttccataacaccactatttcctgctgattttctgacatctctagctactggtgcttagactgtcttataaatcctttctcctctgggaaacgtctcaatgtttggggtccaaagacgtcttggattttcttttcttttcattctttaaactctacctagaggactccatcaattcccatggcttaaaacctgtttatactccaaggctcccaaatcaccaatcccctctcacttctcagtgtgagattcttatactcagctgcctacttaacatctatcttctcctaagtgtcttccaaacatctcagacatcatacctacaagttaatacatcatcttctcactaagacccaatactttctcttttttctaattctgccatctcattaaatggtacatgaatccaactagaaggtaccagaatgaaacttgagtccacgttgcttcctctcataacttcattcttcatgtacaattgatctacaagttaaatagtttatcttgctctgtgtctcacggatccattcagttgtcttcattcccatagccattattcccacccaaagtgcccatcagcctgcaaccgccctctaactgatgttcctctcctctctccttccaccgcaatccattctccacactgcagggagagttatctttctaaatagaaaatttgatccacttcaatggttcccaattgtccttaaagtaaaagctaaactccttaacttgccttaacagggccctaagttatctggtctctaggttcattgactgtggctcttcccaatcatcaatgataaacttgaataatcgcagccactctagaggctgagatgggaatattgcttgagcccagaacttcagaacagcagtaagctatgaccatgccaatgcactccagcctggaagacagggtgagacacccatatctagggggaaaaacaaagcttgaatagatgcacactcttacacacgcacacacatacacacacactaatycatgttcttttctaaaaatacacaattctcttttacagaaatacataattcttctatctgaaaggacttggtcttaatagtatttatatctt

SEQ ID NO: 70452 - DNA, 538 bp, Homo sapiens
tccaggcacgtgtattccatcttacacccacatggggctatttggaaggaaaggggcaggttaaactcttaaacgttagtgccatcattttaagattattggaagctggaagaaaaccagcccacatggcaatagtccgttgctgaagccaccagaagtgggacattgaggtaattaaagaaaataataaagccaacctagggtcaaaacaggcagctttagggaaggtcacattccaaatgccacttttgcctttcctcctgggtcctgctcttttaaccccagttttctctcaaaaggaatggaaaaaggcsaccaaatggggttataccaaaaatcctgaccatccaggatggctaataaaccctcgtggacaatttcttttcctaaaaacagttgcactgcaggccattaaaaaggctcactctaacacccactttggtgaagaaatcctttataactgattttgtgaaagcatgactgtcccaaacttcagggagtcaatcaaaaaggtggctgggactcatcccacctacta

SEQ ID NO: 70453 - DNA, 528 bp, Homo sapiens
gagtccttttcccatgtagtaaacctcactgcccctcagctttcccgatgtccgttccaacctcagtccttcctatgcagccagccctcacctacaccataccatcaaaaactccttttccaaactgctcaggacaccccgctcaattcattctcagaaacctggccttctacagttcttgcctctggtgttttcttctgtctgtctcctctcccctcctagatctggtgatrtattaggactcccttctttgactcactcatttctgcttcttgctctcagctctacaatcttcctaaactttgacactccctgcatctttgacatacttccaagccctaatcctgcagatccagaagagtaagattcagacacatttcccccagtgggtactttaattttgcttgttcaaatgatctacacttacattttgcaaatctttttttttaaattttttaaattttatattttttttccagccaactcaaggccaaaaaaaatttcttaatatagttattatgcgagggg

SEQ ID NO: 70454 - DNA, 528 bp, Homo sapiens
gagtccttttcccatgtagtaaacctcactgcccctcagctttcccgatgtccgttccaacctcagtccttcctatgcagccagccctcacctacaccataccatcaaaaactccttttccaaactgctcaggacaccccgctcaattcattctcagaaacctggccttctacagttcttgcctctggtgttttcttctgtctgtctcctctcccctcctagatctggtgatatattaggactcccttctttgactcactcatttctgcttcttgctctcagctctacaatcttcctaaactttgacactccctscatctttgacatacttccaagccctaatcctgcagatccagaagagtaagattcagacacatttcccccagtgggtactttaattttgcttgttcaaatgatctacacttacattttgcaaatctttttttttaaattttttaaattttatattttttttccagccaactcaaggccaaaaaaaatttcttaatatagttattatgcgagggg

SEQ ID NO: 70455 - DNA, 569 bp, Homo sapiens
tgcattcggagcctaattctgctccttcctaggtggggcaatcttagagaagtcacttcacctctctgtgcctactttgcaaggttaagtgaacttacggttgcaaaacattttcaactccataaatccagactttaccacctctttctgattccacgtccctgcycccactgcacacacacacgtacacacccttatgtatgaatccaatactattatcatcattattattattacgtacttcatattactatttctaactttactaaatgttaccttgagccaggagctaggctaagtactcaatctgcattatcttccttctttattgacacagatccaaacaggaaacaatatctccattttaaagagcacagagagttcattcatcatcccaaggccacccacttagtaaaatgtatagcctggatatcagccattcaatgcccacatcaatattcccaacaacgttaggcattaactaccagacgattttcagtgataccgagaaaggtgttgcgagctccataaatacagcactttccactagcaaacccagtgggattctt

SEQ ID NO: 70456 - DNA, 569 bp, Homo sapiens
tgcattcggagcctaattctgctccttcctaggtggggcaatcttagagaagtcacttcacctctctgtgcctactttgcaaggttaagtgaacttacggttgcaaaacattttcaactccataaatccagactttaccacctctttctgattccacgtccctgctcccactgcacacacacacgtacacacccttatgtatgaatccaatactattatcatcattattattattacrtacttcatattactatttctaactttactaaatgttaccttgagccaggagctaggctaagtactcaatctgcattatcttccttctttattgacacagatccaaacaggaaacaatatctccattttaaagagcacagagagttcattcatcatcccaaggccacccacttagtaaaatgtatagcctggatatcagccattcaatgcccacatcaatattcccaacaacgttaggcattaactaccagacgattttcagtgataccgagaaaggtgttgcgagctccataaatacagcactttccactagcaaacccagtgggattctt

SEQ ID NO: 70457 - DNA, 347 bp, Homo sapiens
ggaggcagagcttgcaatgagccgagatcgcgtcactgcactccagcctgggtgacagagcaagactccgtctcaaaaaaaaaaaaaaaaattgtaaataataatgatttaaaaaaacattcaggctctttctgatacttatgcatggtctaatgaattcyctttcttcttgtttgtgcaatggctgtctctaacacaaggtttagacttttgaatactttttttttttttgcacagataccgtttctttttcttgtttagacacaggatcttgctctgtcactgtcacctaggctggagtgtgtagctatcacagctcactgcatcctccaacttctgggcacaag

SEQ ID NO: 70458 - DNA, 870 bp, Homo sapiens
gcatgacatggaggaatataattttaattgtaaatagttacaaatgcactgaataaattgccattattcaaaagacagcagagccctggtgagatgttaaatacaaaacatgacaaaatacaataagcttaaataaaaatcagtagaaaaaatgtgagaaaagaataattgaaaaaagtcttagctttgttgatatatttcttcaggatcttctcccttatggtctttggacagatgcagtactgtaaagggccgatactgttttttcccctttaatcttgactgttatagaacagtcttcactgtatatagaacctttaattttatctcttgaaaatgaggatcttggccaggcgcagtggctcacacttgtaatcccagcactttgggaggccaaggcgggcggatcacttgaggtcaggaggccagcctggccaacatggtgaaacccagtctctactaaaaatacaaagattagccaggcatggtggcacgtgcctgtagtcccagctactcgggaggctgagacaggagaatcacttgaacctgggaggtagaggttgcagtgagctgagattgtgccactgcactccaacctgggcaacagggcgagactctgtcttaaaaaaaggaaaaagaaaaagaaaaagaaaatgagggtcttatcatttccctaatgttttctcccatcacttaaacctcacactaaatggtttcattcacataatcacatgtattctatatactygtaaaatgtatttggtttggcttagctatttaccacatttaagaaatgattgtttctcttagaatgtttatctttttctcccccaacagaacacagttctctggctttttggaaaactgatg

SEQ ID NO: 70459 - DNA, 697 bp, Homo sapiens
tcccaccttgcctgggttttgagagcaaacccgtggactcagttagatctggcttccacacctcccttctctccgggcctctgtttcctgctctgtaaaatggggatattgagggccgggcgcggtggctcacgcctgtaatcccagcactttgggaggtcraggcgagtggatcacaaggtcaggagttcgagaccagcctggccaacatggtggaaccctgtctctactaaaaatacaaaaaatgagccgaatatggtggcaagcacttgtaatcccagctactccggaggctgaggcaggagaattgcttgaacccaggaggtggaggttgcagtgagccgagattgtgccactgcactccagcctggacaacagagtgagactctgtctcaaaaaaaaaaaaaaaaaaaggggtggggggatatggagtcaccaaggcacagggctgttgagtgccggatgtaataaagcgggtaacagattctcggtcattctggggtcaagacgagctatcccggtccgaatcggagtctggtctcatcagcttcctggtttgtagaggatgaaccctggctcagagaaggacagccgcttaccccgggccgcacagccaagtagaaatgtcaggcggccaagagtcaagacgcagaggacagggagctggtggcgggggtggtgctctggaggctggccc

SEQ ID NO: 70460 - DNA, 697 bp, Homo sapiens
tcccaccttgcctgggttttgagagcaaacccgtggactcagttagatctggcttccacacctcccttctctccgggcctctgtttcctgctctgtaaaatggggatattgagggccgggcgcggtggctcacgcctgtaatcccagcactttgggaggtcgaggcgagtggatcacaaggtcaggagttcgagaccagcctggccaacatggtggaaccctgtctctactaaaaatacaaaaaatgagccgaatatggtggcragcacttgtaatcccagctactccggaggctgaggcaggagaattgcttgaacccaggaggtggaggttgcagtgagccgagattgtgccactgcactccagcctggacaacagagtgagactctgtctcaaaaaaaaaaaaaaaaaaaggggtggggggatatggagtcaccaaggcacagggctgttgagtgccggatgtaataaagcgggtaacagattctcggtcattctggggtcaagacgagctatcccggtccgaatcggagtctggtctcatcagcttcctggtttgtagaggatgaaccctggctcagagaaggacagccgcttaccccgggccgcacagccaagtagaaatgtcaggcggccaagagtcaagacgcagaggacagggagctggtggcgggggtggtgctctggaggctggccc

SEQ ID NO: 70461 - DNA, 405 bp, Homo sapiens
gggagctctgttgcccatgctggagtgcactggtgcgatcacagctcactgcagcctccacctcctgggctcaagcaatcttcctgcctcagccttctgaacacagggactccaggtgtgtgccgccatgcctaagcttttgtatttttttgtttctagggatggggtctcattctgttacccaggctggtctcgaactcctgagctcaggtgattctccctcctcgaccagccttgttcttttcttttgaatgacaataaataggattccagggcctaaacttcaaaatgttactggggagaagagtctcagagaaacagagaaaatctcctttccaccatacrtgcagaaaaatgaatacattgccacgaaacatgttgcagataaattatacaaatttacca

SEQ ID NO: 70462 - DNA, 621 bp, Homo sapiens
atgaaatgtactaagagtgtaaatcttacttgttcttaccatcagattttttaaaaaggtaactggtaacagatgtgttaattaacttcatggcagtcatttcccagtgtatatgtgtatcaaatcatcacctacaccttaaatgtatacaacttttatttgtcaaagacaaaaaaacytacgacacaggaagtgattacagacagaggggaagaggtctgaggactgagtcttaaatagatattggcagactgcaggatcttgtgtgagtgtcctatgaactgagttcagttccgcagtgctgtgagttttaccccatcctcatgtacacatatgtggtttgttttaggacacagtggtctttgaagacgtggttgtggatttcacgctggaggagtgggccttgctgaatcctgctcagagaaaactctacagagatgtcatgctggagaccttcaagcacctggcctcagtaggtgaggatagcattatttctgcacttagttattagataataaatgttttgtctggttgcagtggttcatgcctgtattcccagtgctttaggaggctaaggcaggaggatcacttgaggctaggagttgacaaccagcctgggca

SEQ ID NO: 70463 - DNA, 2966 bp, Homo sapiens
aaaatacaaaaattagccaggagtggtggcacaagcctgtaatcccagctactcgggaagctgaggtatgagaatcgcttgaacccgggaggtggaggttgcagtgagccgagattgcaccactgcactccagcctgggaaacagagcgagactctgtctcaaaaaaaaaaaaaaaaaattactgcaggtttgaaggcctgggcttcagtgaacctcttgcatatgccccccagcagctggaactacggtatgcaacaccacattcaataaatttttaaatttttggaaagatgaaatcttgctatgtctcccaggctggtctaccagtcctggcctgacatgggcctttcaattcggccacccaaagtgctgagactacaggcctcagcaaacatcttgatgaatatccactgtaagctctgccttgtaccttcctggttttgggtgattcagtctcttaaatcaagtccctcaatgtccttctctagcatcctggcactcaatgggaaggccaggctagggtaggagacagggagagacctgaggctggaggcaggagccagtggtcactgtgtgcagattccacctaaggaaccatcagccccatcgtctgtttctcacccccattctgcttgggaaaaggcacctgagaattcatgcattctgctctcataaatgctcagagataagtcctcggtaactcaagggccccaagatcccacaagttctgtcaccggggatccacagtgatgcacaagggaagttagacagagtactgctatgtggggaggaaccttcacatgcacagaaggccacatgcatgttcccagttcaacacccagtcacattccagcacacacactcacagtcacacagagccgtgccactcactgagtcacacacacctgctcactgtgcatataaagatgctcatgcactggtccggctgtgctcacacacacactcacatcacagtcatgaagacaaaacacagtcacctgattacaatcacttacacacccacccatatcctggagggccatacacatcccgtctaaagtcacatcatttttagcagagtttactctcatcagayaccatcacatgctcacagagggtcacaatgttccagcatccacaccccctacccccctaccccaggagcatctcagataccatagccctagggtctctcttccacacacccacaactctcagtaaagcattcacagtagaaattttcatattttcatcccataaaatctccctcttcccttttctgtgtgacctgagattattgaaggctgtgcctttttaactcacgggtagcagggacattgttgtctccttctgggtggctcttctgaattgtgtccagacttctgtgtgaatctctgagctgcagaatttaaatggcccctatcagccctgcctctggctttattcctgattccaagcccctcccaggaaggtttcctcacacagtgagaaggggtggggtgtcagaaacagactcagtcacaaccacacctgtttggaggcctgtgcctgtgatgcagcagaaacgacagtgagggaggtactggaggaggaaggggtcaccagggaaatgcacagataaagacgatggagtgaggatgagtggtgtgagttccagcctccatgcttctcatgaagccttttctccactgtgcagaatctaccaggaaggtgtgcgttctcctaacctgtgcaatggtaaaaagctggagatcctgggggcaaggcacttggctttgaaagaaaatcctcctcctccttctccagtggttctgggagagcatagatcttgatcattcgcaggacctggggacagaagtagagaaaacacttgtgtcttctttacccaccctcagatcccttggctctgccaggtgagagccactcccactctgtctctcagacacctgggctttaggtacgccctcttatttccctatttcttttcatgtgaatcaaaatctgaggctgtcgttctcctgcagattcttggagaaaggtgagatttctcactcataagtgggagctaagcgatgaggatgcattagcattaatattagttgtgcttgacccgacaataaattccactttccctgatctaaaaccttgacaattcatttccaagcatgcactccaagattctgctcatataaatcagcacaatcacacagttcttttggtatataacgtatttccttaagattaatttgtaatgtcatcccactgcattccttgggttttgactctgggtatggacatggaagcaatgaaaagggtcagaggccacaattaaggagctttggaaaccccgttctaggcaaccaccctcacaccctgcccagaactgtagcttgtaagaaattaccacagaagggaaagaggaactgcttttccttgcaacagatatgcaatagaattttgagtaatatcccagctattcatctgaactggggaagaaatatcagttcagggcgtctggccacctagtaagctgtggataaagatgttgatgttatttacttctcaggcattccagcaatcctttcagtgatgcagagagattgatcttctttaacttccatatcctctgcacaatagcccatacttctgctggttgcaactatttcttcagaaatccattatgccctacgacttgctttcagtctttcttttcaactacatctttccaagcacacactgttcccccgaaaaactttaggttttgtgtatgaaattatataatatctgggatttgctctaaaataatctggggatgacagttctctccttttgcaaacatttgaaattttttacagtacagtttttaattaagtagccagtacatagactatatataaaagaaaaacaaaattatcagtactggcatggctatatcttcaagaaatgctgtagtatgaaaaggcat

SEQ ID NO: 70464 - DNA, 2163 bp, Homo sapiens
aatgttttatttttagtagagacagggtttcaccatgttggccaggctggtctcgaactcctatcctcaagtgatctgaccgcctcagcctcccaaagtgctgggattacagacgtgagccaccgcgcctggcccagacaagcccttctaagtgaagtgcaggcaggacttagctcactaggtgcagtgggaggagaggagcatgttgcttgtgcctggtgtgaagcacycccatctagggccatagggactgctaagcaaccccgaaagtttccataggcaaatctctcaaagtttcaatacatacaggatggcccctgtgacaagttgacccacggcatctgggtggtcctaggtgggaagtgtgtatggaggtggagggagtgtgtctggtcttccgatagcatcacttgccttatgtttgttcctgtctggcctgtcctaatcctgcggtcctagagttagaaggggagatgtctggggaagcaaagtgtggatgtggaaagtgtttcaaggtaaacataagcagataagaagcatggcgtctactggcctcgagctacagacagaaggaagacgcaaagcttagggggcacctgtgacagtgatccccacacacaccccaccagggtgaagcatttggtgaaggtccaggtcagattcatcctagaagtcatcagaagttgctaaaacacctatggagcctagcacatagtatgtatttaatatatatttatataacatttcatttttaaaatgcttaacattcaatcaaaccagctctttggccttgaagatcaaataagatttgaccaaattcaaccctttaatttgttttctgagctctatttcccaaaaacaatgttttagcaaaggacagatatgaagttgagaagaatgatttcataaacttaggaatcaaggttctttatacacaagacaatagaggctcatcactggtcagttagttagaccccacatcagcatctttgggagttgactagtcctggatccctaacacaaaatccaaacattcctgcagttattgacaggcatagatagcctgagtcaagacaatgcatcacattaattatttttattttatttttttttaaagacaggatcttgctgtgccacccaggctaaagtgcagtggtgtgatcatagctcactgtagtgttgacctgctaggcttaagccatcctcatcctcccaccttagcctcctgagtagctgggactacaggtgtgtgccaccactcctgggtaatttttaatttttttctagagacacggtcttaccatgttgcctaggctggttgcaaactcctgggctcaagggatcctcccaccttggcctcccacggtgctggaattgcaggtgtgagcaaccacacccagccacgtctcatttatattcaaataattactgacaattgatttttaagtaattattcttcccacccgttagcatggagcttggacccaacagcaaatatctgccacctaaaattgagatacagctcaaccctccaaatcctttgcgtaccctcaccaaggagcccctccatccctgcgtacaccactctttcaaagcccagggcctggaagggcctggctttcaccctgagctgcttccttacagaacacagacctgggttaccaacagagcctccaccatctccatcctacctccgacctcagagagatgccagtaagatgaatgcaaactttgccaagggaaggtcttgagaaagtcaaaagccatcattattaattccccgctgtttggctgggatggaagccactggtgcaccgatggaagaggcttgactccaaataaataaacacacgtcctttgggcagatgtcgggccagctccggctgttaactgatggccccgcactgtggcagctagcgcagtgtgggcaggcgaagtgacactggcagcgcggagtcttccgcctcatcgcaacaagcttggccacatttccaaatccatctctttgaaccgacacagacagcttaatgaagcaatatttatggaactgataccactggggagatggctgctccttctctccgtctcctatttttaatatttgatctggcaaacgtattattaaaggaatatttcatctgattactcttctgtttgactgcg

SEQ ID NO: 70465 - DNA, 2163 bp, Homo sapiens
aatgttttatttttagtagagacagggtttcaccatgttggccaggctggtctcgaactcctatcctcaagtgatctgaccgcctcagcctcccaaagtgctgggattacagacgtgagccaccgcgcctggcccagacaagcccttctaagtgaagtgcaggcaggacttagctcactaggtgcagtgggaggagaggagcatgttgcttgtgcctggtgtgaagcacccccatctagggccatagggactgctaagcaaccccgaaagtttccataggcaaatctctcaaagtttcaatacatacaggatggcccctgtgacaagttgacccacggcatctgggtggtcctaggtgggaagtgtgtatggaggtggagggagtgtgtctggtcttccgayagcatcacttgccttatgtttgttcctgtctggcctgtcctaatcctgcggtcctagagttagaaggggagatgtctggggaagcaaagtgtggatgtggaaagtgtttcaaggtaaacataagcagataagaagcatggcgtctactggcctcgagctacagacagaaggaagacgcaaagcttagggggcacctgtgacagtgatccccacacacaccccaccagggtgaagcatttggtgaaggtccaggtcagattcatcctagaagtcatcagaagttgctaaaacacctatggagcctagcacatagtatgtatttaatatatatttatataacatttcatttttaaaatgcttaacattcaatcaaaccagctctttggccttgaagatcaaataagatttgaccaaattcaaccctttaatttgttttctgagctctatttcccaaaaacaatgttttagcaaaggacagatatgaagttgagaagaatgatttcataaacttaggaatcaaggttctttatacacaagacaatagaggctcatcactggtcagttagttagaccccacatcagcatctttgggagttgactagtcctggatccctaacacaaaatccaaacattcctgcagttattgacaggcatagatagcctgagtcaagacaatgcatcacattaattatttttattttatttttttttaaagacaggatcttgctgtgccacccaggctaaagtgcagtggtgtgatcatagctcactgtagtgttgacctgctaggcttaagccatcctcatcctcccaccttagcctcctgagtagctgggactacaggtgtgtgccaccactcctgggtaatttttaatttttttctagagacacggtcttaccatgttgcctaggctggttgcaaactcctgggctcaagggatcctcccaccttggcctcccacggtgctggaattgcaggtgtgagcaaccacacccagccacgtctcatttatattcaaataattactgacaattgatttttaagtaattattcttcccacccgttagcatggagcttggacccaacagcaaatatctgccacctaaaattgagatacagctcaaccctccaaatcctttgcgtaccctcaccaaggagcccctccatccctgcgtacaccactctttcaaagcccagggcctggaagggcctggctttcaccctgagctgcttccttacagaacacagacctgggttaccaacagagcctccaccatctccatcctacctccgacctcagagagatgccagtaagatgaatgcaaactttgccaagggaaggtcttgagaaagtcaaaagccatcattattaattccccgctgtttggctgggatggaagccactggtgcaccgatggaagaggcttgactccaaataaataaacacacgtcctttgggcagatgtcgggccagctccggctgttaactgatggccccgcactgtggcagctagcgcagtgtgggcaggcgaagtgacactggcagcgcggagtcttccgcctcatcgcaacaagcttggccacatttccaaatccatctctttgaaccgacacagacagcttaatgaagcaatatttatggaactgataccactggggagatggctgctccttctctccgtctcctatttttaatatttgatctggcaaacgtattattaaaggaatatttcatctgattactcttctgtttgactgcg

SEQ ID NO: 70466 - DNA, 2163 bp, Homo sapiens
aatgttttatttttagtagagacagggtttcaccatgttggccaggctggtctcgaactcctatcctcaagtgatctgaccgcctcagcctcccaaagtgctgggattacagacgtgagccaccgcgcctggcccagacaagcccttctaagtgaagtgcaggcaggacttagctcactaggtgcagtgggaggagaggagcatgttgcttgtgcctggtgtgaagcacccccatctagggccatagggactgctaagcaaccccgaaagtttccataggcaaatctctcaaagtttcaatacatacaggatggcccctgtgacaagttgacccacggcatctgggtggtcctaggtgggaagtgtgtatggaggtggagggagtgtgtctggtcttccgatagcatcacttgccttatgtttgttcctgtctrgcctgtcctaatcctgcggtcctagagttagaaggggagatgtctggggaagcaaagtgtggatgtggaaagtgtttcaaggtaaacataagcagataagaagcatggcgtctactggcctcgagctacagacagaaggaagacgcaaagcttagggggcacctgtgacagtgatccccacacacaccccaccagggtgaagcatttggtgaaggtccaggtcagattcatcctagaagtcatcagaagttgctaaaacacctatggagcctagcacatagtatgtatttaatatatatttatataacatttcatttttaaaatgcttaacattcaatcaaaccagctctttggccttgaagatcaaataagatttgaccaaattcaaccctttaatttgttttctgagctctatttcccaaaaacaatgttttagcaaaggacagatatgaagttgagaagaatgatttcataaacttaggaatcaaggttctttatacacaagacaatagaggctcatcactggtcagttagttagaccccacatcagcatctttgggagttgactagtcctggatccctaacacaaaatccaaacattcctgcagttattgacaggcatagatagcctgagtcaagacaatgcatcacattaattatttttattttatttttttttaaagacaggatcttgctgtgccacccaggctaaagtgcagtggtgtgatcatagctcactgtagtgttgacctgctaggcttaagccatcctcatcctcccaccttagcctcctgagtagctgggactacaggtgtgtgccaccactcctgggtaatttttaatttttttctagagacacggtcttaccatgttgcctaggctggttgcaaactcctgggctcaagggatcctcccaccttggcctcccacggtgctggaattgcaggtgtgagcaaccacacccagccacgtctcatttatattcaaataattactgacaattgatttttaagtaattattcttcccacccgttagcatggagcttggacccaacagcaaatatctgccacctaaaattgagatacagctcaaccctccaaatcctttgcgtaccctcaccaaggagcccctccatccctgcgtacaccactctttcaaagcccagggcctggaagggcctggctttcaccctgagctgcttccttacagaacacagacctgggttaccaacagagcctccaccatctccatcctacctccgacctcagagagatgccagtaagatgaatgcaaactttgccaagggaaggtcttgagaaagtcaaaagccatcattattaattccccgctgtttggctgggatggaagccactggtgcaccgatggaagaggcttgactccaaataaataaacacacgtcctttgggcagatgtcgggccagctccggctgttaactgatggccccgcactgtggcagctagcgcagtgtgggcaggcgaagtgacactggcagcgcggagtcttccgcctcatcgcaacaagcttggccacatttccaaatccatctctttgaaccgacacagacagcttaatgaagcaatatttatggaactgataccactggggagatggctgctccttctctccgtctcctatttttaatatttgatctggcaaacgtattattaaaggaatatttcatctgattactcttctgtttgactgcg

SEQ ID NO: 70467 - DNA, 2163 bp, Homo sapiens
aatgttttatttttagtagagacagggtttcaccatgttggccaggctggtctcgaactcctatcctcaagtgatctgaccgcctcagcctcccaaagtgctgggattacagacgtgagccaccgcgcctggcccagacaagcccttctaagtgaagtgcaggcaggacttagctcactaggtgcagtgggaggagaggagcatgttgcttgtgcctggtgtgaagcacccccatctagggccatagggactgctaagcaaccccgaaagtttccataggcaaatctctcaaagtttcaatacatacaggatggcccctgtgacaagttgacccacggcatctgggtggtcctaggtgggaagtgtgtatggaggtggagggagtgtgtctggtcttccgatagcatcacttgccttatgtttgttcctgtctggcctgtcctaatcctgcggtcctagagttagaaggggagatgtctggggaagcaaagtgtggatgtggaaagtgtttcaaggtaaacataagcagataagaagcatggcgtctactggcctcgagctacagacagaaggaagacgcaaagcttagggggcacctgtgacagtgatccccacacacaccccaccagggtgaagcatttggtgaaggtccaggtcagattcatcctagaagtcatcagaagttgctaaaacacctatggagcctagcacatagtatgtatttaatatatatttatataacatttcatttttaaaatgcttaacattcaatcaaaccagctctttggccttgaagatcaaataagatttgaccaaattcaaccctttaatttgytttctgagctctatttcccaaaaacaatgttttagcaaaggacagatatgaagttgagaagaatgatttcataaacttaggaatcaaggttctttatacacaagacaatagaggctcatcactggtcagttagttagaccccacatcagcatctttgggagttgactagtcctggatccctaacacaaaatccaaacattcctgcagttattgacaggcatagatagcctgagtcaagacaatgcatcacattaattatttttattttatttttttttaaagacaggatcttgctgtgccacccaggctaaagtgcagtggtgtgatcatagctcactgtagtgttgacctgctaggcttaagccatcctcatcctcccaccttagcctcctgagtagctgggactacaggtgtgtgccaccactcctgggtaatttttaatttttttctagagacacggtcttaccatgttgcctaggctggttgcaaactcctgggctcaagggatcctcccaccttggcctcccacggtgctggaattgcaggtgtgagcaaccacacccagccacgtctcatttatattcaaataattactgacaattgatttttaagtaattattcttcccacccgttagcatggagcttggacccaacagcaaatatctgccacctaaaattgagatacagctcaaccctccaaatcctttgcgtaccctcaccaaggagcccctccatccctgcgtacaccactctttcaaagcccagggcctggaagggcctggctttcaccctgagctgcttccttacagaacacagacctgggttaccaacagagcctccaccatctccatcctacctccgacctcagagagatgccagtaagatgaatgcaaactttgccaagggaaggtcttgagaaagtcaaaagccatcattattaattccccgctgtttggctgggatggaagccactggtgcaccgatggaagaggcttgactccaaataaataaacacacgtcctttgggcagatgtcgggccagctccggctgttaactgatggccccgcactgtggcagctagcgcagtgtgggcaggcgaagtgacactggcagcgcggagtcttccgcctcatcgcaacaagcttggccacatttccaaatccatctctttgaaccgacacagacagcttaatgaagcaatatttatggaactgataccactggggagatggctgctccttctctccgtctcctatttttaatatttgatctggcaaacgtattattaaaggaatatttcatctgattactcttctgtttgactgcg

SEQ ID NO: 70468 - DNA, 2163 bp, Homo sapiens
aatgttttatttttagtagagacagggtttcaccatgttggccaggctggtctcgaactcctatcctcaagtgatctgaccgcctcagcctcccaaagtgctgggattacagacgtgagccaccgcgcctggcccagacaagcccttctaagtgaagtgcaggcaggacttagctcactaggtgcagtgggaggagaggagcatgttgcttgtgcctggtgtgaagcacccccatctagggccatagggactgctaagcaaccccgaaagtttccataggcaaatctctcaaagtttcaatacatacaggatggcccctgtgacaagttgacccacggcatctgggtggtcctaggtgggaagtgtgtatggaggtggagggagtgtgtctggtcttccgatagcatcacttgccttatgtttgttcctgtctggcctgtcctaatcctgcggtcctagagttagaaggggagatgtctggggaagcaaagtgtggatgtggaaagtgtttcaaggtaaacataagcagataagaagcatggcgtctactggcctcgagctacagacagaaggaagacgcaaagcttagggggcacctgtgacagtgatccccacacacaccccaccagggtgaagcatttggtgaaggtccaggtcagattcatcctagaagtcatcagaagttgctaaaacacctatggagcctagcacatagtatgtatttaatatatatttatataacatttcatttttaaaatgcttaacattcaatcaaaccagctctttggccttgaagatcaaataagatttgaccaaattcaaccctttaatttgttttctgagctctatttcccaaaaacaatgttttagcaaaggacagatatgaagttgagaagaatgatttcataaacttaggaatcaaggttctttatacayaagacaatagaggctcatcactggtcagttagttagaccccacatcagcatctttgggagttgactagtcctggatccctaacacaaaatccaaacattcctgcagttattgacaggcatagatagcctgagtcaagacaatgcatcacattaattatttttattttatttttttttaaagacaggatcttgctgtgccacccaggctaaagtgcagtggtgtgatcatagctcactgtagtgttgacctgctaggcttaagccatcctcatcctcccaccttagcctcctgagtagctgggactacaggtgtgtgccaccactcctgggtaatttttaatttttttctagagacacggtcttaccatgttgcctaggctggttgcaaactcctgggctcaagggatcctcccaccttggcctcccacggtgctggaattgcaggtgtgagcaaccacacccagccacgtctcatttatattcaaataattactgacaattgatttttaagtaattattcttcccacccgttagcatggagcttggacccaacagcaaatatctgccacctaaaattgagatacagctcaaccctccaaatcctttgcgtaccctcaccaaggagcccctccatccctgcgtacaccactctttcaaagcccagggcctggaagggcctggctttcaccctgagctgcttccttacagaacacagacctgggttaccaacagagcctccaccatctccatcctacctccgacctcagagagatgccagtaagatgaatgcaaactttgccaagggaaggtcttgagaaagtcaaaagccatcattattaattccccgctgtttggctgggatggaagccactggtgcaccgatggaagaggcttgactccaaataaataaacacacgtcctttgggcagatgtcgggccagctccggctgttaactgatggccccgcactgtggcagctagcgcagtgtgggcaggcgaagtgacactggcagcgcggagtcttccgcctcatcgcaacaagcttggccacatttccaaatccatctctttgaaccgacacagacagcttaatgaagcaatatttatggaactgataccactggggagatggctgctccttctctccgtctcctatttttaatatttgatctggcaaacgtattattaaaggaatatttcatctgattactcttctgtttgactgcg

SEQ ID NO: 70469 - DNA, 706 bp, Homo sapiens
ttctaraagaagaggttgggttaagttaaagaagccagggctctgacagcgtccccatcccaattcctgactcaatcacaacagctccgcttccgtgttacatgttacatgctgggtgttctttcataaattatgtttgaaaaagaatcccctaggagcaggaaaggctcccgacttgtactcaagtagaagagaaggcaggtgtagagtctggaacaaagaggccttcctgactaatgaaccagtttcagagcaagtatcaagtcttagaagactttgatgatacaaggcaggatcttgtactcctagtagctcctgactataggttttctaaagacaaagctagtaactctccttagagacccagaaaactgtttcggaggggacaaccaggaagagtcaactctaaaggacaaaatcaagtgcagcaatgaagtgtggcccccttaacaaaatggcttcaaatgaatatgccagttaagagagcaagctctttgtacaaaaacataccaaggaattactaagacagatttttcctgtttgataagaaggcagtaaagagaggtaaatggaacaggaaggcactgggtccacataattgagaaacagatgcctcacttctgagtgagaaagcagaggctccacattcttatcattaatcatgtggtaaggttagctgcttgattccctgatagaacatttcaat

SEQ ID NO: 70470 - DNA, 706 bp, Homo sapiens
ttctagaaraagaggttgggttaagttaaagaagccagggctctgacagcgtccccatcccaattcctgactcaatcacaacagctccgcttccgtgttacatgttacatgctgggtgttctttcataaattatgtttgaaaaagaatcccctaggagcaggaaaggctcccgacttgtactcaagtagaagagaaggcaggtgtagagtctggaacaaagaggccttcctgactaatgaaccagtttcagagcaagtatcaagtcttagaagactttgatgatacaaggcaggatcttgtactcctagtagctcctgactataggttttctaaagacaaagctagtaactctccttagagacccagaaaactgtttcggaggggacaaccaggaagagtcaactctaaaggacaaaatcaagtgcagcaatgaagtgtggcccccttaacaaaatggcttcaaatgaatatgccagttaagagagcaagctctttgtacaaaaacataccaaggaattactaagacagatttttcctgtttgataagaaggcagtaaagagaggtaaatggaacaggaaggcactgggtccacataattgagaaacagatgcctcacttctgagtgagaaagcagaggctccacattcttatcattaatcatgtggtaaggttagctgcttgattccctgatagaacatttcaat

SEQ ID NO: 70471 - DNA, 552 bp, Homo sapiens
ctaatgcacatccatcagacattagaaaacatcctgacagagattatttgtcccaaactcctatgtctttatcttcattaggcatatcatcaccaatggggccagctacttgaagctagatttctatgccctggtgtttgggtgggcactgcctcattttgcccacgtgataaacttttttctgtgtttctgggactaatcaatcaactgcttgattcatacacatttctgtaagatgacttagtataatcacacactaagtcattatgagttgattttttaaaaattaattatcagacagcamatcctaagatttgctttttatcaccattatatcaattattaagtttacttcagttgttttcttggctcttttgacactagactgtgactttgttggggacaggggcttttgcttctatctgtgcacccctagccagttttcaagtacagagccatgttcttcagtattttctgaatgaatgggtgcctgggactggataaggaacccaatctctccagaaaaggccactagtccctttattttctgga

SEQ ID NO: 70472 - DNA, 1218 bp, Homo sapiens
ttggtactttcagtttagaacattaaaatggaaaaagaatgcagtgccaatattatatatatatttattttaaaatatgataaaactaattttattagacttccttataggggaacctcccttaaaagactgtgttattaaagatatcaactaagaattctttattcctttctcattactctttaaaaaatctaaaccatagtaaaattcatatggtttttgccccaaagttttcttyatacagcatgcgttaccagtggctaaaatcttttgaagttactgttgctaaactcttactctgcctttctttccccattcagaacctgggacaactaattgcatacagtacaagcttaataatttttaatttattaaatttagaagtacatgtttcaaaagaaaatgttctggtcatttggctaaaaggtttttgatctttttttctgaattatagccatcatttaatttccttcaaaatgcaaatcgctggtgaagacagccatcaaatcatggactaacttttgaattcaggtaagtctgtactaaagttaccaccagcaactttgaagacaatctatatttaaaaatttttaggcatgtagatactgcataataataggaataatgcccctagcaaataatttgttctccgacatgtcaccttaacactcttacacattaactcgtgagataggtaggtagtagtatatttattcaactctttaaatgtagacagattatgtacccaataatatgctttataaattgggtttgcataaaataataaatttctcaatggacagaattggcttgctttacttctttgattaataaatgttagctttttgagtcttcataaacttgttatcaaaaagtcttgtttgaacacttgagttctgatgaagtcctcatggtatggagcttcataactgtttttgtataatctatatccttccggactctaccgggtataagggccccttggtaggctttggagattatactaccattctaccttgcttgtgagcagaacctaatccaacagaaattgctagttttagccagactacattggagcatagaccataacctttatggtccttaatgtgggaaacaactgccaactaacatttcagtattttttgtaatgatttttttcaacttaattgtttcagagaaaataatacttcctttgatatcattatatcaacattcaaa

SEQ ID NO: 70473 - DNA, 1218 bp, Homo sapiens
ttggtactttcagtttagaacattaaaatggaaaaagaatgcagtgccaatattatatatatatttattttaaaatatgataaaactaattttattagacttccttataggggaacctcccttaaaagactgtgttattaaagatatcaactaagaattctttattcctttctcattactctttaaaaaatctaaaccatagtaaaattcatatggtttttgccccaaagttttcttcatacagcatgcgttaccagtggctaaaatcttttgaagttactgttgctaaactcttactctgcctttctttccccattcagaacctgggacaactaattgcatacagtacaagcttaataatttttaatttattaaatttagaagtacatgtttcaaaagaaaatgttctggtcatttggctaaaaggtttttgatctttttttctgaattatagccatcatttaatttccttcaaaatgcaaatcgctggtgaagacagccatcaaatcatggactaacttttgaattcaggtaagtctgtactaaagttaccaccagcaactttgaagacaatctatatttaaaaatttttaggcatgtagatactgcataataataggaataatgcccctagcaaataatttgttctccgacatgtcaccttaacactcttacacattaactcgtgagataggtaggtagtagtatatttattcaactctttaaatgtagacagattatgtacccaataatatgctttataaattgggtttgcataaaataataaatttctcaatggacagaattggcttgctttacttctttgattaataaatgttagctttttgagtcttcataaacttgttatcaaaaagtcttgtttgaacacttgagttctgatgaagtcctcatggtatggagcttcataactgtttttgtataatctatatccttccggactctacmgggtataagggccccttggtaggctttggagattatactaccattctaccttgcttgtgagcagaacctaatccaacagaaattgctagttttagccagactacattggagcatagaccataacctttatggtccttaatgtgggaaacaactgccaactaacatttcagtattttttgtaatgatttttttcaacttaattgtttcagagaaaataatacttcctttgatatcattatatcaacattcaaa

SEQ ID NO: 70474 - DNA, 1218 bp, Homo sapiens
ttggtactttcagtttagaacattaaaatggaaaaagaatgcagtgccaatattatatatatatttattttaaaatatgataaaactaattttattagacttccttataggggaacctcccttaaaagactgtgttattaaagatatcaactaagaattctttattcctttctcattactctttaaaaaatctaaaccatagtaaaattcatatggtttttgccccaaagttttcttcatacagcatgcgttaccagtggctaaaatcttttgaagttactgttgctaaactcttactctgcctttctttccccattcagaacctgggacaactaattgcatacagtacaagcttaataatttttaatttattaaatttagaagtacatgtttcaaaagaaaatgttctggtcatttggctaaaaggtttttgatctttttttctgaattatagccatcatttaatttccttcaaaatgcaaatcgctggtgaagacagccatcaaatcatggactaacttttgaattcaggtaagtctgtactaaagttaccaccagcaactttgaagacaatctatatttaaaaatttttaggcatgtagatactgcataataataggaataatgcccctagcaaataatttgttctccgacatgtcaccttaacactcttacacattaactcgtgagataggtaggtagtagtatatttattcaactctttaaatgtagacagattatgtacccaataatatgctttataaattgggtttgcataaaataataaatttctcaatggacagaattggcttgctttacttctttgattaataaatgttagctttttgagtcttcataaacttgttatcaaaaagtcttgtttgaacacttgagttctgatgaagtcctcatggtatggagcttcataactgtttttgtataatctatatccttccggactctaccgggtataagggccccytggtaggctttggagattatactaccattctaccttgcttgtgagcagaacctaatccaacagaaattgctagttttagccagactacattggagcatagaccataacctttatggtccttaatgtgggaaacaactgccaactaacatttcagtattttttgtaatgatttttttcaacttaattgtttcagagaaaataatacttcctttgatatcattatatcaacattcaaa

SEQ ID NO: 70475 - DNA, 1218 bp, Homo sapiens
ttggtactttcagtttagaacattaaaatggaaaaagaatgcagtgccaatattatatatatatttattttaaaatatgataaaactaattttattagacttccttataggggaacctcccttaaaagactgtgttattaaagatatcaactaagaattctttattcctttctcattactctttaaaaaatctaaaccatagtaaaattcatatggtttttgccccaaagttttcttcatacagcatgcgttaccagtggctaaaatcttttgaagttactgttgctaaactcttactctgcctttctttccccattcagaacctgggacaactaattgcatacagtacaagcttaataatttttaatttattaaatttagaagtacatgtttcaaaagaaaatgttctggtcatttggctaaaaggtttttgatctttttttctgaattatagccatcatttaatttccttcaaaatgcaaatcgctggtgaagacagccatcaaatcatggactaacttttgaattcaggtaagtctgtactaaagttaccaccagcaactttgaagacaatctatatttaaaaatttttaggcatgtagatactgcataataataggaataatgcccctagcaaataatttgttctccgacatgtcaccttaacactcttacacattaactcgtgagataggtaggtagtagtatatttattcaactctttaaatgtagacagattatgtacccaataatatgctttataaattgggtttgcataaaataataaatttctcaatggacagaattggcttgctttacttctttgattaataaatgttagctttttgagtcttcataaacttgttatcaaaaagtcttgtttgaacacttgagttctgatgaagtcctcatggtatggagcttcataactgtttttgtataatctatatccttccggactctaccgggtataagggccccttggtaggctttggagattayactaccattctaccttgcttgtgagcagaacctaatccaacagaaattgctagttttagccagactacattggagcatagaccataacctttatggtccttaatgtgggaaacaactgccaactaacatttcagtattttttgtaatgatttttttcaacttaattgtttcagagaaaataatacttcctttgatatcattatatcaacattcaaa

SEQ ID NO: 70476 - DNA, 745 bp, Homo sapiens
caaataaatatttgttgacagcgtggaaggagaaatgaaatcacttatcctttctagggtcttggtttccttatttgrcacattaagaaatttggagtaattgaactataaggtccttccaaaaaatctataaattaaatgaattttatgaattatgtcagctgacaaatagtgattagatggtttccccacaatagttcacaaagaaaatgctcttcagttagacattctgaaatatttaatattttcagcagaatcatttgaatcttatcaaatctacattagatactttggaaaaggcatacactaagcctcccatcagcttatatattatttcttgaaagaaaaaggtggtagaaaacatacccccaaaaaatttggttgacatttcatacaatgaattttttctacttcagtagactttgaaaaattgttggttaattaatatatcaagaagagtggaatagaaagcgcttataattgagctattcagatccatagcagcttgaataaattgaaggggtcatgaaaactgttttgcccttttctttttttgagattcattcatttgtcagtttaatgagaatatcatctaaaaatttgattttcaggaatgccaagagtcagaatttaacaagggaagaaaagatgcaagtagaaaaagtaatagtaaacagaataaagggagataggcaagagagaagggggtgggtaaagaagaggaagaatgtgtctatgattggat

SEQ ID NO: 70477 - DNA, 542 bp, Homo sapiens
tttttgggttaaatttttatccccagcactttaaaacttcagtaattcaagtgaattataagcaaaatagtacatctacgatttaaacagctttatgttgtaggaggataagcaatttaatttttgcaaatacattttatgtaaatgatacaagctatgttccttttaraaaacgatgaattaattattcattccaaattcaggttgcattactcaattgtccattttttcttgtataattcagcatcattaactagtcatcagtgcaaacaactttggggtcaacttgaccagccaatgcagagtgataacttcacatgtgaattgacattaggaattctgccatattgtaagagtaattttttataaattggatgaggtcatgtattgaagagaactttaagggcataaagatttatttctcatcattagatattcttaattattttcaattggcttttagaagatacatactagttttttaaatggttatataagccttaaaattttcttccgaaggaaaaattttatgaaaattaact

SEQ ID NO: 70478 - DNA, 806 bp, Homo sapiens
cctggggcgcagtcccaccccgcctcagcagctgcggagccttctgacgagcctccgcctggcagcactgcacaaagttttcctcctgagacgcgtccaggaactttgctctctccctggcttcctggttcccccaccacccctcctggtctgggcagcagagagcgtctatgaatgtgtccccggcttccgcaggctgcaggttcatttggagacgctttagtcgggaacatccggggagtacttgaccaaagggcatctgcgccctcgctcgctcctttccttgttggtctgggagaagggaaaggggcaaggaagaaggaagggaagcgtggtggtttttgttgtagcgttttggaagaggaatgggcgacgcctttttcttcgccggggaatcgcgacgttccgtctgatggaagtgtgcatccttttagatttagagggaaagttggagtcaaacagcagccacaaagctggctgtctgaaatgtggttaaggcaaaacactcgggggatctctttgtagtagtgggcttggctcgctttggaaaggccggatttgactcgtgctgggcatttaaccaggagtgcggtccccagggtgtttcctcccggcttctgcccaacgagcctggagttaatgcgttaatgggctaccctggtagcgcacgggccgttttcggcactgtttctccttctctgatgactcgagttcaacctcctgggctgagttgctttgcctccgtcacagtgcaaggagggaagttgacaggaggaggagacgccgcgctgtrgcagggagctttg

SEQ ID NO: 70479 - DNA, 574 bp, Homo sapiens
gctgctgtggcggggcgggcagcttcaggtgccggcacagtcactggctccatgcgaggctgtggctggaccagatgtactgcaagtggcctctgctctgggcaccagtgtctagacaaggggaatgcagtgggacctgaaagctcggagacaccaaaaaccacagagctccaaagagggtgttacagcatgtcacagccctggcttgaggagccctgaggtctgggttcccagaagggctgcatttcttctctccttcttgttactcacagcacagtgagcagggagatgtgttttgtgggggcatgtttcagcctgtttgtgttacagctctttcagtcctgccatctcactccagcccatgactcctgggctggcctagccccaccactgcttcccattgtgtggggcgccacctggcattggcagagagcaggagagctatagtgttacagcagctctggctcagggaatccagaagggttgccactcttcactccataattcaggagcatgtcaccacctgcagctcattgagccaggcaggaacgtgttacagctcctttcacwtcca

SEQ ID NO: 70480 - DNA, 968 bp, Homo sapiens
ataccagaaggccagtgcatatgatgcatatattaacaggaaggcaatacccatggaaatgtttgctgaaatagcttttttaattccaatctctttggcattttctaaatgtttctgatacctaccagaaaaatgagagggaaaacattataattaagaataacaatccatagtccgagtcacactcggctcctatatagttggaggtttaagtaacaaagtcagtcaaggtaatgaacccatggkgagacccagatctttgggaattgaactaattcaggatcagccaggcctagaacagatccaagccttctctttactggcccggttccatttcccttcatccattccaagccaaccaacattcctgtggttattccagaattgagggctcaccctgggatatggaagagcttctccatcaccttcacggcaatatcacaagtcagggttaagagggaatgagagaaaccaagccaaaccagaattgattgtaaatgtcactggaactcataaacagttagattcttaactctggtcaatgtctcttctctggagaaaagaaaatcgtccctctattgtccactgggtgagggatgaaaattttacatgttgttgtacataaacataggcttctctctttgacttttttaaaaatcaggctgaccttcatctgtcaagctagatacaggttataaggtagtcactacttatggaatatgagttcttattcaatttttccagactttagtttcatatatgaaaaatggatttaataatgcctaatttgcaagataattgtgaggttggtagataattgtagaaagtagtacagtagctggttcatagttagcaagcctgatcatttctcttactattatattagtatcattgtgttcaacttttatctcttcctgagttttgctcattctattactatcatatctttgaatcataattcaaatgca

SEQ ID NO: 70481 - DNA, 660 bp, Homo sapiens
gtgcacaccaccacactcagcttattaaaaaaaaaaaaaattgtagagccagggtcttactacattgcccaggctggtcttgagctcctggattccagctaccctcctgccttggcttcccaaagggctagcatattttggtttatgcatttaaaaacaagggagtccatttgtatyatcacatagccaaaagagtccatggaacataaatgattaagaatcttgctttagagtctgacattcaactatagccatcagtaaagggtgcttataatttatgcgagaagggttaatattaggaaagggaaggtaaaaaacacataccacaaagaagaagcaacaaaatgtaaaaacacattccttaaaccagtggctaaagaaccttcctgacctttccagctctttgttctggcccccgaaagctatcacagtcctgatggcccccagagcctcttctgccacggcgcctgcttttgcataagcagctagttctttgtcactaaatgccgagagtatctggacagaaaagaaacagtgatcacttttgtatagggagaaaagtttaaaggcactctggtcaaccctttaacctactttttcttcccaaaccctctcctttaacaaatattaaagtcatgtagcaaatgccagtgttctgga

SEQ ID NO: 70482 - DNA, 660 bp, Homo sapiens
gtgcacaccaccacactcagcttattaaaaaaaaaaaaaattgtagagccagggtcttactacattgcccaggctggtcttgagctcctggattccagctaccctcctgccttggcttcccaaagggctagcatattttggtttatgcatttaaaaacaagggagtccatttgtattatcacatagccaaaagagtccatggaacataaawgattaagaatcttgctttagagtctgacattcaactatagccatcagtaaagggtgcttataatttatgcgagaagggttaatattaggaaagggaaggtaaaaaacacataccacaaagaagaagcaacaaaatgtaaaaacacattccttaaaccagtggctaaagaaccttcctgacctttccagctctttgttctggcccccgaaagctatcacagtcctgatggcccccagagcctcttctgccacggcgcctgcttttgcataagcagctagttctttgtcactaaatgccgagagtatctggacagaaaagaaacagtgatcacttttgtatagggagaaaagtttaaaggcactctggtcaaccctttaacctactttttcttcccaaaccctctcctttaacaaatattaaagtcatgtagcaaatgccagtgttctgga

SEQ ID NO: 70483 - DNA, 917 bp, Homo sapiens
catgtgcttaatatagttaacctttgagggaaggttagtaagcttataggaaagcttttataatgaatacacttttatcacctcatccattttcactctaaagatcatttgtttattttacaaatayatgttgagcacttgctctgtactaaaacctgtgctaggtgcttatggaatgatcagaacaatgtttcaaaggttattttcaataactaaaatacagagtctcaaaagctcattacagaaaagtgaagtatcaaatttacaagcacttaaaaagtatcttttttaaaaggaatatctcactaaatagcatctgctctatcagaaaatattcattttgaaataattgtttcaatcatgccgggaagtgtctagtgtactagaaatcagtctccatcctcagaggggaagctggagttggaagctcgagtttctggccttactctcccctgagtttaagagaacgtacacatctctcctggatgattccattttagtccctatcctgctgggatgacatgccatctcctacctccatgatccagccaagaccccacaccagtggaaagaagaacctgtgaacattttgtcttaagaggatattggccgggtactgtggctcacgcgctataatcccagcactttgggaggctaatgtgggtggatcacttgaggtcaggagttcgagaccagcctggccaaaatggtgaaaccccatctctactaaaaaaaaaaaaaatacaaaaattagccaggtgtggtggtgcttgcctggtcccagctactccggaggctaaggcaggagaattgcttgaacctgggaggtggaggctgcagtgagccgagatcgtgtcactgcactccagcctgggaaacaaaccgagactccatctcaaaaaaaaataaaaaagagt

SEQ ID NO: 70484 - DNA, 917 bp, Homo sapiens
catgtgcttaatatagttaacctttgagggaaggttagtaagcttataggaaagcttttataatgaatacacttttatcacctcatccattttcactctaaagatcatttgtttattttacaaatatatgttgagcacttgctctgtactaaaacctgtgctaggtgcttatggaatgatcagaacaatgtttcaaaggttattttcaataactaaaatacagagtctcaaaagctcattacagaaaagtgaagtatcaaatttacaagcacttaaaaagtatcttttttaaaaggaatatctcactaaatagcatctgctctatcagaaaatattcattttgaaataattgtttcaatcatgccgggaagtgtctagtgtactagaaatcagtctccatcctcagaggggaagctggagttggaagctcgagtttctggccttactctcccctgagtttaagagaacgtacacatctctcctggatgattccattttagtccctatcctgctgggatgacatgccatctcctrcctccatgatccagccaagaccccacaccagtggaaagaagaacctgtgaacattttgtcttaagaggatattggccgggtactgtggctcacgcgctataatcccagcactttgggaggctaatgtgggtggatcacttgaggtcaggagttcgagaccagcctggccaaaatggtgaaaccccatctctactaaaaaaaaaaaaaatacaaaaattagccaggtgtggtggtgcttgcctggtcccagctactccggaggctaaggcaggagaattgcttgaacctgggaggtggaggctgcagtgagccgagatcgtgtcactgcactccagcctgggaaacaaaccgagactccatctcaaaaaaaaataaaaaagagt

SEQ ID NO: 70485 - DNA, 917 bp, Homo sapiens
catgtgcttaatatagttaacctttgagggaaggttagtaagcttataggaaagcttttataatgaatacacttttatcacctcatccattttcactctaaagatcatttgtttattttacaaatatatgttgagcacttgctctgtactaaaacctgtgctaggtgcttatggaatgatcagaacaatgtttcaaaggttattttcaataactaaaatacagagtctcaaaagctcattacagaaaagtgaagtatcaaatttacaagcacttaaaaagtatcttttttaaaaggaatatctcactaaatagcatctgctctatcagaaaatattcattttgaaataattgtttcaatcatgccgggaagtgtctagtgtactagaaatcagtctccatcctcagaggggaagctggagttggaagctcgagtttctggccttactctcccctgagtttaagagaacgtacacatctctcctggatgattccattttagtccctatcctgctgggatgacatgccatctcctacctccatgatccagccaagaccccacaccagtggaaagaagaacctgtgaacattttgtcttaagaggayattggccgggtactgtggctcacgcgctataatcccagcactttgggaggctaatgtgggtggatcacttgaggtcaggagttcgagaccagcctggccaaaatggtgaaaccccatctctactaaaaaaaaaaaaaatacaaaaattagccaggtgtggtggtgcttgcctggtcccagctactccggaggctaaggcaggagaattgcttgaacctgggaggtggaggctgcagtgagccgagatcgtgtcactgcactccagcctgggaaacaaaccgagactccatctcaaaaaaaaataaaaaagagt

SEQ ID NO: 70486 - DNA, 857 bp, Homo sapiens
tgcataggataattatttttaaagggcatatgcaaattaatcatcatcacattctaattaatgtcataaaataatgttatgactaacattttgactttgcatggactggtcggctggaagggatagtgcactgcaggccactggacacctttgtgagccttaggaaaaggcatcccctttaggagaaagcacctttgtggatgaggccaggacaagccaggrgcgcatgggctagtccctcaccccctatacttgcacctcccttgggcggggtgcaacctgcacagccacttgcagaaatcctgagaagaagcctcaagagtgattcaaggcaataatcttggtgtattgcaaaagtggtggccttgacgtcatataaatgagggctgaagtctttctccattacttattagcaatggggctgagcaagttccttaaattctccaaacctaaaattacccatctgttaaaaaaagataatgttatttatcttgaataattgtcagaattaaggagaaagtgtacagtgcctggcccacacaagatggtgacctctgagaggaaagaactcagtgtttttctgagctctcaaactactctcaacaacaattaatacagaagacttctatgaccaaatgtggggaatttccctccatcaacaaataagcaatccgttttgcagcagacaccaggtgggtgtgctgtaagtcagttctgacactatccatgtggagatagcatcacgtcccacaggctgagggctcagtccccaaagctgtccctcctccctcagacactagtcgcaagtctgggtttctggaacttctgactgattggcctcaaattagccaaatcca

SEQ ID NO: 70487 - DNA, 857 bp, Homo sapiens
tgcataggataattatttttaaagggcatatgcaaattaatcatcatcacattctaattaatgtcataaaataatgttatgactaacattttgactttgcatggactggtcggctggaagggatagtgcactgcaggccactggacacctttgtgagccttaggaaaaggcatcccctttaggagaaagcacctttgtggatgaggccaggacaagccaggggcgcatgggctagtccctcaccccctatacttgcacctcccttgggcggggtgcaacctgcacagccacttgcagaaatcctgagaagragcctcaagagtgattcaaggcaataatcttggtgtattgcaaaagtggtggccttgacgtcatataaatgagggctgaagtctttctccattacttattagcaatggggctgagcaagttccttaaattctccaaacctaaaattacccatctgttaaaaaaagataatgttatttatcttgaataattgtcagaattaaggagaaagtgtacagtgcctggcccacacaagatggtgacctctgagaggaaagaactcagtgtttttctgagctctcaaactactctcaacaacaattaatacagaagacttctatgaccaaatgtggggaatttccctccatcaacaaataagcaatccgttttgcagcagacaccaggtgggtgtgctgtaagtcagttctgacactatccatgtggagatagcatcacgtcccacaggctgagggctcagtccccaaagctgtccctcctccctcagacactagtcgcaagtctgggtttctggaacttctgactgattggcctcaaattagccaaatcca

SEQ ID NO: 70488 - DNA, 628 bp, Homo sapiens
cctctagggacatcccccttagaaaacttggggtgctagacatgccrattaactcctttcctcctctggttgaagctggtgtagggggtctcttcatgatcatatggtacttcaccaggggcagcatctttggcaagagtgtgttctgaatctccctaccagctttagtgagtctggttttgcattctcctggggtgcaggagccttttgattagtttctgattttttacaaagggaatatgtacatgaactattgctgaattgatatgcttattggggaaaaaagggatcaggacttccttctaccatgttgctgacattactcctctcagtttgatttttgagttgcagtttttcagatacttggtatttgcacaacatggtttgaactcacatccagttaggccttgatgctggtaggtgacaatcaggttaacacagcacagctgagtgtcagtgcagtgatatggaattacgtggatgggagtcagaaaatacagggttctagattttgtgccaccctccagtggccatgagacctgaggcaaatggctggacttctccaatttaattccccatctgtaaatcaaagatggcagtgcctttcctggctacttcatagagccat

SEQ ID NO: 70489 - DNA, 1297 bp, Homo sapiens
aatgtactgtagtatgtaagagcttaccactggggaagctgcgtgaagagtgcacaggacatctcggtactaattttgcaactttctgtgcatctttagttatttgaaaacaaaaagagaagaaaaaaaaaagaggaggaggcaggacattaaaaaatataaccttatggatgggcttggtggctcacatctgtaatcccagcattttgggaggccgaggccggtggatcacgtgagggcaggagttcgagaccagcctagccatcatggcaaaaccccatctctactaaaagtacaaaaattagccaggcgtggtggcaggcgcctgtaatcccagctactcaggaggctgaggcaggagaattgcttgaacccgggaggcggaggctgcagtgagcagagatcttgccacttcactccggcctgggcaaaagagtgaaactctgtctcaaaaacaaaacaaaacaaaacaaaacaacaacaaaaaactccttattcaaaaatcgaggccattccagataaaggaactctctttatatctacaattttggctccaaactttattgtggcttcctaccttagtgaactggattagtgagcatgtgtgattgcagtgactgcctaaaaaagagacagggcagcctgccctgtcccatgagtccttcccgttgggcttccataaaaggggtgaagtgtccttccccagcaggaggcggcattgagtaattctyatgacaccagccttaaagaaggacttacttggcctgcagtctgccacacacatctccctcagggccccagcagggcctctgcagctagtaggtgcttaatggaggattttaggattttgcatcttggttatctcatctttgaggactcgacctacatctggcaagtctaggagatggaattgaggagggcatatgcacagagtactgggaattagagagctgagtcactggagagtctcgaacctcagagcagctgcctttctcttggactcaggccaagattgagggagactgacgacatattgcatctcacaggttcccaggggcacaaggctatttgcgaccacagcagctccgtttggctaaggaggccttgggtttctgagggataggaagaatcagagcagagaagagcagatggaatggtgaccgacgtagggccctgaagtttacttagggttgtcttctagaaatgtgaggtgctgtgtttacaaaaaaagcatagcttgcactgctctcagtctcaggttcccaggggaaagggctaaataaagacaatctgcaat

SEQ ID NO: 70490 - DNA, 1106 bp, Homo sapiens
ttttggttgggtaagtatacatcttgggtttctctagtcctagtgaatcaggtcaattctggtataattattctggtagagtagagtgcgaatcactctaaaaattgtgctggttttgaagatctatgattacttttattaggtgatgcccacaaaagcatttcaaaatatggactaggcaccttccattctaggtcttatctataagagaataaaacacaaagcaggcagaaaaatctatggaaggcaccaatggaatgtctggtattcaagcgaagatacccagttaacaaatctccactggggaatgggggctaggtagagatttcttaggtgtttctgcttgctggcatagtttactctggttgcttttcaatactcaactggtgcacgccctatggtgtactggagaatgctcatcttgatggtcaggggctgggcaacatctgttgttaaatattttgaatgttacctgttactgaacctctctaacctgcgttagcatatcaatagatttcttgatttggtgatgattcaatgacatatcactgtgccacctggggtagttaggattttaaagccagcaaataaatgtaataacaataattgtaaaaaacaataatgctgccaactcaaagtttactatgtttgagaagctgctgtaagcactttaaatatattaactctttcagttttagcaaccctgtgatataaatactattacaattccattttttacacatcagaaaacggaggcacaagctaaaaacattacctaaggccacacagcaatggtgatgtgaatttgaaataaattgagactcataaagacttcatggcttggcccaaggaattcaaaaacaaggccactaaatttgaaaattatcacaaggatgctcatataaatttggacctatttggatgtaaattcaggtccaaaacactatgttggacaaaggaattgtaaacccattcaaataatctccatgtcctagtctaggatgattttgtttacaagtcttattcacaagatctttagaaatatgtcccaagagagyatgtaatggaattgactgttacaaatatattattatagccatacttaa

SEQ ID NO: 70491 - DNA, 528 bp, Homo sapiens
tgactatcctggctgatggccattctcaagagagagaaaccktaagaccaaattagaaaaaaccctaacaatggaaccacagcacagggttaatacggtgcctcctttcttagagttatcatgaagattagtgatttacccatgtaaagaaatgaatgctgtggctggctaatagaaagcaattcaaaaaggtttgaattattagtaaccattattgttatgttattaaatatattaattatgattattattaatcattattattgaactgtaatagcaattatcattgaaccattattattgaactgtagtagttatgcatgtggcatacctttagtatgatctctttgagtcttttattgttttatcatgcattgtgtctcagattcccaattataaaatttacagacatgggattaaagtaccccaaaacacaaatattttgtttgattataaaaatgacttcttttctaaactattatcattattgcattgggaaagattatgaacactagttagagatatcat

SEQ ID NO: 70492 - DNA, 528 bp, Homo sapiens
tgactatcctggctgatggccattctcaagagagagaaaccttaagaccaaattagaaaaaaccctaacaatggaaccacagcacagggttaatacggtgcctcctttcttagagttatcatgaagattagtgatttacccatgtaamgaaatgaatgctgtggctggctaatagaaagcaattcaaaaaggtttgaattattagtaaccattattgttatgttattaaatatattaattatgattattattaatcattattattgaactgtaatagcaattatcattgaaccattattattgaactgtagtagttatgcatgtggcatacctttagtatgatctctttgagtcttttattgttttatcatgcattgtgtctcagattcccaattataaaatttacagacatgggattaaagtaccccaaaacacaaatattttgtttgattataaaaatgacttcttttctaaactattatcattattgcattgggaaagattatgaacactagttagagatatcat

SEQ ID NO: 70493 - DNA, 966 bp, Homo sapiens
attttaaaatgtatttaaagtagcaatttttcaaacaataatttgtttgcataagtattaatatattttaccctcctaaaactgtctcattttaaaaaaaatttgcagtatgctttttgactgtgcatcattggaaatacctgctgatagaaatatttgtttcaatatcaattagatcataattatgcaattattttttaccttatgttagtatggcttcctgcagactttattttagaatacatgaaaatgaatatgatgtcattatttccaaacatctcaaggagtctaaagtttataaaatcttatcaattatgatgtgatactgacaagacatgagaatatttgcttcacacatcatggcaagtcacatttaaaaatataattagcattttcttttaacaatacttcaaaatacaggtaccaatcagctcaatattgtyataaagcaagtcaaaaggaaaaatggagcaaggacattgaaacaataaaagtcatcagattaaggcaagaaaaatttatttaattcaactcgtctcaacaactaattattaaatagctgttatgtgcttccactctgtaaaacactgagatgcttgaaaaaaatgaagaaaggtgaaagaaggagaaggaggcagaggagaaagagaaagaagaggagaaaaagattataaccacagtcctcttctttatcacatgggaatctgaggaatttacattatgtttcagttagaggaatactttagttgaagccttaaattaaatgcacttagcagagccagctttcaattataaaattagggagaagaacttgaaattacttagaagaacttagtccatttagggcattagcagagagctgaccatctccattggttttttggttttctacagctgttctggatagaacacatcctactctgatctacaggcaaggcatcctctttattgtttggctctgataga

SEQ ID NO: 70494 - DNA, 966 bp, Homo sapiens
attttaaaatgtatttaaagtagcaatttttcaaacaataatttgtttgcataagtattaatatattttaccctcctaaaactgtctcattttaaaaaaaatttgcagtatgctttttgactgtgcatcattggaaatacctgctgatagaaatatttgtttcaatatcaattagatcataattatgcaattattttttaccttatgttagtatggcttcctgcagactttattttagaatacatgaaaatgaatatgatgtcattatttccaaacatctcaaggagtctaaagtttataaaatcttatcaattatgatgtgatactgacaagacatgagaatatttgcttcacacatcatggcaagtcacatttaaaaatataattagcattttcttttaacaatacttcaaaatacaggtaccaatcagctcaatattgtcataaagcaagtcaaaaggaaaaatggagcaaggacattgaaacaataaaagtcatcagattaaggcaagaaaaatttatttaattcaactcgtctcaacaactaattattaaatagctgttatgtgcttccactctgtaaaacactgagatgcttgaaaaaaatgaagaaaggtgaaagaaggagaaggaggcagaggagaaagagaaagaagaggagaaaaagattataaccacagtcctsttctttatcacatgggaatctgaggaatttacattatgtttcagttagaggaatactttagttgaagccttaaattaaatgcacttagcagagccagctttcaattataaaattagggagaagaacttgaaattacttagaagaacttagtccatttagggcattagcagagagctgaccatctccattggttttttggttttctacagctgttctggatagaacacatcctactctgatctacaggcaaggcatcctctttattgtttggctctgataga

SEQ ID NO: 70495 - DNA, 658 bp, Homo sapiens
ctggttgagttattcgcgtccgtggggcctaatcctgctccatgtgttctctttgataaggccctgccttctgtctccaagcttgccttttcagctccagttccagacagggcaaaaggaacgattccccagcatctaggcagaatcatgaagggggtcaaagctttgtccttgctctcccttctccctttcaatagacttctccgggcaacctgaggctggtatcctccagcagggcccagggctcccctctccagaccccagctgtgccacaggacctctgcccttccacccaatgcttctgtgttgtttcttatagtcccataattttttctttcctaatttctctgatgaatgaaattcccgtaaactatttsacatgaaggagttaatgactgcttttgacttaagcagtcactctttcccagtatttgtagttttacaaagctttgacactgaagaaggactctggtatgggataacttctgccttcaataaatggcaagatgatctgggcaagatttttggtgctctctgaagtcatcccctgtgagtgaacatctaatccactcatgccagtccaactcggatatgcctggacagcccctgatatggaagagcatctgtcactcactggtaggtacagataggtgcatca

SEQ ID NO: 70496 - DNA, 1063 bp, Homo sapiens
atgtttaaagaggaggttgacagtggagaaaaaaatctctatctgtggctcttgatcccatagccatctttgtgtccgttgctgatataggagaaacacaaggcagcccctctgtggtctttattttcttcaccccatgacttccaagcacattcatctcccagaccagtacatgatgaagagctgatgggaatgtgtggccaagagagccagctggctgcttggcttggccagacctccctttccttacctagagctgctctgggccctggatccccacacataatcttttacctctcggtgttcgaccagttggccaggccggtgctcctcgttccttttatgcacaggtcatctgaggagaaaggggactcaggacaggtagttttttkggggggaggaaagggggggtttcttggatatgaaacaagagactgtctggaagttcagtcattgatggaggacctgaatcacttgcgatagcagaaggtcacctggcaattgacagagggtgagggtgggaggctgcagggaaaataaaagaggagaaagatggtaagcaattcattgggatgtgcctcaatatggatactaggattcaaacttagaaatgtctatttatacatttttagggcacttttgactttctgtcatgatatccttgagtcttcaaagctggaagtttcctgacatgagaggaggatttggttttattctcagcctctccagataatacaaaactttgattttatattaggctgtcacctaccttgtgcagagaaataggcaagaaatacattcctgttaaaaaaataaaaagaagattatagcttgcttagagaagaagggaagagaggagaagatgaggaatcacagcagaatcctgcatctaaagtgggcggagggttgggagttgcggcgaagaggctgacaaaaaaaaaaatagaaagaaagaaaaagaagaaataaagagcctgatccttctcaggatctaggctgacaattcacagtcctaatgcaccttaagggttaatgtgcaaatctgggtgttgtactgaagagg

SEQ ID NO: 70497 - DNA, 444 bp, Homo sapiens
tttctaagcataagcattgacaaggcagggcttgttccatcttcatccttttctccttcctcagcctcatccagagagctgacatcacytttctcagcaacagacaatctccaccaacgagaaagtcattttttgtgtctgtctttaattaattcactcattaatagagatatattgatggtccacatgtgtagagcagttgccccttgttcagctcaccccacaggacagagattattcccaatcatctcccatgggcaaagagtccagccctaccctgtgaggaaggcatgagagggaactgcccaggtgggtgctagaagggtttgaaagtggttattaatggaggacagagcagtgatcacatgggagaggaactaaatgtgctgaggctgctgaaattgaaaacgcctgttaatagcacaagtgacacatcatagatca

SEQ ID NO: 70498 - DNA, 663 bp, Homo sapiens
tggcctttccatcatggggtgacttatgccctgtttgctcccaataggtcaaagagactttgatttggcagatgcccttgatgaccctggtaagtgccgatatttcaaggggagccttcccttttcagcttggatctaacagcatcagctgtatagttactttggggttggattgggccagtgttgggaatttcttggtcttgagatctctgttctttgcaggagattgcagacaccttgagacaaacctttacacactctctaaaagtctcagactcatttcttggtaggtctgtgcttctaaacctgtggtttaggaatatgctagtattttattattttattttactttattttgttgagatgggagtctcgttctgatgcccagactggagtgcagtggtgcaatcatagcytaccacatagcctcgacttcctggctcaagtgatcctcccacctcagcctcccaagtagctggaacaacaggtgtgtgcccccatgccaagctaatttttttcttttttcttttttgtagaaacggattctcactatgttgcccaggctggtcttgaacccctgggctcaagaaatccttctaccttggtttctcaaaacactgggattacagacgtgcctcaacatgcctggcccagtttctgctt

SEQ ID NO: 70499 - DNA, 1028 bp, Homo sapiens
catcaattaaaattcggttcattgatttgccggtgacgagaacctgcaaacagaatgtgcaggtgtcctgatctgaccctggaagagagagaaaggttcaaagatgagctcttttagtttcaagatatgagtcaactgccttggattcatttccttgttttctttttttttttaatattagggatgtcaatgactcctcataagatgatgaggagagatagatggtataaagtgtattataaatgtgatggttcttactgcctgcttaaggttctagtgcaatagaatattagggatgtcagtgatttcctcataagatgatgaagagagaaagatggcataaagtgtattataaatggtggttcttactgcctgcttaaggttctagtgcaataaaatatgagaaatacatggcttataattcaggcagctattaatgtgatcctgttggacttttgtctgcccatatatggccaaccaagaccgaacaaagtatattccttaaatgttggaagaatctgcaaaccacagactagccagtttggtgttaatcgccagaagatgattaaccatggaaatcaaagccagataaacagtttctgatcataaactgaacctgtgtgtggacctcccctttytccagccccaaaaaggattgcaaagcccttgaggatgctttatcttgtgtcgctcagggtgcctagaagagcgttgaaaactggcaaattctccataatgtgtgtgttggcatggggaagtggggacgatgggaagctcattaggtacgcagccattagcttttgcagcaaaacaaaccaccccaaaacgtggtgctttaaaacaatacccatttagttcgttcccgattccgtggctcagctgttcaggtttggctcagtgaggcagctctggggtcagctggattcactcatgagtcagtgctcagctgccgggtggccaggagcaggctggtttggatgactcagctggggcagcttggtttagctccaactggtctctcagccttc

SEQ ID NO: 70500 - DNA, 642 bp, Homo sapiens
ctttaaattggagtgattagaccatttacatttaatgtgactgactgttgatatgtttgggtttaagtatgccgtattgtatttattattcatatctcttcctatttttcatcttttgatgaaatacttggaaaagtatgaagtatttgaaaaatacttctttggggctaattatctttctatgattccatttcttttttttttctttttgttttggagacggggttttgctctgtcacccaggctgcagtgcagtggcgtgatctcggctcactgcagcctccacctcctgggtttgactgattctcctgccttggcctccagagtagctgggattataggcatctgccaccactcctggctaatttttatattattagtagagacagagtttcaccgtgttggccaggccagattggtctcgaactcctgacttcaagtgatctgcccacctcggcctcccaaaatgctgggattacaggcatgagccactgtgcctkgcctccatttatttttttaatggagaaattaaaatgactttattgttgtatatatacaaaatagaatttaatagagggcaaaatttattgaactgtatacactgcacctgtagtctcagctacacaggaggttgaggtagga

SEQ ID NO: 70501 - DNA, 539 bp, Homo sapiens
tcaacaatgtacagcacattctgatatagtgactagcttttatcggcttattttccaaaatatactttgcaataatatgtgaatcaattactacgaaatgagacttttctgcatagatacctagcacagagaatcagcatcttataaggaatgacctaaaatgacagttttctttttttttagagacaagttctcactatgttgcccaggctggtctcaaagtcctggcctcaagtgatcctcctgcctcagcctccagggtggctaggattacaggaacagccactgtaccccgcgacaattttcttatctaccactttcctgcttttatataaccccagaatggagactaattggtcacttgtagtccatttttaacatagtaactagtactattaattctcagttaggagcccggtgcagtkgctcacacctgtaatcccagcactttgggaggccaaggtggtcggatctcttgaggtcaggagttcaagactagcctgatcaacatggtgaaaccttgtctctactaaaaatac

SEQ ID NO: 70502 - DNA, 941 bp, Homo sapiens
tttcctttagaaactttacattttctctgatcggggtttttctgagggagaggggttgtatagtattgaagtttaacaggagaagccataaaaccactcactaatgaaaagataaagatgatgaccaagagaagaacttggaataatagtaatactgaattgtaccatcttttcatctcttgctgtcatttatgtattaattccaccaatattaataagtatttgctatgtgccaggcaccttactgggtaaaatttctgttttggtgataggagaccttagatataatagatatctgttaactcttactgctctgtgttgaatytgcagtgaatgtagatattaaacctaggtcttttgtctcacagccttagagtttgtttagccacaatgtctttactttaaaagcctactgttaaaatcagtagttccaatgcaacttatccattgagcaaatcatgtataatctttcttaaaacttggaaacaaaaatctggtgatctatccacctagttaccttctcatggaacataagactataagactcatgaagaagcctcttgctaagaagaaagtcaaaattgaagtaatataaattaatttctgctcagaatgtaggttatgcccaagcagcagaagggcaaagtattccaggctgcatctgggaatggggccagttggctgagattagagttccagtgggcttggggtccaaaataaatcagaggtctggatccaggaggcaagcaagatgagaagaggttctgtggccttataccagagggagagatcagtgttaaagtcaaggagtttgaggccaagaaacgtccacctcttccctagaatatatattctctctgttggctctggaagacactgaatcttcaaaagcatatagagtgtttacagctaagagacaaccagaaatccacaaatggccc

SEQ ID NO: 70503 - DNA, 578 bp, Homo sapiens
gtcccagataaaattcttcaccagaaaattctgtagtatgagacatgcctagctctgtttctccaacacattaagatttcagagccatcaaaagacaatgaatgatatgggcaagacagggtgccttcgggacgtgagaactaaatgcacttacagggttgaccaattgcttaggtaatggagccagttacttggccttggaatttattttgcctaagagaacttgtagggaatcrggaaagtataatgtccaatgttcaagacagcctccattgacagcatctgggtatccattatcagtgaggtcatgataaggcaaagagagctagaaagacagagaacccaagaccacatgtcagccaaagccacaggatacacttatcaagatgtgtcaaagagagaggtttatttgaagaacagatgattgtctatttctatggaatctaccagaaagctactagaactaataagtgagtgtcttattctgttttgtgctgcaataacagaatatctgagactgggtaatttataaggaacataactttatttctcaccgttctggaggcctggaagtccaa

SEQ ID NO: 70504 - DNA, 578 bp, Homo sapiens
gtcccagataaaattcttcaccagaaaattctgtagtatgagacatgcctagctctgtttctccaacacattaagatttcagagccatcaaaagacaatgaatgatatgggcaagacagggtgccttcgggacgtgagaactaaatgcacttacagggttgaccaattgcttaggtaatggagccagttacttggccttggaatttattttgcctaagagaacttgtagggaatcgggaaagtataatgtccaatgttcaagacagcctccattgacagcatctgggtatccattatcagtgaggtcatgataaggcaaagagagctagaaagacagagaacccaagaccacatgtcagccaaagccacaggatacacttatcaagatstgtcaaagagagaggtttatttgaagaacagatgattgtctatttctatggaatctaccagaaagctactagaactaataagtgagtgtcttattctgttttgtgctgcaataacagaatatctgagactgggtaatttataaggaacataactttatttctcaccgttctggaggcctggaagtccaa

SEQ ID NO: 70505 - DNA, 977 bp, Homo sapiens
ttattctgattgagctggaatttgatgccttgtcctcatctttttctttcccactttctgaagcacaaatcagagcaactagtaaataccactatagtccttcgtttgactattatgtccgaaactaacaaattcatrgtcatctagaatcatgccttctataggtatatgcttgggattatccaatatatttggcatatatttatcaccatgtcgtggctttaacaaccaatgccctattttccactggaaataaagtcaatagtgcctttaaactaaaaaagatgagaaatccaatttgagaaaacacagaattgatttagaaaactcattcttaagattctcttcctctagaaccacttctggaacaaaatatcttttggtcagcgttgaaacggagtaacaaaatcaatatgacatatacaaatgatttattgcaaggaactttcttatgccactgtgggactggctaagcaactgcaaaaaacatatggctataccccaggatggctcagatggaacactaacccacgagaggaagatgctactaaaaggtgcaatttcttttttcaaagaagcttcagctctacttttaaataatttcaagtgattcatcaggcccactgacattatctcacataatatccctactcaaagccaactgattatgggctaaatatctacaaaatgccttccatatatatatatatatatatatgtattactgtttgattaaataactagggactgtagtctaggcatgttgtaattaaaattgataccacacagatcctcatcatcagaaaactgtttaaggaaaaattaatattcagtacaccaggatacagcaggcattagaaatgaggttggaggtcaacttatttatacagcctttaacattagtgtcatattaggacaatcctgttaggagcaagtatgcttagtgtgttcctagttttgtaaaattctatacaatt

SEQ ID NO: 70506 - DNA, 703 bp, Homo sapiens
ctagaggggatggtgagattttaggtcatttctttcattatttctattatttttattataaagtgtgcagttaacatgtaaaaactggaatgtctccataccacaccagggcatgggtatgaacaaggtcacaataatattaatcgcacacatttcatcagcttcaaaaccctacttgctaatataggaacaccaggccttggaagagttcccacccctcttccagcatcactgagattcccctcctgtggctggatgagctgtggtggacacggaaatttgacacycagatcccctcaaagggagtactcatctcagtgcttagctccctccaaatctgccttagctacagagagatgctcctttcctggcacagcccacacccagtgactgatgggggtggatgtaaaggtccaaccatattagctcactcggaacaactctggcaggcacatgcagtccagagctcccaaaggggctggtcgagttattattgggcctgtattgaagtttatttaacttctctgtctgcccagtcctgcttcttcccctctgtccttccaaagttgttgattcctagtaaatatcctgcagaccaatctccatcttggcatctgctttcagacaagccaacatgtgacatgaatgcatcctggctaccactagcaactgagctggccaagtgggtctcaactgctcagca

SEQ ID NO: 70507 - DNA, 703 bp, Homo sapiens
ctagaggggatggtgagattttaggtcatttctttcattatttctattatttttattataaagtgtgcagttaacatgtaaaaactggaatgtctccataccacaccagggcatgggtatgaacaaggtcacaataatattaatcgcacacatttcatcagcttcaaaaccctacttgctaatataggaacaccaggccttggaagagttcccacccctcttccagcatcactgagattcccctcctgtggctggatgagctgtggtggacacggaaatttgacacccagatcccctcaaagggagtactcatctcagtgcttagctccctccaaatctgccttagctacagagagatgctcctttcctggcacagcccacacccagtgactgatgggggtggatgtaaaggtccaaccatattagctcactcggaacaactctggcaggcacatgcagtccagagctcccaaaggggctggtcgagttattattgggcctgtattgaagtttatttaacttctctgtctgcccagycctgcttcttcccctctgtccttccaaagttgttgattcctagtaaatatcctgcagaccaatctccatcttggcatctgctttcagacaagccaacatgtgacatgaatgcatcctggctaccactagcaactgagctggccaagtgggtctcaactgctcagca

SEQ ID NO: 70508 - DNA, 1147 bp, Homo sapiens
tataattaggcatatacctgtgaatatgaatatttcattttgtcttctaatgaaattgtgttccaagcatttgcatatagaatacaagccattttaaaaattaattatactttctctttatttctactttttattacactgtgggcacaatacttactaaaacttttttctgaaattttgtgtggagctagatttttatctttgaatttctttccaggacagaagcgtggtcatacctaaagwatccttgtgtttttcctgactttagtggaaaggcgtttagtgtttctccatgaataacatatattagcttttgagatgaaatagatacatttcacttgtattattgcataaaaccttttaagtcaataatggatattaaattttgtcagatacctttttaccatcattggagatgaaaatatgatatttttcctttagacctaattgacatgctaaattagatcaatagattttctagtattaaaccatccttgtttttctggtatgtaccctacttaggcatccttactaagagctacctcatgagtgaacctgggatgtcgaggtgctaggttgggccaggccccctcactgtgtaaggccctcactcctgcacattagcatccagaatgcatttctcatttgtggcttggtaaattcataaacacctgccggtgccaggactcggctgttaaatctgcgaatgttccagagattgaccatatattctgggataacaacagagcatctgctgacaaaaatgattggggagactgaggacatctctatacagtctcctgtaaaaggtctctgaaatattgtttctaagaccagttattctggaagcatattctcttgcaaacccctccctgtgtgtgacctctctgcaaaatgtaaacaagtggagtggagagaaagtatccactccaaacagctcagcaccactggaggcacttcttcctgcactcttggcttaggacaaagggacagatggtgtgcaatcaatcagacaagcgactgtgacatcaccatgtctacatacagctttctcaggcaacactcgatttacattcccagcagcccccaaatcagtacaatcattattccacactgccctctagcacctgagattcacagttgtttt

SEQ ID NO: 70509 - DNA, 1147 bp, Homo sapiens
tataattaggcatatacctgtgaatatgaatatttcattttgtcttctaatgaaattgtgttccaagcatttgcatatagaatacaagccattttaaaaattaattatactttctctttatttctactttttattacactgtgggcacaatacttactaaaacttttttctgaaattttgtgtggagctagatttttatctttgaatttctttccaggacagaagcgtggtcatacctaaagtatccttgtgtttttcctgactttagtggaaagrcgtttagtgtttctccatgaataacatatattagcttttgagatgaaatagatacatttcacttgtattattgcataaaaccttttaagtcaataatggatattaaattttgtcagatacctttttaccatcattggagatgaaaatatgatatttttcctttagacctaattgacatgctaaattagatcaatagattttctagtattaaaccatccttgtttttctggtatgtaccctacttaggcatccttactaagagctacctcatgagtgaacctgggatgtcgaggtgctaggttgggccaggccccctcactgtgtaaggccctcactcctgcacattagcatccagaatgcatttctcatttgtggcttggtaaattcataaacacctgccggtgccaggactcggctgttaaatctgcgaatgttccagagattgaccatatattctgggataacaacagagcatctgctgacaaaaatgattggggagactgaggacatctctatacagtctcctgtaaaaggtctctgaaatattgtttctaagaccagttattctggaagcatattctcttgcaaacccctccctgtgtgtgacctctctgcaaaatgtaaacaagtggagtggagagaaagtatccactccaaacagctcagcaccactggaggcacttcttcctgcactcttggcttaggacaaagggacagatggtgtgcaatcaatcagacaagcgactgtgacatcaccatgtctacatacagctttctcaggcaacactcgatttacattcccagcagcccccaaatcagtacaatcattattccacactgccctctagcacctgagattcacagttgtttt

SEQ ID NO: 70510 - DNA, 1147 bp, Homo sapiens
tataattaggcatatacctgtgaatatgaatatttcattttgtcttctaatgaaattgtgttccaagcatttgcatatagaatacaagccattttaaaaattaattatactttctctttatttctactttttattacactgtgggcacaatacttactaaaacttttttctgaaattttgtgtggagctagatttttatctttgaatttctttccaggacagaagcgtggtcatacctaaagtatccttgtgtttttcctgactttagtggaaaggcgtttartgtttctccatgaataacatatattagcttttgagatgaaatagatacatttcacttgtattattgcataaaaccttttaagtcaataatggatattaaattttgtcagatacctttttaccatcattggagatgaaaatatgatatttttcctttagacctaattgacatgctaaattagatcaatagattttctagtattaaaccatccttgtttttctggtatgtaccctacttaggcatccttactaagagctacctcatgagtgaacctgggatgtcgaggtgctaggttgggccaggccccctcactgtgtaaggccctcactcctgcacattagcatccagaatgcatttctcatttgtggcttggtaaattcataaacacctgccggtgccaggactcggctgttaaatctgcgaatgttccagagattgaccatatattctgggataacaacagagcatctgctgacaaaaatgattggggagactgaggacatctctatacagtctcctgtaaaaggtctctgaaatattgtttctaagaccagttattctggaagcatattctcttgcaaacccctccctgtgtgtgacctctctgcaaaatgtaaacaagtggagtggagagaaagtatccactccaaacagctcagcaccactggaggcacttcttcctgcactcttggcttaggacaaagggacagatggtgtgcaatcaatcagacaagcgactgtgacatcaccatgtctacatacagctttctcaggcaacactcgatttacattcccagcagcccccaaatcagtacaatcattattccacactgccctctagcacctgagattcacagttgtttt

SEQ ID NO: 70511 - DNA, 1147 bp, Homo sapiens
tataattaggcatatacctgtgaatatgaatatttcattttgtcttctaatgaaattgtgttccaagcatttgcatatagaatacaagccattttaaaaattaattatactttctctttatttctactttttattacactgtgggcacaatacttactaaaacttttttctgaaattttgtgtggagctagatttttatctttgaatttctttccaggacagaagcgtggtcatacctaaagtatccttgtgtttttcctgactttagtggaaaggcgtttagtgtttctccatgaataacatatattagcttttgagatgaaatagatacatttcacttgtattattgcataaaaccttttaagtcaataatggatattaaattttgtcagatacctttttacyatcattggagatgaaaatatgatatttttcctttagacctaattgacatgctaaattagatcaatagattttctagtattaaaccatccttgtttttctggtatgtaccctacttaggcatccttactaagagctacctcatgagtgaacctgggatgtcgaggtgctaggttgggccaggccccctcactgtgtaaggccctcactcctgcacattagcatccagaatgcatttctcatttgtggcttggtaaattcataaacacctgccggtgccaggactcggctgttaaatctgcgaatgttccagagattgaccatatattctgggataacaacagagcatctgctgacaaaaatgattggggagactgaggacatctctatacagtctcctgtaaaaggtctctgaaatattgtttctaagaccagttattctggaagcatattctcttgcaaacccctccctgtgtgtgacctctctgcaaaatgtaaacaagtggagtggagagaaagtatccactccaaacagctcagcaccactggaggcacttcttcctgcactcttggcttaggacaaagggacagatggtgtgcaatcaatcagacaagcgactgtgacatcaccatgtctacatacagctttctcaggcaacactcgatttacattcccagcagcccccaaatcagtacaatcattattccacactgccctctagcacctgagattcacagttgtttt

SEQ ID NO: 70512 - DNA, 1147 bp, Homo sapiens
tataattaggcatatacctgtgaatatgaatatttcattttgtcttctaatgaaattgtgttccaagcatttgcatatagaatacaagccattttaaaaattaattatactttctctttatttctactttttattacactgtgggcacaatacttactaaaacttttttctgaaattttgtgtggagctagatttttatctttgaatttctttccaggacagaagcgtggtcatacctaaagtatccttgtgtttttcctgactttagtggaaaggcgtttagtgtttctccatgaataacatatattagcttttgagatgaaatagatacatttcacttgtattattgcataaaaccttttaagtcaataatggatattaaattttgtcagatacctttttaccatcwttggagatgaaaatatgatatttttcctttagacctaattgacatgctaaattagatcaatagattttctagtattaaaccatccttgtttttctggtatgtaccctacttaggcatccttactaagagctacctcatgagtgaacctgggatgtcgaggtgctaggttgggccaggccccctcactgtgtaaggccctcactcctgcacattagcatccagaatgcatttctcatttgtggcttggtaaattcataaacacctgccggtgccaggactcggctgttaaatctgcgaatgttccagagattgaccatatattctgggataacaacagagcatctgctgacaaaaatgattggggagactgaggacatctctatacagtctcctgtaaaaggtctctgaaatattgtttctaagaccagttattctggaagcatattctcttgcaaacccctccctgtgtgtgacctctctgcaaaatgtaaacaagtggagtggagagaaagtatccactccaaacagctcagcaccactggaggcacttcttcctgcactcttggcttaggacaaagggacagatggtgtgcaatcaatcagacaagcgactgtgacatcaccatgtctacatacagctttctcaggcaacactcgatttacattcccagcagcccccaaatcagtacaatcattattccacactgccctctagcacctgagattcacagttgtttt

SEQ ID NO: 70513 - DNA, 1147 bp, Homo sapiens
tataattaggcatatacctgtgaatatgaatatttcattttgtcttctaatgaaattgtgttccaagcatttgcatatagaatacaagccattttaaaaattaattatactttctctttatttctactttttattacactgtgggcacaatacttactaaaacttttttctgaaattttgtgtggagctagatttttatctttgaatttctttccaggacagaagcgtggtcatacctaaagtatccttgtgtttttcctgactttagtggaaaggcgtttagtgtttctccatgaataacatatattagcttttgagatgaaatagatacatttcacttgtattattgcataaaaccttttaagtcaataatggatattaaattttgtcagatacctttttaccatcattggagatgaaaatatgatatttttcctttagacctaattgacatgctaaattagatcaatagattttctagtattaaaccatccttgtttttctggtatgtaccctacttaggcatccttactaagagctacctcatgagtgaacctgggatgtcgaggtgctaggttgggccaggccycctcactgtgtaaggccctcactcctgcacattagcatccagaatgcatttctcatttgtggcttggtaaattcataaacacctgccggtgccaggactcggctgttaaatctgcgaatgttccagagattgaccatatattctgggataacaacagagcatctgctgacaaaaatgattggggagactgaggacatctctatacagtctcctgtaaaaggtctctgaaatattgtttctaagaccagttattctggaagcatattctcttgcaaacccctccctgtgtgtgacctctctgcaaaatgtaaacaagtggagtggagagaaagtatccactccaaacagctcagcaccactggaggcacttcttcctgcactcttggcttaggacaaagggacagatggtgtgcaatcaatcagacaagcgactgtgacatcaccatgtctacatacagctttctcaggcaacactcgatttacattcccagcagcccccaaatcagtacaatcattattccacactgccctctagcacctgagattcacagttgtttt

SEQ ID NO: 70514 - DNA, 663 bp, Homo sapiens
ttactatctcagaacttgctttactgtgttcatctattattgtctctttcccaaactcaatgaagggtaatgtgagaagacaattgttcttttcagtttttcatccccagtgttaagggacacacatctgggcacaataaatctttgctggatgggtggatggaaggacagatgaggtgagcctcagctgagtctccagtgatgatggggatcagcccgccaggaaggcagggaaacaaaagacaggtggagaggctgggacttttattaaatccccaaatccttatggtaagcatggctctaaaattgatgataattgtgcaaaatagttgtctagagaggctgtctacttatttcagggattctgtcatgtttctacagtttgggactacctctgggaaaactgattctaagtctgcagcacattcttttgcattcttttgaaagttttcgatgctggtgaatctttgggtctttgaytgaaattttgtaaacagatccaagacatttcatgtagcaactgtttgctgagtctctgcttcttagaatacttccaggcacatagtaggtatttcaaaatgtccattgaatgaaaacattcttgtacttccaaaacaagtgtgactaaaaataataacactgttttttcatgtgactcagact

SEQ ID NO: 70515 - DNA, 1174 bp, Homo sapiens
ttttgatgattagtgatgcaatgagagaaaatgaatacaaacatcaaaagatctgtgtgttcagacagtggttctgatggcacctgtgcctgctgccgcctgcctccttagcatcatgctccatccacctccaccaataagtgaatccaaaggaaagatgcaagtgagggtcaaggttcagagggagtctcttgttcattctggcttcagctggggctttygcaactgtacgtgaactcagctttatttgtattgctttatttcatgactgcaacagggagaagttctcttttcatgacaaaagtatttaggttgctctcggtttgaaaataccaggcatttgatgctaggaatgaggtcttgaatgtaaactgaagttccctttacatacatcatcctacagcattgcacgaggaagaaggcgtgtggctgctctaatacacttcttttatttccctgctttcttttttaatgctctttcctgttcagacttctgggctttttattcccctttccctttgtgtgatggcatttgccttgaatgttgatgagggaaacttggtccttccccaagaacttatttgggggtaattaattcttggcaccctagcagtgcttcacaactgtgacttccttaggtacgaattgactgactaaacgtccaggcatgggacatgtgcaattattgcatttccttttgccaaaaatttaattgtttaatgaacttaccgaagcaggattgggaatggtcattgtgtgtgtaggagagtaaggacagaattcatatgacagcaagggaatatttgagaacatgaattctatttcctaagtcccttcttttgcaatgttgtactctggagctctggaagaagacagttctaggaagataaaccatgcctcagggaggttacagtctattaggaaagcaagtaggcaaaaatgaccacttgtgaacttttgatagactgtttaacgatgaatacaaagagaagaaggagagaggacgaggagacaaaactgtgcctagggaaatagggagggcacttgggaagtgatatttggactagagtgggaaggaaaaggggaattgggtagaagaagagtatatggtggtgattaacattaattttttagcaaacgttgaacttggatttgaaattgggtagaattttag

SEQ ID NO: 70516 - DNA, 1212 bp, Homo sapiens
taaattccttctgcacaaaatgccctgccttcaacctctgtcacttcctctcatctctactcattcttcactttctcagggaaatcttcctaactaggtcattaccctgtgctccttcatagcaccgtgcacctctccatggwgtcctttactatatttgtagtttgattttgtgctgttcaatcaatatatttctatctctagtaggtgataagcttaatgaggacaagggccacatctgtttctgctcattatgtcatcttcagtgcttagagtagcacttgtcactgagtgggcatttgataaatcctagtttaattaaggaaagaataaaagaatgaaaaagtgtgagagagggcaagaaaaggaaagagagagagcgagatgggcagttcattttcttgaacctacagaagatcgtgatggaatggctctcaatttctactttaaatactgtatttcattaactctaagactccataattttatgatacacaattactttatatatcactaaggaagaaaaaacactgacaattaaactatgacatactattgattataagatgcctcccaattttagacatcaaaataatagatgacacaatgtggaaagatgtccattttacaattgatacacattagaattaaattacattaaatctaggaaaaataagctaacttgacagtcaaatggatatagggtgggttgaagaatgcagtctatgtgggttggtgctgttgcataccagattttacatttagacctcagaagtgttgctgtttgttggtttttggtttcatctgataatgtaaagtgaattgaggcacatctagctacacacgagatccttgactggtgaacagtaacactcaattttcaagcaattgggcatatgaggggcaggctacaatatggcaggagaaagacattgtggctatcaatggtgtgtactaaccagaggaccagcaagttacaaactgtatagaatgttttccaaaaagctgtccaagcctttctttcccttcagcatatttgtgcatctttctgaggttatttcagcagcatgctactctgaaaaagaatggattaacaatggtttgagccaatgttaaggggcagactcataaattgcaaagtcattgctcttgctctcaccagtgacactctcagcttcccttccccacatgggtgctgcagcctttgctcta

SEQ ID NO: 70517 - DNA, 719 bp, Homo sapiens
catttacatgcacatctgtctaactcatctgtccaggtgagtgacagtgaggaggcatctaaacccttgccaccacacggaattaaataaaagaccagaggcaagttttgctggagtgaagaagtctcaggatacaacagctgtctgacttcaagtcgggggaaaaaaatgataaaagctgaaatgctttgcttaaatggggagagaaggtgttccaaaaaaaagtgttcctaggcaagttaagctcctgaataactcaagaggcaacacagcttagagaggaagcagatggagactcatgatttccattgcctgagtttgcacctcagccttgccacccccaaggttggtgaatttaggcraacacctaggacttctgatggtgcatgcattttgttcaggtccgctgagaaccagtgccaagatgtgattaaactcataagacatttattagaagggtgttttagtcagcttttggtaccatactaaataccatagaccaggtggcttaaacaacagaaatttattttctcacacttctggaaactgggaaatccaaaatcaaggtgccagccaatttggtttctggtgagaactctcttcctaacttgcaaacgcctaccttctcaccaagtcctcatatggtaaagagaaagagagaaagagaggccacagtcctatcccattaaggtcccactcttatgaactcatttaacctt

SEQ ID NO: 70518 - DNA, 549 bp, Homo sapiens
ctgccacttaaagcacttaactgtgccccggggcatcttgggaaaaggctgatggtragagcctgtcgttgccccaggggaagagctgtccccagtgcagtatgggcttagacaggcccctccctctctcggtgggctccaggccctcctcctcccctgctcttcccttcctcccttccgcctcttcagagcttacctgcactcctgggagtctggaaactgctcctgcaaacccccagcccttggcttcttccttgaataaccagaatttcattcccatctttgggaaataccatttcaggctgcttaagttatgatttaaagcaggataaacccaagccgatgacaacttttggagggtttttcattgatcatttcttctgttgctctcttggcctgagtgatgacaaatgaatagttctccaggatccttttctacaagcagcgcctccctaagcacgcttcttctcagagtggagagtggaagttcaacttcgaggtcagacagacctggctccaacacttactcacagatgggagcttctccaa

SEQ ID NO: 70519 - DNA, 549 bp, Homo sapiens
ctgccacttaaagcacttaactgtgccccggggcatcttgggaaaaggctgatggtgagagcctgtcgttgccccaggggaagagctgtccccagtgcagtatgggcttagacaggcccctccctctctcgktgggctccaggccctcctcctcccctgctcttcccttcctcccttccgcctcttcagagcttacctgcactcctgggagtctggaaactgctcctgcaaacccccagcccttggcttcttccttgaataaccagaatttcattcccatctttgggaaataccatttcaggctgcttaagttatgatttaaagcaggataaacccaagccgatgacaacttttggagggtttttcattgatcatttcttctgttgctctcttggcctgagtgatgacaaatgaatagttctccaggatccttttctacaagcagcgcctccctaagcacgcttcttctcagagtggagagtggaagttcaacttcgaggtcagacagacctggctccaacacttactcacagatgggagcttctccaa

SEQ ID NO: 70520 - DNA, 549 bp, Homo sapiens
ctgccacttaaagcacttaactgtgccccggggcatcttgggaaaaggctgatggtgagagcctgtcgttgccccaggggaagagctgtccccagtgcagtatgggcttagacaggcccctccctctctcggtgggctccagsccctcctcctcccctgctcttcccttcctcccttccgcctcttcagagcttacctgcactcctgggagtctggaaactgctcctgcaaacccccagcccttggcttcttccttgaataaccagaatttcattcccatctttgggaaataccatttcaggctgcttaagttatgatttaaagcaggataaacccaagccgatgacaacttttggagggtttttcattgatcatttcttctgttgctctcttggcctgagtgatgacaaatgaatagttctccaggatccttttctacaagcagcgcctccctaagcacgcttcttctcagagtggagagtggaagttcaacttcgaggtcagacagacctggctccaacacttactcacagatgggagcttctccaa

SEQ ID NO: 70521 - DNA, 549 bp, Homo sapiens
ctgccacttaaagcacttaactgtgccccggggcatcttgggaaaaggctgatggtgagagcctgtcgttgccccaggggaagagctgtccccagtgcagtatgggcttagacaggcccctccctctctcggtgggctccaggccctcctcctcccctgctcttcccttcctcccttccgcctcttcagagcttacctgcactcctgggagtctggaaactgctcctgcaaacccccagcccttggcttcttccttgaataaccagaatttcattcccatctttgggaaataccatttcaggctgcttaagttatgatttaaagcaggataaacccaagccgatgacaacttttggagggtttttcattgatcatttcttctgttrctctcttggcctgagtgatgacaaatgaatagttctccaggatccttttctacaagcagcgcctccctaagcacgcttcttctcagagtggagagtggaagttcaacttcgaggtcagacagacctggctccaacacttactcacagatgggagcttctccaa

SEQ ID NO: 70522 - DNA, 525 bp, Homo sapiens
cttgctcctgatatggtctttgagtgggattagtgggatcttttcttagtggaggccagagggcagctcgtgaactaaaccctccccagaagggacatttcaggccagtgtggtcycaggtcagcccgtggcctgcgtcctttggtgcctttctggtgactgagagaagctgttcgccagactttcaggcctgtatctgaccacaaacgggggagctcctctgtcccccatgctgagtgagctggagcccaggacttaagcagattgtggaaatgccgagactcagcgtaagtcagaggtactcttaacgccagccaggctgtccatcgtctttatttctttaatttttgtgtttgactcaaaattccctctgaagcccagcagagaggaagcaggcaacaaggatgaagagtaggtgggggtgttttaggctctgaggctgtccttacactcagggaaggattgttttagaaatttttcacgctttaagtggctgttgtgggcctttgcttctgtgtgccgcat

SEQ ID NO: 70523 - DNA, 571 bp, Homo sapiens
gatccacccgcctcagcctcccaaagtgctgggattacaggcatgagccgccgcgcccagcctcaggagagacttttaaagcattttttatcatttaaactgtctaattgttggtgctgtgaagaatcgagtgttcatgttgaagaggtgtttagctggtttgggagggccacggttccggtcatgtcactggttctgttaggcagagtacagtatgagctggtcatttcattgtcccctgccgatgggaacagcaggtttgcatccagagaggaacacaaaaggttcatcccagagggcgaaggttaaaatccctgggagcacttcattatcgatatctgatgcttctcagttctcatgtcttgtcctctgtgaaggccttcccatccctcaggggaggaggaacacctgatcgcacacyggtcagcagtggctgtgtgtgcatgtcactcagtgagtgcataatttgtgcttcggtgcccttctcttctcacaggatagcagctgccccgggggcagaggctgcagctgtcgtgtatactgctgtatcccagggcctggctcagagttg

SEQ ID NO: 70524 - DNA, 674 bp, Homo sapiens
gcctggcctgaataagagcttttcaaagcctcctatggacatgtcattttttagtttttctttttaattttttaccagcttcttgttagtcctgcctggtattgacatttcaggcaactgcggtttaaacttttccctcatccacccctaagcacacacacttttccacgcctccatttcctcaagacagttttatcatgctggttgtagtggatcatatctgtagtcccagaattttgggaggccaaggtgagtggatcacatgagccctggagttctgcctggcaacagagggagactttgtcaaaagagagagaaaaaaaagaaggaaggaaggaaggaagttagaaaggaaggaaggaaaggaaaggaaggaaggaaggaaaagagatktatcaaattttttcattaaatcaatattcagtgttctttttgtttgtttttgtttttgtttttgagatggagtcccactctgtcgcctgggctggagtgcagtggtgcaatctcggctcactgcaacctctgcctctcgagttcaagtgattctgctgcctcagcctcctgagtagctgggactacaggcgcccgccaccacgcccggctaatgttttgtatgtgtagtagagacgaggtttcatcatgttagccaggatggtctctatctcctgacttca

SEQ ID NO: 70525 - DNA, 674 bp, Homo sapiens
gcctggcctgaataagagcttttcaaagcctcctatggacatgtcattttttagtttttctttttaattttttaccagcttcttgttagtcctgcctggtattgacatttcaggcaactgcggtttaaacttttccctcatccacccctaagcacacacacttttccacgcctccatttcctcaagacagttttatcatgctggttgtagtggatcatatctgtagtcccagaattttgggaggccaaggtgagtggatcacatgagccctggagttctgcctggcaacagagggagactttgtcaaaagagagagaaaaaaaagaaggaaggaaggaaggaagttagaaaggaaggaaggaaaggaaaggaaggaaggaaggaaaagagatttatcaaattttttcattaaatcaatattcagtgttctttttgtttgwttttgtttttgtttttgagatggagtcccactctgtcgcctgggctggagtgcagtggtgcaatctcggctcactgcaacctctgcctctcgagttcaagtgattctgctgcctcagcctcctgagtagctgggactacaggcgcccgccaccacgcccggctaatgttttgtatgtgtagtagagacgaggtttcatcatgttagccaggatggtctctatctcctgacttca

SEQ ID NO: 70526 - DNA, 2585 bp, Homo sapiens
tgggaggattgttttttaacattattgctgtatctttgttgacaaatcttttcttctgcaataattaatttgccattaatgtcatcaagtgaattcttaaaaatcttaaataggcactattaatagccttgcatgagatctgagctctgttatctctaatcctctctaatgactctttctttgctttgggtagtttcttcacacacgagcaccaattgttaatcttctgatccctttatccagctctcctgtgcagtagtcctgcaggcaccagccagtttagtctctatttcctttcagctctgtatcctcaactcgtaattgcttcattgagattcctctttcctattcctagaatctcttacaatgcaaaaaccaaggycaactacagactttaatttatttattttccatctgtcaggaatctgtccttcagtgcctcgtgtcctagtgtcatgtttacatatttgtctgactatttttgttgtttcaggtaggagaatatatcttatctggttttccttgcatcctattgtttgaaagtagaagttgactttatcttttatcgtgccattgtacttacgttttatacttctttttcctatgatacctcctaaagtctacactagaatacgttgtcattattctactttttgcaagaattccaatggacaagatttgtgctctataatactacaaatctttttagtagataagaaagcactgacttaaactgtcaatgggtaacagtaaaaagatcagtaaaaataattttttttctgtcatttgatagtaggcattcccaaagatgtaaaggagatcagcatgcatctaaatgcaagatggtctccttccagtgcaacccctaaggataattttcacaggtctcttatgactgctaacatgaaaggaacttcccccttttgcggtcctagctctgatagtcactgcctgtgttctcattctttctctctctctctccctctgcctttggcaggtgatttcaaattcctccctctgattccctgtatattttatgctttggtaattgattagccccaggttttagttattgccatcttccacccaccctgcttcctctgcatgacaaacccactcacatctgtattactctgttgcctatatacatataactcacttacccacatcatgagactgtgcccatattcttagcatcagacactggacatctttatatatacacacacacatatatatatatacacacatatatatatatacacacatatatatatatatacacatatatatatatatacacacatatatatacacacacacacacacacacacatatatatacacatatatattccatttaatgactttggacatgcgcatacaaccttgaaaccatcgtcacaatcaaggcagtagacatatctgtcacctctaaaaattttcctgtgactctttgtttttgttaatgctgctgttgttgttgttgtaagaaaaattaatgagatctaccctcaataaattttgaagtgcacaacaccgtattgttaactatgggcactatgttgtatagtagatcttcagaacttattcttacataatcaaaattttaaaaccatgaacaacaactccccatttctccctccccccagtccctggaaactattattttattctctgcttccatgaatttgactattttattttattttatttgttttactttaagttctgggatacacatgcagaatgtgcaggtttgttacataggcatacatgtgtcatggtggtttgctgcacctatcaacccatcgtctagattttaagacctgcatgcattaggtgtttgtcctaatgctctccctccccttgcctctcatcccacaaccaccccagtgtgtgttgttcctctccccatgtccatatgttctcattgttcaactcccacttatgagtgagaacatacggtgcttgactttctgtttctgtgttagtttgctgaagatgatggcttccagcttcatccacttcccttcaaatggcatgatcgaattcatttttatggctgcatagtattccatggtatatgtaccacattttctttatccagtctatcactgatgggcatttgggttcgttccatgactttgctattgtaaatagtgctgcagtaaacatacatgtgcatgtgtctttatagtagaatgatttatagtcctttgggtgtatacccagtaatgggattgctgggtcaaagggtatttctggttctagatccttgaggaatcaccataccatctttcacaatggttgaactaatttacattcccaccaacagtgtaagagtttctatttctccactgcttcaccagcatctattgtttcctgactttttaataatcaccattctgactggcatgagatggtgtttccttgtggtttagaattgcgtttctctaatgatcagtacttatgagcatttttcatgtttgttggcctcataaatatcttctttgtgaagcagacactggacatcttaatttcactggctcttgtggaatcttgaaggtcaatctatctaatat

SEQ ID NO: 70527 - DNA, 2585 bp, Homo sapiens
tgggaggattgttttttaacattattgctgtatctttgttgacaaatcttttcttctgcaataattaatttgccattaatgtcatcaagtgaattcttaaaaatcttaaataggcactattaatagccttgcatgagatctgagctctgttatctctaatcctctctaatgactctttctttgctttgggtagtttcttcacacacgagcaccaattgttaatcttctgatccctttatccagctctcctgtgcagtagtcctgcaggcaccagccagtttagtctctatttcctttcagctctgtatcctcaactcgtaattgcttcattgagattcctctttcctattcctagaatctcttacaatgcaaaaaccaaggccaactacagactttaatttatttattttccatctrtcaggaatctgtccttcagtgcctcgtgtcctagtgtcatgtttacatatttgtctgactatttttgttgtttcaggtaggagaatatatcttatctggttttccttgcatcctattgtttgaaagtagaagttgactttatcttttatcgtgccattgtacttacgttttatacttctttttcctatgatacctcctaaagtctacactagaatacgttgtcattattctactttttgcaagaattccaatggacaagatttgtgctctataatactacaaatctttttagtagataagaaagcactgacttaaactgtcaatgggtaacagtaaaaagatcagtaaaaataattttttttctgtcatttgatagtaggcattcccaaagatgtaaaggagatcagcatgcatctaaatgcaagatggtctccttccagtgcaacccctaaggataattttcacaggtctcttatgactgctaacatgaaaggaacttcccccttttgcggtcctagctctgatagtcactgcctgtgttctcattctttctctctctctctccctctgcctttggcaggtgatttcaaattcctccctctgattccctgtatattttatgctttggtaattgattagccccaggttttagttattgccatcttccacccaccctgcttcctctgcatgacaaacccactcacatctgtattactctgttgcctatatacatataactcacttacccacatcatgagactgtgcccatattcttagcatcagacactggacatctttatatatacacacacacatatatatatatacacacatatatatatatacacacatatatatatatatacacatatatatatatatacacacatatatatacacacacacacacacacacacatatatatacacatatatattccatttaatgactttggacatgcgcatacaaccttgaaaccatcgtcacaatcaaggcagtagacatatctgtcacctctaaaaattttcctgtgactctttgtttttgttaatgctgctgttgttgttgttgtaagaaaaattaatgagatctaccctcaataaattttgaagtgcacaacaccgtattgttaactatgggcactatgttgtatagtagatcttcagaacttattcttacataatcaaaattttaaaaccatgaacaacaactccccatttctccctccccccagtccctggaaactattattttattctctgcttccatgaatttgactattttattttattttatttgttttactttaagttctgggatacacatgcagaatgtgcaggtttgttacataggcatacatgtgtcatggtggtttgctgcacctatcaacccatcgtctagattttaagacctgcatgcattaggtgtttgtcctaatgctctccctccccttgcctctcatcccacaaccaccccagtgtgtgttgttcctctccccatgtccatatgttctcattgttcaactcccacttatgagtgagaacatacggtgcttgactttctgtttctgtgttagtttgctgaagatgatggcttccagcttcatccacttcccttcaaatggcatgatcgaattcatttttatggctgcatagtattccatggtatatgtaccacattttctttatccagtctatcactgatgggcatttgggttcgttccatgactttgctattgtaaatagtgctgcagtaaacatacatgtgcatgtgtctttatagtagaatgatttatagtcctttgggtgtatacccagtaatgggattgctgggtcaaagggtatttctggttctagatccttgaggaatcaccataccatctttcacaatggttgaactaatttacattcccaccaacagtgtaagagtttctatttctccactgcttcaccagcatctattgtttcctgactttttaataatcaccattctgactggcatgagatggtgtttccttgtggtttagaattgcgtttctctaatgatcagtacttatgagcatttttcatgtttgttggcctcataaatatcttctttgtgaagcagacactggacatcttaatttcactggctcttgtggaatcttgaaggtcaatctatctaatat

SEQ ID NO: 70528 - DNA, 2585 bp, Homo sapiens
tgggaggattgttttttaacattattgctgtatctttgttgacaaatcttttcttctgcaataattaatttgccattaatgtcatcaagtgaattcttaaaaatcttaaataggcactattaatagccttgcatgagatctgagctctgttatctctaatcctctctaatgactctttctttgctttgggtagtttcttcacacacgagcaccaattgttaatcttctgatccctttatccagctctcctgtgcagtagtcctgcaggcaccagccagtttagtctctatttcctttcagctctgtatcctcaactcgtaattgcttcattgagattcctctttcctattcctagaatctcttacaatgcaaaaaccaaggccaactacagactttaatttatttattttccatctgtcaggaatctgtccttcagtgcctcgtgtcctagtgtcatgtttacatatttgtctgactatttttgttgtttcaggtaggagaatatatcttatctggttttccttgcatcctattgtttgaaagtagaagttgactttatcttttatcgtgccattgtacttacgttttatacttctttttcctatgatacctcctaaagtctacactagaatacgttgtcattattctactttttgcaagaattccaatggacaagatttgtgctctataatactacaaatctttttagtagataagaaagcactgacttaaactgtcaatgggtaacagtaaaaagatcagtaaaaataattttttttctgtcatttgatagtaggcattcccaaagatgtaaaggagatcagcatgcatctaaatgcaagatggtctccttccagtgcaacccctaaggataattttcacaggtctcttatgactgctaacatgaaaggaacttcccccttttgcggtcctagctctgatagtcactgcctgtgttctcattctttctctctctctctccctctgcctttggcaggtgatttcaaattcctccctctgattccctgtatattttatgctttggtaattgattagccccaggttttagttattgccatcttccacccaccctgcttcctctgcatgacaaacccactcacatctgtattactctgttgcctatatacatataactcacttacccacatcatgagactgtgcccatattcttagcatcagacactggacatctttatatatacacacacacatatatatatatacacacatatatatatatacacacatatatatatatatacacatatatatatatatacacacatatatatacacacacacacacacacacacatatatatacacatatatattccatttaatgactttggacatgcgcatacaaccttgaaaccatcgtcacaatcaaggcagtagacatatctgtcacctctaaaaattttcctgtgactctttgtttttgttaatgctgctgttgttgttgttgtaagaaaaattaatgagatctaccctcaataaattttgaagtgcacaacaccgtattgttaactatgggcactatgttgtatagtagatcttcagaacttattcttacataatcaaaattttaaaaccatgaacaacaactccccatttctccctccccccagtccctggaaactattattttattctctgcttccatgaatttgactattttattttattttatttgttttactttaagttctgggatacacatgcagaatgtgcaggtttgttacataggcatacatgtgtcatggtggtttgctgcacctatcaacccatcgtctagattttaagacctgcatgcattaggtgtttgtcctaatgctctccctccccttgcctctcatcccacaaccaccccagtgtgtgttgttcctctccccatgtccatatgttctcattgttcaactcccacttatgagtgagaacatacggtgcttgactttctgtttctgtgttagtttgctgaagatgatggcttccagcttcatccacttcccttcaaatggcatgatcgaattcatttttatggctgcatagtattccatggtatatgtaccacattttctttatccagtctatcactgatgggcatttgggttcgttccatgactttgctattgtaaatagtgctgcagtaaacatacatgtgcatgtgtctttatagtagaatgatttatagtcctttgggtgtatacccagtaatgggattgctgggtcaaagggtatttctggttctagatccttgaggaatcaccataccatctttcacaatggttgaactaatttacattcccaccaacaktgtaagagtttctatttctccactgcttcaccagcatctattgtttcctgactttttaataatcaccattctgactggcatgagatggtgtttccttgtggtttagaattgcgtttctctaatgatcagtacttatgagcatttttcatgtttgttggcctcataaatatcttctttgtgaagcagacactggacatcttaatttcactggctcttgtggaatcttgaaggtcaatctatctaatat

SEQ ID NO: 70529 - DNA, 2585 bp, Homo sapiens
tgggaggattgttttttaacattattgctgtatctttgttgacaaatcttttcttctgcaataattaatttgccattaatgtcatcaagtgaattcttaaaaatcttaaataggcactattaatagccttgcatgagatctgagctctgttatctctaatcctctctaatgactctttctttgctttgggtagtttcttcacacacgagcaccaattgttaatcttctgatccctttatccagctctcctgtgcagtagtcctgcaggcaccagccagtttagtctctatttcctttcagctctgtatcctcaactcgtaattgcttcattgagattcctctttcctattcctagaatctcttacaatgcaaaaaccaaggccaactacagactttaatttatttattttccatctgtcaggaatctgtccttcagtgcctcgtgtcctagtgtcatgtttacatatttgtctgactatttttgttgtttcaggtaggagaatatatcttatctggttttccttgcatcctattgtttgaaagtagaagttgactttatcttttatcgtgccattgtacttacgttttatacttctttttcctatgatacctcctaaagtctacactagaatacgttgtcattattctactttttgcaagaattccaatggacaagatttgtgctctataatactacaaatctttttagtagataagaaagcactgacttaaactgtcaatgggtaacagtaaaaagatcagtaaaaataattttttttctgtcatttgatagtaggcattcccaaagatgtaaaggagatcagcatgcatctaaatgcaagatggtctccttccagtgcaacccctaaggataattttcacaggtctcttatgactgctaacatgaaaggaacttcccccttttgcggtcctagctctgatagtcactgcctgtgttctcattctttctctctctctctccctctgcctttggcaggtgatttcaaattcctccctctgattccctgtatattttatgctttggtaattgattagccccaggttttagttattgccatcttccacccaccctgcttcctctgcatgacaaacccactcacatctgtattactctgttgcctatatacatataactcacttacccacatcatgagactgtgcccatattcttagcatcagacactggacatctttatatatacacacacacatatatatatatacacacatatatatatatacacacatatatatatatatacacatatatatatatatacacacatatatatacacacacacacacacacacacatatatatacacatatatattccatttaatgactttggacatgcgcatacaaccttgaaaccatcgtcacaatcaaggcagtagacatatctgtcacctctaaaaattttcctgtgactctttgtttttgttaatgctgctgttgttgttgttgtaagaaaaattaatgagatctaccctcaataaattttgaagtgcacaacaccgtattgttaactatgggcactatgttgtatagtagatcttcagaacttattcttacataatcaaaattttaaaaccatgaacaacaactccccatttctccctccccccagtccctggaaactattattttattctctgcttccatgaatttgactattttattttattttatttgttttactttaagttctgggatacacatgcagaatgtgcaggtttgttacataggcatacatgtgtcatggtggtttgctgcacctatcaacccatcgtctagattttaagacctgcatgcattaggtgtttgtcctaatgctctccctccccttgcctctcatcccacaaccaccccagtgtgtgttgttcctctccccatgtccatatgttctcattgttcaactcccacttatgagtgagaacatacggtgcttgactttctgtttctgtgttagtttgctgaagatgatggcttccagcttcatccacttcccttcaaatggcatgatcgaattcatttttatggctgcatagtattccatggtatatgtaccacattttctttatccagtctatcactgatgggcatttgggttcgttccatgactttgctattgtaaatagtgctgcagtaaacatacatgtgcatgtgtctttatagtagaatgatttatagtcctttgggtgtatacccagtaatgggattgctgggtcaaagggtatttctggttctagatccttgaggaatcaccataccatctttcacaatggttgaactaatttacattcccaccaacagtgtaagagtttctatttctccactgcttcaccagcatctattgtttcytgactttttaataatcaccattctgactggcatgagatggtgtttccttgtggtttagaattgcgtttctctaatgatcagtacttatgagcatttttcatgtttgttggcctcataaatatcttctttgtgaagcagacactggacatcttaatttcactggctcttgtggaatcttgaaggtcaatctatctaatat

SEQ ID NO: 70530 - DNA, 2585 bp, Homo sapiens
tgggaggattgttttttaacattattgctgtatctttgttgacaaatcttttcttctgcaataattaatttgccattaatgtcatcaagtgaattcttaaaaatcttaaataggcactattaatagccttgcatgagatctgagctctgttatctctaatcctctctaatgactctttctttgctttgggtagtttcttcacacacgagcaccaattgttaatcttctgatccctttatccagctctcctgtgcagtagtcctgcaggcaccagccagtttagtctctatttcctttcagctctgtatcctcaactcgtaattgcttcattgagattcctctttcctattcctagaatctcttacaatgcaaaaaccaaggccaactacagactttaatttatttattttccatctgtcaggaatctgtccttcagtgcctcgtgtcctagtgtcatgtttacatatttgtctgactatttttgttgtttcaggtaggagaatatatcttatctggttttccttgcatcctattgtttgaaagtagaagttgactttatcttttatcgtgccattgtacttacgttttatacttctttttcctatgatacctcctaaagtctacactagaatacgttgtcattattctactttttgcaagaattccaatggacaagatttgtgctctataatactacaaatctttttagtagataagaaagcactgacttaaactgtcaatgggtaacagtaaaaagatcagtaaaaataattttttttctgtcatttgatagtaggcattcccaaagatgtaaaggagatcagcatgcatctaaatgcaagatggtctccttccagtgcaacccctaaggataattttcacaggtctcttatgactgctaacatgaaaggaacttcccccttttgcggtcctagctctgatagtcactgcctgtgttctcattctttctctctctctctccctctgcctttggcaggtgatttcaaattcctccctctgattccctgtatattttatgctttggtaattgattagccccaggttttagttattgccatcttccacccaccctgcttcctctgcatgacaaacccactcacatctgtattactctgttgcctatatacatataactcacttacccacatcatgagactgtgcccatattcttagcatcagacactggacatctttatatatacacacacacatatatatatatacacacatatatatatatacacacatatatatatatatacacatatatatatatatacacacatatatatacacacacacacacacacacacatatatatacacatatatattccatttaatgactttggacatgcgcatacaaccttgaaaccatcgtcacaatcaaggcagtagacatatctgtcacctctaaaaattttcctgtgactctttgtttttgttaatgctgctgttgttgttgttgtaagaaaaattaatgagatctaccctcaataaattttgaagtgcacaacaccgtattgttaactatgggcactatgttgtatagtagatcttcagaacttattcttacataatcaaaattttaaaaccatgaacaacaactccccatttctccctccccccagtccctggaaactattattttattctctgcttccatgaatttgactattttattttattttatttgttttactttaagttctgggatacacatgcagaatgtgcaggtttgttacataggcatacatgtgtcatggtggtttgctgcacctatcaacccatcgtctagattttaagacctgcatgcattaggtgtttgtcctaatgctctccctccccttgcctctcatcccacaaccaccccagtgtgtgttgttcctctccccatgtccatatgttctcattgttcaactcccacttatgagtgagaacatacggtgcttgactttctgtttctgtgttagtttgctgaagatgatggcttccagcttcatccacttcccttcaaatggcatgatcgaattcatttttatggctgcatagtattccatggtatatgtaccacattttctttatccagtctatcactgatgggcatttgggttcgttccatgactttgctattgtaaatagtgctgcagtaaacatacatgtgcatgtgtctttatagtagaatgatttatagtcctttgggtgtatacccagtaatgggattgctgggtcaaagggtatttctggttctagatccttgaggaatcaccataccatctttcacaatggttgaactaatttacattcccaccaacagtgtaagagtttctatttctccactgcttcaccagcatctattgtttcctgactttttaataatcaccattctgactggcatgagatggtgtttccttgtggtttagaattgcrtttctctaatgatcagtacttatgagcatttttcatgtttgttggcctcataaatatcttctttgtgaagcagacactggacatcttaatttcactggctcttgtggaatcttgaaggtcaatctatctaatat

SEQ ID NO: 70531 - DNA, 2585 bp, Homo sapiens
tgggaggattgttttttaacattattgctgtatctttgttgacaaatcttttcttctgcaataattaatttgccattaatgtcatcaagtgaattcttaaaaatcttaaataggcactattaatagccttgcatgagatctgagctctgttatctctaatcctctctaatgactctttctttgctttgggtagtttcttcacacacgagcaccaattgttaatcttctgatccctttatccagctctcctgtgcagtagtcctgcaggcaccagccagtttagtctctatttcctttcagctctgtatcctcaactcgtaattgcttcattgagattcctctttcctattcctagaatctcttacaatgcaaaaaccaaggccaactacagactttaatttatttattttccatctgtcaggaatctgtccttcagtgcctcgtgtcctagtgtcatgtttacatatttgtctgactatttttgttgtttcaggtaggagaatatatcttatctggttttccttgcatcctattgtttgaaagtagaagttgactttatcttttatcgtgccattgtacttacgttttatacttctttttcctatgatacctcctaaagtctacactagaatacgttgtcattattctactttttgcaagaattccaatggacaagatttgtgctctataatactacaaatctttttagtagataagaaagcactgacttaaactgtcaatgggtaacagtaaaaagatcagtaaaaataattttttttctgtcatttgatagtaggcattcccaaagatgtaaaggagatcagcatgcatctaaatgcaagatggtctccttccagtgcaacccctaaggataattttcacaggtctcttatgactgctaacatgaaaggaacttcccccttttgcggtcctagctctgatagtcactgcctgtgttctcattctttctctctctctctccctctgcctttggcaggtgatttcaaattcctccctctgattccctgtatattttatgctttggtaattgattagccccaggttttagttattgccatcttccacccaccctgcttcctctgcatgacaaacccactcacatctgtattactctgttgcctatatacatataactcacttacccacatcatgagactgtgcccatattcttagcatcagacactggacatctttatatatacacacacacatatatatatatacacacatatatatatatacacacatatatatatatatacacatatatatatatatacacacatatatatacacacacacacacacacacacatatatatacacatatatattccatttaatgactttggacatgcgcatacaaccttgaaaccatcgtcacaatcaaggcagtagacatatctgtcacctctaaaaattttcctgtgactctttgtttttgttaatgctgctgttgttgttgttgtaagaaaaattaatgagatctaccctcaataaattttgaagtgcacaacaccgtattgttaactatgggcactatgttgtatagtagatcttcagaacttattcttacataatcaaaattttaaaaccatgaacaacaactccccatttctccctccccccagtccctggaaactattattttattctctgcttccatgaatttgactattttattttattttatttgttttactttaagttctgggatacacatgcagaatgtgcaggtttgttacataggcatacatgtgtcatggtggtttgctgcacctatcaacccatcgtctagattttaagacctgcatgcattaggtgtttgtcctaatgctctccctccccttgcctctcatcccacaaccaccccagtgtgtgttgttcctctccccatgtccatatgttctcattgttcaactcccacttatgagtgagaacatacggtgcttgactttctgtttctgtgttagtttgctgaagatgatggcttccagcttcatccacttcccttcaaatggcatgatcgaattcatttttatggctgcatagtattccatggtatatgtaccacattttctttatccagtctatcactgatgggcatttgggttcgttccatgactttgctattgtaaatagtgctgcagtaaacatacatgtgcatgtgtctttatagtagaatgatttatagtcctttgggtgtatacccagtaatgggattgctgggtcaaagggtatttctggttctagatccttgaggaatcaccataccatctttcacaatggttgaactaatttacattcccaccaacagtgtaagagtttctatttctccactgcttcaccagcatctattgtttcctgactttttaataatcaccattctgactggcatgagatggtgtttccttgtggtttagaattgcgtttctctaatgatcagtrcttatgagcatttttcatgtttgttggcctcataaatatcttctttgtgaagcagacactggacatcttaatttcactggctcttgtggaatcttgaaggtcaatctatctaatat

SEQ ID NO: 70532 - DNA, 524 bp, Homo sapiens
caaaacagatgctattgttctgctgtgttcttccttagagaatgtggccagtggaaacagggcagactgggaattggagtgaacttccttgaaagagagtcatgggtcaagaaggtcaagccaaaggatgtagtagaaagcttttccctagaaatctttgggaatgaagcaggcttcaagcactcccatccctgcccctgccgccacccctaccacattggtttagactgggtagggccagaagtcgcggsgggggtggttggggggaggaaaaaagccatcagtttgcccacggcccaggctgcttccccagctgctcctgtcctagcccgggcctgggtgccatgcttacactctcacactcgtgtgcacgcccacacacacatcacacacctttctagtcacacagtcacagcctggcctctgctcctgtgggccagtggctggacaccccctgggatggctcaaaggagtcagggctgggaagtggggacatcagggtagctgaaggaaatccacacact

SEQ ID NO: 70533 - DNA, 524 bp, Homo sapiens
caaaacagatgctattgttctgctgtgttcttccttagagaatgtggccagtggaaacagggcagactgggaattggagtgaacttccttgaaagagagtcatgggtcaagaaggtcaagccaaaggatgtagtagaaagcttttccctagaaatctttgggaatgaagcaggcttcaagcactcccatccctgcccctgccgccacccctaccacattggtttagactgggtagggccagaagtcgcggggggggtggttggggggaggaaaaaagccatcagwttgcccacggcccaggctgcttccccagctgctcctgtcctagcccgggcctgggtgccatgcttacactctcacactcgtgtgcacgcccacacacacatcacacacctttctagtcacacagtcacagcctggcctctgctcctgtgggccagtggctggacaccccctgggatggctcaaaggagtcagggctgggaagtggggacatcagggtagctgaaggaaatccacacact

SEQ ID NO: 70534 - DNA, 1167 bp, Homo sapiens
ccttaagaaactagaaaaagaatagcaaaatagatccaaagctcacagaaagaaataataaagataaggcagaaataaatgaaatagagaacagcaaaatgaattttttagccaaggaaataatatttgcatgttaactttttccaatatccattttccccttctttctgaaacctccatttttgagctgggtatattgctgcctagctaacagcatttcccagcctcctctgcaactagatgtggccatgtgtccaagttctgatccatgagatgtaagcagaagagttctgaagtgtttctggaaactattaaaagggagaggcttctcttttctcctcgctttcctcctttttactgctcggaatgtggatgcaatggcaagaactccagcagtgatctgtactatgaagcagctttgggaatgggagctacatatggtagaggaaaaagacagagacagcctgagtccctgatatcatgtctcttccttaccagccttgaacttcctcctccagccagagagagacagagagcaaaagagggaataagagagcaccacaatgatggggaagattgagaagacagtctgggaggaattggttttcaaatctrtcctgaacctctaaactttattcatagaagtcagagccagacttgattgtaaaagtagcagttaatgtaactgtagcctctgtcagagatttcttcaaacccctcagcagaggagcagcttatattgaagatcaagcctgcctttatgtggaattgctttctctccctttcttggtagttttcaggacccagtgcaaaatgaaaatgtgagacccattccctggttcaaagagtgttaagaaatttaggacagtgacagaagagcattaaaccaagccctgggcccttctgaacacaggaagtacactcttgaagctaatcctggcaccaagcagtctaactactgcaaaactaaaaccttatttaataagataaagaagtcagggtcattattatctccattttataaatggggaaactgaggcacagagctatctacctaacgtcatacaactagtaagtggtaagcagagatttaaactcaggcactaactccaaagcccattatcttaacctgacatccaccttctccattttatgccctgtaacaaa

SEQ ID NO: 70535 - DNA, 594 bp, Homo sapiens
ggttgactttggagcactaatgagttgtaagtgcatttattaaaccagtatcactccacggcctaggcctttctctacagagaaaagagctaatgaaaggaactaatgaaagagactcgagctaatgaaaacaaaaatcaactcaacccccaaacaatggtgtctggagtagctgaattatccttcctcctaaactaagaagtgtctcgcatttccaaaccgtcagtactctattgtaattgcttttgtttggactacaaagtgtttgggggctccagaacgtagggtgattagtgatcccaatatccatgttctctctgctaaattgaatttagcatatttgttacaggtgatccctggggcctttgtacacacagaaagaaatcaaattaataattcaaaacrtaaaagctatctgttggtctctcttaacttaatttgtttggggtcaggtccacaccttctaattcagaacgcgatttcagtgactcttgagctgtgatgctcagtgaatggagagtagaaaagctcgaggagacaaatctccttaaacacaataaaaccgacagtgggagaatttccaaaatggggttg

SEQ ID NO: 70536 - DNA, 1482 bp, Homo sapiens
ctctccactctgcctatccattcctccctctccccaactcctagcaaccactgatcattttttctgtctccataattttgtcttttcataaagttggatgtttgtttctctgcagcctcatgctccccactgcctaaatttaaataggttctactgtgagctccttgagagaagagatgatgtttgaatgaatgtatgtttctctgtacccagcaagactggatttagtacttagcatgcactgaatgaaaatcagtaaattattatgctgaattaggtcaaatcaatacctcaaataatcaattatccctcgtatcactstcatgtgaaatatacaacaaattaatttgaacgtttttaaaccacaggacatttttaccagtaagaactgggaaaaatctcgttaaataattttactattaagaaccatggcccaagcgcagtagctcaggccgggtgcaatgattcacacctgtaatcccagcaatttggaaggccaaggcagggatcacctgaggtcaggagttggagaccagcctggccaacatggcaaaaccccatctctactaaaaatacaaaaattagtcaggcgcctgtaatcccagctactagggaggctgaggcaggagaactgctggaacccagggggcagaggttgcagtgagccaagatcgcgccactgcacttgagcctgggcaacagagcaagactgcatcttggggagaaaaaacaacaacaacaacaacaaaaacccaaactgaaccatgatcagaagaccttaatctgaagaaccggtagtgaattgtaaaaatttgtttcagtatttgcttttagaatatggatcccctttgtaattaagccccattataactaagttaaataaaggtgatctaaacaatgctgacaataggtaaaattcgtgggttgcttaccaggcaggagtcactgtgctggggacttttcatatatattattaccaatttttacaataattgtaaggtttgtgggtcttataactcctcttgaaaaataagaaacctggccaggtgtggtgactcacacctgtaatcccagcattttgggaggccaaggcaggtggatcacctgaggccacaagctcgagaccagcctgaccaacacagtgaaactccgtctctactaaaaatacaaaaactagccgggcatgatggtgggcacctgtagtcccagttacctgggaggctgagacaggagaattgtttgaacccgggaggcagaggttaccgtgagctgagatcgcactccagcgcgacagggtgagactccgtttcaaaaataataataataataattagaaacccagggctcaggaaagtgatgccactttcccaaactcacatggctttttaagagatggagcttgaattgggtctatttcatagcaaagccagtggtttgagctctctactgtgtaaactcctaaaccaaggccatttatgataa

SEQ ID NO: 70537 - DNA, 517 bp, Homo sapiens
ttatgtgtgtgtgtttttttttaaatatagagatggagttttgctctgttgcccaggccgatcttaaactcttgaactcaagcgatctaccagccttggcctcccaaagtgctgggattacgtgcatgagccaccatgcctggccaagaatatattttaaagtgttgatatataagtgtagttccaaataccaattgccactacttttactcgaataaatgtcgatatgcaaggatgctatagragtgccaataatagaattccttattaggcaaagaattttgaggagctatatcaaagaaagcttcacagaggagaggatgtttaagctaaatcaacaaagataaaactagaaggagtttgccacataagtaaggatttggagcagaaaatctcttgtatacaaatgaagaatcacaattcctcggtattttcctattttgctaattcaagttaagcaaatacatgtggaaaaccttcactaagctctctaaagaggaatgcagtgaagagatgc

SEQ ID NO: 70538 - DNA, 968 bp, Homo sapiens
catgggtgtgtgcaggtgtgtgggtgtgcagtgtccctggctgcrtgtgggtgtgcgcagtgtgcaggtgtgtgggtgtacgcagtgtgtgtggctgagtgtgccgcctctctggcggctcgtgtggtgtcaaagcccgcactgccgttcagcccctgggtgcctggacttctcttctaagatgatggagtttgtggtcggggactgagttgccaaatgctcaggtgggcgctggtgaaatattttctattcgacccaaattccagggaggaaacagctctcctgaggggcatcttttttaccacaacgatgatgttttgctgtcagggcctgcggtcatcctggtcatggtctccgggtgctcaccctcgacggctcgctctttccttgtcttcagttccaaaccaggcgacgtgacttcctccgttcaaaggagctgcaggcgcctcctcttggcttcgtagaagcaagcattcagattggacagcagcattttgcccaaataatttttctatctttgtgaaactgaacttctaggggaagtttagtctcggggcgatgttgggcagcgcagtcacggattaagatgtgatggtgactttcgcatggtcccatttccttatgccttgaagttccaggagctgaatttatgtgcatgctccaagacagctcctgaacacacaccctgaggaagagggtgaactcctccggacgcccagtccaagaaggaagcagctaggaagctgactctgttatctggagtgcagaaaacggagcttcgggtcaccaagtgatctgggcaacagggctggggtgtgtatgtgttatcatcttgctatttatttatttatttatatttaagttctgggatacatgtgcaggacgggcagctttgttacataggtaaacgtatgccatggtggtttgccgcacccatgaatccatcaccgaggaattaagctccgcat

SEQ ID NO: 70539 - DNA, 968 bp, Homo sapiens
catgggtgtgtgcaggtgtgtgggtgtgcagtgtccctggctgcatgtgggtgtgcgcagtgtgcagrtgtgtgggtgtacgcagtgtgtgtggctgagtgtgccgcctctctggcggctcgtgtggtgtcaaagcccgcactgccgttcagcccctgggtgcctggacttctcttctaagatgatggagtttgtggtcggggactgagttgccaaatgctcaggtgggcgctggtgaaatattttctattcgacccaaattccagggaggaaacagctctcctgaggggcatcttttttaccacaacgatgatgttttgctgtcagggcctgcggtcatcctggtcatggtctccgggtgctcaccctcgacggctcgctctttccttgtcttcagttccaaaccaggcgacgtgacttcctccgttcaaaggagctgcaggcgcctcctcttggcttcgtagaagcaagcattcagattggacagcagcattttgcccaaataatttttctatctttgtgaaactgaacttctaggggaagtttagtctcggggcgatgttgggcagcgcagtcacggattaagatgtgatggtgactttcgcatggtcccatttccttatgccttgaagttccaggagctgaatttatgtgcatgctccaagacagctcctgaacacacaccctgaggaagagggtgaactcctccggacgcccagtccaagaaggaagcagctaggaagctgactctgttatctggagtgcagaaaacggagcttcgggtcaccaagtgatctgggcaacagggctggggtgtgtatgtgttatcatcttgctatttatttatttatttatatttaagttctgggatacatgtgcaggacgggcagctttgttacataggtaaacgtatgccatggtggtttgccgcacccatgaatccatcaccgaggaattaagctccgcat

SEQ ID NO: 70540 - DNA, 968 bp, Homo sapiens
catgggtgtgtgcaggtgtgtgggtgtgcagtgtccctggctgcatgtgggtgtgcgcagtgtgcaggtgtgtgggtgtacgcagtgtgtgtggctgagtgtgccgcctctctggcggctcgtgtggtgtcaaagcccgcactgccgttcagcccctgggtgcctggacttctcttctaagatgatggagtttgtggtcggggactgagttgccaaatgctcaggtgggcgctggtgaaatattttctattcgacccaaattccagggaggaaacagctctcctgaggggcatcttttttaccacaacgatgatgttttgctgtcagggcctgcggtcatcctggtcatggtctccgggtgctcaccctcgacggctcgctctttccttgtcttcagttccaaaccaggcgacgtgacttcctccgttcaaaggagctgcaggcgcctcctcttggcttcgtagaagcaagcattcagattggacagcagcattttgcccaaataatttttctatctttgtgaaaytgaacttctaggggaagtttagtctcggggcgatgttgggcagcgcagtcacggattaagatgtgatggtgactttcgcatggtcccatttccttatgccttgaagttccaggagctgaatttatgtgcatgctccaagacagctcctgaacacacaccctgaggaagagggtgaactcctccggacgcccagtccaagaaggaagcagctaggaagctgactctgttatctggagtgcagaaaacggagcttcgggtcaccaagtgatctgggcaacagggctggggtgtgtatgtgttatcatcttgctatttatttatttatttatatttaagttctgggatacatgtgcaggacgggcagctttgttacataggtaaacgtatgccatggtggtttgccgcacccatgaatccatcaccgaggaattaagctccgcat

SEQ ID NO: 70541 - DNA, 968 bp, Homo sapiens
catgggtgtgtgcaggtgtgtgggtgtgcagtgtccctggctgcatgtgggtgtgcgcagtgtgcaggtgtgtgggtgtacgcagtgtgtgtggctgagtgtgccgcctctctggcggctcgtgtggtgtcaaagcccgcactgccgttcagcccctgggtgcctggacttctcttctaagatgatggagtttgtggtcggggactgagttgccaaatgctcaggtgggcgctggtgaaatattttctattcgacccaaattccagggaggaaacagctctcctgaggggcatcttttttaccacaacgatgatgttttgctgtcagggcctgcggtcatcctggtcatggtctccgggtgctcaccctcgacggctcgctctttccttgtcttcagttccaaaccaggcgacgtgacttcctccgttcaaaggagctgcaggcgcctcctcttggcttcgtagaagcaagcattcagattggacagcagcattttgcccaaataatttttctatctttgtgaaactgaacttctaggggaagtttagtctcggggcgatgttgggcagcgcagtcacggattaagatgtgatggtgactttcgcatggtyccatttccttatgccttgaagttccaggagctgaatttatgtgcatgctccaagacagctcctgaacacacaccctgaggaagagggtgaactcctccggacgcccagtccaagaaggaagcagctaggaagctgactctgttatctggagtgcagaaaacggagcttcgggtcaccaagtgatctgggcaacagggctggggtgtgtatgtgttatcatcttgctatttatttatttatttatatttaagttctgggatacatgtgcaggacgggcagctttgttacataggtaaacgtatgccatggtggtttgccgcacccatgaatccatcaccgaggaattaagctccgcat

SEQ ID NO: 70542 - DNA, 1947 bp, Homo sapiens
gcgtggcgatgccgggggccagggcctcatcgcaggacgggaagaggggcggagcgcggcgcagggcagcaaaggggcctccccggaacaaggaacaacatggaaatgcaacgggaaggctggccgcagaggctcctgtggccaaaggaaggcrgcgacaatggaaggcaaaggagacggagctaagtgctaatgagaaaaacagcgctgctgctaggcatgcagcgcacgccgccaccacccttcatgagaccgcgaaagcccacactgggcagcaggtgctgttttcatccccattctacagacgtagaaactgtcacagctaagcacactgccaggaaatggtggcaggcacaggcttggctccgggctgcgagggagcccggctgggaaggttggtgggagggagctccgggtcacccccagccaagcacagatccaggcgccgcggcacgcccatgtttccacatcacgatacattaatctgcagggctcaggtgccagaaatcagcattcccaattctacctattctgcattttttataacatttgatttacttgtttttaaataacaatgagtatcagtaaggatgaatgatttttctgcaacagggttacacttaagagtgtcagaagtttcctgttaaaaaaagctctatataataaatgcaaggtttattatgaatatattgtgctaagttcaataagatataaatatggtctccacctgacataaacatttgataagagaaaacattaaaagggaacttaatgcaaaataattgccaaataaaaatcacttaatattgaaaggcagtattgcagatatttaatattttaaaattaccatcttaaaaatgttaaaacacacagagcgtgaactgcactaccagatagccttgctctttgtttcatggctatcccagacgtagggaaacttcttccactttgcctggatggtcttaatcttcagagtgaaccaaaagcacctccaagttgggccatatcttacttcatataagcttgcttcttttaaacaatgaaaatattttctgcttgacctaattgtggttttgtcactgaaatagatattgcttctgccaattcagattttagatcactttcagatttcatgtcaaattattccagaacattcacatattcttctctctgccttccttctgttacagtatttacaaagtgctccagcctacagcgaggattcaaacactggaaaatgctagaaacgctattgggtagttttcgaatacggtaacatgcaggatccttaacaagttaacggccctacaaagaactgcgtgtcacaactgccaattgaaggactcaatttgcttccaaaacttgctatttttttggaagacccctcacagggtttatatatagcatgttatgtatataaatattaatacttattttatttgcaagaatgacttcacccttagcagcagaggggctacagatccacacttagaaggccttgcccacctggcagcctgaccactcggcctgcacggcttccctgccacacgccttcaccctcattcccgaaaacgccagcctcaacttactcacgctcttgcttgcgacttgtcattggtggactcctctgaaccagtgatgtctctatgttgactataacgtttccaaattataatacttttctgtattttctcaaaatgttttggccatttttcctcagatttgtaatttggaaaaataccaatttcccaaggaatgccaggaacaacttctcacatggaaagccaaatctccaggagtaaagaagtcttcagactccaattccaaaattctttcaactacagcagtctggctggtgagatgggaggacttgcatggaacctactaaaggaaaagtgtcaaaacactggccttggccgggcgcggtggctcatgcctgtaatccca

SEQ ID NO: 70543 - DNA, 1947 bp, Homo sapiens
gcgtggcgatgccgggggccagggcctcatcgcaggacgggaagaggggcggagcgcggcgcagggcagcaaaggggcctccccggaacaaggaacaacatggaaatgcaacgggaaggctggccgcagaggctcctgtggccaaaggaaggcggcgacaatggaaggcaaaggagacggagctaagtgctaatgagaaaaacagcgctgctgctaggcatgcagcgcacgccgccaccacccttcatgagaccgcgaaagcccacactgggmagcaggtgctgttttcatccccattctacagacgtagaaactgtcacagctaagcacactgccaggaaatggtggcaggcacaggcttggctccgggctgcgagggagcccggctgggaaggttggtgggagggagctccgggtcacccccagccaagcacagatccaggcgccgcggcacgcccatgtttccacatcacgatacattaatctgcagggctcaggtgccagaaatcagcattcccaattctacctattctgcattttttataacatttgatttacttgtttttaaataacaatgagtatcagtaaggatgaatgatttttctgcaacagggttacacttaagagtgtcagaagtttcctgttaaaaaaagctctatataataaatgcaaggtttattatgaatatattgtgctaagttcaataagatataaatatggtctccacctgacataaacatttgataagagaaaacattaaaagggaacttaatgcaaaataattgccaaataaaaatcacttaatattgaaaggcagtattgcagatatttaatattttaaaattaccatcttaaaaatgttaaaacacacagagcgtgaactgcactaccagatagccttgctctttgtttcatggctatcccagacgtagggaaacttcttccactttgcctggatggtcttaatcttcagagtgaaccaaaagcacctccaagttgggccatatcttacttcatataagcttgcttcttttaaacaatgaaaatattttctgcttgacctaattgtggttttgtcactgaaatagatattgcttctgccaattcagattttagatcactttcagatttcatgtcaaattattccagaacattcacatattcttctctctgccttccttctgttacagtatttacaaagtgctccagcctacagcgaggattcaaacactggaaaatgctagaaacgctattgggtagttttcgaatacggtaacatgcaggatccttaacaagttaacggccctacaaagaactgcgtgtcacaactgccaattgaaggactcaatttgcttccaaaacttgctatttttttggaagacccctcacagggtttatatatagcatgttatgtatataaatattaatacttattttatttgcaagaatgacttcacccttagcagcagaggggctacagatccacacttagaaggccttgcccacctggcagcctgaccactcggcctgcacggcttccctgccacacgccttcaccctcattcccgaaaacgccagcctcaacttactcacgctcttgcttgcgacttgtcattggtggactcctctgaaccagtgatgtctctatgttgactataacgtttccaaattataatacttttctgtattttctcaaaatgttttggccatttttcctcagatttgtaatttggaaaaataccaatttcccaaggaatgccaggaacaacttctcacatggaaagccaaatctccaggagtaaagaagtcttcagactccaattccaaaattctttcaactacagcagtctggctggtgagatgggaggacttgcatggaacctactaaaggaaaagtgtcaaaacactggccttggccgggcgcggtggctcatgcctgtaatccca

SEQ ID NO: 70544 - DNA, 792 bp, Homo sapiens
tccaaattcctcatttgttgattatcctatgttacctggcattatacaatttttaaatagcttcataatcaactagattattaaatccttgtaagaaaactgtgacctacacatatatgagggttataaatcactaatgaatatttataagtgacagatactttgttaagcaagtgacttattttattttatccttactacaaccccctgaaggataatttttcccagcccctttaagagatatttgttgagattccagcaacttgcctatgtcttattttgcttgataaatatctcttgttcataatgatcatgacatgcagaatcataaagtcattcttcatattttgaattaaaataacttgagatcccctatgctgactctcatttcactgaaaagcctatgagataaattcctatrtgatagttcatcagaatagagcaaacagaaattagcaattatggaaactacatttttttttcctgagttgcttgctataaattctccttacattggcaaaggataaagaagactaaagaaatagttcataattttggcaatctggagagagaggtaacaagagctaattcatcctggctgactcagaaaatattgtgactgtgggtctgcactatcacaaagttgaattgtcagtcaggctcacaagaaactaagttttactaatggttagcaaaggatataacaaaggagtcacagctttcttgtatcctgtgctaatgctacatcagtgcctgggagcccagaaatcagtcaagcacagcttcctaaat

SEQ ID NO: 70545 - DNA, 770 bp, Homo sapiens
gatccatttttctcagtctaaaagttttgctcaaagatgctggagacttcaaaccttttatagggttaaaaatgtgtactgctaactagcaaattgtgactaagttttccactacaggggaacccaagaaaacctttgatatttcagggattgccacaatatttttccttctttctttccttcctactcttctcttaatcataagaaatctggagcatgaatatacaagagcaggggtgagcaaaattccaagaactatatttgtatttttcaattaaatctttaagtttgagtccttattagtctatgtcttcatcaaagcaactaatctggtcattattgttaaacaaagatgaaataattcaggttttgtaacaattaagcatttctcaaagtcttgaggctggctatagaccttaactgtgatacagagtagttagttyacattagtcagttgtatgtattctgtttacccatctgtaaaatgagaataataatatataccttacttggatttgaacttgcaataaagatacatccctagagaataggacgtatgtcttaatcactctgtatttccagcacccagccactcatgtgtacataatagctctcatgttcactaaactgaattaaactaagttacaatatattaaagtttatacatttttaatctctttaaatttaatgggttattaagtgcattgctaactgaccatttttttttgcattaacaaccacattttttataaccaatgaatttggaagat

SEQ ID NO: 70546 - DNA, 1940 bp, Homo sapiens
gtttttttcatcagtgtcaacaaattaaaaagataagaagagctgaggtaatgtgtgttgtaagatgtatgtcacctaatgttaactttgtggtctaaactgttgagctatcaagccagattcccaaatcttttgtcactgaagtgttctgagatataccttgatgtttagaagaaaatagcaagctcacacaggaacagaaaagcaaataccacgtgttctcacttataagtgggaactaaatggtgagaacttagggacacatagaagagaaaacctcacactggggcctttctaagggtggagggtgggaggagggagaggatcaggaaaagtaactaatggatactgggcttaatacctggatgaatgaaatagactgtacaacaaacccccatgatacaagtttacttatgtaacaaaacggcacttgtatccctgaacttaaaataraagttaataaagaaaaataaaactacaaaaaggaaagtatgttctacctcttctaggatcgactttaaaaactttccattccctgtagttgccaattctgcaggtactagtcctctggaaataagtatgttaaactgaaggaatgggaggaacgctccacagagtttgttttccaaagaaaattattgtttagagaagcaaaattaaaagtctagctaggtgtggtgtaaagctgttcaaaaagtaactcagagcaagacctgtaaattgaaatgtagtgcccgagtcatattctgcttaaaaaggttgtaacaaataaagatgagtttaaaaaatgacaaggtaaatcagaattcctactcaaaatgggaaaggacaaatatacataggttgacattagctccccacattagtcttgtctttggaggacaagttaaaaagttattattgatgcatacaagtgggtcttgttgagcagcaagtgaaactattgtctttattagaatggagatattgtgcagatatttgccgattttgcatgcagaaaaagcaactttcttgcctttaagtagaaaagataacagcttagaagagaaactgggaaactgagaattgatccaattccaaacttctgatttttgtaataaaagcgggatccagccaggcatggtggctcatgcttgtaatcccagcactttgggaggcctaggcaggcggatcacttgaggtcgggagttcaagaccagcctgaccaacatggagaaaccctgtctactaaaaatacaaaaattagctgggcatggtggtggtcgcctgtaatcctaactacttgggaggctgaggcagaagaatcacttaaacccaggaggtggagattgcggtgagccgagatcgtgccattgcactccagcctgggtgacagagcgagactccatctcaattaaaaaaaaaaaaaaaaaggcaggatccatgtgtatttcttaaaacagaattgactgttgatcacatatcagtcttaccttttaattaatctgtgtgaaaaatctgttgattctcctaaatttttcatctgtgctctaaagtccttgattacactaagcattgatttagcctccctttagctatatctatttgggcttccaaccagagtcattcacttgcataagtgacacttattaaaattcaacattagaaggcactatattcaatgttaaatatcatttcataaagattacaataacatttttataacaatacacctcatgcttcagaagtctttatgtcacatctcaactcattccatcttctaaaggaggagagcaattttaaaagctttgtatttctcattatgtttattttcccatccatttactaacgctggaccatatttcagagtttcatgaatagtgaaggcagatttcaagggacatcagagttatgatggcatccttaacttgacattcatagaaaaatctgaaagtacatgc

SEQ ID NO: 70547 - DNA, 1268 bp, Homo sapiens
tgcagagttactgaggcctatctggatgagggaaaaaaattaaaaatgatacttaaccaaacagttaaactggattttggttcaacaaatttcaaaatggcattttccaagtggttagcattcctttttaaagttgaacacrgggaaatattttttaaattatctttattcaatctaaacagaaaatataaacaagcccagagcctactagatgaataatctaaatgagaatgaagttaaattggcaacataactcagagtgcacaataataaggcccagatgcaatgctacacatagggtttcagtgagtttcttccaacctttaaaatcaccctctgtttcaagaatcatttcctagtaagttatatctaaaatataggtctcagttttagatatctttagctagtaaaaatcagttgatttaagacttatctctcatttgtgtgggccagttctattcttaattttgctggactattagagcaagaaaaaaccagagagattaatacatatgagccctggtttcctcacatgttaactgaaagtaggtatctgtgggcttcaaacataaaagatactaatgaaaaagttctgccaaaaagagctatagactgcatacaaaccgtagttttattacattttgttggttaattcatccaacattcaacaaatgatttttcagtattattatatggcaggttctgctctgggaacagagaattaagtagtgaacagaaatctttgtcctcatggagactgaacataattgtaattaagttaacatgatttaaatgactttttttcctggttaatatactttggaataagttaccctttttatctttttcagttgatttggctttatctttatcctaatagcttagactgtttgttaaagaaaaattacatttggttcattcataatatgcaagtatcaataatacatagttttaaacatgtataatacttaaacatagttttaaacatgtataaaaatacatggttttaaacatgtataatatacttgaaaatttctacacactagaaatttattctaaagaaataattcaactcatagaaacagagagtagaatggtggctactaaggctagggagcaggtgaattgtggagatggtcaaaggagacaaaatttcagttacacagaaggaataatttcaagaaatctattgtacattatggtgatcatagttaataacagcatattatatacttaaacattgcttttctcacaacaacaacaaagtg

SEQ ID NO: 70548 - DNA, 1519 bp, Homo sapiens
gttttcagtatctttagtttacaagccaactgtttatcacatcaggacattgatctataaataaatttgaaagcagtgatacatctgggccttcgcgggcctccagttgaggcaatgatctataaatatgtttgtctgtgtcgctgatcttttgttattaatgttgcggctttcatcgtggttatcaatctcaccctgattaccagagtctttgcaaaacactttgttccctgaccaggcctcgttggccagttctcacgcatttgactaacacagttatatccagtactggctgtatttcagacgcatcattcattttcactagctcttcccgttctttctatccactttccttcttttgagtacatttttctattttctagaggtgctcccctcatttgtagcaaatgttaccaaatgccctcaaattaagaattgctatatttttgacgcttatatactttaccttcttgatagaagttatgcctattggggcagggcattgtagctcatgcctataatcccagcactttgggaggccaaggtgggaggatctcttgagcccaggagtttgagacaagcctgggcaacatagtgagaccccatctctacaaaaaatgcaaaaattagccaggtgtggtggcatgggcctgtactcccagctactcggggaggctgaggtgggaggatccattgagcctagcaagtggaggctgcagtgagccgagatcacaccactgtactccagcctgggtaacagagcaagaccctgcctcaggaaaaaaaaaaaattatgcctattttgttagttgtgtaagacttctcattattttgttgtgactttctttgtttttgttgtgtctatgccaggcagttttgtattctcgcagggtaatcttacctggaggtggtttcccattcacattcttgcttgagaagattcaccctaatgccttgtacttgctgccgggttagccaacattggaccgagggtgtgtgctgcttttacaggacttacaaaactctgtcttttggctgggcacagtggctcatgcctgtaatccgagcacttggggaggccgaggtgggaggatcacttgaggccaagagtttgagaccaacctggccaacatagtgaaacycatctccactaaaaacagaaaaaaattagctgggtgtggttgctcctgcctataatcccagctacttgggaggctgaggcatgagaaggcatgagaatggcttgaacctgggaggtggaggttgtggtaagctgagatcacaccaccgcactccagcctgggcaacagagcaagaccttaactcaaaaaaaaaaaaaaacaaaacaacaacaaaaaaaccctctatctttctatgcggctatgttactcaggcctagagcaaactaatagaacttgaatgtggctttttcaaattgcataagacactacttagtatcatcactggctaaagtcacctcccctttagtattactcagatcacaaactaagtccaaaca

SEQ ID NO: 70549 - DNA, 1519 bp, Homo sapiens
gttttcagtatctttagtttacaagccaactgtttatcacatcaggacattgatctataaataaatttgaaagcagtgatacatctgggccttcgcgggcctccagttgaggcaatgatctataaatatgtttgtctgtgtcgctgatcttttgttattaatgttgcggctttcatcgtggttatcaatctcaccctgattaccagagtctttgcaaaacactttgttccctgaccaggcctcgttggccagttctcacgcatttgactaacacagttatatccagtactggctgtatttcagacgcatcattcattttcactagctcttcccgttctttctatccactttccttcttttgagtacatttttctattttctagaggtgctcccctcatttgtagcaaatgttaccaaatgccctcaaattaagaattgctatatttttgacgcttatatactttaccttcttgatagaagttatgcctattggggcagggcattgtagctcatgcctataatcccagcactttgggaggccaaggtgggaggatctcttgagcccaggagtttgagacaagcctgggcaacatagtgagaccccatctctacaaaaaatgcaaaaattagccaggtgtggtggcatgggcctgtactcccagctactcggggaggctgaggtgggaggatccattgagcctagcaagtggaggctgcagtgagccgagatcacaccactgtactccagcctgggtaacagagcaagaccctgcctcaggaaaaaaaaaaaattatgcctattttgttagttgtgtaagacttctcattattttgttgtgactttctttgtttttgttgtgtctatgccaggcagttttgtattctcgcagggtaatcttacctggaggtggtttcccattcacattcttgcttgagaagattcaccctaatgccttgtacttgctgccgggttagccaacattggaccgagggtgtgtgctgcttttacaggacttacaaaactctgtcttttggctgggcacagtggctcatgcctgtaatccgagcacttggggaggccgaggtgggaggatcacttgaggccaagagtttgagaccaacctggccaacatagtgaaactcatctccactaaaaacagaaaaaaattagctgggtgtggttgctcctgcctataatcccagctacttgggaggctgaggcatgagaaggcatgagaatggcttgaacctgggaggtggaggttgtggtaagctgagatcacaccaccgcactccagcctgggcaacagagcaagaccttaactcaaaaaaaaaaaaaaamaaaacaacaacaaaaaaaccctctatctttctatgcggctatgttactcaggcctagagcaaactaatagaacttgaatgtggctttttcaaattgcataagacactacttagtatcatcactggctaaagtcacctcccctttagtattactcagatcacaaactaagtccaaaca

SEQ ID NO: 70550 - DNA, 1519 bp, Homo sapiens
gttttcagtatctttagtttacaagccaactgtttatcacatcaggacattgatctataaataaatttgaaagcagtgatacatctgggccttcgcgggcctccagttgaggcaatgatctataaatatgtttgtctgtgtcgctgatcttttgttattaatgttgcggctttcatcgtggttatcaatctcaccctgattaccagagtctttgcaaaacactttgttccctgaccaggcctcgttggccagttctcacgcatttgactaacacagttatatccagtactggctgtatttcagacgcatcattcattttcactagctcttcccgttctttctatccactttccttcttttgagtacatttttctattttctagaggtgctcccctcatttgtagcaaatgttaccaaatgccctcaaattaagaattgctatatttttgacgcttatatactttaccttcttgatagaagttatgcctattggggcagggcattgtagctcatgcctataatcccagcactttgggaggccaaggtgggaggatctcttgagcccaggagtttgagacaagcctgggcaacatagtgagaccccatctctacaaaaaatgcaaaaattagccaggtgtggtggcatgggcctgtactcccagctactcggggaggctgaggtgggaggatccattgagcctagcaagtggaggctgcagtgagccgagatcacaccactgtactccagcctgggtaacagagcaagaccctgcctcaggaaaaaaaaaaaattatgcctattttgttagttgtgtaagacttctcattattttgttgtgactttctttgtttttgttgtgtctatgccaggcagttttgtattctcgcagggtaatcttacctggaggtggtttcccattcacattcttgcttgagaagattcaccctaatgccttgtacttgctgccgggttagccaacattggaccgagggtgtgtgctgcttttacaggacttacaaaactctgtcttttggctgggcacagtggctcatgcctgtaatccgagcacttggggaggccgaggtgggaggatcacttgaggccaagagtttgagaccaacctggccaacatagtgaaactcatctccactaaaaacagaaaaaaattagctgggtgtggttgctcctgcctataatcccagctacttgggaggctgaggcatgagaaggcatgagaatggcttgaacctgggaggtggaggttgtggtaagctgagatcacaccaccgcactccagcctgggcaacagagcaagaccttaactcaaaaaaaaaaaaaaacaaaacaacaamaaaaaaaccctctatctttctatgcggctatgttactcaggcctagagcaaactaatagaacttgaatgtggctttttcaaattgcataagacactacttagtatcatcactggctaaagtcacctcccctttagtattactcagatcacaaactaagtccaaaca

SEQ ID NO: 70551 - DNA, 1519 bp, Homo sapiens
gttttcagtatctttagtttacaagccaactgtttatcacatcaggacattgatctataaataaatttgaaagcagtgatacatctgggccttcgcgggcctccagttgaggcaatgatctataaatatgtttgtctgtgtcgctgatcttttgttattaatgttgcggctttcatcgtggttatcaatctcaccctgattaccagagtctttgcaaaacactttgttccctgaccaggcctcgttggccagttctcacgcatttgactaacacagttatatccagtactggctgtatttcagacgcatcattcattttcactagctcttcccgttctttctatccactttccttcttttgagtacatttttctattttctagaggtgctcccctcatttgtagcaaatgttaccaaatgccctcaaattaagaattgctatatttttgacgcttatatactttaccttcttgatagaagttatgcctattggggcagggcattgtagctcatgcctataatcccagcactttgggaggccaaggtgggaggatctcttgagcccaggagtttgagacaagcctgggcaacatagtgagaccccatctctacaaaaaatgcaaaaattagccaggtgtggtggcatgggcctgtactcccagctactcggggaggctgaggtgggaggatccattgagcctagcaagtggaggctgcagtgagccgagatcacaccactgtactccagcctgggtaacagagcaagaccctgcctcaggaaaaaaaaaaaattatgcctattttgttagttgtgtaagacttctcattattttgttgtgactttctttgtttttgttgtgtctatgccaggcagttttgtattctcgcagggtaatcttacctggaggtggtttcccattcacattcttgcttgagaagattcaccctaatgccttgtacttgctgccgggttagccaacattggaccgagggtgtgtgctgcttttacaggacttacaaaactctgtcttttggctgggcacagtggctcatgcctgtaatccgagcacttggggaggccgaggtgggaggatcacttgaggccaagagtttgagaccaacctggccaacatagtgaaactcatctccactaaaaacagaaaaaaattagctgggtgtggttgctcctgcctataatcccagctacttgggaggctgaggcatgagaaggcatgagaatggcttgaacctgggaggtggaggttgtggtaagctgagatcacaccaccgcactccagcctgggcaacagagcaagaccttaactcaaaaaaaaaaaaaaacaaaacaacaacaaaaaaaccctctatctttctatgcggctatgttactcaggcctagagcaaactaatagaacttgaatgtggctttttcaaattgcataagacactacttagtatcrtcactggctaaagtcacctcccctttagtattactcagatcacaaactaagtccaaaca

SEQ ID NO: 70552 - DNA, 741 bp, Homo sapiens
tccatctcagcctcctgagcctctgggaccacagttgcatgccaccatgtctggctaatatttttaatttttgtgtagatgcggggcgggtctcactttgctgcccaggctgatctcaatctcctagttttaagcactcctcccaccccagcctcccaaagtgctgggattccaggcatgagccaccgtgcccggccaataaaaaagaagcttsctttactttcaatgaggatagttctcctggagacagcacagatgtcctggatcatccatcagcttttaagaattacaaaatatgtaatcccagcactttgggaggccgagacaggtggatcacgaggtcaagagatcgagaccatcctggccaacatggtgaaacccccatctctactaaaaatacaaaaattagctgggtgtggtggtgcgtgcccgttagtcccagctactcaggaggctgaggcaggaggagaatcacttgaacccaggaggcagaggttgcagtgagctgagatcgctccactgaactccagcctggcgacagagcaagactctgtctcaaaaaaaaaaaaaagaatgacaaaatcgatattaatgtggatgtttgcaacaatattcacggcagaatggggaatgaaaagaagaatggattcagagaccctcctatgtgcacttccatgggaagagacccagtctgctcaataaacaggcacccgctctgtctcgatgagaaccaacccaatg

SEQ ID NO: 70553 - DNA, 1224 bp, Homo sapiens
acacaggggccattgtttccccaaacacacggcccccgaactctgaacaccccctgcatccttaggacatgttaaactggccctgttccctttcatcattttaccacgcaaacatcatttttcatcattgtccagctctactcaagataagtgtcaccttctggtgaactcggcccctgtgcagccacaccccccatcggcttcatcagtgcagcctgtgatgcaacagttaaggctgagaacaagaaaagctccccattccctggccagtgttactgtcactagaaaaatccaagttttatagcactttgataacactctctacacacaagcatccacacagacatccggagtcctccacgctcagggaggtacagcgcggccctccagaagcccacacacttcagttamtgttcagtctctacgtgatgctggctccgtgctgtagaactgccttccctgggaggtgtctgagttgactctagatgcttccacggctggtctgtggctgctttcacagggcctctctccacccgctggactcacccgctgctctgttctggggccccttcctctcatacctcgttctcctcaagggactgcacattttgttggatccctaggctgccacccagagctggtgtctacatccttcagccctgacttccacgggtgccactagccccagaaaacgcaacgcgcctcaggttgaaatcctcctcctctgaaatctatgagcctccgcccccttctcagagacgttccaagcctccactgccccctccaccctctcgtttaagggcaccacattctggcccggcgcggtggctcacccctgtaatcccagcactttgggaggccgaggtgggtggatcacttgaggccaggagttcgagaccagcctggccaacatggtgaaaccccgtctctactaaaaatacaaaaattagccgggtgtggtggcgagtgcctgtaatcccagctactcgggaggctgaggcaggagaattgcttgaacctgggaggcggaggtggcagtgagctgagatcgcaccactgcattctagcctgggccacataaaaataaataaataaataaaataatatacaaaaataaaataaaataataatacaaaataataataaaataaaatttccactcttatttgtggaaaagcaagctcatacaaccagggcataaaacacactcatttaactcatcag

SEQ ID NO: 70554 - DNA, 1224 bp, Homo sapiens
acacaggggccattgtttccccaaacacacggcccccgaactctgaacaccccctgcatccttaggacatgttaaactggccctgttccctttcatcattttaccacgcaaacatcatttttcatcattgtccagctctactcaagataagtgtcaccttctggtgaactcggcccctgtgcagccacaccccccatcggcttcatcagtgcagcctgtgatgcaacagttaaggctgagaacaagaaaagctccccattccctggccagtgttactgtcactagaaaaatccaagttttatagcactttgataacactctctacacacaagcatccacacagacatccggagtcctccacgctcagggaggtacagcgcggccctccagaagcccacacacttcagttactgttcagtctctacgtgatgctggctccgtgctgtagaactgccttccctgggaggtgtctgagttgactctagatgcttccacggctggtctgtggctgctttcacagggcctctctccacccgctggactcacccgctgctctgttctggggccccttcctctcatacctcgttctcctcaagggactgcacattttgttggatccctaggctgccacccagagctggtgtctacatccttcagccctgacttccacgggtgccactagccccagaaaacgcaacgcgcctcaggttgaaatcctcctcctctgaaatctatgagcctccgcccccttctcagagacgttccaagcctccactgccccctccaccctctcgtttaagggcaccacattctggcccggcgcggtggctcacscctgtaatcccagcactttgggaggccgaggtgggtggatcacttgaggccaggagttcgagaccagcctggccaacatggtgaaaccccgtctctactaaaaatacaaaaattagccgggtgtggtggcgagtgcctgtaatcccagctactcgggaggctgaggcaggagaattgcttgaacctgggaggcggaggtggcagtgagctgagatcgcaccactgcattctagcctgggccacataaaaataaataaataaataaaataatatacaaaaataaaataaaataataatacaaaataataataaaataaaatttccactcttatttgtggaaaagcaagctcatacaaccagggcataaaacacactcatttaactcatcag

SEQ ID NO: 70555 - DNA, 701 bp, Homo sapiens
aaaatgtattaaaagcagtgaatagctcacagagtccccaggatgcaaaaaaaacctgggtttttttgtttgttttgtttttgggtttttttttttttttttgcatcctggggacttcatgagctactcagcacttttactggggactttggtgggtttccgagaggagcccaccatgacttacagagcggggacacggaggcccacgtggcactgggcacagccaccatgacctgcatgcagctggaggactcgtgccgtgctgtggaccagatcgtgtcccccgaattcatacgttgaagccctgaccctcgatgtggcttatttggagatagggctttgaggaggtaattaagggtaaataaagtcataagggtggggctgtaagctgataggactgtggccttacaagaagaggaagagctctacccccccctccacccaccaccatgggaaggcggctgtctgcaagccaggaagagggtcctcaccagaaaccaacagggctggcaccgtgaccttgggctttccagcccccagaaccgtaagaaaatcaacttctgttacgtaagccaccccatctatgtgctytgttctgccagcccaagatgactaagatagtgtctgctctggaaggcaggacctcctgcctggcatctgcttccatgtagcagaagctgagtctggcccaggacgaccct

SEQ ID NO: 70556 - DNA, 1498 bp, Homo sapiens
tcccacctcagcctcttgagtatctgggactacagaccctcatcaccacaacacccgtctaatttatttattttttgtaaagatgaggtctcactttgttgctcaggctgacaagtattatcttaatgttatagaaaaaaagtaattctggccatatataggtattattctttgcagtggaatatcatttcagaaatttgtgccaaacataaaattagttttctagtagtaaaaagtaattaaactctaaattattattacccctagtatactggggaatgagtgtgtgttccaaatgaaaaaaacttgggatgtctaatgagatgctgttttctgtcgcagaaaatctatgtaaaatgttttttctcacgtgtacactgttgatatttgagacagcacatgttaacacttcaagaagtaaaataaatgtgttgattatatccacagttttcatatttattaactatatattttgtttttaatgtaatgcctattgaaaaacctgtaaatagttgtttcttaaaattgataaatactgcctaagatttttctgtatattttcatatttcaattttcctgtgaggttagaatgaacacttttagctaagacatttgggcctccaaatcctaaacctttcagaatgttagtttattatttggcttttacctaaattattttctgcttattcaagatccttaggtctatccagttacgtttttatttttttatttttatttttttattttgaaacaaagtctcactctgttgccaaagctggagtgcattggcatgatctgggctcactgcaacctctgcctcccaggttcaagtgattctcctgcctcaacctcccgagtagctgggattacaggggcataccaccacacccagctaatttttgcatttttagtagagatggggtttcaccatgctggccaggctggtctcaaactcctgacttcaggtgatctgcccacctcaggatcccaaagtgctgggattataggcgtgagccaccatgcctggctgtatccagttacatttttaagaccagccaggcttaatatatatttggtctttagctcaattcaatttgttgcattttgtccattgtacttcatgtgacacagaatatatcttaatttaaaaagacatatgtttgttgagctatctgttacrttggtatatcttggaattttaaaaaatataaaccacagaagccaattatggctgacattaacaataaataggtttatcacagaaatagtggggaacttgtagaactgttgagaaggctagagagccagatcaaagctaggcagccaggaaatgtaccccaaaccatgctgtagaactcatccagggaggaaaccactgtcaccaccagtaagaagtaacaccgaagatgcagagagcaacaattgcagcaattgctcaatcctaggctaactgcaaagccaccagcaccactcccacttgttcgctttgcaacagata

SEQ ID NO: 70557 - DNA, 1498 bp, Homo sapiens
tcccacctcagcctcttgagtatctgggactacagaccctcatcaccacaacacccgtctaatttatttattttttgtaaagatgaggtctcactttgttgctcaggctgacaagtattatcttaatgttatagaaaaaaagtaattctggccatatataggtattattctttgcagtggaatatcatttcagaaatttgtgccaaacataaaattagttttctagtagtaaaaagtaattaaactctaaattattattacccctagtatactggggaatgagtgtgtgttccaaatgaaaaaaacttgggatgtctaatgagatgctgttttctgtcgcagaaaatctatgtaaaatgttttttctcacgtgtacactgttgatatttgagacagcacatgttaacacttcaagaagtaaaataaatgtgttgattatatccacagttttcatatttattaactatatattttgtttttaatgtaatgcctattgaaaaacctgtaaatagttgtttcttaaaattgataaatactgcctaagatttttctgtatattttcatatttcaattttcctgtgaggttagaatgaacacttttagctaagacatttgggcctccaaatcctaaacctttcagaatgttagtttattatttggcttttacctaaattattttctgcttattcaagatccttaggtctatccagttacgtttttatttttttatttttatttttttattttgaaacaaagtctcactctgttgccaaagctggagtgcattggcatgatctgggctcactgcaacctctgcctcccaggttcaagtgattctcctgcctcaacctcccgagtagctgggattacaggggcataccaccacacccagctaatttttgcatttttagtagagatggggtttcaccatgctggccaggctggtctcaaactcctgacttcaggtgatctgcccacctcaggatcccaaagtgctgggattataggcgtgagccaccatgcctggctgtatccagttacatttttaagaccagccaggcttaatatatatttggtctttagctcaattcaatttgttgcattttgtccattgtacttcatgtgacacagaatatatcttaatttaaaaagacatatgtttgttgagctatctgttacaytggtatatcttggaattttaaaaaatataaaccacagaagccaattatggctgacattaacaataaataggtttatcacagaaatagtggggaacttgtagaactgttgagaaggctagagagccagatcaaagctaggcagccaggaaatgtaccccaaaccatgctgtagaactcatccagggaggaaaccactgtcaccaccagtaagaagtaacaccgaagatgcagagagcaacaattgcagcaattgctcaatcctaggctaactgcaaagccaccagcaccactcccacttgttcgctttgcaacagata

SEQ ID NO: 70558 - DNA, 1678 bp, Homo sapiens
gtgtttggtttatttgtagtgactattcacctttaaaatatttcaatattcaataaaatggcttccaaccaatattattacacttatgtttctaactttcgtttttgtattgatatctgccttcattgctgtttgtttaggacatatattctgtgtcacgttatttccgtgaaaattgtttgaatttgtggtatggtctagaaaatgttaatttttgtaagtattctgtatgaacatgaaaataacatgaattataatattcaagttccttatataatatttgcccgttttaaaatccactagcttcttttaaaacttactcttttaattttttcttttatctattactgaaagacgtgtgtttgaaatgtctataatatttgggggcttatccatttctacttactttctgatatttttgctttatataatttgactctctctctaaatacgtgtgtgtmtgtgtgtgtgagagagagtgtgtggtttgtgtgtatatatatatgtatgtatcaggctaatacacattgaagtcatcacatcttcttaataacttaaaacttttatcacactggttacactaacttattttaataaatgtttctaacttacattctatttggtctacatagcaactttttaaaaaattatattcatgtagtatgtttgtatgtatatcatatatacacagtatctgtattgtttgaacttcaaagtttctgtaaatttatatattagttgtgtctcttgtaactatgatagagacggatgttttaaattttgccaatctttgtattttaacaaaaacattgtctacttaggtttaagttaatctttgatcatttatacttaattttgtattagtaatttgttgtgtatatatatatatatatatataatgtctcattttctcctatcactttctgtcttcttgttttaaaattatgacttttatttttattgttttcatagatacaacagagaaatgcataatgtccagtcaatttattaaagttccaaagtcggtcgcgcgcagtggctcacgcctgtaatctcaacacttcgggaggccgaggcgtgtggatcacgaggtcaggagttggagactagcctgatcaacatggtgaaaccccgtctctactaaaaatacaaaaattagccaggcagggtggcacgcggctgtaatccccgctactcaggaggctgaggcaggagaattgcttgaacctgggaggcagaggttgcagtgagcagagatgacgccaccatactccagcctgggagaaagggtgaatgagactccttctcaaaaaaaaaaaaaaaaaagagttgcaaagtcatacctttctgctcttgtcagacaattaaggggtctttgaatacttcagccctaataatttgcttcctaacatacatattgcagtgcttatctaattttaaatattcttttgtttcaacacctaattttctattttgatctatctttatgtttacaatatattttgctctgtgttcattctttgatttcagaacttcaatctttctgaagcgtgttttcagagtttcctttgagtttctttagtggaattctgctggtggtgttttgttttttgtctctaaatatgtgatttagccataggttgatgaatatttttcttggttgagaatttcagaatgg

SEQ ID NO: 70559 - DNA, 1678 bp, Homo sapiens
gtgtttggtttatttgtagtgactattcacctttaaaatatttcaatattcaataaaatggcttccaaccaatattattacacttatgtttctaactttcgtttttgtattgatatctgccttcattgctgtttgtttaggacatatattctgtgtcacgttatttccgtgaaaattgtttgaatttgtggtatggtctagaaaatgttaatttttgtaagtattctgtatgaacatgaaaataacatgaattataatattcaagttccttatataatatttgcccgttttaaaatccactagcttcttttaaaacttactcttttaattttttcttttatctattactgaaagacgtgtgtttgaaatgtctataatatttgggggcttatccatttctacttactttctgatatttttgctttatataatttgactctctctctaaatacgtgtgtgtctgtgtgtgtgagagagagtgtgtggtttgtgtgtatatatatatgtatgtatcaggctaatacacattkaagtcatcacatcttcttaataacttaaaacttttatcacactggttacactaacttattttaataaatgtttctaacttacattctatttggtctacatagcaactttttaaaaaattatattcatgtagtatgtttgtatgtatatcatatatacacagtatctgtattgtttgaacttcaaagtttctgtaaatttatatattagttgtgtctcttgtaactatgatagagacggatgttttaaattttgccaatctttgtattttaacaaaaacattgtctacttaggtttaagttaatctttgatcatttatacttaattttgtattagtaatttgttgtgtatatatatatatatatatataatgtctcattttctcctatcactttctgtcttcttgttttaaaattatgacttttatttttattgttttcatagatacaacagagaaatgcataatgtccagtcaatttattaaagttccaaagtcggtcgcgcgcagtggctcacgcctgtaatctcaacacttcgggaggccgaggcgtgtggatcacgaggtcaggagttggagactagcctgatcaacatggtgaaaccccgtctctactaaaaatacaaaaattagccaggcagggtggcacgcggctgtaatccccgctactcaggaggctgaggcaggagaattgcttgaacctgggaggcagaggttgcagtgagcagagatgacgccaccatactccagcctgggagaaagggtgaatgagactccttctcaaaaaaaaaaaaaaaaaagagttgcaaagtcatacctttctgctcttgtcagacaattaaggggtctttgaatacttcagccctaataatttgcttcctaacatacatattgcagtgcttatctaattttaaatattcttttgtttcaacacctaattttctattttgatctatctttatgtttacaatatattttgctctgtgttcattctttgatttcagaacttcaatctttctgaagcgtgttttcagagtttcctttgagtttctttagtggaattctgctggtggtgttttgttttttgtctctaaatatgtgatttagccataggttgatgaatatttttcttggttgagaatttcagaatgg

SEQ ID NO: 70560 - DNA, 1678 bp, Homo sapiens
gtgtttggtttatttgtagtgactattcacctttaaaatatttcaatattcaataaaatggcttccaaccaatattattacacttatgtttctaactttcgtttttgtattgatatctgccttcattgctgtttgtttaggacatatattctgtgtcacgttatttccgtgaaaattgtttgaatttgtggtatggtctagaaaatgttaatttttgtaagtattctgtatgaacatgaaaataacatgaattataatattcaagttccttatataatatttgcccgttttaaaatccactagcttcttttaaaacttactcttttaattttttcttttatctattactgaaagacgtgtgtttgaaatgtctataatatttgggggcttatccatttctacttactttctgatatttttgctttatataatttgactctctctctaaatacgtgtgtgtctgtgtgtgtgagagagagtgtgtggtttgtgtgtatatatatatgtatgtatcaggctaatacacattgaagtcatcacatcttcttaataacttaaaacttttatcacactggttacactaacttattttaataaatgtttctaacttacattctatttggtctacatagcaactttttaaaaaattatattcatgtagtatgtttgtatgtatatcatatatacacagtatctgtattgtttgaacttcaaagtttctgtaaatttatatattagttgtgtctcttgtaactatgatagagacggatgttttaaattttgccaatctttgtattttaacaaaaacattgtctacttaggtttaagttaatctttgatcatttatacttaattttgtattagtaatttgttgtgtatatatatatatatatatataatgtctcattttctcctatcactttctgtcttcttgttttaaaattatgacttttatttttattgttttcatagatacaacagagaaatgcataatgtccagtcaatttattaaagttccaaagtcggtcgcgcgcagtggctcacgcctgtaatctcaacacttcgggaggccgaggcgtgtggatcacgaggtcaggagttggagactagcctgatcaacatggtgaaaccccgtctctactaaaaatacaaaaattagccaggcagggtggcacgcggctgtaatccccgctactcaggaggctgaggcaggagaattgcttgaacctgggaggcagaggttgcagtgagcrgagatgacgccaccatactccagcctgggagaaagggtgaatgagactccttctcaaaaaaaaaaaaaaaaaagagttgcaaagtcatacctttctgctcttgtcagacaattaaggggtctttgaatacttcagccctaataatttgcttcctaacatacatattgcagtgcttatctaattttaaatattcttttgtttcaacacctaattttctattttgatctatctttatgtttacaatatattttgctctgtgttcattctttgatttcagaacttcaatctttctgaagcgtgttttcagagtttcctttgagtttctttagtggaattctgctggtggtgttttgttttttgtctctaaatatgtgatttagccataggttgatgaatatttttcttggttgagaatttcagaatgg

SEQ ID NO: 70561 - DNA, 980 bp, Homo sapiens
tgcatgtaaacccagcactttcagagtccgaggcgggcagatcacgaggtcaggagatcaagaccatcctggccaacatgatgaaaccctgtctctactaaaaatagaaaaattagctgggcgtggtggcgtgtgcctgtaatcccagctactcaggaggctgaggcaggagaatcgcttgaaccagggagtcagaggttgcagtgagccaagattataccactgcactccagcctggtgacagagcgagactccatcactccatctcaaaaagaaaaaaaaaaaaaaagagagaagagttgaattccgggaaaatattgcaggcatatgttatttattttgttataaaatatcttggctttttaagttaaattttataggtactttatatagcataactttagctcatttcttgcttatcatatcatccacacttgccatttacatttatatatatatcacctaaatatttgagacttaaaaattcagtccattccattccttttctaaatcatagactgccttattctttgataaatttttcctgattacttttgttttgcattttttggatctgagtcaaaatcgtgtgaaggctccarggaatagctgcaaactacattattactttaaaattcaaaaaaatgtttaaagcatatggtacgaaaaattgttcttctgatctaacttacctgatttggggagttagtgttcatggaattgtgctgagcttcaaacaaatactaggtgaactattgaggacagactcttattgatcttaccaagagttttacgattaaaaacaacaacaaggcaaggcactgtggctcatgcctgtaatcccagcactttgggaggccagaggccaaagcagaaggattgcttgagtccaggagtttgagctcagactgggcaacaaagtgagaccctgtctctgcaaaaaaattcaaaggaaatttagctggctgtggtggtatgca

SEQ ID NO: 70562 - DNA, 3034 bp, Homo sapiens
ttgagttccctgaaatttcccaaaagatactctttcctgggggtgatctatctcatctttaggcagccttatttccttgcattatggatacaaaatccatcattctgcagcattcacacgcttatcttagtttcacacaaacaaatattgagcacctactaattttcagtatgctggttcaagtactagattccatatagaatatgattcattccttttatatatgacaactctttaaatatttgaattgatgaatgaagatttttgtgcagccataactttgaataaagattccatggatagattccatggagattcacttagttctcaagtgaaataaaatataagcatgtatgaaaatgtacaatgatattttaataatataatatataatataataattatgtttataatggtgtgagaacttcagtgagattgaattttgaaatgttttataattaccatttatattaaattattttaattttcttaaattaggaattagtaggaataattccctttttacacttgattctttgagtcaaaagttaaattaaggcgctaatatatttacagtattaaaatcaagtatatatattcaatattttataataaaacagcattgttaagtttcagtagaaactaaaataattagcactcttgccttctgcagcaatgctgggtgctggttgactgcacatacttctagatttctaaataacctcccattgcatttaatttgaatgttgttctgacagctgtaatcaaacataaaatgttagcagtataaaacagactgaaaccttcagatgattttcatagtattcagtattgtcataaacaataagctttgtttgcaatgttcaccctggtcctacctcaaccccacttaatgcttttcaaatgaaatggagttacacaataaaaagcttgttaaaatatgattaattaacttccatttcttctaacaataggatcctcctattcaaaaatgaaaaacaagtgagaaatatccttgctgaacaaattaggccaggaaatctctttcactaaatacaaaaggaatataaatttagcactcaggtattcaaatggaaaatatatgcctgttgatatactgcctatcctgactgaaatacttacacaaaggctatagtaataggagattaggcaagaattccattatgctttatttctatgaaatcaggcaatcaagtgtgcttgacacaggtatacttttgtgggctctatctttacataccaggtggctaactgtcatgcatggcttaaagacatctgacagtttcaaactactwtgttctagtgagaagtttttggatcctttaccttagcaatttaatgttgggacagctcttacttattggtaacagcactcaccagaaacactgtaatcacacttggagctatacaaagaatagaattctgaaagtctgctttctgctaatagctatgattgctttcagtgtttggtacagactcagaggcattcagagccagtaagtgttcaatgtctgaaatagaaccaaaggcatttgatgcttcagcgatctgagggaggacaacaggctggggtttatgtgaacaaaaaaaactcttcaaatggatgagctttagtaagcacagaccactccagtcatctttgtatctcaagcactgaacacaatgccctactcaataaatgtcttgctcttattgggacttcccatcaccatggataccatattaaatatagaaaatgttcataatttctgaattgttttcagacatatatagaaaatagcttgctatttctaagtgtcttttatgtttgtttgtttccttaatgtaaagcatttccttttattccagtgggtataaaacaaatgaaagggcaccaaaaaaattcgtaagagttgaacagctctcaataaatcactgggaaaaaaaaaggctgagaaaagtaatgggaggctactttcaatggatcaacatttttatcttgagcattataccagatgaggggctttttgttttgttttactctccactttgtttattataaacaacaataatacagcttatcatctaatatctgacatttggtcatctaaataaataggggagacatataagaataaaagtgaaagacaagttcaattactactaagttcagcttatgttttaaacttccttctaaatttattttaagccagaatttctaataaaatatgcattaattatactctttacccattcacagccaatactctaaattttaaagacaagtctaatattgcagaaaaacgtgaaaagaaagaaaatcacaagcaagcgattaaaagtcagctgcaatactacttcagaaataatcactataaaaatattgtcaaagcaattgacaaatattcatttattaagtcactgtatgtaaagcaaatagtgcaatgcacataagatatgctctatagatcttggttattttgcatactatattttctgtttggtaagcaacatttttcacttaaaaatatgtcctgaattttacttcatgtcattaaatatcttgcaaaaacatcatatttaatgtttttttttttttttttttttttttttttgagacggagtctcgctctgtcgcccaggctggagtgcagtggcgggatctcggctcactgcaagctccgcctcccgggttcacgccattctcctgcctcagcctcccaagtagctgggactacaggcgcccgccactacgcccggctaattttttgtatttttagtagagacggggtttcaccgttttagccgggatggtctcgatctcctgacctcgtgatccgcccgcctcggcctcccaaagtgctgggattacaggcgtgagccaccgcgcccggcccatatttaatgtttaagagcagtccattatataaatattcctaattttatataagtcaactgaatggaaattatgtagaacattaaagagctgaaaagacaccatggtagggaaaaggggaaaaaaccctacagggca

SEQ ID NO: 70563 - DNA, 1225 bp, Homo sapiens
tgcatcaccaccattgggagggttgtcaaaacacaaattgttgagccttcctcaaagcttctgtaggtctagagtggggccaaaaaatttgcatttcaaataagttcccaaaagatgctgttgctgttggtcttccaaccatgctttgagaaccactgcttgcatagatagaggaccattgagctgatgatgctcttggtaaataataacaataaatatttattatttttaattttaatatgtgttccatgctgatacgatttgtgtccccatccaaatctcatcttgtagctcccataattgccatgtgttgtgggagggacccagtgggagataattgaatcacggggccaggtctttgctgttctcttgatagcgaatgagtcttgcgagatctgatagttttaaaaaggtgagtttccttgcacaaactctctcctctcttgccaccaccaagtaagaagtgcttttcacctttcgccatgattgtgaggcctccccagccacgtcgaactgtgagtccaataacctctttyttctgtaaattgcccagtctcggttgggtatgtctttatcagcagtgtgaaaacggactaatacacatacctagttttcttttgattgttttttcttaatggtatattttctcactttttcatgtattttgtattttttttattgacagcttgtcattgtgtaagaaagatatgcttagtgtaaggtctggagtgctacagaatttttgtcacttctcttcctctaccctcagacttcaacaggccttattttcctgcaccttacattgagtccttttaagaatgacatctttccctctagggtagacagatcatcactgcctcgtacttggtgtaagggccatatttcaagaagttcttctcaattctgctttttcctcattcttaggcaaaccttcctgcatcccagtaaaattcatctcaatattactgattgcttgacaccttataatttccttgagacttacatttttggctcttaattcaaatgagttttgccactgctctctgcttattgataagataattatgtattctgcatctttgtgtgctctctggtgatagattataatataattgtccctgccagagctgctttagttaagtgcctggtagcacaagtcattttcctccccaagggtttgtaaacttaatcttctaaaatctttttgttgtccagttactaatag

SEQ ID NO: 70564 - DNA, 792 bp, Homo sapiens
tcttccaagctaactcattggctccgggcaggccttattttcttcctggctattggctagaggcctcagttccttgtcttttcacagggtagctcacaacatggcagcttgcttttactgggggaaaattaaaaaataatgaattctaaccacagtttaaaaattcaattaaagaaaaagaaaggtttgatgtacattaacaacaacagcaaactataagtcaataaacctaacacaatgtatgcatgtcctatatgaagaaaattgtaaaactttggtaagatgcactgaataaggacaagtaaatagtgaggtagtccatgttcatagataggatgacccaatatagtacacatgctaattatttccaaataaattaatttccaatcaaactcttaagaggatttttcatgaaatctcagaggttgattccaaaatttatatgaatgaccatagagtccagaagaatcaaaatattataggagatgagaagaaaatcatactgttcttgatatcaagatttattataaaaccatgtaattacaacattatagtattgatacaggaatagacaaactgagtaattggacagaygagggagtgcagaaatagacccacatacacgtcgagctttgatatatgatgggggagtgttttagattgttggggaaaggacagagcatttcattcaataaatggtagcagaatgttttttgcagaaaaatagtgaaaataaatcctacttcacaccacgtacaaaaaccaattattgaatttatatatgtatgaaaa

SEQ ID NO: 70565 - DNA, 1185 bp, Homo sapiens
gttatataacactttgagaatgatataaattggacatgttattaagaatataatcatgtaaacatgtaggtaccttcttattactcttcaactgttgtcaagcaactgccaccggttccctcttactgtaaccctgattcagtgtccaacatagacctgtacagaaagaattggaagtctacagctttaaattctgagatgttgtcctgaatatctgggttttaggacaactcaggtgarcaatcattacaaatgatggaaaagttgacctttgttcttctctctctcatttgccacgtagtgctctatgtgcaaccgcacagtcccccatctctctgtttacagaaggactgggcttgatgtttttttcagctttcggaatcacgtggttttctgccccacattgcttaggacaagctggaagggagagatcagagccccaccagggctcctcagtgtgattccctcctaatgatccttttccaatcagaagggagtaattttcctccgcctcattattttcctgcctagctttctgccctttgaagctgagttttccctgccattaacaaataactaggaaagtatacttactagaacttcttactaatctccttgtagttttatagctcgacctcttaccaaccttttgacacatgtgatttcttaaaggggcaatgcctgctattttctaaacttcttaaaagacattcaaagagatcctacttccttgtagggttctctgtagaaactgacacacacaaaacataactatgtttaattcttgcggtggggtgccttttaatactgactatatgtcagactccatatggtagcctggatacttgacattcagcgaccaaataagaaattagcatttcaaactgatacgagacacaaatcaaactcattctcatcatctttgacagggatagcacttggtaaacccataggatgctttctggatataatgtaaatagatttggttaaacatttattgagcacctgctatgtgcagaatactgtgttgaatgctatatcaaatgctatatgaatcaacaatatgaccaggatttacagtttgacagaaagcatatggccttacacagacatttatagagtgttcatatagaaggttcacaaggtgaataaatacaatatgataagatgatggagtaaataccc

SEQ ID NO: 70566 - DNA, 1185 bp, Homo sapiens
gttatataacactttgagaatgatataaattggacatgttattaagaatataatcatgtaaacatgtaggtaccttcttattactcttcaactgttgtcaagcaactgccaccggttccctcttactgtaaccctgattcagtgtccaacatagacctgtacagaaagaattggaagtctacagctttaaattctgagatgttgtcctgaatatctgggttttaggacaactcaggtgagcaatcattacaaatgatggaaaagttgacctttgttcttctctctctcatttgccacgtagtgctctatgtgcaaccgcacagtcccccatctctctgtttacagaaggactgggcttgatgtttttttcagctttcggaatcacgtggttttctgccccacattgcttaggacaagctggaagggagagatcagagccccaccagggctcctcagtgtgattccctcctaatgatccttttccaatcagaagggagtaattttcctccgcctcattattttcctgcctagctttctgccctttgaagctgagttttccctgccattaacaaataactaggaaagtatacttactagaacttcttactaatctccttgtagttttatagctcgacctcttaccaaccttttgacacatgtgatttcttaaaggggcaatgcctgctattttctaaacttcttaaaagacattcaaagagatcctacttccttgtagggttctctgtagaaactgacacacacaaaacataactatgtttaattcttgcggtggggtgccttttaatactgactatatgtcagactccatatggtagcctggatacttgacattcagcgaccaaataagaaattagcatttcaaactgatacgagacacaaatcaaactcattctcatcatctttgacagggatagcacttggtaaacccataggatgctttctggatataatgtaaatagatttggytaaacatttattgagcacctgctatgtgcagaatactgtgttgaatgctatatcaaatgctatatgaatcaacaatatgaccaggatttacagtttgacagaaagcatatggccttacacagacatttatagagtgttcatatagaaggttcacaaggtgaataaatacaatatgataagatgatggagtaaataccc

SEQ ID NO: 70567 - DNA, 834 bp, Homo sapiens
aaaaaaaaaaaaaaaaaaaagttcaacatctatgaggaaaactataaaacactgataaaagatatcaaaaaagaaataaagagatacttcatgttcatagataggaagactcaatattgtcaagatatcagttcttcccagcttaatctacacattcaacacaatcctaatacaaatctcaacaaatgatttcgtggatattgacaaaatgtaaaccgtatgtacagatgacttcctcagggatataagtatgggagttaatagagaagcccagtactatgcactaggggatacatacacttaatgggagaaagaaggattggcacaggagaatcaaaactttccccaatacttcctgtttaataccacatttaatatttataattaacattaaatgactatattcttcatttgcctcataattttttctagttgaactgaataattcctaagactttcacatatgtgataatattgtacataataaacaaaaagttgtaattgccagatactttggtcattattagcatgatcaagtcgatttttcctttattatcagatccaaaaacatgtgatttcttttgtaaatggaatctctaagttaatatatttaggataaaatgtctaattgttaacaaagtacacaccaaaatggaagaatctttccccacattctggaataactacttctccaaaagttcctttgcaaawactcctctaaggaggagggttttctaaaccaacagtggtcaattattttttcgacattctttcaaccacgctcacctgtgctgtgccttttaacctctgttgccatcttcctgtggatttcta

SEQ ID NO: 70568 - DNA, 834 bp, Homo sapiens
aaaaaaaaaaaaaaaaaaaagttcaacatctatgaggaaaactataaaacactgataaaagatatcaaaaaagaaataaagagatacttcatgttcatagataggaagactcaatattgtcaagatatcagttcttcccagcttaatctacacattcaacacaatcctaatacaaatctcaacaaatgatttcgtggatattgacaaaatgtaaaccgtatgtacagatgacttcctcagggatataagtatgggagttaatagagaagcccagtactatgcactaggggatacatacacttaatgggagaaagaaggattggcacaggagaatcaaaactttccccaatacttcctgtttaataccacatttaatatttataattaacattaaatgactatattcttcatttgcctcataattttttctagttgaactgaataattcctaagactttcacatatgtgataatattgtacataataaacaaaaagttgtaattgccagatactttggtcattattagcatgatcaagtcgatttttcctttattatcagatccaaaaacatgtgatttcttttgtaaatggaatctctaagttaatatatttaggataaaatgtctaattgttaacaaagtacacaccaaaatggaagaatctttccccacattctggaataactacttctccaaaagttcctttgcaaatactcctctaaggaggagggttttctaaaccaacagtggtcaattattttttcgamattctttcaaccacgctcacctgtgctgtgccttttaacctctgttgccatcttcctgtggatttcta

SEQ ID NO: 70569 - DNA, 1025 bp, Homo sapiens
taacctaatcttttataacctaatcttttacaacctaatctctgaaatgacataccatcaattctgctatactctttggatcacaccaactaattttagtgcagagtgggaagggaccacaatagaatgtgaatagcaggaggcagggatcatcgggggctatgttggaggctggctgtaataatgataatgtcaccatcatttaatatattaaaatttttgtggctatttctgtacatattttttcacatcaattgttgagcattccttgtccactaattctgttttatacaaattccaaaaagtttaacttaatttcaaataagagtaagtaatcttttacttcaaatgctacgcttctgtctgacttttaaacatatcataaaaaccaagaacagtgtaaaatcctgaggtcataaaaatattcattagcttatatttcttatataatctttctcatccataataagcatagaaatttacaaatatagacatrtagacagtaaatgatgtttcttttctctgacaaaatcaagtgttaatggttccattctgatttgccagtaaaaacaaaagccagctataatgttcaagactactatttgtgaacagatatttttttcttattctctgatatgtcaatactcaagctctctctctatatatatatttatatgcattccctgacatatatgtgcgtagtcgcccacagcaacgtacacccacatgtgttaattagacatgaatcagtggcactttggaaaaatgaatgaggttttctctctgcccagctgcagtggttggttgccatggaaatgatgcaaagtaaaactttcagaaaatacaaatgttcatgtgtctttattggaagagctcatgcattaatcagaaaagaagagaactttaataacaaaacaatgccaatatcctagtaacaaaagctgtctgcatgtatcaaatacaattcattatctcttttgctctgaacttaagtgaactgcacatcagtcttctctgcactctgc

SEQ ID NO: 70570 - DNA, 1025 bp, Homo sapiens
taacctaatcttttataacctaatcttttacaacctaatctctgaaatgacataccatcaattctgctatactctttggatcacaccaactaattttagtgcagagtgggaagggaccacaatagaatgtgaatagcaggaggcagggatcatcgggggctatgttggaggctggctgtaataatgataatgtcaccatcatttaatatattaaaatttttgtggctatttctgtacatattttttcacatcaattgttgagcattccttgtccactaattctgttttatacaaattccaaaaagtttaacttaatttcaaataagagtaagtaatcttttacttcaaatgctacgcttctgtctgacttttaaacatatcataaaaaccaagaacagtgtaaaatcctgaggtcataaaaatattcattagcttatatttcttatataatctttctcatccataataagcatagaaatttacaaatatagacatgtagacagtaaatgatgtttcttttctctgacaaaatcaagtgttaatggttccattctgatttgccagtaaaaacaaaagccagctataatgttcaagactactatttgtgaacagatatttttttcttattctctgatatgtcaatactcaagctctctctctatatatatatttatatgcattccctgacatatatgtgcgtagtcgcccacagcaacrtacacccacatgtgttaattagacatgaatcagtggcactttggaaaaatgaatgaggttttctctctgcccagctgcagtggttggttgccatggaaatgatgcaaagtaaaactttcagaaaatacaaatgttcatgtgtctttattggaagagctcatgcattaatcagaaaagaagagaactttaataacaaaacaatgccaatatcctagtaacaaaagctgtctgcatgtatcaaatacaattcattatctcttttgctctgaacttaagtgaactgcacatcagtcttctctgcactctgc

SEQ ID NO: 70571 - DNA, 985 bp, Homo sapiens
catgtgtgaaaatggacagtgaagctgatatttatacataagcagttattttgcattgctttctttgcagcaacaattaacctgacgttctggtactttgaagtaattattcccttgcttttgtctaatgcttttagttttattaaacattttcaaccttttatttatttaagtcttaaaataatcctctgggatatatattcctgccacattttatagagaggaaactgatatgaagtcatttcccaagattatgcagaatacagctagttaataaaagaactatatgttgaacacagatcttctaacgtcatgttcaggctttttcctacatccagaaggattctttcacatatgaaaaaactaggtagctaccttttctgttggccccctatcctggagctgccactcattgcctggatctcacagaaattcaaaatgagtctgcccctctcttcatagcctctgctgtcgtaaatagtcatggtttagaacatgacttttcaactttaaacaacttcgcagtttatcaaactactagggattctgtgagtcaaaagcagctgtagtattataaaatatatctttgatctttgtccctgtttcccaacataaaaatcctaaaatccttggaatttccaaagtgatgtatatttttgtgtgctcatgagttgacagatggctggcagtccctaggtaacttcaggataggggctagtcacaagaaagaccgaggcatgattagagagttgagacttttcagccctacccctcaacttctggggaggtgagaggggctgaaagtattgatcaccaatacctagtgacttaatcaatcatgcttacatagttaagtgttcataaaagcccaaaatgactgtattcagagagcttccagatakttggacacgtggaggttcctggaaggtagtgcacccagagagagcatgaaactctgcatcacttcccacttgcctttcctatg

SEQ ID NO: 70572 - DNA, 792 bp, Homo sapiens
ggcctgaggatttggtgacctaatgcaggtgatgactttggcccggagcctggtacatcataattattgttacctgcctgggattgaagagagggaaaaggaaggagaatacatggggtttggccattttcccccttcccctaacagcgcagctggcccagatcagaacctccatggcacagtgctgagaggggccaggaggaagattactgtcacatctcctactatatgtatctttccttaagaagcactggttggccgggcgtggtggctcccacctgtaatcccagcactttgagagtctgaggcagacttattgcctgggttcaggagttcaagaccagcctggccaacatgccgaaaccccgtgtctgccaaaaatacaaaaaattagccaggygtgatgggtgcctgtaatcccggctactggggaagctgaggcacgaggatcattccaggaggcagaggttgcggggagctgagatcgcgccactgcactccagcctcggtgacagaacgagactctgtctcaaacaaaaaagaaaaaacaaaaaagaaaaagaaacactggccaggaacctcaaatgccgcaaacttgaattagtctggacttcctgtgtcattctgggcaaatcccctcctttctctaggcctcagtttccctttctgcagattttgatgcccacatcacagagggagaggggagctccaagtagtagagtctgcacagaagtgcttagagcctggagcttgccccttgaccctacctcatccatctaaacaccaatggga

SEQ ID NO: 70573 - DNA, 792 bp, Homo sapiens
ggcctgaggatttggtgacctaatgcaggtgatgactttggcccggagcctggtacatcataattattgttacctgcctgggattgaagagagggaaaaggaaggagaatacatggggtttggccattttcccccttcccctaacagcgcagctggcccagatcagaacctccatggcacagtgctgagaggggccaggaggaagattactgtcacatctcctactatatgtatctttccttaagaagcactggttggccgggcgtggtggctcccacctgtaatcccagcactttgagagtctgaggcagacttattgcctgggttcaggagttcaagaccagcctggccaacatgccgaaaccccgtgtctgccaaaaatacaaaaaattagccaggtgtgatgggtgcctgtaatcccggctactggggaagctgaggcacgaggatcattccaggaggcagaggttgcggggagctgagatcgcgccactgcactccagcctsggtgacagaacgagactctgtctcaaacaaaaaagaaaaaacaaaaaagaaaaagaaacactggccaggaacctcaaatgccgcaaacttgaattagtctggacttcctgtgtcattctgggcaaatcccctcctttctctaggcctcagtttccctttctgcagattttgatgcccacatcacagagggagaggggagctccaagtagtagagtctgcacagaagtgcttagagcctggagcttgccccttgaccctacctcatccatctaaacaccaatggga

SEQ ID NO: 70574 - DNA, 792 bp, Homo sapiens
ggcctgaggatttggtgacctaatgcaggtgatgactttggcccggagcctggtacatcataattattgttacctgcctgggattgaagagagggaaaaggaaggagaatacatggggtttggccattttcccccttcccctaacagcgcagctggcccagatcagaacctccatggcacagtgctgagaggggccaggaggaagattactgtcacatctcctactatatgtatctttccttaagaagcactggttggccgggcgtggtggctcccacctgtaatcccagcactttgagagtctgaggcagacttattgcctgggttcaggagttcaagaccagcctggccaacatgccgaaaccccgtgtctgccaaaaatacaaaaaattagccaggtgtgatgggtgcctgtaatcccggctactggggaagctgaggcacgaggatcattccaggaggcagaggttgcggggagctgagatcgcgccactgcactccagcctcggtgacagaacgagactctgtctcaaacaaaaaagaaaaaacraaaaagaaaaagaaacactggccaggaacctcaaatgccgcaaacttgaattagtctggacttcctgtgtcattctgggcaaatcccctcctttctctaggcctcagtttccctttctgcagattttgatgcccacatcacagagggagaggggagctccaagtagtagagtctgcacagaagtgcttagagcctggagcttgccccttgaccctacctcatccatctaaacaccaatggga

SEQ ID NO: 70575 - DNA, 792 bp, Homo sapiens
ggcctgaggatttggtgacctaatgcaggtgatgactttggcccggagcctggtacatcataattattgttacctgcctgggattgaagagagggaaaaggaaggagaatacatggggtttggccattttcccccttcccctaacagcgcagctggcccagatcagaacctccatggcacagtgctgagaggggccaggaggaagattactgtcacatctcctactatatgtatctttccttaagaagcactggttggccgggcgtggtggctcccacctgtaatcccagcactttgagagtctgaggcagacttattgcctgggttcaggagttcaagaccagcctggccaacatgccgaaaccccgtgtctgccaaaaatacaaaaaattagccaggtgtgatgggtgcctgtaatcccggctactggggaagctgaggcacgaggatcattccaggaggcagaggttgcggggagctgagatcgcgccactgcactccagcctcggtgacagaacgagactctgtctcaaacaaaaaagaaaaaacaaaaaagaaaaagaaacactggccaggaacctcaaatgccgcaaacttgaattagtctggacttcctgtgtcattctgggcaaatcccctcctttctctaggcctcagtttccctttctgcagattttgatgcccacatcacagagggagaggggagctccaagtagtagagtctgcacagaagtgcttagagcctggagcttgccccttgaccctacctcatccatctraacaccaatggga

SEQ ID NO: 70576 - DNA, 1001 bp, Homo sapiens
tatagcatgatggttaacaggtcagactcaggtagaaaggcccatttgaaccccagctctgccacactcagaaactgtgtgacccgaacaagtcacttaacctctctgagcataggtaaaataagatcatcataccagattgttttgaagattaaatcaagtgttattcacgagaggtgcacagcatagcatgcacaacaaataaggacctggtaagtatctaattaataacaatggctaagatccaaaaaacagctacctactaataaatagatggrgctgccttgtaaggcagtgagcatcatgcaaccaggattcaaatgaaggacagttgctacctctgaggttcccgagaaggatttctgcatccattgagagactgaatgacatgaactctgcgatcccatctcttgtggggagggaacctagaatgaagggaagattgtgggccataaaggcagacatctggttcctggcacagaaccatatgtgtgccaccaaagccacccaccggaccccacttggcccctggagtctatttttactcctctcatcttacagatctattttgttaatctccttatatttgctgttttgacttcccagccagcttgctaatcagtttgcctatttgactcacagggtttgcatttgtcacggggactgaaacacacgcttgttttgatttctttttgtaaaattagaagcgtttgatgtaatgactctacctagacacagctggtaaagtgagaataatgctcaagtttgcacagtttaaacacaatgtagacaataattagaaatgctatctttagatgtttaggataagctttttctcagaattgcactgattttttttttctgagtggggctttttagtgcatatatacagaaatactaaaaacgtaagaaaatagagcaaatcagtgagtgctttggtcaacttgaaagactgcaggaaataaaccaactgattttagatctgcctttttttgactgaa

SEQ ID NO: 70577 - DNA, 588 bp, Homo sapiens
cttctctttgacttggacctccgaattaggtcagctcagtctgaacatttaagtttttcttttccagaaattaacataacttattaataagcctgtaattttacaaaggtttagcaaaatgtcaaccacatccccagtctatgaagataagagctatatttagctagtcctaattaaaaatagctaaagtgctgcttggtatgggaggaggggaaaatctgtatgattcatgtctcatcaaaaacgttgacatttgactttccttaatgctgtttatggctgaattaatattgttccatttagttcraaatataggaattatttgaattgtattattgatcctcataaaatatgtgaattttaccagtctcacatacagtcaatattgggcatgtaacaggagttttgtgactctcattgttagttaaagatatctttaccagagagttgcatcctagaaaaattgcccctaatagtcatgtagaatgatctctccaggtatagatatcgggttatgagtttgatatgcaatcattgccattcagccaaatctataaagcaaaattcaaaacctaaaacaatcaagga

SEQ ID NO: 70578 - DNA, 1322 bp, Homo sapiens
cagaaagtagtacaacacatcattcccatttagagtgacaactgtgcaccgctgagagatcttggactaattgattctgagactgggtgggattttgttttgtgtgtcttggtaagtggcagagtataaattgcgggaaggagaatgagccacatatatgttgattagaatagaggactctggtagccatcagtgttcttcaacaaatatttttcacttccctccttccaggtacccttgaaagttagctgaggtcttcttgtgactgactatggccaatgcaacagaagtagtagtaatatatagaactctgggccaaagcttatcataaccaatatgcatatcaacgtatatcttcccattgtttcagcgattgagaaaaaatgagttgaaataaaaccggcagccatgctccctttgtgacaatgatatgtagagatgctcacaaccctcttccactgactcaaactggatatgtagcatgagcaagaaaataaacacttccattaccttaaaaaaacaaaaagaaatgaagcatgtctacacttattaaatacttaatatttgctrttattattattattatcataattgtcaggatcatcattctaccccagttttcactggacttaagattctctctggatccttccaacttctcctagtccttccctagccagatgaaaacatatttttagctacttaaccatattcatggattggagatacctccactcaatcagaagttctatgctcaatccagaaggtaaacaatccctgattcagaataggacttacctctgtgcttctgtagctggttcctgttcacaaactacctaaatttctggatttctgactgtctggacctcagagaatttatttcttctctgcatcatgcccctatgcctggatatcagacctttagcttacttttgaccatgcataactctagactccttctccttgccacagttccttggtttccaaatattggcccactttaaccttctggcaatcactaatataggagaccttctgatttccaacctagattgaaattcttatttggggttgtcaatctgataattcctattataatctcatgtctaggcagtctttttttctttttcttttttattatactttaatttctggggtacatgtgcagaacatggaggtttgttacataggtatacatgtgccgtggtggtttgctgaacccatcaacccatcatctacattaggtatttctcctaatgctatgcctcccttaaaccctcaccccccaaatggccctggtgtgtgatgttcccctccctgtg

SEQ ID NO: 70579 - DNA, 1226 bp, Homo sapiens
tctttttggctttcaggtctcacatcatttttattgtgttatttaataagatcactttgattatgatcattaatccataaaaatagttttcatatatatgttgtatttaaataaatttaaatataccaaggtccttgcttttttttccttttctaatcaagtccaagatatcagaattactcttcagaaaaatgtcaactgaaacacaattctcaacttcactaattattcacgaactcagatttaagatagactttcttctttctttttttttttagactagattctcatctaggggtcatgaagggggaaaaaaatcaatgagtagctatcacttactctcagaagaggggttcctctgccttccctgattggagctgtgaataattcaacaccatcccaggctcccttttcctttcttgaggttgagcttattaaaattacatggccaaaggacactgctgaggagatggctggtgccctccatatcggctgtcaggatctccagtgcagcctcataacagcttaagcccttgctctgggagcactgagctgccaccagctaggggtgaccaatgggtgaatgaagatagcagtggaggagcagccagctgtctccccggcttgtatcattttcctccattcgctcggcatccatcctggtggggtgtggaaatggaatgctgtctccatgcttactattgatcaacttcgtcatcattgttggcctcatcattaagtatttatagttcactgagtgaaaggtaagtgctgaacagacggggcaccccttttagaagctttccaagactataattcatctccttcagtgagatggagtctccagagacagaatttgaacagtccatggattagagtcagtactatcttttttttttttttttttttttggttgtgggggtggaatttgattacatgactagggattttttttgcaaaatratgtgtgtgtgtggtgtgtgtgtgtgtgtgtgtgtgtgtgtgtgaaacttttttttcatgggtcagtgtatgaagtttctaggaccaggtaggattcaattggaggctgaatatgatggaaccaaatcagacttaaaattccatggactcaggtcaagattttttaagagttgtcagggagacggaaacctaacagtaaatccagctaatcttgaaaagagggaggaaatttgggtcaggcattgtcaccgaatgctactctg

SEQ ID NO: 70580 - DNA, 813 bp, Homo sapiens
taacaaaaatgatagagggctctggtgagagagtcacaggcagtgcaaaagtgagcagtaattatcctctgtaggtcaggagtgatgataggagaagttgttgttacacaagtgggctccctaacagcaatgaggataagactctggaaaagaagaggccaggaggcagcccttaacagtcagaaaaagaataaagtaaagccagttactgtaatggacagcaagactggaatggcagccagaggcatctgtcccatagggatcatggcartggctcacagaacatagtattcttaggtgcaaaatagatgggcaaccagaaagtgtactgcttaaaatacatgatccaaaaagttcagagaatgacagtcgggtgtggtggctcatgcctgtaatcctaacactttgggaggctgagacgggcagatcacatgagtccaggagttccagaccagcctgggcaacatggtgaaaaccctgtctctgtaaaaaatacaaaaattagtcaggtgcagtggtatgtgcctgtagtcccagctacctaggaggctgaagcaggaggatcttgagcccaggagtttgaggctgaagtgagagccatgatcaccctattgtactccagcctgggcgacagaacaagacactgtctcaaaaaacaaaagggttcacagagaatggatgatcaagagacttaaggtctgctgcctctgtaaaaagactttttttttgagacaagattttgctctgtttcccacctggagtgcagtggcctaatcacagctcactgcagccttgaactcctaggctcaaggg

SEQ ID NO: 70581 - DNA, 613 bp, Homo sapiens
tagtcactggaatataagatgtgaagacaagcattttgttgttgttgttgtttactgctagttcttgtccccagaacactgcccagcatatagttagagttcataataagcaataaataaattaattaacatcagggaattttctctgaccatttcctctatttggaacatctttagcccagggttaaatggctaaattcctccatttgggtctagactcaaaagtcacctccacagggatgcctcacctgaccaccccacctaaaaatagttaccttctaccgcttttattctcttcctttgctatgyttttcctcttaactcatgtgtaatcatgagttcatcatcaatttccccactgccaatttccatgagggcagagcacccatctcttgtacatccattgctatatctctggcacctagaacacagcctggcttgagtcagtgctctgtaagttatatattgagtaagtgagtgaataaatgaatgcaggcatcatgcataggaaaagcttagcacagtgcccggcacatagcagatgagagataagtgttcgttttgatgatgttgataatgacatccaaatgtcactctgaggcagtggcactgt

SEQ ID NO: 70582 - DNA, 784 bp, Homo sapiens
ttgcctcccctcactatggcgtatacatgtaccctgaggttagccagcctctctcctgtgtcctgtattttccaaagccacattattctgctcttcctgtgattctgaagctcttctgtgtccttccaataaattccttttttattgcccatgaacaatgggcacgtggaggaaatacggaaggtaatttagcagattgttggcaagttaagttagcaagataagtggtttctattgttgcaactaaatatctttaaaatatatatcattggaaatagacattgtaatgttctttttatgaataatgaaaccagctaacatttactgattctctgtctagacttttactatgtggttatgtttaacacacttctgcgacagtaagcgccattaaccccattttgcagagaagaaaattgaagacttagattcctctgccagcttgtcctgcttgtgtgtccttgagcaagtctctgaacatatccaaggtctcagtgwcctgatatgtgaagtggggttggtgacctttcccacgcacagggtggttttgagaatcaagcaagatgatgaacgtataaaagctctttgtaaactatatagttacatgccatatacgggtaagattgcattatgattctctttgacaaaaggacacattttaactcctgtgtcttggtgcctaatttaagccatttgttgttctttctgcataataataataataacaaataaataatgcatgtttcaaagtgaaagccctagctaacacactccccagaatgag

SEQ ID NO: 70583 - DNA, 784 bp, Homo sapiens
ttgcctcccctcactatggcgtatacatgtaccctgaggttagccagcctctctcctgtgtcctgtattttccaaagccacattattctgctcttcctgtgattctgaagctcttctgtgtccttccaataaattccttttttattgcccatgaacaatgggcacgtggaggaaatacggaaggtaatttagcagattgttggcaagttaagttagcaagataagtggtttctattgttgcaactaaatatctttaaaatatatatcattggaaatagacattgtaatgttctttttatgaataatgaaaccagctaacatttactgattctctgtctagacttttactatgtggttatgtttaacacacttctgcgacagtaagcgccattaaccccattttgcagagaagaaaattgaagacttagattcctctgccagcttgtcctgcttgtgtgtccttgagcaagtctctgaacatatccaaggtctcagtgtmctgatatgtgaagtggggttggtgacctttcccacgcacagggtggttttgagaatcaagcaagatgatgaacgtataaaagctctttgtaaactatatagttacatgccatatacgggtaagattgcattatgattctctttgacaaaaggacacattttaactcctgtgtcttggtgcctaatttaagccatttgttgttctttctgcataataataataataacaaataaataatgcatgtttcaaagtgaaagccctagctaacacactccccagaatgag

SEQ ID NO: 70584 - DNA, 1408 bp, Homo sapiens
caccttgtcacaggttttgtaacccatagaaaaccaatggtcacccatggtccacggacattctttccagaaaaagacactcagatgactgtgcccctcctggcacacacactctgatagaaacagaacacacactcttacacacttgcacacacctacactcacatacatgctcacacatttcagccaacaatttcaggggggttcacaaagttcctggttccatgtttagaacctttgcttgacagtacttccttcagtgatgttatggaatcctagacttgtaactatcacacctatgaagaggtatctcagatgccaggttcttttctatatccagtcctttgtttccaaccgccctcaytatttctgatgtaaacatcctgcccttccctatggctaacgctgtagccatgttgatctcctctcaagaaacacttctgggcacgttcaaattctgttcactctccaagccccggttcatatactaccatctctgggaagtcaatctctaatcagagagaattaaactttccctttgtgatctcttagactatttttttaagttttcacattaaatatttcagactttctactgtttataattgcctgagtagataggttcttaaggaaagaaaacatgtctggtttcattttgcagcttctatcataacaagagaggggcttaccttgtagcttgtagcttttcctttaaagtctttgagattggaagacttggtttaatttctcactttagaccttaacgtgtgactgtgagcaaggtagttaagctttccaagactcagttcttcatctgtacacagggatccgatggttcctatatgtggggtctgtgggaggattcaatgagtcaaggtatgtaatgcactttgcatgtttcctggcacacagctggggatcaaaacatgtttcttgaataataggaccctcagaaaaggaaaagaagctgaggtcactctctccaaaaaatgtattcccatgattttgaaatcaaggagtttgtcctttatttctgtaggagtgattaggatgtccctaaatgttagaaactcagttaacagcagagaaacaagatgaatcagcagtttgctctaatagatccaatctttgaaacctttcaatcagcattgggatggcaacccaagtaatttttttaagtattattttatttaggcctgtgtggctggcttttcagtctgggctgaccattagcaagagcaatctgcagctggtttcggtctcctggcactagtggttttcacagcaacagcaagttgtctgtggtgcagtagaaagagcactgaagttggaggtagagggtctgacccaaaggatacccttgttcctccaaaccacatagcctggagaataaatatggacttctgct

SEQ ID NO: 70585 - DNA, 1408 bp, Homo sapiens
caccttgtcacaggttttgtaacccatagaaaaccaatggtcacccatggtccacggacattctttccagaaaaagacactcagatgactgtgcccctcctggcacacacactctgatagaaacagaacacacactcttacacacttgcacacacctacactcacatacatgctcacacatttcagccaacaatttcaggggggttcacaaagttcctggttccatgtttagaacctttgcttgacagtacttccttcagtgatgttatggaatcctagacttgtaactatcacacctatgaagaggtatctcagatgccaggttcttttctatatccagtcctttgtttccaaccgccctcactatttctgatgtaaacatcctgcccttccctatggctaacgctgtagccatgttgatctcctctcaagaaacacttctgggcacgttcaaattctgttcactctccaagccccggttcatatactaccatctctgggaagtcaatctctaatcagagagaattaaactttccctttgtgatctcttagactatttttttaagttttcacattaaatattkcagactttctactgtttataattgcctgagtagataggttcttaaggaaagaaaacatgtctggtttcattttgcagcttctatcataacaagagaggggcttaccttgtagcttgtagcttttcctttaaagtctttgagattggaagacttggtttaatttctcactttagaccttaacgtgtgactgtgagcaaggtagttaagctttccaagactcagttcttcatctgtacacagggatccgatggttcctatatgtggggtctgtgggaggattcaatgagtcaaggtatgtaatgcactttgcatgtttcctggcacacagctggggatcaaaacatgtttcttgaataataggaccctcagaaaaggaaaagaagctgaggtcactctctccaaaaaatgtattcccatgattttgaaatcaaggagtttgtcctttatttctgtaggagtgattaggatgtccctaaatgttagaaactcagttaacagcagagaaacaagatgaatcagcagtttgctctaatagatccaatctttgaaacctttcaatcagcattgggatggcaacccaagtaatttttttaagtattattttatttaggcctgtgtggctggcttttcagtctgggctgaccattagcaagagcaatctgcagctggtttcggtctcctggcactagtggttttcacagcaacagcaagttgtctgtggtgcagtagaaagagcactgaagttggaggtagagggtctgacccaaaggatacccttgttcctccaaaccacatagcctggagaataaatatggacttctgct

SEQ ID NO: 70586 - DNA, 1408 bp, Homo sapiens
caccttgtcacaggttttgtaacccatagaaaaccaatggtcacccatggtccacggacattctttccagaaaaagacactcagatgactgtgcccctcctggcacacacactctgatagaaacagaacacacactcttacacacttgcacacacctacactcacatacatgctcacacatttcagccaacaatttcaggggggttcacaaagttcctggttccatgtttagaacctttgcttgacagtacttccttcagtgatgttatggaatcctagacttgtaactatcacacctatgaagaggtatctcagatgccaggttcttttctatatccagtcctttgtttccaaccgccctcactatttctgatgtaaacatcctgcccttccctatggctaacgctgtagccatgttgatctcctctcaagaaacacttctgggcacgttcaaattctgttcactctccaagccccggttcatatactaccatctctgggaagtcaatctctaatcagagagaattaaactttccctttgtgatctcttagactatttttttaagttttcacattaaatatttcagactttctactgtttataattgcctgagtagataggttcttaaggaaagaaaacatgtctggtttcattttgcagcttctatcataacaagagaggggcttaccttgtagcttgtagcttttcctttaaagtctttgagattggaagacttggtttaatttctcactttagaccttaacgtgtgactgtgagcaaggtagttaagctttccaagmctcagttcttcatctgtacacagggatccgatggttcctatatgtggggtctgtgggaggattcaatgagtcaaggtatgtaatgcactttgcatgtttcctggcacacagctggggatcaaaacatgtttcttgaataataggaccctcagaaaaggaaaagaagctgaggtcactctctccaaaaaatgtattcccatgattttgaaatcaaggagtttgtcctttatttctgtaggagtgattaggatgtccctaaatgttagaaactcagttaacagcagagaaacaagatgaatcagcagtttgctctaatagatccaatctttgaaacctttcaatcagcattgggatggcaacccaagtaatttttttaagtattattttatttaggcctgtgtggctggcttttcagtctgggctgaccattagcaagagcaatctgcagctggtttcggtctcctggcactagtggttttcacagcaacagcaagttgtctgtggtgcagtagaaagagcactgaagttggaggtagagggtctgacccaaaggatacccttgttcctccaaaccacatagcctggagaataaatatggacttctgct

SEQ ID NO: 70587 - DNA, 2280 bp, Homo sapiens
ttttcagaacaaattctccatcactaagtgaagcatgattgtatttctgacattgtattttatcaataaaaataaactacatctcacatctgaagctaatttcttgttatagccaaaagcacgtctagtctgtcttattctgctttatccaactataggatgtctaattgtagccaaaaacatggcataattcacacataaaattccaaaattgtatagtttatcccaaatacactaaattccacaaagcggtttggtcatcccccaacaaaaaaatgtaagattacctacatgcaattctagacggaacactacgcattggaccataattttctgtttccagataaagcggcttagggagtggcagccttctctccatcacacatacttctggttttcggtaatggagattggtaaagacttttagacccatgttctttaaagaaacaaacaacaaaaatattgttcattcttttcatgcaagaactataaaaggcctattatttatattgcaaagataaatggatcataagtatccatattttctgtgttaacaaaggtctgagaagttacaagtcaacttacctctatttgacttatggaaaatccctaatttagagaaaaaattataatcactatgatttatctagcacttattatgtgctagcatttttctaagtattttccattattctccatttcatcctaagtggaaaatacttatgagatcagcactatcattaccctaattaacatcaaacacacacacacacacacacacacacacacacacccggcacactcagtaaattaaagaactggaacctgataaagtytgtctgattcaataccccttttcttacacacttgtgatgttaattataaagattatttcatggaaggctcagcatgtctcattaatggcctagggatatctggagtccacactctcttagcctcttgatttgacaatctttgcataagatttattgtattaattggagactgtcttatttttttaagtgaggttttgtaattatagctacatgatttattttcagcagaaaattttaaaatcaacaaaattaatatctcctttttataagacaatttctatgtactctattggcagattacagacacgaatctcaaagtataggaagaaaactacataattaagaaaacattaatatgcattatgaatactaaaaattgcgatgaaatattttccaaaatccttagtgatcttaccctgacaatattatagatatctccatccccatagttgcttacaggtgtgtaatataaaccattgtagaacatatccctctgaggaatgcaagggtcttccttgccatcatcaagattgaggccatggtagaaataaccatacggctctatacttggaaccatgttatacacctatgagaaaaaacatttcccaataattttaagcacttcttttaaaattacaaaattggcaaattgtctactgtaccatttatttttgttcttttctttaagaggacggccatcatatttaatccagtattttcacataagctcttcctttcgaaagagcaaaccagttttgttttaggcaactgatgtcatgttcacagaatttctcagcttgggcgcaggatttaagagagaatgtaagaaagcaatgcctgactattgattaatccaaggcccattgtacagacaatcaattataatgctagaatttctaagtctggagaataatcttagctgcctgattttaaatcttcttacataatcttctgaagaaaacataaaatcaacaaagagaacaagtaaggatactcatgactaatatctctaacattactacaattcagagaataccatgatcttcaaattatttcttagtagagaaacaaacaccaaatgccaagagagcttctactgctattgcagagggaaggcttaagagactgcagagaaaaacagagcagaatggcatggagaaatgagaagaaacacacaccaagtcaactccaggtaagagaaagtctagcattgttaaaaatacaaattatagttttcggactcaacagttcccagtacagcacacagggaaagggcttggagtgaatgggcctggaagtggaagcttccaaaaaacatggctaaggggaaataatcagatcacaagaagaggtatgcagatccttggatacagggaatttaaaaaaggaaaggatgtcataggataaaataactccctccaccctcatttccatcaccaacatt

SEQ ID NO: 70588 - DNA, 2280 bp, Homo sapiens
ttttcagaacaaattctccatcactaagtgaagcatgattgtatttctgacattgtattttatcaataaaaataaactacatctcacatctgaagctaatttcttgttatagccaaaagcacgtctagtctgtcttattctgctttatccaactataggatgtctaattgtagccaaaaacatggcataattcacacataaaattccaaaattgtatagtttatcccaaatacactaaattccacaaagcggtttggtcatcccccaacaaaaaaatgtaagattacctacatgcaattctagacggaacactacgcattggaccataattttctgtttccagataaagcggcttagggagtggcagccttctctccatcacacatacttctggttttcggtaatggagattggtaaagacttttagacccatgttctttaaagaaacaaacaacaaaaatattgttcattcttttcatgcaagaactataaaaggcctattatttatattgcaaagataaatggatcataagtatccatattttctgtgttaacaaaggtctgagaagttacaagtcaacttacctctatttgacttatggaaaatccctaatttagagaaaaaattataatcactatgatttatctagcacttattatgtgctagcatttttctaagtattttccattattctccatttcatcctaagtggaaaatacttatgagatcagcactatcattaccctaattaacatcaaacacacacacacacacacacacacacacacacacccggcacactcagtaaattaaagaactggaacctgataaagtttgtctgattcaataccccttttcttacacacttgtgatgttaattataragattatttcatggaaggctcagcatgtctcattaatggcctagggatatctggagtccacactctcttagcctcttgatttgacaatctttgcataagatttattgtattaattggagactgtcttatttttttaagtgaggttttgtaattatagctacatgatttattttcagcagaaaattttaaaatcaacaaaattaatatctcctttttataagacaatttctatgtactctattggcagattacagacacgaatctcaaagtataggaagaaaactacataattaagaaaacattaatatgcattatgaatactaaaaattgcgatgaaatattttccaaaatccttagtgatcttaccctgacaatattatagatatctccatccccatagttgcttacaggtgtgtaatataaaccattgtagaacatatccctctgaggaatgcaagggtcttccttgccatcatcaagattgaggccatggtagaaataaccatacggctctatacttggaaccatgttatacacctatgagaaaaaacatttcccaataattttaagcacttcttttaaaattacaaaattggcaaattgtctactgtaccatttatttttgttcttttctttaagaggacggccatcatatttaatccagtattttcacataagctcttcctttcgaaagagcaaaccagttttgttttaggcaactgatgtcatgttcacagaatttctcagcttgggcgcaggatttaagagagaatgtaagaaagcaatgcctgactattgattaatccaaggcccattgtacagacaatcaattataatgctagaatttctaagtctggagaataatcttagctgcctgattttaaatcttcttacataatcttctgaagaaaacataaaatcaacaaagagaacaagtaaggatactcatgactaatatctctaacattactacaattcagagaataccatgatcttcaaattatttcttagtagagaaacaaacaccaaatgccaagagagcttctactgctattgcagagggaaggcttaagagactgcagagaaaaacagagcagaatggcatggagaaatgagaagaaacacacaccaagtcaactccaggtaagagaaagtctagcattgttaaaaatacaaattatagttttcggactcaacagttcccagtacagcacacagggaaagggcttggagtgaatgggcctggaagtggaagcttccaaaaaacatggctaaggggaaataatcagatcacaagaagaggtatgcagatccttggatacagggaatttaaaaaaggaaaggatgtcataggataaaataactccctccaccctcatttccatcaccaacatt

SEQ ID NO: 70589 - DNA, 2280 bp, Homo sapiens
ttttcagaacaaattctccatcactaagtgaagcatgattgtatttctgacattgtattttatcaataaaaataaactacatctcacatctgaagctaatttcttgttatagccaaaagcacgtctagtctgtcttattctgctttatccaactataggatgtctaattgtagccaaaaacatggcataattcacacataaaattccaaaattgtatagtttatcccaaatacactaaattccacaaagcggtttggtcatcccccaacaaaaaaatgtaagattacctacatgcaattctagacggaacactacgcattggaccataattttctgtttccagataaagcggcttagggagtggcagccttctctccatcacacatacttctggttttcggtaatggagattggtaaagacttttagacccatgttctttaaagaaacaaacaacaaaaatattgttcattcttttcatgcaagaactataaaaggcctattatttatattgcaaagataaatggatcataagtatccatattttctgtgttaacaaaggtctgagaagttacaagtcaacttacctctatttgacttatggaaaatccctaatttagagaaaaaattataatcactatgatttatctagcacttattatgtgctagcatttttctaagtattttccattattctccatttcatcctaagtggaaaatacttatgagatcagcactatcattaccctaattaacatcaaacacacacacacacacacacacacacacacacacccggcacactcagtaaattaaagaactggaacctgataaagtttgtctgattcaataccccttttcttacacacttgtgatgttaattataaagattatttcatggaaggctcagcatgtctcattaatggcctagggatatctggagtccacactctcttagcctcttgatttgacaatctttgcataagatttattgtattaattggagrctgtcttatttttttaagtgaggttttgtaattatagctacatgatttattttcagcagaaaattttaaaatcaacaaaattaatatctcctttttataagacaatttctatgtactctattggcagattacagacacgaatctcaaagtataggaagaaaactacataattaagaaaacattaatatgcattatgaatactaaaaattgcgatgaaatattttccaaaatccttagtgatcttaccctgacaatattatagatatctccatccccatagttgcttacaggtgtgtaatataaaccattgtagaacatatccctctgaggaatgcaagggtcttccttgccatcatcaagattgaggccatggtagaaataaccatacggctctatacttggaaccatgttatacacctatgagaaaaaacatttcccaataattttaagcacttcttttaaaattacaaaattggcaaattgtctactgtaccatttatttttgttcttttctttaagaggacggccatcatatttaatccagtattttcacataagctcttcctttcgaaagagcaaaccagttttgttttaggcaactgatgtcatgttcacagaatttctcagcttgggcgcaggatttaagagagaatgtaagaaagcaatgcctgactattgattaatccaaggcccattgtacagacaatcaattataatgctagaatttctaagtctggagaataatcttagctgcctgattttaaatcttcttacataatcttctgaagaaaacataaaatcaacaaagagaacaagtaaggatactcatgactaatatctctaacattactacaattcagagaataccatgatcttcaaattatttcttagtagagaaacaaacaccaaatgccaagagagcttctactgctattgcagagggaaggcttaagagactgcagagaaaaacagagcagaatggcatggagaaatgagaagaaacacacaccaagtcaactccaggtaagagaaagtctagcattgttaaaaatacaaattatagttttcggactcaacagttcccagtacagcacacagggaaagggcttggagtgaatgggcctggaagtggaagcttccaaaaaacatggctaaggggaaataatcagatcacaagaagaggtatgcagatccttggatacagggaatttaaaaaaggaaaggatgtcataggataaaataactccctccaccctcatttccatcaccaacatt

SEQ ID NO: 70590 - DNA, 1550 bp, Homo sapiens
gtgtcccccagcccataggagcagccatgctgtgggacaccctgagtggggtctgtgttacctgttgtgcctaccatgcccttccccgccttggatgcacaggtgccccaccttagctgcccgagatgctgtttatccttgatagtcaccttttaagccttatacaggtctatcaagttgagtcaccattaccacttggtgtgtgctgtgccttgtgtaacactgcagttccgggagtcctccaacctggaatgcatgctttgcggggatctatgatgccctcgaattgtatgttacatgtgaacttgtgagcattttctaggggctctgcacctttgtgttctcagctctgagccccatgcttgctgcaaccagcaggtgttcagagtgaatgaatttgcttatcttggcataaatcatgtaactgttgatgataccccaggaaggtgagcctttggttataaatccttttaacattttccagtctaaaagttttgtggtcttattacaggatgtagaaaacagkgggcctcagttattcttttgctgttgtgccggagtataccacggttgtttttgaaagataactttgaccatacccttaggaacttcctcagctcactttcaaatggagggcactggctttctaaccattgtgtctcccagcccagtgacagctgaagctgtctgcttccgatatcacaggcagcacagaagagccgccctccaggtgctgctgggaaatgctgcctggaactctttgccatttactttctatcaaaagctgagggaaatggtacatatggggctttcctaaaaatatgggatccatccatttgtcagcaatgtcattctatcctatcccagggcctttcaagattttggtgaaaactaatagatcccatattccagaataatgctattaataattttattattattacttaatgatagcaaaaagttagctaactccaaccgctcacttgttatttgccaggtaatcctctaatccagaggatttggccttttgtgtgtgttaatgtcctgcttgcaccagctctatgaggaaggtgctgctgttgtcatttccatttctgcactcgtggaaacaagcgtagtgaggccagcctgagccacagagctgcaggtaggggaggcagctggaaccctggcgcctggctgtggagtttgaggctctgactcctgcgccgcgctgctgccccaaccctagtcatacgaggtgtttcaccccgccctggatactctgagatcccctctgggttcagcaggctcagagagctgactgcctggagcagaaggcatggggtcctccagagactcccctgagctgagttcccctgtggacaccagggccgcctccttgtggcgctccctgaagggtcctctctggaagaactgtattggttccctggggctgctagaggaaagcttcacaaactggggcttaaacaacagaaactgacatcccacagcgctggaggctggagtccgagatcaaggtgtcagcatgcttggtcccttctgagggt

SEQ ID NO: 70591 - DNA, 1550 bp, Homo sapiens
gtgtcccccagcccataggagcagccatgctgtgggacaccctgagtggggtctgtgttacctgttgtgcctaccatgcccttccccgccttggatgcacaggtgccccaccttagctgcccgagatgctgtttatccttgatagtcaccttttaagccttatacaggtctatcaagttgagtcaccattaccacttggtgtgtgctgtgccttgtgtaacactgcagttccgggagtcctccaacctggaatgcatgctttgcggggatctatgatgccctcgaattgtatgttacatgtgaacttgtgagcattttctaggggctctgcacctttgtgttctcagctctgagccccatgcttgctgcaaccagcaggtgttcagagtgaatgaatttgcttatcttggcataaatcatgtaactgttgatgataccccaggaaggtgagcctttggttataaatccttttaacattttccagtctaaaagttttgtggtcttattacaggatgtagaaaacagtgggcctcagttattcttttgctgttgtgccggartataccacggttgtttttgaaagataactttgaccatacccttaggaacttcctcagctcactttcaaatggagggcactggctttctaaccattgtgtctcccagcccagtgacagctgaagctgtctgcttccgatatcacaggcagcacagaagagccgccctccaggtgctgctgggaaatgctgcctggaactctttgccatttactttctatcaaaagctgagggaaatggtacatatggggctttcctaaaaatatgggatccatccatttgtcagcaatgtcattctatcctatcccagggcctttcaagattttggtgaaaactaatagatcccatattccagaataatgctattaataattttattattattacttaatgatagcaaaaagttagctaactccaaccgctcacttgttatttgccaggtaatcctctaatccagaggatttggccttttgtgtgtgttaatgtcctgcttgcaccagctctatgaggaaggtgctgctgttgtcatttccatttctgcactcgtggaaacaagcgtagtgaggccagcctgagccacagagctgcaggtaggggaggcagctggaaccctggcgcctggctgtggagtttgaggctctgactcctgcgccgcgctgctgccccaaccctagtcatacgaggtgtttcaccccgccctggatactctgagatcccctctgggttcagcaggctcagagagctgactgcctggagcagaaggcatggggtcctccagagactcccctgagctgagttcccctgtggacaccagggccgcctccttgtggcgctccctgaagggtcctctctggaagaactgtattggttccctggggctgctagaggaaagcttcacaaactggggcttaaacaacagaaactgacatcccacagcgctggaggctggagtccgagatcaaggtgtcagcatgcttggtcccttctgagggt

SEQ ID NO: 70592 - DNA, 1550 bp, Homo sapiens
gtgtcccccagcccataggagcagccatgctgtgggacaccctgagtggggtctgtgttacctgttgtgcctaccatgcccttccccgccttggatgcacaggtgccccaccttagctgcccgagatgctgtttatccttgatagtcaccttttaagccttatacaggtctatcaagttgagtcaccattaccacttggtgtgtgctgtgccttgtgtaacactgcagttccgggagtcctccaacctggaatgcatgctttgcggggatctatgatgccctcgaattgtatgttacatgtgaacttgtgagcattttctaggggctctgcacctttgtgttctcagctctgagccccatgcttgctgcaaccagcaggtgttcagagtgaatgaatttgcttatcttggcataaatcatgtaactgttgatgataccccaggaaggtgagcctttggttataaatccttttaacattttccagtctaaaagttttgtggtcttattacaggatgtagaaaacagtgggcctcagttattcttttgctgttgtgccggagtataccacggttgtttttgaaagataactttgaccatacccttaggaacttcctcagctcactttcaaatggagggcactggctttctaaccattgtgtctcccagcccagtgacagctgaagctgwctgcttccgatatcacaggcagcacagaagagccgccctccaggtgctgctgggaaatgctgcctggaactctttgccatttactttctatcaaaagctgagggaaatggtacatatggggctttcctaaaaatatgggatccatccatttgtcagcaatgtcattctatcctatcccagggcctttcaagattttggtgaaaactaatagatcccatattccagaataatgctattaataattttattattattacttaatgatagcaaaaagttagctaactccaaccgctcacttgttatttgccaggtaatcctctaatccagaggatttggccttttgtgtgtgttaatgtcctgcttgcaccagctctatgaggaaggtgctgctgttgtcatttccatttctgcactcgtggaaacaagcgtagtgaggccagcctgagccacagagctgcaggtaggggaggcagctggaaccctggcgcctggctgtggagtttgaggctctgactcctgcgccgcgctgctgccccaaccctagtcatacgaggtgtttcaccccgccctggatactctgagatcccctctgggttcagcaggctcagagagctgactgcctggagcagaaggcatggggtcctccagagactcccctgagctgagttcccctgtggacaccagggccgcctccttgtggcgctccctgaagggtcctctctggaagaactgtattggttccctggggctgctagaggaaagcttcacaaactggggcttaaacaacagaaactgacatcccacagcgctggaggctggagtccgagatcaaggtgtcagcatgcttggtcccttctgagggt

SEQ ID NO: 70593 - DNA, 1550 bp, Homo sapiens
gtgtcccccagcccataggagcagccatgctgtgggacaccctgagtggggtctgtgttacctgttgtgcctaccatgcccttccccgccttggatgcacaggtgccccaccttagctgcccgagatgctgtttatccttgatagtcaccttttaagccttatacaggtctatcaagttgagtcaccattaccacttggtgtgtgctgtgccttgtgtaacactgcagttccgggagtcctccaacctggaatgcatgctttgcggggatctatgatgccctcgaattgtatgttacatgtgaacttgtgagcattttctaggggctctgcacctttgtgttctcagctctgagccccatgcttgctgcaaccagcaggtgttcagagtgaatgaatttgcttatcttggcataaatcatgtaactgttgatgataccccaggaaggtgagcctttggttataaatccttttaacattttccagtctaaaagttttgtggtcttattacaggatgtagaaaacagtgggcctcagttattcttttgctgttgtgccggagtataccacggttgtttttgaaagataactttgaccatacccttaggaacttcctcagctcactttcaaatggagggcactggctttctaaccattgtgtctcccagcccagtgacagctgaagctgtctgcttccgatrtcacaggcagcacagaagagccgccctccaggtgctgctgggaaatgctgcctggaactctttgccatttactttctatcaaaagctgagggaaatggtacatatggggctttcctaaaaatatgggatccatccatttgtcagcaatgtcattctatcctatcccagggcctttcaagattttggtgaaaactaatagatcccatattccagaataatgctattaataattttattattattacttaatgatagcaaaaagttagctaactccaaccgctcacttgttatttgccaggtaatcctctaatccagaggatttggccttttgtgtgtgttaatgtcctgcttgcaccagctctatgaggaaggtgctgctgttgtcatttccatttctgcactcgtggaaacaagcgtagtgaggccagcctgagccacagagctgcaggtaggggaggcagctggaaccctggcgcctggctgtggagtttgaggctctgactcctgcgccgcgctgctgccccaaccctagtcatacgaggtgtttcaccccgccctggatactctgagatcccctctgggttcagcaggctcagagagctgactgcctggagcagaaggcatggggtcctccagagactcccctgagctgagttcccctgtggacaccagggccgcctccttgtggcgctccctgaagggtcctctctggaagaactgtattggttccctggggctgctagaggaaagcttcacaaactggggcttaaacaacagaaactgacatcccacagcgctggaggctggagtccgagatcaaggtgtcagcatgcttggtcccttctgagggt

SEQ ID NO: 70594 - DNA, 774 bp, Homo sapiens
accgactgaaggtgagacctggggtatccggaagtgggagtgctggaggaaacagggcttcagcgattgttgtggggcgattccgagactcaggcagtgcatgctcccctgccgttgctgtgcctctcagctcttccctcagctccttgggtcgatggtgctgccgctgtgctgtctcttttgagctggaggtcagcagggccttctccacacaaggaactgttggtgcccatttattactcacctgggaaaggacctgatcgttgccattggcagcatggttcagtggctgcaaatggatctgatggagagcgtgtggctttgggaggagygtgccgccttccacagtgagcagcgaggctgggacctgcagggatgaggtcccgggaggggatgcggcagcccttgagtgctggttggagaaggagagctgcccccagtgaggaggcgccgagctgagtggcccagactccttaggagaggcctggttttgggcttcctggtgattttccttcatgtctgcctcctgtaggcggagcaggccaggaggaagcagcgagaagaacgcctgcagcagctgcagcacagggtgcagctcaagtatgcagccaagcgcctggtgagcctcatttcttggggggcaggattatgtccaggcagggtcgccctgcttggaggctcatgggtgcgtggccagggtcttggtctcccctccatgaccctcactggctatgtgctcccgtacagaagctgggctgtgagtggttgaggcgt

SEQ ID NO: 70595 - DNA, 774 bp, Homo sapiens
accgactgaaggtgagacctggggtatccggaagtgggagtgctggaggaaacagggcttcagcgattgttgtggggcgattccgagactcaggcagtgcatgctcccctgccgttgctgtgcctctcagctcttccctcagctccttgggtcgatggtgctgccgctgtgctgtctcttttgagctggaggtcagcagggccttctccacacaaggaactgttggtgcccatttattactcacctgggaaaggacctgatcgttgccattggcagcatggttcagtggctgcaaatggatctgatggagagcgtgtggctttgggaggagtgtgccgccttccacagtgagcagcgaggctgggacctgcagggatgaggtcccgggaggggatgcggcagcccttgagtgctggttggrgaaggagagctgcccccagtgaggaggcgccgagctgagtggcccagactccttaggagaggcctggttttgggcttcctggtgattttccttcatgtctgcctcctgtaggcggagcaggccaggaggaagcagcgagaagaacgcctgcagcagctgcagcacagggtgcagctcaagtatgcagccaagcgcctggtgagcctcatttcttggggggcaggattatgtccaggcagggtcgccctgcttggaggctcatgggtgcgtggccagggtcttggtctcccctccatgaccctcactggctatgtgctcccgtacagaagctgggctgtgagtggttgaggcgt

SEQ ID NO: 70596 - DNA, 680 bp, Homo sapiens
agaaagaatggcagaggagaccccagttcctccctgagtcccctctccttgggaaaaagtgttcctactctctgggtgagcgtctggtccgaatcgttggcttggagatgattttacgggctctttctggagaacaaaagtaaaacsttacagtgttccgatgagacacagtaggcagtacttgggagggtcttatagaccccaccctgtggaagtgggtctcaacattacacaaccccctctcgggcccgtggacagttgctgtcctctctgttttctctctttgtgcctgtgcccccctcagagaagaagaaaggagctgaggaggagaagccaaagaggaggaggcaggagaagcaggcagcctgccccttctacaaccacgagcagatgggccttctccgggatgaggccctggcagaggtgaaggacatggagcagctgctggcccttgggaaggaggcccgggcctgtccctattacgggagccgccttgccatccctgcagcccaggtgagggccctgcagggccagaaagccgctcttggctctcactgtggtctaggccatgaggggggtcctcatcacactgtagtttgggggatgccccccaccgtggtcaggttgatggcaccttaacccattctctcctgaggcgtgagttggaggaggcgcgtggg

SEQ ID NO: 70597 - DNA, 680 bp, Homo sapiens
agaaagaatggcagaggagaccccagttcctccctgagtcccctctccttgggaaaaagtgttcctactctctgggtgagcgtctggtccgaatcgttggcttggagatgattttacgggctctttctggagaacaaaagtaaaacgttacagtgttccgatgagacacagtaggcagtacttgggagggtcttatagaccccaccctgtggaagtgggtctcaacattacacaaccccctctcgggcccgtggacagttgctgtcctctctgttttctctctttgtgcctgtgcccccctcagagaagaagaaaggagctgaggaggagaagccaaagaggaggaggcaggagaagcaggcagcctgccccttctacaaccacgagcagatgggccttctccgggatgaggccctggcagaggtgaaggacatggagcagctgctggcccttgggaaggaggcccgggcctgtccctattacgggagccgccttgccatccctgcagcccaggtgagggccctgcagggccagaaagccgctcttggctctcactgtggtctaggccatgaggggsgtcctcatcacactgtagtttgggggatgccccccaccgtggtcaggttgatggcaccttaacccattctctcctgaggcgtgagttggaggaggcgcgtggg

SEQ ID NO: 70598 - DNA, 624 bp, Homo sapiens
ctgtcatcttcccagaccttacaacttttcctcataatctttcactatttgctttattcaatagcaattttttagcaattttcctttgggactttccaaagcattcagctttgtcttcacagaaacattgctctacacataattatttttcatcagcttccatatttaattaaatgatgtaattacaatgaygtgcaacaggcacaaaccggcacattaaggatgggcggccaaggcctccagggagcaggactgagtgagcaccacagtgtttacaaaactcaggagtgatcacagagcccaggggcttgctctgggagtgtgggttgggggcgtaatgggatggaactagggaaggtccacatgttttcaaagaaactttcctttttcttgagaatgggcacacaggcgacagtatgtattctttgttttttgttttttgagacagagtctcactctgtcgcccaggctggagtgcagtggcacaatctcggctcactgcaacctctgcccccccggttcaagcgattcttctgcctcagcctccagagtagctgggattacaggcgcatgacaccacacctggctaattttttgtatctttagtagagacagggtttcact

SEQ ID NO: 70599 - DNA, 389 bp, Homo sapiens
cagctgcatggcaccatgtggccagccagatggatggaggttattgagggcacagctcaccatactccaggatcagccaagcattccggcaacagggccacaaattcactggatgcccttgggccagtcagcccctcccagaacccagcttagtccacagggttctgaggaagaacgaatgagacgctgattatcaacaggctttgtcaactacacagcagctctccagagccaaccaccaccgtcaacagtgccatcctgccagcaaagtgaagaccstcttgagaacaggctctgtctttaaacaaataaactctagaaactcttgtaagccacctgtttccaaaccagggaaaacgtctggccttcattcccaccagcgtcattca

SEQ ID NO: 70600 - DNA, 1139 bp, Homo sapiens
agagcccgcctttgcttctgccagccactcacgctctccacaggctgcagccaggtacacaccccccttcaagcaacaaaaccactgcctgagcacctggcctgctctaagcccagggctgagacaagggggagccagccacacacaacaccaggagcgctggcatcgccggagcaaggagcccgtgatggccgtccacccgggacagcaatcgcgctctgcggcacgaggctttcaacagaggcgagtgcttcctgggggtcaagagcatggaacacacacttcaggccccctctccaggctgcaggccaacaggcgtccatgagacagacactccctgatgtgtcccactcagttctcctgccgctgagtgactctcccagggaggcccagagccacatgctcttggtagcccctactcctccaggtgttaaagcaggtgcccatgtacagtccacaagcacaggccatcaggctgggcaaggatgggcaaggaaccaggcccctgccctttgaggctcaggagctccaagctacagaatagggttccaaagctccagccactcggaggacacacaggccacaggaagccggcgaccagtccacagagagacgcgctgtggggcccgacaggctgaggtcaggcagtgggatccccccttcacagtcctcccggccttgggcggggctatccaggagggggctgcccctccctgccagagtgcactggggcctgtaygatgccagcctgagaaagatgcgcaactccagctccacctgcacggagatgccccacagcagatccctgccaaaatggcatttgcaaagcgaggaaactgagccccaggaaggccacaatgatcaaaaacggtctcactgcaacttccagatacattttctaggcctctggttttggcctttttaaatgttggcatatggactaaggaatggaatacctaactgctctccaagaaaggagtttgttacttctgggtcacagattccacacgttcacctttctggccttcatacctcacgtgtcacagccaagactcctaggaggtcccctgcctgccgtcatgaagggcgcctgcagcctggtgcgccacccccacatgccctgcacgcggcaaaccgct

SEQ ID NO: 70601 - DNA, 1139 bp, Homo sapiens
agagcccgcctttgcttctgccagccactcacgctctccacaggctgcagccaggtacacaccccccttcaagcaacaaaaccactgcctgagcacctggcctgctctaagcccagggctgagacaagggggagccagccacacacaacaccaggagcgctggcatcgccggagcaaggagcccgtgatggccgtccacccgggacagcaatcgcgctctgcggcacgaggctttcaacagaggcgagtgcttcctgggggtcaagagcatggaacacacacttcaggccccctctccaggctgcaggccaacaggcgtccatgagacagacactccctgatgtgtcccactcagttctcctgccgctgagtgactctcccagggaggcccagagccacatgctcttggtagcccctactcctccaggtgttaaagcaggtgcccatgtacagtccacaagcacaggccatcaggctgggcaaggatgggcaaggaaccaggcccctgccctttgaggctcaggagctccaagctacagaatagggttccaaagctccagccactcggaggacacacaggccacaggaagccggcgaccagtccacagagagacgcgctgtggggcccgacaggctgaggtcaggcagtgggatccccccttcacagtcctcccggccttgggcggggctatccaggagggggctgcccctccctgccagagtgcactggggcctgtacgatgccagcctgagaaagatgcgcaactccagctccacctgcacggagatgccccacagcagatccctgccaaaatggcatttgcaaagcgaggaaactgagccccaggaaggccacaatgatcaaaaacggtctcactgcaacttccagatacattttctaggcctctggttttggcctttttaaatgttggcatatggactaaggaatggaatacctaactgctctccaagaaaggagtttgttacttctgggtcacagattccacacgttcacctttctggccttcatacctcacgtgtcacagccaagactcctaggaggtcccctgcctgccgtcatgaagggcgcctgcagcctggtgygccacccccacatgccctgcacgcggcaaaccgct

SEQ ID NO: 70602 - DNA, 605 bp, Homo sapiens
gtatcagtcccactccaccaacacttctccaatttccagaacgccatcgtgcgacccgggaaacctcaggacacatctcagctggaggacaccagcctgtggagggactgtgggtctcagggactgccaaaaatccccrcatcgggccggaacccaccccacacaggaggcggggggcgctccctgcatcactgcagcccaggacaccatcatgcaccccttcactccctcgaccagccagcaggccccaggacttctctcttccgggctctgtcctccacacaggggtccgccgtcactgttccagcccccgtggtcggcggagcacaacggcccaggcccggcggagggggcaggagctaagtgcgagggagaaaagccggagcacaggttagagaggggaaggccgcctggcctagctggtgggaaagcgggagacacacctgccgtcagggtggggaggctgggccttcatgcgagtggccaacagagatcacgggacccctggggagacagcagggcacgcctgacatggccccaaggtcaggagcaataacagcaaggtagcagcttccagggacagaggaaaatctgatcatggagat

SEQ ID NO: 70603 - DNA, 605 bp, Homo sapiens
gtatcagtcccactccaccaacacttctccaatttccagaacgccatcgtgcgacccgggaaacctcaggacacatctcagctggaggacaccagcctgtggagggactgtgggtctcagggactgccaaaaatccccgcatcgggccggaacccaccccacacaggaggcggggggcrctccctgcatcactgcagcccaggacaccatcatgcaccccttcactccctcgaccagccagcaggccccaggacttctctcttccgggctctgtcctccacacaggggtccgccgtcactgttccagcccccgtggtcggcggagcacaacggcccaggcccggcggagggggcaggagctaagtgcgagggagaaaagccggagcacaggttagagaggggaaggccgcctggcctagctggtgggaaagcgggagacacacctgccgtcagggtggggaggctgggccttcatgcgagtggccaacagagatcacgggacccctggggagacagcagggcacgcctgacatggccccaaggtcaggagcaataacagcaaggtagcagcttccagggacagaggaaaatctgatcatggagat

SEQ ID NO: 70604 - DNA, 1257 bp, Homo sapiens
gagcacgggacagaccaaacaggcgctaccaagtatgggttccagacccccacccggccattccagacgcctccctgtgctgcgcacacagcctccccgcacccgctctgcagctcagagctgctcaccctcagctctgggtcctccgcacccacttcggattcccatcagaggacaggccctgcctgtgggcccatcaccatcccatctcccacctagacggaaaacccgagctctgctcctcctgaaatgaggccagccctctggtgtcaattacatgcaacttccccgggcctcggcttcttcttcaggccacatggatagtccctgccttaagcagcccatgagagcactggaggcgcacacacaatcaggtgacgagaagcggctgcagcagccgcagggaacacggcaacacaggagccgaacccggcacagcgggagccccacgcccgccaaccccaggaggacactcaagagtggggccccaaggactctgtcatttcaactcacttcctatgtttgtaaacgtcagaactcatagcagggaggtgtgcggcctcaggatcccagcaacagcccccaacagcctcgagatgctctggcgtgtcagctttagggactacatcagaagacttccccacaatccaagattgtcaagagctggttaacgtaggaagtttagcaagagctcactgcggctgcgtgggtctaaatagttttaaacacttctgtgtttttatagcattatatttagaaacctctaaataaaactcatggcgagtgttgcaataatatacattttttaaactaattgaatgttgccattacaagtgctattttggacaatctgctaaatatgtaatttaggaattaagattcatatcttacaggatacgctaattattcctttgaatcmgtttgggtactttctgaacacacacaagaagtctgagagttggcgacaatatccacccttctccacagcgcagaggtcaggccactagtaagggcacaagcgtgggctcagcacagttgtgagagtgcagacccagctgcgcaggccggaggtggccatgaggcccacgcctttccagtccaggaggctccggctcaaagcagcgggaagttcagtttattaaaccacagccgattttcctaaggctcccctccactgatctcacacacgttatcaaaatgacacagatgtccagatggcagcacctcgaagattcttgaagcctcctcctgtgactt

SEQ ID NO: 70605 - DNA, 1495 bp, Homo sapiens
ggggctcgggaagccaggcctcagagcccgcaggcgcctccatgcacccctccacctctgcacgctggctgcccagcccccagtcccaggcgtggaagcctcccaggcggcaaggagctttcgagaccgtggctgctcagcccttgctctctgctctagtcaaggagcgtgcctcggaatgaatgaggtacagtctttccctaaagtcaccggagaacagagatcaatgaaaaaggaggaagggaggaaagacaaaagacttgagaggaagcaaaacgaaaccagcttagatttgatcccgatacgtgggaaatcaggtggggaaaaggggctacaactccatgatgaccacaagtccagagggctgtgcaagccaacacggctgggggctgcagaaagcaccacagcaactgtctgacgccaggttggggccagcagccgcacgctggaaaacgcaacacacagcccacacagccctgtgggggcagcyaagcccaaaaccctggcgtggcccagcaggagcaggcctgtgcggagtggacctgcacacacagcaaacgcacacaccgcgaacgcacacaccggatgcttcccgctgtggagacccacaaggcaatgtcttctgaagttaaaaggatgccaggatccagcagtcccactcctaagtatgtgctcaaggaaaagtaagagtttagatcatacaaagccaacatttccagcagctttactccatttcaccaaacccagaaacaatacagatgtccttcaaccagtgaacgaataaacaagtcccagagcagccgtgcctggagcatcactcagcaacgaaaagcagcgctgcgattcacacagccacgcggtgagtcccaaatgcacctccatgagccaaagatgccatatttgtatgacgttctggaaaaggcaaaatcaccagacagaaagcatgctggggtggccagggaggggagtctggggtggtggggccgcaagtcagccccaggcatgtgaaaatgcgcagctgcacagcagaagggcaaatgaggctgtatagacagttttttttaatcaaccagaatgaaaaagactcaaaatgaaacaccagctctaagcggtaaacctaagggaaccacaaacaaagaacacaacaccaggcagtgggaaacacaacggcacccacggtgctgagaaaacgccacttccactgggaacggtaggccaaggacagaacggcctgtccacagacactgcaccctcgcaagtcaacctctcctcacagagccatggattagcaattccagaaagaccctgtgcgcacgtgaggactggatgggtaagtaaaacatggtgtgtgctgacacctgggcttctcaagaccaaggagacagcacaggaggcgaggacagcccaggggtgctggatggagccagtgtcagggtgtccaccgaggggccctggggccctgacacacccggagcaggcagcaccccacacccac

SEQ ID NO: 70606 - DNA, 1495 bp, Homo sapiens
ggggctcgggaagccaggcctcagagcccgcaggcgcctccatgcacccctccacctctgcacgctggctgcccagcccccagtcccaggcgtggaagcctcccaggcggcaaggagctttcgagaccgtggctgctcagcccttgctctctgctctagtcaaggagcgtgcctcggaatgaatgaggtacagtctttccctaaagtcaccggagaacagagatcaatgaaaaaggaggaagggaggaaagacaaaagacttgagaggaagcaaaacgaaaccagcttagatttgatcccgatacgtgggaaatcaggtggggaaaaggggctacaactccatgatgaccacaagtccagagggctgtgcaagccaacacggctgggggctgcagaaagcaccacagcaactgtctgacgccaggttggggccagcagccgcacgctggaaaacgcaacacacagcccacacagccctgtgggggcagctaagcccaaaaccctggcgtggcccagcasgagcaggcctgtgcggagtggacctgcacacacagcaaacgcacacaccgcgaacgcacacaccggatgcttcccgctgtggagacccacaaggcaatgtcttctgaagttaaaaggatgccaggatccagcagtcccactcctaagtatgtgctcaaggaaaagtaagagtttagatcatacaaagccaacatttccagcagctttactccatttcaccaaacccagaaacaatacagatgtccttcaaccagtgaacgaataaacaagtcccagagcagccgtgcctggagcatcactcagcaacgaaaagcagcgctgcgattcacacagccacgcggtgagtcccaaatgcacctccatgagccaaagatgccatatttgtatgacgttctggaaaaggcaaaatcaccagacagaaagcatgctggggtggccagggaggggagtctggggtggtggggccgcaagtcagccccaggcatgtgaaaatgcgcagctgcacagcagaagggcaaatgaggctgtatagacagttttttttaatcaaccagaatgaaaaagactcaaaatgaaacaccagctctaagcggtaaacctaagggaaccacaaacaaagaacacaacaccaggcagtgggaaacacaacggcacccacggtgctgagaaaacgccacttccactgggaacggtaggccaaggacagaacggcctgtccacagacactgcaccctcgcaagtcaacctctcctcacagagccatggattagcaattccagaaagaccctgtgcgcacgtgaggactggatgggtaagtaaaacatggtgtgtgctgacacctgggcttctcaagaccaaggagacagcacaggaggcgaggacagcccaggggtgctggatggagccagtgtcagggtgtccaccgaggggccctggggccctgacacacccggagcaggcagcaccccacacccac

SEQ ID NO: 70607 - DNA, 1495 bp, Homo sapiens
ggggctcgggaagccaggcctcagagcccgcaggcgcctccatgcacccctccacctctgcacgctggctgcccagcccccagtcccaggcgtggaagcctcccaggcggcaaggagctttcgagaccgtggctgctcagcccttgctctctgctctagtcaaggagcgtgcctcggaatgaatgaggtacagtctttccctaaagtcaccggagaacagagatcaatgaaaaaggaggaagggaggaaagacaaaagacttgagaggaagcaaaacgaaaccagcttagatttgatcccgatacgtgggaaatcaggtggggaaaaggggctacaactccatgatgaccacaagtccagagggctgtgcaagccaacacggctgggggctgcagaaagcaccacagcaactgtctgacgccaggttggggccagcagccgcacgctggaaaacgcaacacacagcccacacagccctgtgggggcagctaagcccaaaaccctggcgtggcccagcaggagcaggcctgtgcggagtggacctgcacacacmgcaaacgcacacaccgcgaacgcacacaccggatgcttcccgctgtggagacccacaaggcaatgtcttctgaagttaaaaggatgccaggatccagcagtcccactcctaagtatgtgctcaaggaaaagtaagagtttagatcatacaaagccaacatttccagcagctttactccatttcaccaaacccagaaacaatacagatgtccttcaaccagtgaacgaataaacaagtcccagagcagccgtgcctggagcatcactcagcaacgaaaagcagcgctgcgattcacacagccacgcggtgagtcccaaatgcacctccatgagccaaagatgccatatttgtatgacgttctggaaaaggcaaaatcaccagacagaaagcatgctggggtggccagggaggggagtctggggtggtggggccgcaagtcagccccaggcatgtgaaaatgcgcagctgcacagcagaagggcaaatgaggctgtatagacagttttttttaatcaaccagaatgaaaaagactcaaaatgaaacaccagctctaagcggtaaacctaagggaaccacaaacaaagaacacaacaccaggcagtgggaaacacaacggcacccacggtgctgagaaaacgccacttccactgggaacggtaggccaaggacagaacggcctgtccacagacactgcaccctcgcaagtcaacctctcctcacagagccatggattagcaattccagaaagaccctgtgcgcacgtgaggactggatgggtaagtaaaacatggtgtgtgctgacacctgggcttctcaagaccaaggagacagcacaggaggcgaggacagcccaggggtgctggatggagccagtgtcagggtgtccaccgaggggccctggggccctgacacacccggagcaggcagcaccccacacccac

SEQ ID NO: 70608 - DNA, 814 bp, Homo sapiens
ggataagctttttgatgtgctgctggattcggtttgccagtattttattgagaatttttgcatcgatgttcatcagggaaaatggcctgaaattttcttttcttgtcgtgtctctgccaggttttggtatcaggatgatgctggcctcataaaatgaattagggaggagtcccactttttccgctgtttggaatagtttcagaaggaatggtacccgctactctttaatcacaataagaaaacattttgaaacctatgttttaaagcaaatttcatttgtgttttgattcttgacttgtcataagggataagaatttcaaatttaaaaagaaaacttctgaaatttagtgcagtgtgcatgcctggagaaatgaatgctatagctttaagataaggtagtctggtgattcattgcacgaaacaagatcgatttggagcaggctcctactgttagcttttttgaagatggattctcacgccgaaaataacacaacatattctagataacagcagtttttccccctgaaatccaccaaaactgaagaaaaatccaagtgactgttcttagcagctgtgtggcctggagttcactggggaagctggcttcctgccgtcccctattcatcacctgcttcaaagacagcctggctggctatagtttgcaggccaggtagggtgccattgtgcacagtctgggaggattagtatcaaagctgcggcaaccaggccttggtctcgggctgccattcagtctagcggggakaggctaagactggccaaggtcacagtctccagtgtggagtggactgggaaa

SEQ ID NO: 70609 - DNA, 562 bp, Homo sapiens
tgcaaatcatttctttttcaatatcagaccaaaatatatttttccccacacatattttttaaattggttttaaaaaagctttttagagcattgtttgtgataccttcttagtgaattagtgacattttaaacgtttttttaaagaaacaatattaggccaggcacggtggctcatgcctgtaatcccagcactttgggaggctgaagtgggtggatcacctgaagtcaggagttcgagaacagcctggccaacatggcgaaacctcatctctactaaaaatgcaaaaattagccgggtgtggtggcacatgcctgtaatcccagctactcaggaggctgagggaggagaattgcttgaacctgggaagcagaggttgtggtaagccgagatcgcaccactgtgctccagcctgggcgacagagcaagactccgtctcagaaaaaaaaaaaaaaaaaaaaaaaaaaatawatatatatatatatatatatataattatatatatatatataattatatatataagtttaataatttgataattttttaagtattggaagcccc

SEQ ID NO: 70610 - DNA, 796 bp, Homo sapiens
ggggaaaaaatgtgttgttttcctttttttctgatgcttctaatattaaatgcgtctattttcccactctccattgtcttgaggtcttcccctacccaccctgcctagttctgtcacgtcccttctttccctgtatcacaacaatgttctccctttctcacctttgtttctcttcatacttgtttctctctctgtgtctctctcattctcttcccttccaaatgtagtatttggagactgtaatatcgattgaggcagacaatagaaaactgtcgaacctccactgtaaattcattcttaatcctatgaaaaaatgcatcctgaaacgtgttgcatgcacagtgagacaaaaacctgtgtctttaggtttcctgcgatctagcttggaggcgggttgggggggtgtggagggaagtgctggagaaattatcccattattgactgagcagcaaagaattttcaagaacagtgattctcctagaaaaagtattgctgctgccatttcaatgcaaaatttggcttttgagtaaaaggcttaggtttttatcttccggggagaaaaaaaaamcccaaaagacaaaaaaaaaaaaaaaaaaggtcatagcgtccctgggtgggctcgaaccaccaacctttcggttaacagccgaacgcgctaaccgattgcgccacagagaccgagtcgactaccggcgtagtagtgagccgagtcaatgggagcgagcctggacggcgcagacgccgtaagagatgccgccatcgggcgaaataagtggaacccgggggagaaagggaa

SEQ ID NO: 70611 - DNA, 780 bp, Homo sapiens
ccacctgcctcggcctcccaaagtattgggattacaggcgtgaggcaccgcgcctggccctggtgtctttataacaagaggagagaaggacmcagacacacacagagagacagccatgtaaagacactggaggaaattgaccatctacaagccaaagagagaggcctcaaaaggaaccaaccctgcccataccttgatcttggatttctagccccaggaccctgagaagagaaattcctgttattgaagttgatgatctgtggtcctttgttatggcagcccaagctgatcaaagataactggctgctcattccaggggagccaaatcccgtgaagacagagccttatagtgatacagtgacaatgtggaaagctttcgtgaggccagaacgaactgcattcgttcattcatttatttttcttgcagttcatctttaaatactggatgaacattgttctcagcatggggaatacaaggctgcaaagtctgtggcacacaccgtgggggtgtcagttaggtgagaggcagtccccaaaacagtgacaacgctgggctcagtgctttgaccagagtgtcccagagcaatgagggagcacaaaggagggcatttcggcagcttggggtgagagtcaatttctgccagagaaggtcccagaaccgtttgtgagagagggaggagcacagggttagtgggtcagaggccactggaagagggtgtctttgggacatgcagtctttcctcacagtggggtagcgggaggatgtgtgggcacaggctg

SEQ ID NO: 70612 - DNA, 1671 bp, Homo sapiens
aaaacacatctggaaagttacacgagaaacctctgaggtttctggagatgcaaactgggggcatgaaggcaggggaaagggaaagacttcactgtttacctttttattattttccaattttaaatcatttgaatgtataacttgtctaaaaatcaaattttaaaagttgagggaattaacattacagaaagtaacaaacctcaaggaagcagccaccttcaccagatggacagtctacctcactcttcccaygctccagtagttactgaatgccagtcccctccctccattcagtctgccccacctgctggccttctagagcctcagagcagtcctattcccacacctccaaacacatccatacactgtgatggtcgatctgggaccaccagttgagaggaaatgtgttgtgtttccactcttcagacaaacagagtgttattttattgaggtttgggattttttcttgcattaacagggtttctagatcccagtaggtgaatgagaaagaagtatgcttttattgtataaggaatttgtttctgatacaccaaagtgatgatgtatgacttttcttaaagaagtggttattagaagagttaaaaatcaatagaaacaaaaagtcataggtattgttccaatactccaggaacatcacaatttggattctgtagatgtgtgtaatataatgtgtaatattacattctgacaacctcaagttgaaaactgcacagctgaagatcacttatagtcaataacacttttcaaactttaattttaaattcattaagtctctccctaatgtatcgtactttttaataaaggaaactgtcagatacgctataatacagaggaaaacgtttatatactctttcattataatttttccacaacttccaaaatgaagaaaaagacatggaaacattaagttcagagaataattgtggcaggcaattccctcctcctgaaagttcaattaccccaacacaggcaaaatttcttactaactcaaaaggaactgaattcacatataaagacaaacgtgggattctgttgagttctgttggacacagaacacaattgctcaagcactggttgggcacctgtattctaatagctcacgattactgagcactccatgtctgggaagagccagtgctgggtgcctgacacgcatccttgcacctcatcagcacaactatcccatgggctcatcctggttcacctattttataaaagagaacactaacatcagagaagttaaaaaatttgcctaaaaacatccagagtaggtttcatcgttgcccactactttataatgctttcccaagggtactgagacgttatcaaaacatgttagtgaaacagtctaaaacatcacaaattttaggtttaatacaaaatacccagaaaaggacagcgttattagaaatctcagcataatgtaataataagaacttatgatgattgtattcttttcctattttctctcccgtacaggcatatgaaataccttaaaacttattttagtggtgtgtgtgtacatgtagtttcaggataatatagtaatctaaaacatttttaatatggcaaagtgtggcaatactaaatttttaaaaaggatttttatttagcaaacagaaagcaaaaatgttgtccaagtaacatgca

SEQ ID NO: 70613 - DNA, 1671 bp, Homo sapiens
aaaacacatctggaaagttacacgagaaacctctgaggtttctggagatgcaaactgggggcatgaaggcaggggaaagggaaagacttcactgtttacctttttattattttccaattttaaatcatttgaatgtataacttgtctaaaaatcaaattttaaaagttgagggaattaacattacagaaagtaacaaacctcaaggaagcagccaccttcaccagatggacagtctacctcactcttcccacgctccagtagttactgaatgccagtcccctcyctccattcagtctgccccacctgctggccttctagagcctcagagcagtcctattcccacacctccaaacacatccatacactgtgatggtcgatctgggaccaccagttgagaggaaatgtgttgtgtttccactcttcagacaaacagagtgttattttattgaggtttgggattttttcttgcattaacagggtttctagatcccagtaggtgaatgagaaagaagtatgcttttattgtataaggaatttgtttctgatacaccaaagtgatgatgtatgacttttcttaaagaagtggttattagaagagttaaaaatcaatagaaacaaaaagtcataggtattgttccaatactccaggaacatcacaatttggattctgtagatgtgtgtaatataatgtgtaatattacattctgacaacctcaagttgaaaactgcacagctgaagatcacttatagtcaataacacttttcaaactttaattttaaattcattaagtctctccctaatgtatcgtactttttaataaaggaaactgtcagatacgctataatacagaggaaaacgtttatatactctttcattataatttttccacaacttccaaaatgaagaaaaagacatggaaacattaagttcagagaataattgtggcaggcaattccctcctcctgaaagttcaattaccccaacacaggcaaaatttcttactaactcaaaaggaactgaattcacatataaagacaaacgtgggattctgttgagttctgttggacacagaacacaattgctcaagcactggttgggcacctgtattctaatagctcacgattactgagcactccatgtctgggaagagccagtgctgggtgcctgacacgcatccttgcacctcatcagcacaactatcccatgggctcatcctggttcacctattttataaaagagaacactaacatcagagaagttaaaaaatttgcctaaaaacatccagagtaggtttcatcgttgcccactactttataatgctttcccaagggtactgagacgttatcaaaacatgttagtgaaacagtctaaaacatcacaaattttaggtttaatacaaaatacccagaaaaggacagcgttattagaaatctcagcataatgtaataataagaacttatgatgattgtattcttttcctattttctctcccgtacaggcatatgaaataccttaaaacttattttagtggtgtgtgtgtacatgtagtttcaggataatatagtaatctaaaacatttttaatatggcaaagtgtggcaatactaaatttttaaaaaggatttttatttagcaaacagaaagcaaaaatgttgtccaagtaacatgca

SEQ ID NO: 70614 - DNA, 1671 bp, Homo sapiens
aaaacacatctggaaagttacacgagaaacctctgaggtttctggagatgcaaactgggggcatgaaggcaggggaaagggaaagacttcactgtttacctttttattattttccaattttaaatcatttgaatgtataacttgtctaaaaatcaaattttaaaagttgagggaattaacattacagaaagtaacaaacctcaaggaagcagccaccttcaccagatggacagtctacctcactcttcccacgctccagtagttactgaatgccagtcccctccctccattcagtctgccccacctgctggccttctagagcctcagagcagtcctattcccacacctccaaacacatccatacactgtgatggtcgatctgggaccaccagttgagaggaaatgtgttgtgtttccactcttcagacaaacagagtgttattttattgaggtttgggattttttcttgcattaacagggtttctagatcccagtaggtgaatgagaaagaagtatgcttttattgyataaggaatttgtttctgatacaccaaagtgatgatgtatgacttttcttaaagaagtggttattagaagagttaaaaatcaatagaaacaaaaagtcataggtattgttccaatactccaggaacatcacaatttggattctgtagatgtgtgtaatataatgtgtaatattacattctgacaacctcaagttgaaaactgcacagctgaagatcacttatagtcaataacacttttcaaactttaattttaaattcattaagtctctccctaatgtatcgtactttttaataaaggaaactgtcagatacgctataatacagaggaaaacgtttatatactctttcattataatttttccacaacttccaaaatgaagaaaaagacatggaaacattaagttcagagaataattgtggcaggcaattccctcctcctgaaagttcaattaccccaacacaggcaaaatttcttactaactcaaaaggaactgaattcacatataaagacaaacgtgggattctgttgagttctgttggacacagaacacaattgctcaagcactggttgggcacctgtattctaatagctcacgattactgagcactccatgtctgggaagagccagtgctgggtgcctgacacgcatccttgcacctcatcagcacaactatcccatgggctcatcctggttcacctattttataaaagagaacactaacatcagagaagttaaaaaatttgcctaaaaacatccagagtaggtttcatcgttgcccactactttataatgctttcccaagggtactgagacgttatcaaaacatgttagtgaaacagtctaaaacatcacaaattttaggtttaatacaaaatacccagaaaaggacagcgttattagaaatctcagcataatgtaataataagaacttatgatgattgtattcttttcctattttctctcccgtacaggcatatgaaataccttaaaacttattttagtggtgtgtgtgtacatgtagtttcaggataatatagtaatctaaaacatttttaatatggcaaagtgtggcaatactaaatttttaaaaaggatttttatttagcaaacagaaagcaaaaatgttgtccaagtaacatgca

SEQ ID NO: 70615 - DNA, 755 bp, Homo sapiens
agagtgactcaaaatagagggaatgtggggacttggggcataagattgatcatgaatcaccaaatagaaaaaccttcggatggctttcaagaagaatcctccttgaagttttaactttcacctacaagcaagttttctcactgctctgtacagcagggtaaggacagcagcctcacagcatcagtctgaagatagaatgggttaatgcagccaggcacagtggctcatgcctgtaatcccagcactttaggaggccgaagcaggcggatcatgaggtcaagagatcaagacaccctggccaacayggtgaaaccccgtctatactaaaatacaaaaatactagctgagtgtggtggtgcatgcctgtaggcccagctacttgggaggctgaggcaggagaattgcttgaacctgggagacggaggttgcagtgagccaagatcgcaccactgcactccagcctgggtgacagagtgagactttgtctccgcaaaaaaaaaaaaaaaaaaaaaaaagaatgggttaatgcctgagaactctttggcacagtgtccagcacaaattcagcagtcactcagtgttggctatcatctttggtgatgttggtcccaaacccagacctctgctcttgtcctcggctcatacacccacctgtatagcccatatgcactttaaacatgagtccaaaatggaatccaaaatattagatgccctcgttgccaccaccaggtttgctttcctctcaagccactgag

SEQ ID NO: 70616 - DNA, 2794 bp, Homo sapiens
ggatcctggccctggctctcctgggaatgctctgggactgtgcatgatgggtggggtggggagactctgaggagttggggagaggacccctccctactcacagtgttgcaggccagcaggaaggcggggacccggggcaaggtggcagccaccaagcaggcccaacgtggttcttccaacgtcttttccatgtttgaacaagcccagatacaggagttcaaagaagtgagtgcccactcccagtagcctcagatcccatcctggcccccccaccccaccccacatacataccccccttctaccctgaccttgcctctcacaccacccaggtctctcccccacctcccaccttccctagagctgggggctgctcccacctgaaggcccccatcccacaggccttcagctgtatcgaccagaatcgtgatggcatcatctgcaaggcagacctgagggagacctactcccagctgggtgcgtgcacccacctcccaccctgcgcactggggtccctactctgagctgctgggcgggtgggagtggctggggggacaggactctgctcccctgcttcccctcctccccgtctcctcacactgcccttccccccttgtcacgccttgcttccacttcaccttcccgacccacagctgcctctgcccctccagcccctgtggccaggatggagggagggcggcctgggccttctgggggacacccagggtccctgtgtgcacctcatgccccacccccaccagggaaggtgagtgtcccagaggaggagctggacgccatgctgcaagagggcaagggccccatcaacttcaccgtcttcctcacgctctttggggagaagctcaatggtgagcctgggacagagctgggcacccttggccaggcagggagcctgcaccctgcctgaaccccacctgaaccctgcctgaaccccacctgaaccttacatgaaccccacctgaaccctaactgaaccccacctggacccacctggactcttcctggccatgacccattccaagcacatcctctgccccagaatcccatgtgcactggtcaccccagtgctgacttggagccaggaaatgtgccttcagcccccacccccaaattccagtctcccagccaagctgcccgcctcaggaggatgaccattcccagccccactgatccccgagaaacattttatgttagggaatacccccacctcttctgggatgtgggaggctcctcatgcagcccagttcctcctgcgggggacctgggatgctggagacatggatgctcacctggctgcctcggccttccagggacagaccccgaggaagccatcctgagtgccttccgcatgtttgaccccagcggcaaaggggtggtgaacaaggatgagtaagtatgggcccagccagatgaggagcaccgtggtggaagcagagagcggggtgaggcccctagtgaggggggctgcctgtgcttcggggccttacactgctctttggggtgcagccaacccttccctgcgccatgggagcctccgtacccaccttccctgtgcagtcactcccccgcagtctcctgctcagaccctcctcaccccccaggttcaagcagcttctcctgacccaggcagacaagttctctccagctgaggtgaggctgcccagccccttcaatactcatccccagcaccttctctgggccttcacccatgacccagagcccagtaccagtgaggcagttgctggaagggtgagccgagggcccttctggaggaggtgccatctctgttgagacctagagggtaaagatgtggagtcagaaaagagggcagggtgcgccaggcagggagactgtgcacagacctggggggaagtggatagggagaggtttcgtacactcggggtgggcctgtgcctgtggctggaggggcgtcctttgccycttggcccacatttgcactgactcctcactctgcccagagtcagccaagagaaaaacattaacccagagtctggggtctagggttgaaaagctaaggcaaaaagcacagatgcagggggcagacagaaaggccacaggactcaggtgaggtctctgccgggctgggccaggagccaggggactgccactcaccagtgtcccctgcaggtggagcagatgttcgccctgacacccatggacctggcggggaacatcgactacaagtcactgtgctacatcatcacccatggagacgagaaagaggaatgaggggcagggccaggcccacgggggggcacctcaataaactctgttgcaaaattggaattgctgtggtgtcttgtctgtgacagatgggttggggaccagccaagggggatcccagggtctcagtgcgcacatcaccatgatcatggccaccatctacctcctgggagctggcccctcgccagctcaccttgattcactcccatgatgccaagtgaagtgtgaactatgatcatgcctagtttacagatgaggacactgaggcccagaaagtgtgagcatcttaccaaggccagccctctagaagaggagatggtgggatttacaccacctccaccaagcccaggaatgagccacaaagtgggcactgcccagctacttggggctgtgcagagaagaggctgcttgctgggcactcagcaaactctgcccaacagcccagcgggtgggcagcagccctgggacccccacacccaaccacacagcctcccctggcccactgctcgcaccccatctcaatacactggcttgg

SEQ ID NO: 70617 - DNA, 2794 bp, Homo sapiens
ggatcctggccctggctctcctgggaatgctctgggactgtgcatgatgggtggggtggggagactctgaggagttggggagaggacccctccctactcacagtgttgcaggccagcaggaaggcggggacccggggcaaggtggcagccaccaagcaggcccaacgtggttcttccaacgtcttttccatgtttgaacaagcccagatacaggagttcaaagaagtgagtgcccactcccagtagcctcagatcccatcctggcccccccaccccaccccacatacataccccccttctaccctgaccttgcctctcacaccacccaggtctctcccccacctcccaccttccctagagctgggggctgctcccacctgaaggcccccatcccacaggccttcagctgtatcgaccagaatcgtgatggcatcatctgcaaggcagacctgagggagacctactcccagctgggtgcgtgcacccacctcccaccctgcgcactggggtccctactctgagctgctgggcgggtgggagtggctggggggacaggactctgctcccctgcttcccctcctccccgtctcctcacactgcccttccccccttgtcacgccttgcttccacttcaccttcccgacccacagctgcctctgcccctccagcccctgtggccaggatggagggagggcggcctgggccttctgggggacacccagggtccctgtgtgcacctcatgccccacccccaccagggaaggtgagtgtcccagaggaggagctggacgccatgctgcaagagggcaagggccccatcaacttcaccgtcttcctcacgctctttggggagaagctcaatggtgagcctgggacagagctgggcacccttggccaggcagggagcctgcaccctgcctgaaccccacctgaaccctgcctgaaccccacctgaaccttacatgaaccccacctgaaccctaactgaaccccacctggacccacctggactcttcctggccatgacccattccaagcacatcctctgccccagaatcccatgtgcactggtcaccccagtgctgacttggagccaggaaatgtgccttcagcccccacccccaaattccagtctcccagccaagctgcccgcctcaggaggatgaccattcccagccccactgatccccgagaaacattttatgttagggaatacccccacctcttctgggatgtgggaggctcctcatgcagcccagttcctcctgcgggggacctgggatgctggagacatggatgctcacctggctgcctcggccttccagggacagaccccgaggaagccatcctgagtgccttccgcatgtttgaccccagcggcaaaggggtggtgaacaaggatgagtaagtatgggcccagccagatgaggagcaccgtggtggaagcagagagcggggtgaggcccctagtgaggggggctgcctgtgcttcggggccttacactgctctttggggtgcagccaacccttccctgcgccatgggagcctccgtacccaccttccctgtgcagtcactcccccgcagtctcctgctcagaccctcctcaccccccaggttcaagcagcttctcctgacccaggcagacaagttctctccagctgaggtgaggctgcccagccccttcaatactcatccccagcaccttctctgggccttcacccatgacccagagcccagtaccagtgaggcagttgctggaagggtgagccgagggcccttctggaggaggtgccatctctgttgagacctagagggtaaagatgtggagtcagaaaagagggcagggtgcgccaggcagggagactgtgcacagacctggggggaagtggatagggagaggtttcgtacactcggggtgggcctgtgcctgtggctggaggggcgtcctttgcctcttggcccacatttgcactgactcctcactctgcccagagtcagccaagagaaaaacattaacccagagtctggggtctagggttraaaagctaaggcaaaaagcacagatgcagggggcagacagaaaggccacaggactcaggtgaggtctctgccgggctgggccaggagccaggggactgccactcaccagtgtcccctgcaggtggagcagatgttcgccctgacacccatggacctggcggggaacatcgactacaagtcactgtgctacatcatcacccatggagacgagaaagaggaatgaggggcagggccaggcccacgggggggcacctcaataaactctgttgcaaaattggaattgctgtggtgtcttgtctgtgacagatgggttggggaccagccaagggggatcccagggtctcagtgcgcacatcaccatgatcatggccaccatctacctcctgggagctggcccctcgccagctcaccttgattcactcccatgatgccaagtgaagtgtgaactatgatcatgcctagtttacagatgaggacactgaggcccagaaagtgtgagcatcttaccaaggccagccctctagaagaggagatggtgggatttacaccacctccaccaagcccaggaatgagccacaaagtgggcactgcccagctacttggggctgtgcagagaagaggctgcttgctgggcactcagcaaactctgcccaacagcccagcgggtgggcagcagccctgggacccccacacccaaccacacagcctcccctggcccactgctcgcaccccatctcaatacactggcttgg

SEQ ID NO: 70618 - DNA, 632 bp, Homo sapiens
ggacccagattttctgtctgcaagtctggggctgtgaccaccaatctcaacctctctaaagactgagcrtagggttcccagttcccagggggaggccctcatccccccacctgccaaaacctcaataggggttccttactatccactcctccactattctgttctgggcacagaaggggcagagaggtgactgagccatccaggcctggaggagcatctggtcatccctgccaactgccatacaaaggaagggacatgggcccaagaccttcccctggtctcctacggggcaagaaaagcttcaaagaaaagggacacttggttgagtattgaagcccaaagaagaggaagtggtctcctttcgagaagtaaggggtttggaattgattggaaggatagggagtcctggggggttcagggatcacacagaggacagaaaagacaggtagggagcttgtggctgcacactcatttcagagtctgggagagggagcagggactggttgtgaggattccccatgggaatcctcccaggaccctaagcaggagctgcaagtgctgttgagaacctgatgagaggtggggagcatgagggaagtttggcagaaacacaggaaagctaccaaatgcag

SEQ ID NO: 70619 - DNA, 660 bp, Homo sapiens
acactgccttagctctaaccctgagattctggtatgttgtatttcggttgtaattagtttcaaaaattttatttctgccttaatttcattatttccaaaatagccatttggaagctgattattccatttttatgtaaatgcatcctttcacatgttttttttgtattgaattattctatacattttctttttaaaattaatgagaaagataagaagaaataaaaatgctgtgctcttaatctaaatgctaaaaattattcagcacttagtaccaactcccagggtgctatgaaaattaaatcacaaaatgtgttattcccagcgcagtgttctgtgacatgctcctgagcacacagtacctgcttartaaacgttttattagtacatgtgtacaggtttcccaggtgcagattcactcagacgttgctgtcttctgttgtccctgtaaacttaaaaaagccaacaaaaatatagcatttcagggtggaaattggttgtttttatttgtagcagaagtattagtattgtgacaaatgtggtgtgtgtaagggactctgctgtgcctgctttctcttgctaatgctaataatgtgtctgggaaagcacaatcagcatttacaggggacttgttgtaaaagcccattcctggacccttttgga

SEQ ID NO: 70620 - DNA, 660 bp, Homo sapiens
acactgccttagctctaaccctgagattctggtatgttgtatttcggttgtaattagtttcaaaaattttatttctgccttaatttcattatttccaaaatagccatttggaagctgattattccatttttatgtaaatgcatcctttcacatgttttttttgtattgaattattctatacattttctttttaaaattaatgagaaagataagaagaaataaaaatgctgtgctcttaatctaaatgctaaaaattattcagcacttagtaccaactcccagggtgctatgaaaattaaatcacaaaatgtgttattcccagcgcagtgttctgtgacatgctcctgagcacacagtacctgcttagtaaacrttttattagtacatgtgtacaggtttcccaggtgcagattcactcagacgttgctgtcttctgttgtccctgtaaacttaaaaaagccaacaaaaatatagcatttcagggtggaaattggttgtttttatttgtagcagaagtattagtattgtgacaaatgtggtgtgtgtaagggactctgctgtgcctgctttctcttgctaatgctaataatgtgtctgggaaagcacaatcagcatttacaggggacttgttgtaaaagcccattcctggacccttttgga

SEQ ID NO: 70621 - DNA, 660 bp, Homo sapiens
acactgccttagctctaaccctgagattctggtatgttgtatttcggttgtaattagtttcaaaaattttatttctgccttaatttcattatttccaaaatagccatttggaagctgattattccatttttatgtaaatgcatcctttcacatgttttttttgtattgaattattctatacattttctttttaaaattaatgagaaagataagaagaaataaaaatgctgtgctcttaatctaaatgctaaaaattattcagcacttagtaccaactcccagggtgctatgaaaattaaatcacaaaatgtgttattcccagcgcagtgttctgtgacatgctcctgagcacacagtacctgcttagtaaacgttttattagtacatgtgtacaggtttcccaggtgcagattcactcagacrttgctgtcttctgttgtccctgtaaacttaaaaaagccaacaaaaatatagcatttcagggtggaaattggttgtttttatttgtagcagaagtattagtattgtgacaaatgtggtgtgtgtaagggactctgctgtgcctgctttctcttgctaatgctaataatgtgtctgggaaagcacaatcagcatttacaggggacttgttgtaaaagcccattcctggacccttttgga

SEQ ID NO: 70622 - DNA, 660 bp, Homo sapiens
acactgccttagctctaaccctgagattctggtatgttgtatttcggttgtaattagtttcaaaaattttatttctgccttaatttcattatttccaaaatagccatttggaagctgattattccatttttatgtaaatgcatcctttcacatgttttttttgtattgaattattctatacattttctttttaaaattaatgagaaagataagaagaaataaaaatgctgtgctcttaatctaaatgctaaaaattattcagcacttagtaccaactcccagggtgctatgaaaattaaatcacaaaatgtgttattcccagcgcagtgttctgtgacatgctcctgagcacacagtacctgcttagtaaacgttttattagtacatgtgtacaggtttcccaggtgcagattcactcagacgttgctgtcttctgttgtccctgtaaacttaaaaaagccaacaaaaatatagcatttcagggtggaaattggttgtttttatttgtagcagaagtattagtattgtgacaaatgtggtgtgtgtaagggactctgctgtgcctgctttctcttgctaatgctaataatgtgtctgsgaaagcacaatcagcatttacaggggacttgttgtaaaagcccattcctggacccttttgga

SEQ ID NO: 70623 - DNA, 660 bp, Homo sapiens
acactgccttagctctaaccctgagattctggtatgttgtatttcggttgtaattagtttcaaaaattttatttctgccttaatttcattatttccaaaatagccatttggaagctgattattccatttttatgtaaatgcatcctttcacatgttttttttgtattgaattattctatacattttctttttaaaattaatgagaaagataagaagaaataaaaatgctgtgctcttaatctaaatgctaaaaattattcagcacttagtaccaactcccagggtgctatgaaaattaaatcacaaaatgtgttattcccagcgcagtgttctgtgacatgctcctgagcacacagtacctgcttagtaaacgttttattagtacatgtgtacaggtttcccaggtgcagattcactcagacgttgctgtcttctgttgtccctgtaaacttaaaaaagccaacaaaaatatagcatttcagggtggaaattggttgtttttatttgtagcagaagtattagtattgtgacaaatgtggtgtgtgtaagggactctgctgtgcctgctttctcttgctaatgctaataatgtgtctgggaaagcacaatcagcatttacaggggacttgytgtaaaagcccattcctggacccttttgga

SEQ ID NO: 70624 - DNA, 1105 bp, Homo sapiens
ttcagtttagcaaaagaacttacagaaacttggtatatatcttatgaaacgctgcagaccctaacctaggtcaggcaataccttttactacaaaattgggataatcattttctaaatcatgaagaaaatgttctgagtaggctgcaaggatttctctggtaacatgatgatttaaaaatgaagctgtccacttgaactgggttgtataaagtatgcttttatttctgagtatagcaagaaagatcataacatacctcttagtgcctyccagcctccgacatgtagcaagtgaaagctgtttgaattggcaaatgaggtagttattgagtagctggttggaatgtttgctactagctacagagcagaattgttacttagttcttagtactggtgcaattacagtaattagaataagtaaacttcttttaagataattgcagggccaggttatatagagcctatttagcttgccttttagtgttagcatgtatatcagtgtgtatgttaaaggatatactaatagattttgaggagatgaaattgtcttatagcaaattccagatcaatatatgtatgggatgccttgaaaatgattggtatctaatgtagtccagaccagcggctcccagttttttggcaccagggactggttttatggaagacaatttttctgccagggtgtgtgtaggtgtgtgtgggggggcaggggatgggtgatggatggtttcaggatgaaactgatcatgaggcattagattcttataaggaggacgcaacctagatccctcacatgcgcagtgcacaatagggtttgcattcctttgagaatctgatgctgctgctaatctgacaggaggcggagctccagcagtaaagctcaccaccactcacctcctactgtgtggcccggttcctaacaggccacggactgggggttggggacgcctgatctggattgttcttcacagattaaatcttcaccagattaagctgatgaaaaagtaaaacaaagaatagcgccctcccttggcaaaacattttggtgtgatatcttttcttcattttacagccagatataaagaaaaaataaacttctacttttaaa

SEQ ID NO: 70625 - DNA, 1105 bp, Homo sapiens
ttcagtttagcaaaagaacttacagaaacttggtatatatcttatgaaacgctgcagaccctaacctaggtcaggcaataccttttactacaaaattgggataatcattttctaaatcatgaagaaaatgttctgagtaggctgcaaggatttctctggtaacatgatgatttaaaaatgaagctgtccacttgaactgggttgtataaagtatgcttttatttctgagtatagcaagaaagatcataacatacctcttagtgccttccagcctccgacatgtagcaagtgaaagctgtttgaattggcaaatgaggtagttattgagtagctggttggaatgtttgctacyagctacagagcagaattgttacttagttcttagtactggtgcaattacagtaattagaataagtaaacttcttttaagataattgcagggccaggttatatagagcctatttagcttgccttttagtgttagcatgtatatcagtgtgtatgttaaaggatatactaatagattttgaggagatgaaattgtcttatagcaaattccagatcaatatatgtatgggatgccttgaaaatgattggtatctaatgtagtccagaccagcggctcccagttttttggcaccagggactggttttatggaagacaatttttctgccagggtgtgtgtaggtgtgtgtgggggggcaggggatgggtgatggatggtttcaggatgaaactgatcatgaggcattagattcttataaggaggacgcaacctagatccctcacatgcgcagtgcacaatagggtttgcattcctttgagaatctgatgctgctgctaatctgacaggaggcggagctccagcagtaaagctcaccaccactcacctcctactgtgtggcccggttcctaacaggccacggactgggggttggggacgcctgatctggattgttcttcacagattaaatcttcaccagattaagctgatgaaaaagtaaaacaaagaatagcgccctcccttggcaaaacattttggtgtgatatcttttcttcattttacagccagatataaagaaaaaataaacttctacttttaaa

SEQ ID NO: 70626 - DNA, 1105 bp, Homo sapiens
ttcagtttagcaaaagaacttacagaaacttggtatatatcttatgaaacgctgcagaccctaacctaggtcaggcaataccttttactacaaaattgggataatcattttctaaatcatgaagaaaatgttctgagtaggctgcaaggatttctctggtaacatgatgatttaaaaatgaagctgtccacttgaactgggttgtataaagtatgcttttatttctgagtatagcaagaaagatcataacatacctcttagtgccttccagcctccgacatgtagcaagtgaaagctgtttgaattggcaaatgaggtagttattgagtagctggttggaatgtttgctactagctacagagcagaattgttacttagttcttagtactggtgcaattacagtaattagaataagtaaacttcttttaagatawttgcagggccaggttatatagagcctatttagcttgccttttagtgttagcatgtatatcagtgtgtatgttaaaggatatactaatagattttgaggagatgaaattgtcttatagcaaattccagatcaatatatgtatgggatgccttgaaaatgattggtatctaatgtagtccagaccagcggctcccagttttttggcaccagggactggttttatggaagacaatttttctgccagggtgtgtgtaggtgtgtgtgggggggcaggggatgggtgatggatggtttcaggatgaaactgatcatgaggcattagattcttataaggaggacgcaacctagatccctcacatgcgcagtgcacaatagggtttgcattcctttgagaatctgatgctgctgctaatctgacaggaggcggagctccagcagtaaagctcaccaccactcacctcctactgtgtggcccggttcctaacaggccacggactgggggttggggacgcctgatctggattgttcttcacagattaaatcttcaccagattaagctgatgaaaaagtaaaacaaagaatagcgccctcccttggcaaaacattttggtgtgatatcttttcttcattttacagccagatataaagaaaaaataaacttctacttttaaa

SEQ ID NO: 70627 - DNA, 1040 bp, Homo sapiens
ctttgaatattcaaaacgtgaatttggtaactgaagtttattttaacagtgtgtccaaaaggaagtaactcattctcatacttatgtcaaaaaattaacttcagattttggaaacaaaattattaccagaaagaagtcctgattcagactccaagagagggtcttggatgttgtgtaagaaagaattcaaggtgtgaccaaagaataaagtgaaagtgagattattaaaaaagtaaaggaataaaagggtggctactccataggcagagcactcctgaggactgctggttggctatttttatgtttttttcttgataatatgctaaacaagggktggagtattcatgagttttccacaagaggcaggcaatttctggagctgagggttcctcccctttttagactgtctaaggtaacttctggacatttgtaaactgtcatggtgatagtgggagtgtcttttaacatgctaacggattgcaattagcatataatgagcaatgagtatgaccagaggtcacttttgttgcctacttggatttggcaggatttggccagcttctttaccacaacctgttttatcagtaggctctttatgacctgtatcttgtgacatcagtgctaccaatctcctgtcttatcctgtgactaagaatgtctaacgtcccaggaaggcaacccaacaggtctcattctcattttttcactctggtttgaatgcctttggcaaaatattgctacatttggtggcaattgtaatacaaaacagtcttcgtattataattaaatattgaataattgaatattccaaaatttaaaattagttttatctgttgatcttggaacttcactattaagtaaataattttatgagagatgaaaatggagagtcattgaattatttcattgatactaagaatgtctagttttcacgagacattaataattcttataagtagcaccactggactagatgtctttagatatttgatggtattctcacaaacttttgatgcgtatctgttgaagcatataatgtc

SEQ ID NO: 70628 - DNA, 584 bp, Homo sapiens
caaagaaagggcaaccagaggacaaaatacttgctggaaacactacagtaaaacctgaaaggaaaacagagctccgtcactttcacttgacctcattccagagtataacctatctcctggtacctgatatgcaggcattaacctggcaaatgcctttttttccattcctgtccataaggcccaccagaagcaatttgccttcagctgtcgaggccagtaatatacctttactgtcctacctcaggggtgtgtaaactctctggctttgtgtcacaatcttgttcacagagatcttgatcacttttgcctttcacaagatattacactggtccatcacattgacgacattatgytgattggatccagtgagcaataagtagcaaacaccctggacttatggtgagacatttgcatatcaagggatgggaaataaatctgactaaaattcagggaacttttacctcagtgaaatttctaggggtccagtggtgtggggcctgtcaagatattccttctaagctgaagggtaagttgctgaatttggcccctcctacaaccaagaaagagccacaatgcctagtggg

SEQ ID NO: 70629 - DNA, 1420 bp, Homo sapiens
tagaaatcatctaatccaattgacttctacagataagcaaatttatactacacattgcttrtagaaagagcagaaaagtatattaggcagtaagtacaaccaaacatttaattgactgaatagtaattgtggttaaaatttgtgtttaagacagaagaaatgtaaatggaaacttttgaaaagactttcttaagagaatttcgggaaattttttaaggattagagccttgtttttctttctcttctatcccctatctttggcaacagtggttaaaactccgcaactctatcttctcttcccactccttcccttttctcccagcatccactgtgcaggacttgtatagttaactgatctgtaacactgttttaggtgtcagccacactggctacggtccactcattcctggccattaataattgtctgttaacaacacaagccagggtggagagtaggttaaagtgctctgctccccatctctggaatgtattcaaaccgtcttccactgcacactgcattcttggccaccctgttcctcacagtcccagctttggctttacccttctccaccctgtttgctgagatgaatgtcaagtctgtgcccactctcccagctcagtctctgggcttctctcttcctctaggtctacactgcagccaaaggacccagcagctggagtaccctccatcatgagggtggatggaggattttgtttgtttccttgacaaaggtgtgtgacttgtcagccaagatgttggctttttcatgaaaggagcaaggaaataggaagagagcatgttaaggaagagagcccttcttgaagcaaatgggcaagaattggaaggaagtggggaaagaggatggagattacagaagatgtgtctgtacttatgacaagtaactaaagtagatataactattttgggagaagtgaaaagccaaagaaaaagtaccaagtacagggctcccctaaaaaaaatggaaagaaaaggcagagggggcaaagaagagatcatcctcacataaactcctctaaaccagcctcttgacgtgggacagatgggagtgttgggatggagtagttgggacagatctgcagggaaaaggggcagagaaacagcagccagtcttctctcttcgcttggattgcaagaggtaagtgtcaggaaaaggaaagaaaagcagaatgggttcaaaaactaccccagcacaccaaatactttactatgctgattcaggtagaatcctgagttgccatatcacccatctagctaaaaaaaaaaaaaaaaaaaaaaaaaaaaaaaaaaaaaaaaaaaaattgaatgtgttaatattgatgagttggcgaattgtcacaacaaattaccacaacaaattactcaacactgccttctaggagcggatactttgaaaggaca

SEQ ID NO: 70630 - DNA, 1420 bp, Homo sapiens
tagaaatcatctaatccaattgacttctacagataagcaaatttatactacacattgcttatagaaagagcagaaaagtatattaggcagtaagtacaaccaaacatttaattgactgaatagtaattgtggttaaaatttgtgtttaagacagaagaaatgtaaatggaaacttttgaaawgactttcttaagagaatttcgggaaattttttaaggattagagccttgtttttctttctcttctatcccctatctttggcaacagtggttaaaactccgcaactctatcttctcttcccactccttcccttttctcccagcatccactgtgcaggacttgtatagttaactgatctgtaacactgttttaggtgtcagccacactggctacggtccactcattcctggccattaataattgtctgttaacaacacaagccagggtggagagtaggttaaagtgctctgctccccatctctggaatgtattcaaaccgtcttccactgcacactgcattcttggccaccctgttcctcacagtcccagctttggctttacccttctccaccctgtttgctgagatgaatgtcaagtctgtgcccactctcccagctcagtctctgggcttctctcttcctctaggtctacactgcagccaaaggacccagcagctggagtaccctccatcatgagggtggatggaggattttgtttgtttccttgacaaaggtgtgtgacttgtcagccaagatgttggctttttcatgaaaggagcaaggaaataggaagagagcatgttaaggaagagagcccttcttgaagcaaatgggcaagaattggaaggaagtggggaaagaggatggagattacagaagatgtgtctgtacttatgacaagtaactaaagtagatataactattttgggagaagtgaaaagccaaagaaaaagtaccaagtacagggctcccctaaaaaaaatggaaagaaaaggcagagggggcaaagaagagatcatcctcacataaactcctctaaaccagcctcttgacgtgggacagatgggagtgttgggatggagtagttgggacagatctgcagggaaaaggggcagagaaacagcagccagtcttctctcttcgcttggattgcaagaggtaagtgtcaggaaaaggaaagaaaagcagaatgggttcaaaaactaccccagcacaccaaatactttactatgctgattcaggtagaatcctgagttgccatatcacccatctagctaaaaaaaaaaaaaaaaaaaaaaaaaaaaaaaaaaaaaaaaaaaaattgaatgtgttaatattgatgagttggcgaattgtcacaacaaattaccacaacaaattactcaacactgccttctaggagcggatactttgaaaggaca

SEQ ID NO: 70631 - DNA, 500 bp, Homo sapiens
aatgaaaaccaaattgtatgtatttatgcacttgtttgcagagggcaacaaaaaccaggaggtcaacaaaaactgcgagctaaaaagtatgtgtcaagcacttaatgtcatctgtcccaaaattgtwtttatccacttgtttgcagagggcaacaaaaaccaggaggtcaacaaaatctgggagctaaaaagtatgtgtcaagcactttaatgtcatctggcctgtataactacatgtcttgagggtctaccatctgacacatggtagaccctcaaggcatagataccccaccacaccaaattctttgaccatgctgattcagatgccatcctgagttgccttatcacccaactagctacaaaaaaaattgaatgtgttaatattgattttatatatatttatagatatagagctggcttgaactgctttaatctgatgtcacaaatagtctcttttccttattaatcattcaagcatgtatctctttatatcttcttaa

SEQ ID NO: 70632 - DNA, 500 bp, Homo sapiens
aatgaaaaccaaattgtatgtatttatgcacttgtttgcagagggcaacaaaaaccaggaggtcaacaaaaactgcgagctaaaaagtatgtgtcaagcacttaatgtcatctgtcccaaaattgtttttatscacttgtttgcagagggcaacaaaaaccaggaggtcaacaaaatctgggagctaaaaagtatgtgtcaagcactttaatgtcatctggcctgtataactacatgtcttgagggtctaccatctgacacatggtagaccctcaaggcatagataccccaccacaccaaattctttgaccatgctgattcagatgccatcctgagttgccttatcacccaactagctacaaaaaaaattgaatgtgttaatattgattttatatatatttatagatatagagctggcttgaactgctttaatctgatgtcacaaatagtctcttttccttattaatcattcaagcatgtatctctttatatcttcttaa

SEQ ID NO: 70633 - DNA, 500 bp, Homo sapiens
aatgaaaaccaaattgtatgtatttatgcacttgtttgcagagggcaacaaaaaccaggaggtcaacaaaaactgcgagctaaaaagtatgtgtcaagcacttaatgtcatctgtcccaaaattgtttttatccacttgtttgcagagggcaacaaaaaccaggaggtcaacaaaatctgggagctaaaaagtatgtgtcaagcactktaatgtcatctggcctgtataactacatgtcttgagggtctaccatctgacacatggtagaccctcaaggcatagataccccaccacaccaaattctttgaccatgctgattcagatgccatcctgagttgccttatcacccaactagctacaaaaaaaattgaatgtgttaatattgattttatatatatttatagatatagagctggcttgaactgctttaatctgatgtcacaaatagtctcttttccttattaatcattcaagcatgtatctctttatatcttcttaa

SEQ ID NO: 70634 - DNA, 1682 bp, Homo sapiens
gtggcacatgcctgtaatcccagctacttgggaggacgaggcaggagaatctcttgaacccgggatgcggaggttgtggtgagccgagattgcgccattgcactctagcctgggcaacaagagtgaaactccatctcaaaaaaaaaaaaaagatattataatcttatgggaccactcctttatatggggttggttgttgatggagacattgttatgcagtgcatgactgtactttgaccctcagttgttaggtaaacacacatttaggattgttatgacttcttggtgaattgacccaattatcgttatgacatgtccttctttagcctactaattttctttgcactgaagtcgatttcggtattaatacagccactccagctctattttgatttgtgtttttgtggcatagtttttccatccttttggctttaactgacttatatttcaattaagtatatcatagatagcatatagttaggtcatgtttttgttttgtttttaatctatttttatgatctcttcttttaattgacatctgtattaatagtttttctccatttgtctatgttaaatggactggcccattttataataattccattgctggatatgtcacctaaaactcagcgttcgccgtcctccttccgtgttttttttcatgtgtcattatctgtatgggaccagcccacaaaattgcttttgcattgattcttatctccatgtttgcaggcattgaaattgatatttagtattcatttaatgcatgcacctaattatacatattttctgcttcaatttcccaataacagacatgacattattttgatagtacagtattaggtgatatgtcttcaaaaatacccagtactaatggttacttaaaaaataacttactatgaaaatcaaaatctaacaaaccaaacccactttatttattttagtttaatttataaaaaagggaattaacagtagttgctgtaacaattaaatgaaaacatttgtccaatatagaacattttatatgcaaatagtattcagtgaagtcccaaaccactctatcctgactcccatmctgaatgtccttaatgagttcagggagggtctgaactgggagtcaagaaacttggattccaggcctacagaccaatcagcactgtaactctggatatttccctccttctctcatccccagttttcccacctgtaaaataatgatgatcagtgataatcagccccagcccaggatccattatctgactttgcaatatagtttaaagtgtaattccagaataaaaaattataatgctgccttttgtaatctgcttcataagcatacccatatacagtcatgccctgcataatgacgtttcagttaatgacagatcacgtatatgacggtgggcccataagattatgatgaagctgccctattcagtgtatcattttttatattgtatttttgctgtaccttttctatatttagatatgtttagatatgcaaatatttatcattgtgttacagttgcctacagtattcactacagtaacatgatgtacaggtttgtagggtaggaacacaaacccataccgtatagcctaggtgtgtaatagactatttcatctaggtttgtgtaagtgcactctgatgtttgcacagcagcaaaattgcctaaagatgc

SEQ ID NO: 70635 - DNA, 1698 bp, Homo sapiens
aggcaccagtaatctctttaatgtggagagatgttccaaccccccatttattacctgtctcattcaaggaaggtcttattgagaggcttctctgaaacaacagtcacaattgataatcccattggcttcctacaggagaggaaaaccattaagtgctacacatttgagagtttcaggtttatagggagattgtcaccaagagatttcacaaacaagtgttttcaggccaagagtcttctgactttcttgcagcatttgacactgccaactgcacatacctctgtcttttgtcctttgtctttttgaaaccatcatgcttcagagtttccttgcacctctgtgcctaattctctgtctcctttcctggtyctctgtctcctccctcgtcataaacagatattctccaggatctctcttaatttcttccaatataacttacttcagggttacatttattcttatatttccaactgtaacctgtaagtacagacttccctaaccatagcagttttcagatcccagacctacattgccagctgcactttggaaacattcatttaatatcctagaactcaatcttccaaaataaaacccttctcctcaagtaaacacattgccacctacaacccttctgagctttctattcttattgataccaccgtcatctgagatgccaacctttgagcatatcccaatctcctcccctattgatcccacctctttcatgtcactgaagccccttaggccagatccccatgacttctcatctcgatgattaaacttttttcctatttggtcttctcctcacagtctcctctcatttaatgcatcctacacactgtcagtgaaaagatcttcctacagcccagcccacccaagatatgacattcatcctcatctcccagcctccagacttgcaccctctaattcattctccaaactgctctcagagtgattaggctacaatgcaaattagagtgtgtttcttatccacttaaaatgctttcagtggccctccttttccctcaggataaaacccaaactgcttagcctgccatcactgccctctccacgacctttgctcagaccattccaagattatgagtgatgaactgaaatgagctaatgtacctaaagaatatgtatttaaatactttcctcctaatgtatgttcaataataatcagttctgacatgaatttttgaaagcagagtccatgcttgtctcagcattcctgggtagctagtacaacatccctggcataagtgatcaggttacttctcccactcagaaactacctttcatccttctcaagaatgtgaaatgaagttcaacttcaagaactgtaggatctgatccaaatctaccttttcagccttcctgtacattatttcctctcacaaaattgaacttcaattatgtggcccctctgtcagtctctcagcacatagtgcatttccatgaacataaatctttcaggaccgtcccctcgaatgtctgctctccccattctccatcagtcaaaacaccaatttgtcaaagtctacaaactttgagaccttctgtgagattttctgtgatcctctgaactaaattttctctttatttctttatttttttatttcagtggcttttggggtacaagcagtttttgaccacatagatgaattaattttatagcagtgaattctgagattt

SEQ ID NO: 70636 - DNA, 1314 bp, Homo sapiens
tattaatgccacatttaccgttattcaacctcaaagttcacaaggcctaaatgttttaaatgtatgtatttttagaccaacaaagaaaattcatccagtgtgactgtatcagaccctgagatggaaaataaggcaggccagactctggagaacagctcattaatggccgagctcctgagcgatgtgccgttcaccctggccccgcatgtgctggcagtacagggcaccatcactgaccttcccgaccacttactctcctatgatggcagcgaaaacttatcacggttttggtatgatttcactcttgaaaattcagtgctctgtgattcataacctttatgtctgtttgcaccttaacagctttaaaatatgttcgcctattttatctaacctgtttgatgttctttgccgtttcactgtttaaggtcctcagcaaggatcataaagcaaagaaaatagcattatgttcactactctatttttaagaaaaaggtacatttgtatacaaattgaacttaagttcyacttcctttctcccatataataaatatacaaattaggctatgaaggttttaggaaaggactcgattccttcagatggtctctcaaaatataacacctcaaatttatcttagaagaactgtgaaaaagaattgtggcatttttcagtcactacagctccgaagtctgagcaagaagtgggtgtgaagtctcctctctggtttgtaggaagttgaattggtgttattcctgcatttttttcttccacagtgtttatgaatgaattcagaaaaaaagttgccagttagcttaatttcttcagatgcattgatgtggaaatttaaaacttgtcctaaacagcagtgctagtttgctgatacaaggatgctagacctgctctgcgtgctctttctggagtggcccatttcggttttctgaaacccatggcagccctttccatcgtgaataatcgttgtgttcccacctttgttctctgcctttttgctacttcagtgtgctctctgaccagctttccaaagaactttccctgcttctgcctcggttgccatttgctctccttaccacatatgttcccagtttatgaagagatccacatttcctttcaacccctctgcctcctgaagaaaaacatctcatgatgatacatattattgctgataacacccttatttagaaatttgttggccacaatagagatggaaatgttttactgctggaaaaactgaaatcaactcatttccaattagagtataggcagaacacctagatatgacttttagttcttgaatatcc

SEQ ID NO: 70637 - DNA, 1314 bp, Homo sapiens
tattaatgccacatttaccgttattcaacctcaaagttcacaaggcctaaatgttttaaatgtatgtatttttagaccaacaaagaaaattcatccagtgtgactgtatcagaccctgagatggaaaataaggcaggccagactctggagaacagctcattaatggccgagctcctgagcgatgtgccgttcaccctggccccgcatgtgctggcagtacagggcaccatcactgaccttcccgaccacttactctcctatgatggcagcgaaaacttatcacggttttggtatgatttcactcttgaaaattcagtgctctgtgattcataacctttatgtctgtttgcaccttaacagctttaaaatatgttcgcctattttatctaacctgtttgatgttctttgccgtttcactgtttaaggtcctcagcaaggatcataaagcaaagaaaatagcattatgttcactactctatttttaagaaaaaggtacatttgtatacaaattgaacttaagttctacttcctttctcccatataataaatatacaaattaggctatgaaggttttaggaaaggactcgattccttcagatggtctctcaaaatataacacctcaaatttatcttagaagaactgtgaaaaagaattgtggcatttttcagtcactacagctccgaagtctgagcaagaagtgggtgtgaagtctcctctctggtttgtaggaagttgaattggtgttattcctgcatttttttcttccacagtgtttatgaatgaattcagaaaaaaagttgccagttagcttaatttcttcagatgcattgatgtggaaatttaaaacttgtcctaaacagcagtgctagtttgctgatacaaggatgctagacctgctctgcgtgctctttctggagtggcccatttcggttttctgaaacccatggcagccctttccatcgtgaataatcgttgtgttcccacctttgttctctgcctttttgctacttcagtgtgctctctgaccagctttccaaagaactttccctgcttctgcctcggttgccatttgctctccttaccacatatgttcccagtttatgaagagatccacatttcctttcaacccctctgcctcctgaagaaaaacatctcatgatgatacatattattgctgataacacccttatttagaaatttgttggccacaatasagatggaaatgttttactgctggaaaaactgaaatcaactcatttccaattagagtataggcagaacacctagatatgacttttagttcttgaatatcc

SEQ ID NO: 70638 - DNA, 2513 bp, Homo sapiens
gggatcctcagagtagtgatgggggtgttgggagggatgaaggtcttgtaatttctgactgtcagttgccctaaaatgaactaatgtagatgctctgagcctcccaatgttgttatactgtgcccttgtgggtagcctgttgcagtagttattctggtgtgaacctggaaattccctctgccactgtcctggatgcaaagttgtaaattctgtgggtgaaacccagtcatgaggagctcttccatatgctctttctaggccagagaggcagtctttagcagatggcagacctttacaaagacatcatatgtatccattccaattcatacaggctttcagctgaatggggactttgcagtgatatctcagcttcagtcagcaaatcttccaccaacgcagtgggcagggcctttgttctgaccctcagggccctctcaggaccacccctctcagtcaccctcttctcccttcccctttcagaaggcccccacctgcagtgtattgtattctaggttcctctccctcaccccaggtccctcctcccctctgcccctgatgtaaactcagacatggcttggggtgagttctccttgagctgatactcttgatgcccttatcttttgggtgtccccaatacttgagaatcatctgtagtgttctccttaaccctattgagacactttttccatggacaaaagcatccattcctatgacattaagcctcacttccattaataaacccaactattcaccaccaggagcagctttggcttgggcagtaagtaccatggagagagccaagtgaaccttgggtccagcaccacagacagttccaagactgtacctacttggcagtctgtgtggcctatttttatctgatatgaacaaagacagatttaggttttatgaagttggaaactcatataatttggggagtcctctttaatacaaactgaaaaatttttaattaaaattaggtataaaaataagggtttttttgaatgagaaaagttgacaactatgataaacattatgaaatccagaaaaacaacatcatctttgtattaattactctctgatgctttttgcctacttgttttggttgcttactctttgataatctctttattagctgataacatttatatcattttctgttcataaaatttgaatataatttagtcacatagttaatcaaaatgtgtgttttattattgaacatttggactcagcaccaatgaaaacagaatcctccaattacagtgttacacatatgatgattggcagatttttttcacagactggcacctggctccatacacatccaactttgtttctgcagcactgtgcacactgccaggcactgtaygacattttaatatgatgatatgatatgatctctggccctctctctgcctttgtacataatgctgagtgaacaacaagagtattcctggaaggacagtataatatcactgtataatgaagcaatgacacacactcatgtgaaacccactgaaccaaactgagtgtctctctaacttaacctccccttcgttggatccccaaagtgttcctggcagttgagtgctacccaacatgtaagaaggtgtggtagaggagatgttagggtggagagatgctgtaggcttatccaatttggggcaaataatttacttttccaaattttccaaaaacataagatcttgtgaacacacttctgagatccaagtgagagagaggggcttggaaagtgctgtatatgacccacatttatctgtcatcacaggaagatatttttcagttttacaagactgaagcccgtaatgcagagaaccagagatttctgaggtccctgctttcaaatgatatcatgtgctctctggagcattcaggtcactctttagatggatggctgttacccctccattcaagaatctcttactggaaactaactatgtggtagaggcatggagggcacagtttggcatcaagaatgaaccagaaacattttgtcttcatagtcaggtggtgaagactagaataaataaaccaggcatggtgtgtgataaggtataattaaggtattaagggatctgtgggttaataaatatttgtaattgctgcttcagcctccgttgccctcggctccctccaataattccctgattttgttttatggaaactgcccacctcatgatcaaacacaaggtttgggtgcctacactcctagcctctggggtgggtccagataaacaagccaggccacatggcccttatcactcattcctctggctgtagtgactggcccagggacagacacacaggccatgtgaggagtctatttctagggtttctgggaaagagggattcctcttttttgtgaggaagcttattggagagacacccgcttgtcccctggaaagcatgacacgagaatgtgaggcttgcaggtgccacagtcatttgcaattatgagggaaacaactggagctgttcagagaacgtggtag

SEQ ID NO: 70639 - DNA, 790 bp, Homo sapiens
agtttgttggctacttctgattgttctgataacttaagttctattcttttttaaaatgggaatttacaagaaatggctcaagttaagtgtcgcttatgtctgcaaatcaatcaaggttgaggtaatttatgagacctgactggttgtgtctgcccagagcttcttgatatctgtttccttttaaatttactttaaaatagccagtctaacaatattacatgtgcttcatgcatttaacttaaaagattgttttctaaagactatctttgtttatggtataatattataaaatactattttattttgaattaaaaacatctgtttttcaggtaatatcaaaagaggataccaacgtggcctttaagaatatacacgttttccatgtaattatttctcattatttgttagggaagtgcattagacactcagtgcagaggctaaaattaaaaaggctgatcataccaagtcttggcaatgatatggagtaatagcactcacattgttgatcagggcatacatatgtgcaatccctttggaaaactgtttggcagtaggtactacgaactagacatatgtccactgatgacctaacgattcctctgctaggtacaaacccaagacaaatgtgtgtgtgtgtgtccaccagcatacacatccaagagcgtcgtagccaataagtacagacaacccagacaygcactgacggaacagtgggcagtggcctgtgctgtggtcacaccttggctccctctgtggcaggagaggacaggtgcacacagaacaacaacac

SEQ ID NO: 70640 - DNA, 735 bp, Homo sapiens
gcagcctgaagttgtcagagctgatatcctaggagcagatttcaatcaatgtcagttasgacttatggataaacaccacaacttatcaagttgtccaccacgtgagacaactctgtgatgtactgcatacaaattgctgagtccccagcaggactgagacccagttgtctgcagtgggaacatcctcatcaccgtatacagtggtaatgtgctcattaatgcaacttgcattggctactatcccttcccgtcccacatttccactttcctactggtgctttctgggatcttcttcctattgaaaagtaaccgtttctgtctttattttcctctacatttctattagctcttgattatgtctcactgtctctgggctttgttgcctattattattcattgatacttactatcagttgtggaaacccaggtgaagctcagaccctgactacacttgagtctcagaattatatctagaactccggcttccttttgtaccctgtattaatgcttccttcctctctttccagtctttgcatgttcattgttttcttccgtatccttataaatgcagtgaagaaaatgtattagtccgtcctcacgctgctttaaagaaatacccgagattgggtaatttataaagaaaagagatttaattggctcacggttccacagcctgtacagggagcatgatgctggcatctccttggcttctggggaggcctcaggaaacttaca

SEQ ID NO: 70641 - DNA, 2214 bp, Homo sapiens
ttaaatggttaagtatttaaattctccccattgggcttacaatcaaacaccacatgtactatcagcccccgggtaaccttaacttgcttttcagaggagagtgaaggctttgtatacttctttgctgataataaggtttacagagcaggtagatggggaccagttgtcactggagaagcaagagaaaagttaagttcagatttctatacgtccatgtgtgatctctctctctctcacacataccatgcaatcagactttctttacgatttcagtacaacagaggccttaagtgggattatttggtctgatagttcaaattttcctagctcaaataaaaaagaataaaatatttctgctttctgtcatttatgatttataattactcctttatgaaatactccattattacaaaaaaaactgggcacagtactttcaagatattggctaacattcaaacaaaaatgagtgttcaagattctataaaggaaaagatggaataattattgggcaaaggatttaaatgaaatttcaagttactaatatcagggtaaaatctgattaacatagccaattagaaaactctgagatgattgtgtgatgcaaaacaactttcttcataaatcttctttctaatggccttcactccaaaattgactagcaatgacctatgtctctgatcccattgtccagttttagttctatctggatccccacaggaatggactgtttagctggaaaggagtgagtcatgtaagatcacacattttaagagcccaaataagctgggataatggtatgcacctgtagttccagtcacttaggaggctgaggcaggaggatcccttgagatcaggaatttgaggtaacagtgagctgtgattgagccattgcactccagcctgggtaaaaaagcaagaccctgtctcaaaaacaaacaaaaaactaaaacaaacaaaacgttaattaaaagcagaggattaataaactctcaagtcttttatgaatcctcaaagcagatataatcttggcagggaatgaaatagaatttaccaccagcccttggagttgaagtcagggcctctctcgtactcagattaaggaggcaaaaggtgacctaatgaaatgttatttggagaatcaacaaaataattaataattcaggttaaccttgaataaatactcaattcaacacccaaatcatccattttaatccatccaagtcccttgttgatatgggcaggttccagaaatatcttaaaatgtttatttttctccaacatccttttaaggatgttgacttgagaaaggaaagtgacatgagaaaagtcaaatgacttgcccaaggtcacacaactgtgagtggcagaccaggactacaccctgtgagtcaactaccaccatcagctccaatgtgttgctcccaagcacaattttcacagcattgacaacacatgatagatttctgcttccagaaggtgttcagcgtacccaaatagaaccaccgaagttacaaagatagcgacaggctccctttaactttctcttccacttatttcagtgtatactgggcagttccatgctgagccactctagaacaacaaaatcagtaatatcaatcttgtttttatttaaaatgttgatattttcctcatcatgaagtttttgcagtaattttaagttttaaaaatatcaktaaaatattatttattctgatcactgagttttggggcaccttcctcatttccccttaaattttgcaccccaggcaattaccttacttgcctcttctagtccctgatgctttacccatgaccaaaaacactgatgcaatttctcccaatcaagtattgtagacaggctgactgtatttgataaattagaggaagggatcattcacttcagttttactattggctcctttctgtggattaagggttgttgttcaggcttacatgctcctagatggaggggtgtcctcccctgcccaggaaggaggaggtaagttaggaacattaattgctctggatttcttgaaataaaggagctgggacctgctgtgggtcacacactagaaaagcaattgtccatctgtattttctctattgctcatccatattatgtttaaagcaagagtccatttggggctctactgtgaagggctgtggagggagagtgactctctagggtgtcatgatgtattatcacaagctgat

SEQ ID NO: 70642 - DNA, 2214 bp, Homo sapiens
ttaaatggttaagtatttaaattctccccattgggcttacaatcaaacaccacatgtactatcagcccccgggtaaccttaacttgcttttcagaggagagtgaaggctttgtatacttctttgctgataataaggtttacagagcaggtagatggggaccagttgtcactggagaagcaagagaaaagttaagttcagatttctatacgtccatgtgtgatctctctctctctcacacataccatgcaatcagactttctttacgatttcagtacaacagaggccttaagtgggattatttggtctgatagttcaaattttcctagctcaaataaaaaagaataaaatatttctgctttctgtcatttatgatttataattactcctttatgaaatactccattattacaaaaaaaactgggcacagtactttcaagatattggctaacattcaaacaaaaatgagtgttcaagattctataaaggaaaagatggaataattattgggcaaaggatttaaatgaaatttcaagttactaatatcagggtaaaatctgattaacatagccaattagaaaactctgagatgattgtgtgatgcaaaacaactttcttcataaatcttctttctaatggccttcactccaaaattgactagcaatgacctatgtctctgatcccattgtccagttttagttctatctggatccccacaggaatggactgtttagctggaaaggagtgagtcatgtaagatcacacattttaagagcccaaataagctgggataatggtatgcacctgtagttccagtcacttaggaggctgaggcaggaggatcccttgagatcaggaatttgaggtaacagtgagctgtgattgagccattgcactccagcctgggtaaaaaagcaagaccctgtctcaaaaacaaacaaaaaactaaaacaaacaaaacgttaattaaaagcagaggattaataaactctcaagtcttttatgaatcctcaaagcagatataatcttggcagggaatgaaatagaatttaccaccagcccttggagttgaagtcagggcctctctcgtactcagattaaggaggcaaaaggtgacctaatgaaatgttatttggagaatcaacaaaataattaataattcaggttaaccttgaataaatactcaattcaacacccaaatcatccattttaatccatccaagtcccttgttgatatgggcaggttccagaaatatcttaaaatgtttatttttctccaacatccttttaaggatgttgacttgagaaaggaaagtgacatgagaaaagtcaaatgacttgcccaaggtcacacaactgtgagtggcagaccaggactacaccctgtgagtcaactaccaccatcagctccaatgtgttgctcccaagcacaattttcacagcattgacaacacatgatagatttctgcttccagaaggtgttcagcgtacccaaatagaaccaccgaagttacaaagatagcgacaggctccctttaactttctcttccacttatttcagtgtatactgggcagttccatgctgagccactctagaacaacaaaatcagtaatatcaatcttgtttttatttaaaatgttgatattttcctcatcatgaagtttttgcagtaattttaagttttaaaaatatcattaaaatattatttattctgatcactgagttttggggcaccttcctcatttccccttaaattttgcaccccaggcaattaccttacttgcctcttctagtccctgatgctttacccatgaccaaaaacactgatgcaatttctcccaatcaagtattgtagacaggctgactgtatttgataaattagaggaagggatcattcacttcagttttactattggctcctttctgtggattaagggttgttgttcaggcttacatgctcctagatggaggggtgtcctcccctgcccaggaaggaggaggtaagttaggaacattaattgctctggatttcttgaaataaaggagctgggacctgctgtgggtcacacactagaaaagcaattgtccatctgtattttctctattgctcatccatattatgtttaaagcaagagtccatttggggctctaytgtgaagggctgtggagggagagtgactctctagggtgtcatgatgtattatcacaagctgat

SEQ ID NO: 70643 - DNA, 998 bp, Homo sapiens
tgaggaaatcctccacacctgttaaaaaacgacagccctacaaccaagagccctacagttccttttgcgtctatgggggaggagcaaaaaggactcattcctaaacccagggcaggcttcagggcgtgtgaccagtggagtcgcacagggcccttcctcaaaagggccctgcactaggttattaagactcgtcaatcactgtcttgaatttcttagtaagttcagcttggaagttatatagaagattcggagtcccagctcacatgcagtccyttctctggcacctccatacccctccgagatgggttctcagtcagcttcctcggcccctgacaacctgaacttgatccagtttccccctcctggctccctgcccagcccctgctgccgccctccaatggggcccactgagtcaagtgcaccgacagagaggcccgcattccgggaggtgcctgcgcagggaggagccaggtcggacgcacccatggtccccaactctccccaacacgtgtctcaaggaaagacatggccttggcggcaccgccgtgggttgggcaaatgactctgctagcggcagcctcttgcctactctgatcctgctaccaagtgcagtctatttaggcgttgccatgaccggggattgaggttgtggactgtgagaaactgggattgaccaccgcccacagagccggtgggaagcggacctcagtagcctgtgctctgcccacatgccccgctgcctgggaaggctaaaagaacgcaacattaagtatcaaattaaaaataccgtgatcagtcgagagagagacagggtagcaagttttatattttattacctttaaggccacttttctcttgtttttttgaaaaaaaggcccccacattttcattttgccctgggccctgcagagtatataccctgccttccctagaccaaggctgtgccaggcaacacgtagaccaaagaggctagaacttgagctcttgagtcagactgc

SEQ ID NO: 70644 - DNA, 998 bp, Homo sapiens
tgaggaaatcctccacacctgttaaaaaacgacagccctacaaccaagagccctacagttccttttgcgtctatgggggaggagcaaaaaggactcattcctaaacccagggcaggcttcagggcgtgtgaccagtggagtcgcacagggcccttcctcaaaagggccctgcactaggttattaagactcgtcaatcactgtcttgaatttcttagtaagttcagcttggaagttatatagaagattcggagtcccagctcacatgcagtcccktctctggcacctccatacccctccgagatgggttctcagtcagcttcctcggcccctgacaacctgaacttgatccagtttccccctcctggctccctgcccagcccctgctgccgccctccaatggggcccactgagtcaagtgcaccgacagagaggcccgcattccgggaggtgcctgcgcagggaggagccaggtcggacgcacccatggtccccaactctccccaacacgtgtctcaaggaaagacatggccttggcggcaccgccgtgggttgggcaaatgactctgctagcggcagcctcttgcctactctgatcctgctaccaagtgcagtctatttaggcgttgccatgaccggggattgaggttgtggactgtgagaaactgggattgaccaccgcccacagagccggtgggaagcggacctcagtagcctgtgctctgcccacatgccccgctgcctgggaaggctaaaagaacgcaacattaagtatcaaattaaaaataccgtgatcagtcgagagagagacagggtagcaagttttatattttattacctttaaggccacttttctcttgtttttttgaaaaaaaggcccccacattttcattttgccctgggccctgcagagtatataccctgccttccctagaccaaggctgtgccaggcaacacgtagaccaaagaggctagaacttgagctcttgagtcagactgc

SEQ ID NO: 70645 - DNA, 998 bp, Homo sapiens
tgaggaaatcctccacacctgttaaaaaacgacagccctacaaccaagagccctacagttccttttgcgtctatgggggaggagcaaaaaggactcattcctaaacccagggcaggcttcagggcgtgtgaccagtggagtcgcacagggcccttcctcaaaagggccctgcactaggttattaagactcgtcaatcactgtcttgaatttcttagtaagttcagcttggaagttatatagaagattcggagtcccagctcacatgcagtccctyctctggcacctccatacccctccgagatgggttctcagtcagcttcctcggcccctgacaacctgaacttgatccagtttccccctcctggctccctgcccagcccctgctgccgccctccaatggggcccactgagtcaagtgcaccgacagagaggcccgcattccgggaggtgcctgcgcagggaggagccaggtcggacgcacccatggtccccaactctccccaacacgtgtctcaaggaaagacatggccttggcggcaccgccgtgggttgggcaaatgactctgctagcggcagcctcttgcctactctgatcctgctaccaagtgcagtctatttaggcgttgccatgaccggggattgaggttgtggactgtgagaaactgggattgaccaccgcccacagagccggtgggaagcggacctcagtagcctgtgctctgcccacatgccccgctgcctgggaaggctaaaagaacgcaacattaagtatcaaattaaaaataccgtgatcagtcgagagagagacagggtagcaagttttatattttattacctttaaggccacttttctcttgtttttttgaaaaaaaggcccccacattttcattttgccctgggccctgcagagtatataccctgccttccctagaccaaggctgtgccaggcaacacgtagaccaaagaggctagaacttgagctcttgagtcagactgc

SEQ ID NO: 70646 - DNA, 998 bp, Homo sapiens
tgaggaaatcctccacacctgttaaaaaacgacagccctacaaccaagagccctacagttccttttgcgtctatgggggaggagcaaaaaggactcattcctaaacccagggcaggcttcagggcgtgtgaccagtggagtcgcacagggcccttcctcaaaagggccctgcactaggttattaagactcgtcaatcactgtcttgaatttcttagtaagttcagcttggaagttatatagaagattcggagtcccagctcacatgcagtcccttctctggcacctccatacccctccgagatgggttctcagtcagcttcctcggcccctgacaacctgaacttgatscagtttccccctcctggctccctgcccagcccctgctgccgccctccaatggggcccactgagtcaagtgcaccgacagagaggcccgcattccgggaggtgcctgcgcagggaggagccaggtcggacgcacccatggtccccaactctccccaacacgtgtctcaaggaaagacatggccttggcggcaccgccgtgggttgggcaaatgactctgctagcggcagcctcttgcctactctgatcctgctaccaagtgcagtctatttaggcgttgccatgaccggggattgaggttgtggactgtgagaaactgggattgaccaccgcccacagagccggtgggaagcggacctcagtagcctgtgctctgcccacatgccccgctgcctgggaaggctaaaagaacgcaacattaagtatcaaattaaaaataccgtgatcagtcgagagagagacagggtagcaagttttatattttattacctttaaggccacttttctcttgtttttttgaaaaaaaggcccccacattttcattttgccctgggccctgcagagtatataccctgccttccctagaccaaggctgtgccaggcaacacgtagaccaaagaggctagaacttgagctcttgagtcagactgc

SEQ ID NO: 70647 - DNA, 529 bp, Homo sapiens
taatattaaaaaatcaacatgtcagagtcaaaacctctttgaattttagagcaaatcacatatttaatgctttttttaaaagcrtaaagtcaaaagaactagtttccactttttcatggtgacatcgcgatcaaccagaaaagttcttttgtaaatagcagctttacacatctgagtttttaaccaaaactcctcagggctttcacagtatttccccaggtattcctggaagaatacaaagtgggtttagatgacaggattaactatattattattttaatagttgaatacttattttaacatacaatgaaaaatacgactagtctaccagattcattaatttgcagatattattgtttataaaatattaagtaataatagtaatatggtcatgtcaaaaatctgctattcaagacctctggcttgtcagatctttaatgcctctaaggagatcagatgctacctaaagcaagggctgctgggggtcatttcatctcatgccaaaatgcagaccagtgaaaacactgat

SEQ ID NO: 70648 - DNA, 544 bp, Homo sapiens
agacacctctccccacgtggttaagagtcctatcagatagggagactcacagactaatattgaccactttctatgccactagcatggcaggcaatggcaatccctcaaagaccacaggagrgagggagaatgagaaaccctttaaactacagaggcttcagcttccatggagcagcacacaaagcctcacttcatctcctaaccccttaatttgctcataattccaacccagatcttcctgttcatcccatccctacctaggtattgttaatctgggcttggcatgtctccacaacacatgaggagtgttacaaaagttatagctcttcaggtggaaacaagcacaaacctaccaagcctctgtaggagttttcatggaaggctgctgtggcctccaagacaatgcccaggtgacaccccttaggtgaatgtctcatacctgaaatttaagtggtcaacctgaggcaggaatgatccttttccatggtatcaatttgccatgcttcctataggtgatattttaggccagcaacttgaattcaaa

SEQ ID NO: 70649 - DNA, 756 bp, Homo sapiens
tccagctaattgggaggtagagaaatcaacgttattcacttatgaatcayggggacccatgtgctctcttaagttttggaaatacagacttctcttagcagcccctcccatcctcaggctgcctcctgctgtaggtccattcctgaatcagcctgtccagggcagatgtatgtgaagagcactcaagggggtgttcaatcccactacattagtgagagaccacttaagtctcctgtgtggagatacagataagtaacttgtcactaggaccatcttttccttgtgggagtggttaacctttccacgaagtttccttccagagtcccaagtggcaatgagaaataagggaacccccaaggggttgttcaattccactacagctctctttagtgcatgaaattttctgtgggttgtaggtatattgagtgaaacaggtttgtttcattgaagaattttcttcctagactataccctttaacccttgtacctgctgaaaaactgtagatatcaactcaatgtgttgaaacactttaaatggaaagcaagtatgaccttcagcgctcaggttgggacctgaaatcactaccagctactaaaggacatccaactaggaaggaaaccacacacttagactttgtggggagaaacaggaccttcatcactactttcatgtaagattcttgtcctcaaaggcagaaattcatctcagtcttctgcaaagagatcattctttcatcattgatgtcatattcatgc

SEQ ID NO: 70650 - DNA, 2357 bp, Homo sapiens
tttgggaggctgaggtgggcggatcacctaaagtcaggagttcaagaccagcctggccaacatggtgaaaccctggtggtgggtgcctatagtcccagctacttgggaggctgaggcagaagaatggcatgagcccgggaggcagagcttacagtgagccgagatcaagccactgtaccccagcctgggcgacagagcaagactctcttaaatgacgagttaatgggtgcagcacgccagcatggcacatgtatacatatgtaactaacctgcacattgtgcacatgtaccctaaaacttaaagtataataataataaaataaaattwaaaaaaatagctggtcatggtggcatgcacctgcactcccagctacttgggaggctgaggcacaagaattgtttgaacccaggaggtggaggttgcagacagccgatattgtgcaaaggcactccagcctgggtggcagagcaagactgtctcaaacaaaaaataagcaaaaaccaaaaaacaaacctgttttgggcagtaagacctacattattctgcggatgtagattcctgcctctgtgtaggaactggggatgtgctccttgctctcctacttcctgctgaaaggtcccaaaggcccattcctttgccagctttaaactaagaaataggactcttgtctgctactgaaaaacagatttcagagaccaagatggggcaggacccaacttccagttagttttccctgtgggactttcttaccctatagcaggagatgacttagtttcaccctcaatgtgccagaacatcaagatcaacagtcaccagaaataggatccaagaataagtgaggttgtgaggaagatgaaaatccagggtgaacctagttgaacctgccccaattgttgcaggaccaatgaggtgccagcaggtatccatgtagaaaatcaagtcagaacaactttatgttgaagtccccaatgggaggctatcatcaagtctgggccattttatcatcaactgagcccaacctgacacaaacaggctcactgctctttcctaaggaaggaagatatggaatacctactacagaccaggaagaagatacaagttcaaaaatcagtccctatggagatgagcagcttgctatcctcctctgcatagctgtccaggttccatcggcctcacctctggagcaggaagtactcaccacagagcaccctggactcagacttatccccaaggaccaacacacctcagtgggtcccctggctgcatccttgccagcatcactggcagagtaaccaagatgcctgagtcctcagaatccccagcctgggagctccctaggttcacagagctgtttctcagcatcaaggatgagtggacctgcatcttcttgcagctctgctgcccaacaatgcttctttcagggtcagccactcagacaatacactaattccttctaaggggcagccttcttgctgcttgcttactgtagccaaccttcaggggggctgtgacccagcagcagcaggaaaggatctctgagaaaaagccagatcagagagaatacctgcaagacatgaccaacagctgcctcccccacctacaatacggtgatacagagctggctgtcagtttggggacagggtcgggtcaccacagcagtgcaatcatgtgggactgtaaaggttccagagatcaacgcctttccaccagagtcgtcctgggtgcccagagaaggcacagcattgtccacaatgaccatcatcccatttgtcccctgtctgtaacaacttttattggtgccaatggcatccagagaaactacagggaacatccaaccccaagcttctagtgttcagatggcttgacgaaaatttcaggagcagtacctgaatcctaacagcttcggagaaaacacagatgtatgtcaaaaccttcaaccttggtcaatgtcccctcagcctgttacactggaaggagggccttgagtgaactgtccaggtccttggcgtttttaacacaacacagaagcaaagtaacaaaggaatgaaacacaaacgatgcagcaaaagccaatatcaaagtgagaaagcatccatggggtgggagtgggcctcagcaagtggcacaagagccgggttacaaagttctctgggttttaagttctccttttgaggtccccatctgttaccccttatctggataaaggatttggtccatggctaattaaggactgaggtgaactggcaccctctgcagataaacagatggtccctgcataacctgcatccaagccagtacacacacttcctttcctctgccacgtggtggacaggggaagatagagggagaatagcct

SEQ ID NO: 70651 - DNA, 2357 bp, Homo sapiens
tttgggaggctgaggtgggcggatcacctaaagtcaggagttcaagaccagcctggccaacatggtgaaaccctggtggtgggtgcctatagtcccagctacttgggaggctgaggcagaagaatggcatgagcccgggaggcagagcttacagtgagccgagatcaagccactgtaccccagcctgggcgacagagcaagactctcttaaatgacgagttaatgggtgcagcacgccagcatggcacatgtatacatatgtaactaacctgcacattgtgcacatgtaccctaaaacttaaagtataataataataaaataaaattaaaaaaaatagctggtcatggtggcatgcacctgcactcccagctacttgggaggctgaggcacaagaattgtttgaacccaggaggtggaggttgcagacagccgatattgtgcaaaggcactccagcctgggtggcagagcaagactgtctcaaacaaaaaataagcaaaaaccaaaaaacaaacctgttttgggcagtaagacctacwttattctgcggatgtagattcctgcctctgtgtaggaactggggatgtgctccttgctctcctacttcctgctgaaaggtcccaaaggcccattcctttgccagctttaaactaagaaataggactcttgtctgctactgaaaaacagatttcagagaccaagatggggcaggacccaacttccagttagttttccctgtgggactttcttaccctatagcaggagatgacttagtttcaccctcaatgtgccagaacatcaagatcaacagtcaccagaaataggatccaagaataagtgaggttgtgaggaagatgaaaatccagggtgaacctagttgaacctgccccaattgttgcaggaccaatgaggtgccagcaggtatccatgtagaaaatcaagtcagaacaactttatgttgaagtccccaatgggaggctatcatcaagtctgggccattttatcatcaactgagcccaacctgacacaaacaggctcactgctctttcctaaggaaggaagatatggaatacctactacagaccaggaagaagatacaagttcaaaaatcagtccctatggagatgagcagcttgctatcctcctctgcatagctgtccaggttccatcggcctcacctctggagcaggaagtactcaccacagagcaccctggactcagacttatccccaaggaccaacacacctcagtgggtcccctggctgcatccttgccagcatcactggcagagtaaccaagatgcctgagtcctcagaatccccagcctgggagctccctaggttcacagagctgtttctcagcatcaaggatgagtggacctgcatcttcttgcagctctgctgcccaacaatgcttctttcagggtcagccactcagacaatacactaattccttctaaggggcagccttcttgctgcttgcttactgtagccaaccttcaggggggctgtgacccagcagcagcaggaaaggatctctgagaaaaagccagatcagagagaatacctgcaagacatgaccaacagctgcctcccccacctacaatacggtgatacagagctggctgtcagtttggggacagggtcgggtcaccacagcagtgcaatcatgtgggactgtaaaggttccagagatcaacgcctttccaccagagtcgtcctgggtgcccagagaaggcacagcattgtccacaatgaccatcatcccatttgtcccctgtctgtaacaacttttattggtgccaatggcatccagagaaactacagggaacatccaaccccaagcttctagtgttcagatggcttgacgaaaatttcaggagcagtacctgaatcctaacagcttcggagaaaacacagatgtatgtcaaaaccttcaaccttggtcaatgtcccctcagcctgttacactggaaggagggccttgagtgaactgtccaggtccttggcgtttttaacacaacacagaagcaaagtaacaaaggaatgaaacacaaacgatgcagcaaaagccaatatcaaagtgagaaagcatccatggggtgggagtgggcctcagcaagtggcacaagagccgggttacaaagttctctgggttttaagttctccttttgaggtccccatctgttaccccttatctggataaaggatttggtccatggctaattaaggactgaggtgaactggcaccctctgcagataaacagatggtccctgcataacctgcatccaagccagtacacacacttcctttcctctgccacgtggtggacaggggaagatagagggagaatagcct

SEQ ID NO: 70652 - DNA, 2357 bp, Homo sapiens
tttgggaggctgaggtgggcggatcacctaaagtcaggagttcaagaccagcctggccaacatggtgaaaccctggtggtgggtgcctatagtcccagctacttgggaggctgaggcagaagaatggcatgagcccgggaggcagagcttacagtgagccgagatcaagccactgtaccccagcctgggcgacagagcaagactctcttaaatgacgagttaatgggtgcagcacgccagcatggcacatgtatacatatgtaactaacctgcacattgtgcacatgtaccctaaaacttaaagtataataataataaaataaaattaaaaaaaatagctggtcatggtggcatgcacctgcactcccagctacttgggaggctgaggcacaagaattgtttgaacccaggaggtggaggttgcagacagccgatattgtgcaaaggcactccagcctgggtggcagagcaagactgtctcaaacaaaaaataagcaaaaaccaaaaaacaaacctgttttgggcagtaagacctacattattctgcggatgtagattcctgcctctgtgtaggaactggggatgtgctccttgctctcctacttcctgctgaaaggtcccaaaggcccattcctttgccagctttaaactaagaaataggactcttgtctgctactgaaaaacagatttcagagaccaagatggggcaggacccaacttccagttagttttccctgtgggactttcttaccctatagcaggagatgacttagtttcaccctcaatgtgccagaacatcaagatcaacagtcaccagaaataggatccaagaataagtgaggttgtgaggaagatgaaaatccagggtgaacctagttgaacctgccccaattgttgcaggaccaatgaggtgccagcaggtatccatgtagaaaatcaagtcagaacaactttatgttgaagtccccaatgggaggctatcatcaagtctgggccattttatcatcaactgagcccaacctgacacaaacaggctcactgctctttcctaaggaaggaagatatggaatacctactacagaccaggaagaagatacaagttcaaaaatcagtccctatggagatgagcagcytgctatcctcctctgcatagctgtccaggttccatcggcctcacctctggagcaggaagtactcaccacagagcaccctggactcagacttatccccaaggaccaacacacctcagtgggtcccctggctgcatccttgccagcatcactggcagagtaaccaagatgcctgagtcctcagaatccccagcctgggagctccctaggttcacagagctgtttctcagcatcaaggatgagtggacctgcatcttcttgcagctctgctgcccaacaatgcttctttcagggtcagccactcagacaatacactaattccttctaaggggcagccttcttgctgcttgcttactgtagccaaccttcaggggggctgtgacccagcagcagcaggaaaggatctctgagaaaaagccagatcagagagaatacctgcaagacatgaccaacagctgcctcccccacctacaatacggtgatacagagctggctgtcagtttggggacagggtcgggtcaccacagcagtgcaatcatgtgggactgtaaaggttccagagatcaacgcctttccaccagagtcgtcctgggtgcccagagaaggcacagcattgtccacaatgaccatcatcccatttgtcccctgtctgtaacaacttttattggtgccaatggcatccagagaaactacagggaacatccaaccccaagcttctagtgttcagatggcttgacgaaaatttcaggagcagtacctgaatcctaacagcttcggagaaaacacagatgtatgtcaaaaccttcaaccttggtcaatgtcccctcagcctgttacactggaaggagggccttgagtgaactgtccaggtccttggcgtttttaacacaacacagaagcaaagtaacaaaggaatgaaacacaaacgatgcagcaaaagccaatatcaaagtgagaaagcatccatggggtgggagtgggcctcagcaagtggcacaagagccgggttacaaagttctctgggttttaagttctccttttgaggtccccatctgttaccccttatctggataaaggatttggtccatggctaattaaggactgaggtgaactggcaccctctgcagataaacagatggtccctgcataacctgcatccaagccagtacacacacttcctttcctctgccacgtggtggacaggggaagatagagggagaatagcct

SEQ ID NO: 70653 - DNA, 2357 bp, Homo sapiens
tttgggaggctgaggtgggcggatcacctaaagtcaggagttcaagaccagcctggccaacatggtgaaaccctggtggtgggtgcctatagtcccagctacttgggaggctgaggcagaagaatggcatgagcccgggaggcagagcttacagtgagccgagatcaagccactgtaccccagcctgggcgacagagcaagactctcttaaatgacgagttaatgggtgcagcacgccagcatggcacatgtatacatatgtaactaacctgcacattgtgcacatgtaccctaaaacttaaagtataataataataaaataaaattaaaaaaaatagctggtcatggtggcatgcacctgcactcccagctacttgggaggctgaggcacaagaattgtttgaacccaggaggtggaggttgcagacagccgatattgtgcaaaggcactccagcctgggtggcagagcaagactgtctcaaacaaaaaataagcaaaaaccaaaaaacaaacctgttttgggcagtaagacctacattattctgcggatgtagattcctgcctctgtgtaggaactggggatgtgctccttgctctcctacttcctgctgaaaggtcccaaaggcccattcctttgccagctttaaactaagaaataggactcttgtctgctactgaaaaacagatttcagagaccaagatggggcaggacccaacttccagttagttttccctgtgggactttcttaccctatagcaggagatgacttagtttcaccctcaatgtgccagaacatcaagatcaacagtcaccagaaataggatccaagaataagtgaggttgtgaggaagatgaaaatccagggtgaacctagttgaacctgccccaattgttgcaggaccaatgaggtgccagcaggtatccatgtagaaaatcaagtcagaacaactttatgttgaagtccccaatgggaggctatcatcaagtctgggccattttatcatcaactgagcccaacctgacacaaacaggctcactgctctttcctaaggaaggaagatatggaatacctactacagaccaggaagaagatacaagttcaaaaatcagtccctatggagatgagcagcttgctatcctcctctgcatagctgtccaggttccatcggcctcacctctggagcaggaagtactcaccacagagcaccctggactcagacttatccccaaggaccaacacacctcagtgggtcccctggctgcatccttgccagcatcactggcagagtaaccaagatgcctgagtcctcagaatccccagcctgggagctccctaggttcacagagctgtttctcagcatcaaggatgagtggacctgcatcttcttgcagctctgctgcccaacaatgcttctttcagggtcagccactcagacaatacactaattccttctaaggggcagccttcttgctgcttgcttactgtagccaaccttcaggggggctgtgacccagcagcagcaggaaaggatctctgagaaaaagccagatcagagagaatacctgcaagacatgaccaacagctgcctcccccacctacaatacggtgatacagagctggctgtcagtttggggacagggtcgggtcaccacagcagtgcaatcatgtgggactgtaaaggttccagagatcaacgcctttccaccagagtcgtcctgggtgcccagagaaggcacagcattgtccacaatgaccatcatcccatttgtcccctgtctgtaacaacttttattggtgccaatggcatccagagaaactacagggaacatccaaccccaagcttctagtgttcagatggcttgacgaaaatttcaggagcagtacctgaatcctaacagcttcggagaaaacacagatgtatgtcaaaaccttcaaccttggtcaatgtcccctcagcctgttacactggaaggagggccttgagtgaactgtccaggtccttggcgtttttaacacaacacagaagcaaagtaacaaaggaatgaaacacaaacgatgcagcaaaagccaatatcaaagtgagaaagcrtccatggggtgggagtgggcctcagcaagtggcacaagagccgggttacaaagttctctgggttttaagttctccttttgaggtccccatctgttaccccttatctggataaaggatttggtccatggctaattaaggactgaggtgaactggcaccctctgcagataaacagatggtccctgcataacctgcatccaagccagtacacacacttcctttcctctgccacgtggtggacaggggaagatagagggagaatagcct

SEQ ID NO: 70654 - DNA, 1097 bp, Homo sapiens
ttgtaggtccttgaccagagctggcaaattctacaagcgttctttccagagtgaggccagtttttttctttcttcttctttttttttgggacagagtttcactctgttgttcaggttggagttcagtggcgcaatctcagctcactgcaacctccgtctcgggttcaagtaattctcgtgcctcagcctcctgaggttgctaaattggagatactaaggaccaacagtactcgtgttcatcttgcctgagagggatgttacagggcagtcaacagagccaagagctggggattacaggcatgcgccaccaaacctgcttaatttttgtatctttagtagagatggggttttgctgtgctagccaggctggtctcgaactcctggcctcaagtgatctgcccgccttggccccccaaagtgatgggtggcctaagccactatgcccggcccattgtctttcaaagctccatcactatgtatttccgggccagcaaaatcttctaaattcaagatcctttgcagcctgctgattggtggcttgaaatctgagggttagtggactctggtctacatgggaaaagtacaaagggcaagagaaagcaagcaggagtccaggtcactgagagagcagctgaccctgcctcctatctccaaatgggcagcggggcctgtgggaggtaaagcccctatctcccactattcctgcaatctattcttctggttcctttgggtaacgccttctttttccaggtggcctgtgaagctgtcaatcatgatgctcgtatatactcatctcccccactctcaccccaggaacagacacgtaagccaggatgacacagccaaacaaactactccttttcacagtccacagtgattcatggagggagggcacacaaccaaatcaaggccaaacaggatcatcctggagaccactaagtagataattgagagagaatttctctcttcactgaggttgctaaattggagatactaaggaccaacagtactcgtggtcatcttgcctgagagggatgttayagggcagtcaacagagccaagagctggggagggaaccaggccctggtaacgtgtgt

SEQ ID NO: 70655 - DNA, 2126 bp, Homo sapiens
cttcagaaacctggcaagaatacaggacagggaaaagtcttaagagaaagcagatctcagtttgcatcatggctctactgtgtataagcaggtgactttaacaaggttatttaccctcttcaagcctcagtttacacatcaattataactgggaattgtttcctgcctcatgattgtcgcagtttaatgagttgactctgaaacaagcccattattaagcagatcatcaataaatatgatccttccccttgcaaagagttagtgtttttataactagagtttaccttgcccctcaatttggagtggcatgattttgcagcatgtgtgcacatagctatggctctaccatagaaattgtgacctacccattactggaaataaatcaagaaaaggagctatgccagccttcttctgactaagcttgctggaaggaagkctcctggcttttccctctgagactttggagcaaggaactctgcactgtcctaaaaccccatcccaaagaatacacaagtaagacacagtcctaggtatcaggaaacacccaagggaatacagacatgtaaacaaaatgtaaagttgagtactagatgagagaatagaattatggacaaggtctagaagtagcactgaggagggaatgattatttctttaggtggacatcagagaacacctccctaggtgctggtatcttgagctgtgttttgaagtacatatgagtttactgtgttgggggaggggagtaggaggagatgcacattctagctagagacagcagcgtgtgcagagttgtagaggtatgaatatctgcatggatctgggcaaccacatagcccttgttactggtggagtataaagagtgaggagggtagagtgtggggtcaggctgacagctcagacacgagctagtccttctctttcagattatgcagtggaccctcagagtcactggaaggtattaagcaagggggcagcatgctcagactcgggttaagtaaattcattttggtggatgcattgaaataaatgaggcgcaagaatctgggagagcaattaagaggcaagagaatagtagaggtctgaaatctggggagaaaactggatagatttggaaaagtaggaggtagacttgaaattcggggaatgcctggtctctttttggtcaggagtggggggtggtgttgagtggaggggagaaaatgaaagcatcctaggtttgagcaatctggtagattgagatgtccacaattaagagcaacacaaaagtaagaataggttttaggaataggttgttcgtttggttttggaatatccatgagaatgttcaagctcagcagaggagcctacgcaagtattcaggtcagggagccatcagcatagaggcagtaattaaaactgttacagtgcctagaggacaggtttacaaggagtaagcaccctggaagacaccaacctgcatggagcgggctgagtgttcatatatgggcagagaagatacggtcagagcagtaagacagtcatgagatagcattcttctggaagccaagggagtgaagaattcccaggcaccagcagtgtcagagtttacataaaacatcaagtatataaaaactgtaaagggcttttatgctgtttatcaactagtaagtcacaggtaacctctcggtacagtttcatcagagttgagttgattaaaggtagattacaggtgactgggaagtaaaagtgggaagtaagaaacagacttagtaagtacagattgcacttccctgatatctaacagagaatggaaaagtagtgcagaaagtaaaagccaaagggtgaaggtaacattccgaggatgtcagcatcttgtgcgcttttagaactgtaattcttattcaagaatcaagaaggtatggatagctgaaaaggctattcagtacacctattgttttcataatataaattttagaatgtaaaactcaacaaaatattggcaaatgaggttataaaaaaagatagagtgagagattatcctggggaacatgaggtttgaaatattgagaagcactcgtctgaattctgaagagaaggaatcaggaaaggctgcacagggataatgaatggagcagtgacctagaag

SEQ ID NO: 70656 - DNA, 524 bp, Homo sapiens
aggttttctgtgcagttttgtggtaaatatatgataccagttatgcctgtacttttgccaggtatcaaaaccttttgctcctagctactctgtgggcatcacagggaagtggagattctggctggctggccatgcttttctgagtrtgatttctaattaattactccgatgatgaccctaaagcctactcactgtggttttttgtatttattgataaaggcccttggagtgctcttacttcttagtatttgtgctactatttctccactagtctgaccccatctgctttctgcctttcagggtttgcaaactttctgatgtgctgctaacacacattcttgttttctagcatcattagggctttgttcgttttttgttctgttttgttttgttttgagacacagtctcactctgttgcccaggctggagtgcaggggtgtgatctcagctcactgcaacctctgcctcccaggttcaagcgattctcttgctgagttcagcctcccaagtagctgggattacag

SEQ ID NO: 70657 - DNA, 590 bp, Homo sapiens
tgaagatatatcactgtgcaaaaatacagttccttagttccttctcagggtctatttgctctttatggcttgatatctcttctctcatgctcagaaactctattattactgttattatttatttatttatttatttatttatttgagatagagtcttgctctgttgcacaggccggagtgcaatggcgtgatcttggctcactgcaacctccacctcctgggttcaagtaattctcctgcctcagcctcctgaatagctgggactacaggcacgtgccaccatgccctgctaatttttgtacttttagcagagacagggtttcaccatgttggccaggctggtctcgaactcctaacctcgtgatccacctgcctcagactcccaaagtgctgggattacagacctgagccaccgtgcccagccttattactgttattattaattattgttaccctggctatccctggtatcctttgccatttttacttgctgggaacagggaaaagaggaasctgggcttattaaagactgagtcaaggcccaaggcttatcctggagcaaaatgcaaaatttagtgcccgcggatttt

SEQ ID NO: 70658 - DNA, 376 bp, Homo sapiens
tgggaagctgaggcaggagaatcgcttggacctgggaggcggaggtkgcagtgagctgagatcacgccactacactccagcctgggaaatagaggagtgagactccatcttaaaaaaaaaaaaaaaaaaagagaggaggggagggaaagagggagggaaggaaagaggaagggagaggaagagggagaaagggtgggagagagaggaaaacagagtgagagggagggagagaggaagggaaggggaatgagtgtgagcgagggagggatggaggaaggaaggaagggagggagggagggagggatgagggaaggaagaggaaaggagagacacccactttagacaacatgatccgtaagcactgacatttatgact

SEQ ID NO: 70659 - DNA, 1089 bp, Homo sapiens
tgtaaaaacgtttgctgctgagttgtgaccttacaatcttaactcatttcccacttactatactttgcagaaccaacctctgctactcgctttgttcctgattgaacctggttccatgtgtgctcagtgtatactatgcacagggcactgtgctgtgtgccctggtcccggtgagcatcattctcaggggagaaccttgctgaaaacaaaatcacatcccaaaaagttaaaatcatgctactggccgggcgcggtggctcacgcctgtaatcgcagcactttgggaggccgaggcgggtggagcacgaggtcagacgttcgagaccagcctggctaacgtggtgaaaccccgtctctactaaatatgcaaaaaatgcaaaaaattagccgggcgkgggggcgggcgcctgtaatccgaactacttgggaggctgaggcaggagaatccttgaaacctgggaggcagaggttgcagtgagccgagattgcaccactgcagtccagccccggcgacagtgcaagactccgtctcaaaaaaacaaaacaaaacaaaaacaaaaaaccatgctacttaccgaattgaggtgaaaattaaaagacctagggggtcacccaaaggttagaacatgaatcaataacttggaatattaatatacatctgatggtgccctgagcacacatgtccattttattttattttatcttaccttattttatttttattttttgagacagagtcttgctctgttgccaaggctggagtacagtgccgcggatctcggctcactgcaacctctgcctcccaggttcgagcgattctcctgcctcagtctccccagcagctgggattacaggcatgcaccaccacgcccagctaattttttgtatttttagtagagacgaggtttcactacgttgggcagacctcgggtgatccgcccgcctcggcctcccaaagtgctgggattgcaggcgtgagccactgcaccccgccacgtgtctgcctttaaaagaaaacaaaataaagcattactattattctcaaatattaatttataactattatgcaaacatgtaatatttaaattt

SEQ ID NO: 70660 - DNA, 1089 bp, Homo sapiens
tgtaaaaacgtttgctgctgagttgtgaccttacaatcttaactcatttcccacttactatactttgcagaaccaacctctgctactcgctttgttcctgattgaacctggttccatgtgtgctcagtgtatactatgcacagggcactgtgctgtgtgccctggtcccggtgagcatcattctcaggggagaaccttgctgaaaacaaaatcacatcccaaaaagttaaaatcatgctactggccgggcgcggtggctcacgcctgtaatcgcagcactttgggaggccgaggcgggtggagcacgaggtcagacgttcgagaccagcctggctaacgtggtgaaaccccgtctctactaaatatgcaaaaaatgcaaaaaattagccgggcgggggggcgggcgcctgtaatccgaactacttgggaggctgaggcaggagaatccttgaaacctgggaggcagaggttgcagtgagccgagattgcaccactgcagtccagccccggcgacagtgcaagactccgtctcaaaaaaacaaaacaaaacaaaaacaaaaaaccatgctacttaccgaattgaggtgaaaattaaaagacctagggggtcacccaaaggttagaacatgaatcaataacttggaatattaatatacatctgatggtgccctgagcacacatgtccattttattttattttatcttaccttattttatttttattttttgagacagagtcttgctctgttgccaaggctggagtacagtgccgcggatctcggctcactgcaacctctgcctcccaggttcgagcgattctcctgcctcagtctccccagcagctgggattacaggcatgcaccaccacgcccagctaattttttgtatttttagtagagacgaggtttcactacgttgggcagacctcgggtgwtccgcccgcctcggcctcccaaagtgctgggattgcaggcgtgagccactgcaccccgccacgtgtctgcctttaaaagaaaacaaaataaagcattactattattctcaaatattaatttataactattatgcaaacatgtaatatttaaattt

SEQ ID NO: 70661 - DNA, 691 bp, Homo sapiens
ccaaaatctggccataaactggccataaacaaaatctctgcagcactgtgacatgtttgtgattgccatgatgcccacgctggaaggttgtgggtttaccggaatgagggcaaggaacacctggtccacccagggcagaraaccatgtaaaggcattcttaaaccacaaacaataacatgagtgatctctgccttaaggacatgctcctgctgcagataactagccagactcattcctttacttcagcccatccctttatttcccataaggaatacttttagttaatctataatctatagaaacaatgcttatcactggcttgctgttaataaatatgtgggtaaacctctgctccaggctctcagctctgaaggctgttagaaccctgatttcccactctacacctctatatttctgtgtgtgtgtctttaattcctctagcaccgctgggttagggtctccctgaccgagctggtctcgggaatgatccacctgcctcagcctcccaaagtgctgggattacaggcatgagccaccgcacccagcctcacgaacgtgtatatttttcagtgctatattttcttcatatggaatgagttgtgaatatttttcagatggaaaagacatgttgtgttagaaggcacctctcaaattttaatatgtacagtaagttgaagaccttgttttgca

SEQ ID NO: 70662 - DNA, 853 bp, Homo sapiens
tcagcacctttgatggacacatctttgggaacatacggtgtgaaattcccattagattcagaaatgttaggacatcttagaatccaggaaatggggtgacagtgcagtggtcattgacctgccagtgtgtccaggccctgtgaccttgtctcttgtccatatagtgcgttcctcggagtagatggccagkggatagttgttaaatgtattgattaaacctaaactagtctctggttttcatgttgtgtccccttcgaagtacatccaccatgccttgtcccttgttaaatgtgtgatgtctgcatctcctgttctttccgggaatcttgggaggatgttaggtcatgcagtgcggtttgcatgtgtgcatctttactggtatgcacgcatgtgcatgcatgcgtgttcctgtgcacgttgtgggagtgtgcatgtgcgtgtgtctgcatgtgttccttctgctctgatgcagggttttctggctgccccctcagacccatcttccctgcttcatgttgtccctttcttcatgcttcctctgtagtaaggcttcctagagttgcatccttaaccctcatctctgggtggccttcctcctgtgggtttggcgactacctcctcagtgcgtcctggccttccgtatctggaccagtcatggctccagagttgtggcctcggcaccttcagagcctgcctggaggtcccctctgttctcctcgccaggctcctgcctgcatgctggaatttgggtgtccttccttgtctttagttccctcttttctctgctatccacctccgttgggtcaacaagtgcggtcagttctgtgacactgttcttggcccattgccaggg

SEQ ID NO: 70663 - DNA, 853 bp, Homo sapiens
tcagcacctttgatggacacatctttgggaacatacggtgtgaaattcccattagattcagaaatgttaggacatcttagaatccaggaaatggggtgacagtgcagtggtcattgacctgccagtgtgtccaggccctgtgaccttgtctcttgtccatatagtgcgttcctcggagtagatggccagtggatagttgttaaatgtattgattaaacctaaactagtctctggttttcatgttgtgtccccttcgaagtacatccaccatgccytgtcccttgttaaatgtgtgatgtctgcatctcctgttctttccgggaatcttgggaggatgttaggtcatgcagtgcggtttgcatgtgtgcatctttactggtatgcacgcatgtgcatgcatgcgtgttcctgtgcacgttgtgggagtgtgcatgtgcgtgtgtctgcatgtgttccttctgctctgatgcagggttttctggctgccccctcagacccatcttccctgcttcatgttgtccctttcttcatgcttcctctgtagtaaggcttcctagagttgcatccttaaccctcatctctgggtggccttcctcctgtgggtttggcgactacctcctcagtgcgtcctggccttccgtatctggaccagtcatggctccagagttgtggcctcggcaccttcagagcctgcctggaggtcccctctgttctcctcgccaggctcctgcctgcatgctggaatttgggtgtccttccttgtctttagttccctcttttctctgctatccacctccgttgggtcaacaagtgcggtcagttctgtgacactgttcttggcccattgccaggg

SEQ ID NO: 70664 - DNA, 853 bp, Homo sapiens
tcagcacctttgatggacacatctttgggaacatacggtgtgaaattcccattagattcagaaatgttaggacatcttagaatccaggaaatggggtgacagtgcagtggtcattgacctgccagtgtgtccaggccctgtgaccttgtctcttgtccatatagtgcgttcctcggagtagatggccagtggatagttgttaaatgtattgattaaacctaaactagtctctggttttcatgttgtgtccccttcgaagtacatccaccatgccttgtcccttgttaaatgtgtgatgtctgcatctcctgttctttccgggaatcttgggaggatgttaggtcatgcagtgcggtttgcatgtgtgcatctttactggtatgcacgcatgtgcatgcatgcgtgttcctgtgcacgttgtgggagtgtgcatgtgygtgtgtctgcatgtgttccttctgctctgatgcagggttttctggctgccccctcagacccatcttccctgcttcatgttgtccctttcttcatgcttcctctgtagtaaggcttcctagagttgcatccttaaccctcatctctgggtggccttcctcctgtgggtttggcgactacctcctcagtgcgtcctggccttccgtatctggaccagtcatggctccagagttgtggcctcggcaccttcagagcctgcctggaggtcccctctgttctcctcgccaggctcctgcctgcatgctggaatttgggtgtccttccttgtctttagttccctcttttctctgctatccacctccgttgggtcaacaagtgcggtcagttctgtgacactgttcttggcccattgccaggg

SEQ ID NO: 70665 - DNA, 555 bp, Homo sapiens
gcctgggtgctcacctgggtttgatgtgcagtggccacctagcaaggctaagaagccctgcttgccccctcagggcaggtgaggccacacccctgggctgaatggctgtcagtgatcctggcctcttccccgaccygccccgcctctgctgaactcctccgagactgctcagttcctgagaaggggttctgttgggtcggctggcccattgatgccacccatagcagctgtgctgattctgggtaggcaggggtccaggcggcccccttcttggggcaggccacttgtctacccgttgccccacctcctgccctgtatctggtccaggcacacaggaaggggagcaggttgctcttgtgccccgaatccctgcccttagtgcctatacagggttcccgacttcactgtttgctcctcggacgttaccagacagtgagtggccccagccccctctctgcactcagtaaacatgagttgctgccggtggggtggcttcacccatgcaccaggtgggcaggagttctgggtgtcatgtggtgtggggagctggaggcc

SEQ ID NO: 70666 - DNA, 781 bp, Homo sapiens
gttaggggagggcaggggccgggccccagaagagggagtggctgctgtctggtgtgcaggggtcggtgggttcctcaggggcatttctgccgacttgggctgagtcagaggcttgggargagggggcggccgatggtctgtggctgggaagtgtgagggtctctcgccttgggtctgtgtcagttctggcagtgacagggtgtttgggggaaagacttgggtctgccgctacccacaggggactctcaggaacccgagagcttggggagatgaaatgggggtgcataggggccacctgttggctcagggccctgtgggggccgctgaacctgctggaactctcctgcctgccacatgccaggggcagggctgagggagtgtgagggatgcacagctgttcagggctgagacattctgggctggggctgtcccagcgtgggaggcgtgcgggctgtagggccccgaagctgacctccacctttctgcttctctctcacggacgccgcggcccgcagggggcggattggcacctgcacccgtggatgggggcggcgtggccagccttgggtgcctcctgggctgcacctgtgccaccttggccgcccggaggaccgcccaccactgcgggccccctggagccaggccgccggggcacccccacgcggggccatgtgccgcctgcacttggctgcctccagtcttttccccagcctctcggggccctagcaggatgacaagtaggcggctctggggcccaggacagcccagctggggacccagg

SEQ ID NO: 70667 - DNA, 781 bp, Homo sapiens
gttaggggagggcaggggccgggccccagaagagggagtggctgctgtctggtgtgcaggggtcggtgggttcctcaggggcatttctgccgacttgggctgagtcagaggcttgggaagagggggcggccgatggtctgtggctgggaagtgtgagggtctctcgccttgggtctgtgtcagttctggcagtgacagggtgtttgggggaaagacttgggtctgccgctacccacaggggactctcaggaacccgagagcttggggagatgaaatgggggtgcataggggccacctgttggctcagggccctgtgggggcmgctgaacctgctggaactctcctgcctgccacatgccaggggcagggctgagggagtgtgagggatgcacagctgttcagggctgagacattctgggctggggctgtcccagcgtgggaggcgtgcgggctgtagggccccgaagctgacctccacctttctgcttctctctcacggacgccgcggcccgcagggggcggattggcacctgcacccgtggatgggggcggcgtggccagccttgggtgcctcctgggctgcacctgtgccaccttggccgcccggaggaccgcccaccactgcgggccccctggagccaggccgccggggcacccccacgcggggccatgtgccgcctgcacttggctgcctccagtcttttccccagcctctcggggccctagcaggatgacaagtaggcggctctggggcccaggacagcccagctggggacccagg

SEQ ID NO: 70668 - DNA, 648 bp, Homo sapiens
tggctgccctgcttaagccctgcagcctgtggggctgtgtccacccgggtcgcatgttgcttctacctgcaccgtggccccaccacacaaggtgccgtcctgccctccagtcaacttcctggggctctgagcagcctgtggtggcacctcacctgggcagagggtgggaggagcagcgcccttccttctgtgcagggagtctgatcagggttctgtctcactgtgggacagtgggggccggggaagagcggcaggtaccaagtgcagacagcagatgtagatgcatgcggrggtccgggctggggccaagaacacagccctggagtcagggacaccggcttcatgtcctcactctgccattcaagagctgggggacctcgggcaggtggtgtaggaacagggaggagtctgcctgcagcacgcagaggagggctgtgctggtcagggggtgttttggggagaggacctcaaagggaggttgactttgggaaaggggtcagagtacagaaaaagtgggtccaaatcctgcttcagcactgagaccctgcctcggcaggggtctccaagcttggctccaccccctgaggggccagttactgcatacctcgcccacccaggagctgggggccctggtcctgtttcccaggg

SEQ ID NO: 70669 - DNA, 713 bp, Homo sapiens
tgcatgttcttgccatgcaccagggcawcatcctgacccagatgccagccaccctgtctcacatccatttagagagaatctccatcttctgccaagacactgcccatgtagatgaaaaagtattttgcctccaaacatatcttaagcactgatttgaacctcaatacttcacacagatgcctttgcccagggcgtgtcggcctggctcaacagcaggggaagtggagccaattatatcagtgtcagtggactgagaaatactccagggagtagttctcatgcacgactaccagtggccagaccaaggtagtgcagcctgtgcacaaacctcctgctgcttttccagaggactggatttctgggaaatggctactgaacaggctgccaggatccatatatccagattcagagagatacatctctggattcaaatgcgctttttctttgtgcataatttttgcagtcattgttactacgccttggggattctagtcattatacttcagctcactctctatggccctttctccccttcactgctctatctgaacctggggaagcagctcaggctgcaaatgaggcagacctcatggcctggaattagcatcccctaggacggctgtcaatcagtgatgacaagggaggcgtacacatcccccagctccctcacctctcaggtggaataacagaggcatttttcctgtgtttctatg

SEQ ID NO: 70670 - DNA, 713 bp, Homo sapiens
tgcatgttcttgccatgcaccagggcatcatcctgacccagatgccagccaccctgtctcacatccatttagagagaatctccatcttctgccaagacactgcccatgtagatgaaaaagtattttgcmtccaaacatatcttaagcactgatttgaacctcaatacttcacacagatgcctttgcccagggcgtgtcggcctggctcaacagcaggggaagtggagccaattatatcagtgtcagtggactgagaaatactccagggagtagttctcatgcacgactaccagtggccagaccaaggtagtgcagcctgtgcacaaacctcctgctgcttttccagaggactggatttctgggaaatggctactgaacaggctgccaggatccatatatccagattcagagagatacatctctggattcaaatgcgctttttctttgtgcataatttttgcagtcattgttactacgccttggggattctagtcattatacttcagctcactctctatggccctttctccccttcactgctctatctgaacctggggaagcagctcaggctgcaaatgaggcagacctcatggcctggaattagcatcccctaggacggctgtcaatcagtgatgacaagggaggcgtacacatcccccagctccctcacctctcaggtggaataacagaggcatttttcctgtgtttctatg

SEQ ID NO: 70671 - DNA, 713 bp, Homo sapiens
tgcatgttcttgccatgcaccagggcatcatcctgacccagatgccagccaccctgtctcacatccatttagagagaatctccatcttctgccaagacactgcccatgtagatgaaaaagtattttgcctccaaacatatcttaagcactgatttgaacctcaatacttcacacagatgcctttgyccagggcgtgtcggcctggctcaacagcaggggaagtggagccaattatatcagtgtcagtggactgagaaatactccagggagtagttctcatgcacgactaccagtggccagaccaaggtagtgcagcctgtgcacaaacctcctgctgcttttccagaggactggatttctgggaaatggctactgaacaggctgccaggatccatatatccagattcagagagatacatctctggattcaaatgcgctttttctttgtgcataatttttgcagtcattgttactacgccttggggattctagtcattatacttcagctcactctctatggccctttctccccttcactgctctatctgaacctggggaagcagctcaggctgcaaatgaggcagacctcatggcctggaattagcatcccctaggacggctgtcaatcagtgatgacaagggaggcgtacacatcccccagctccctcacctctcaggtggaataacagaggcatttttcctgtgtttctatg

SEQ ID NO: 70672 - DNA, 713 bp, Homo sapiens
tgcatgttcttgccatgcaccagggcatcatcctgacccagatgccagccaccctgtctcacatccatttagagagaatctccatcttctgccaagacactgcccatgtagatgaaaaagtattttgcctccaaacatatcttaagcactgatttgaacctcaatacttcacacagatgcctttgcccagggygtgtcggcctggctcaacagcaggggaagtggagccaattatatcagtgtcagtggactgagaaatactccagggagtagttctcatgcacgactaccagtggccagaccaaggtagtgcagcctgtgcacaaacctcctgctgcttttccagaggactggatttctgggaaatggctactgaacaggctgccaggatccatatatccagattcagagagatacatctctggattcaaatgcgctttttctttgtgcataatttttgcagtcattgttactacgccttggggattctagtcattatacttcagctcactctctatggccctttctccccttcactgctctatctgaacctggggaagcagctcaggctgcaaatgaggcagacctcatggcctggaattagcatcccctaggacggctgtcaatcagtgatgacaagggaggcgtacacatcccccagctccctcacctctcaggtggaataacagaggcatttttcctgtgtttctatg

SEQ ID NO: 70673 - DNA, 713 bp, Homo sapiens
tgcatgttcttgccatgcaccagggcatcatcctgacccagatgccagccaccctgtctcacatccatttagagagaatctccatcttctgccaagacactgcccatgtagatgaaaaagtattttgcctccaaacatatcttaagcactgatttgaacctcaatacttcacacagatgcctttgcccagggcgtgtcggcctggctcaacagcaggggaagtggagccaattayatcagtgtcagtggactgagaaatactccagggagtagttctcatgcacgactaccagtggccagaccaaggtagtgcagcctgtgcacaaacctcctgctgcttttccagaggactggatttctgggaaatggctactgaacaggctgccaggatccatatatccagattcagagagatacatctctggattcaaatgcgctttttctttgtgcataatttttgcagtcattgttactacgccttggggattctagtcattatacttcagctcactctctatggccctttctccccttcactgctctatctgaacctggggaagcagctcaggctgcaaatgaggcagacctcatggcctggaattagcatcccctaggacggctgtcaatcagtgatgacaagggaggcgtacacatcccccagctccctcacctctcaggtggaataacagaggcatttttcctgtgtttctatg

SEQ ID NO: 70674 - DNA, 713 bp, Homo sapiens
tgcatgttcttgccatgcaccagggcatcatcctgacccagatgccagccaccctgtctcacatccatttagagagaatctccatcttctgccaagacactgcccatgtagatgaaaaagtattttgcctccaaacatatcttaagcactgatttgaacctcaatacttcacacagatgcctttgcccagggcgtgtcggcctggctcaacagcaggggaagtggagccaattatrtcagtgtcagtggactgagaaatactccagggagtagttctcatgcacgactaccagtggccagaccaaggtagtgcagcctgtgcacaaacctcctgctgcttttccagaggactggatttctgggaaatggctactgaacaggctgccaggatccatatatccagattcagagagatacatctctggattcaaatgcgctttttctttgtgcataatttttgcagtcattgttactacgccttggggattctagtcattatacttcagctcactctctatggccctttctccccttcactgctctatctgaacctggggaagcagctcaggctgcaaatgaggcagacctcatggcctggaattagcatcccctaggacggctgtcaatcagtgatgacaagggaggcgtacacatcccccagctccctcacctctcaggtggaataacagaggcatttttcctgtgtttctatg

SEQ ID NO: 70675 - DNA, 1500 bp, Homo sapiens
gtccatcataagttgcttctgtacgtataaaagagaacagtccagacacttgaaaacagatatcttctggttttcaatatgttagtcaaagtggcgatacagcaaggcttgcagggtgaacacagcgttgcacatggaacacttatatattatttttggttctcctatcttgatgccaggatgctgtgttaagtgcttggggcggacttaaacaccattggacaaataggacacttgtagaagacttcacagtgagaaccttgaatgcgagacttcagagcagccacatcagagtacacaacattgcaatgtacacgtcaaaaaccaactctccttgtgtagtgtagacagttcttggtgacatgggtctggaagtgcaccaacctgcagatggccctgcactcagggcaggtgtagggagatttgtgctgatggattctctgcactggttaggaagcagcatctggcagatagtacaagtcttttgtccactcatatctgcagcctgctggaaatgtgtagccagggatctcttgtcctggaagatttcattacacttcaaacattttagattatgtctacacagtttggaggggtcttcatctaggggcatggctgtggtgctgggagtgcttgaaggagccgatatgactgtcccagttatgccagactgaatttttgtgacagtgtgtatgccagttcccacagggctctgaagagtggaagatgaagaagaactattgctcgatggagaaactatgatatgacctgctgagactggctttaaaattgagtaggaacattgcattaccacccccttctccttatgcccacgggcttgggaaaggaggttgcatttgttgtaaacaaygaggttctttgtacaatggttgcacgttacttcgatgcacatgctccatctgttgtagtgctgggtcagactcttcaagtgcaaaggagtccctacactccaagcacttgtacccatgcatcagtaatgtgatccctgcattggcaggaggactgaggtttaggatgtaaacagggactggattgacactgctcagcaccttgttgaaagtttccaccacagaattctgcaaggacgacaccacctggactcgagacacctttttggggggttgtgaggctgctgcattgattagtgccttctttatttgttgctgagttttggttagcacttggtggagttcagaggtggcctgggcaccctaagccagaaggttaaggttggcaaggtgcacagtctttggcacaagtttggcattggccaggctggatgctggcatcatgacagcttgctcctgtatagcattggcagctttaatgatgatgccgctggcactctggacagaggcagcaggtatgaccgtggctttcaccgtggtgttgttagcaagcttcaaattaatgacttgggatcctgctgtcttcacagcagacactgggaggaaagcagtagccacaggcttgattgtg

SEQ ID NO: 70676 - DNA, 1416 bp, Homo sapiens
gggatcctcctgttccagggttacaaatgtcccctgtcccagaatggcagcgtggtttaagaatccctaacctggcaggtgacagaacaggggttgtagattccaaagcttactaaggacagtggcatagttgtgtgagaccttgcttcttctcagtgttgggaagagaagagggagtaaaagggactgtggagagggcagtccaattgtggattttaatgcatagggactcagcattgcaagatctgtaatttaatgtgaaacttgcacatttgaaataatagcagctaaatctaattgagaacagcatgcattccaaacaaaatacctcagtgggccagatttggacctccagggggatttatgcaaaagaccaagtaaacagagacacttcacagtggcggaacccaagagtctagcctggggaaagcatgcaggggccctcagataatctgtgaaagaaagacaggtcataacactcaaaatgcctacaagcgatgaaggctaagactatttgaaatcatggaaaaaggttagcttcttcaggaaaattgtatggtcaaggtacagggacacatgtcatcctgggatatatatgactgtggtggagactggtataacatgagccactcagggaaaaaaacaaaacaaaacaaacaaaaaaactcccttcctagtaatacataaagctaaagagaaattgcatctgggttacaccagaagaaggaaatgaggtaagaaaaaggtgagaataaatcacctaatcaaaatactgggttataaaaataactagcccacctgcttcaggactgtaagaaactgagcaatgctttcaggaggccaggttgaaaaacacaaacctgtttagccacagcttgattccatgcaattcatgctccaagattctgtctcactgtggttaaaaactcatgttttttaaatggtgggctgacaaaattgcattattgtagatgtggaaggaataatataaatgaagtagcattggagaatcaatatttttggagcaccatcatgtgcctgaccctgtatgggtgactcatgtatgataaccgcttttactgctcacatcattcttatgagatagatacttcttttcattcctgttttgcaaatgaggaaattaaggcacatactggtaacatgacttacctaatgttagagctctaataataagttaaagaactgrgatttaaaccagttaaatataataatgataataacagtaaacaattcgatcctcagaagtctttgtgtgagctctgagctctgatttccattattaacgccagcctgtctttcgagggttgtgaagattaaatgagatagtgcctgtaagaacttaacactgacttgcccaatcaacaagattaatagttgttattaataatagtaact

SEQ ID NO: 70677 - DNA, 1416 bp, Homo sapiens
gggatcctcctgttccagggttacaaatgtcccctgtcccagaatggcagcgtggtttaagaatccctaacctggcaggtgacagaacaggggttgtagattccaaagcttactaaggacagtggcatagttgtgtgagaccttgcttcttctcagtgttgggaagagaagagggagtaaaagggactgtggagagggcagtccaattgtggattttaatgcatagggactcagcattgcaagatctgtaatttaatgtgaaacttgcacatttgaaataatagcagctaaatctaattgagaacagcatgcattccaaacaaaatacctcagtgggccagatttggacctccagggggatttatgcaaaagaccaagtaaacagagacacttcacagtggcggaacccaagagtctagcctggggaaagcatgcaggggccctcagataatctgtgaaagaaagacaggtcataacactcaaaatgcctacaagcgatgaaggctaagactatttgaaatcatggaaaaaggttagcttcttcaggaaaattgtatggtcaaggtacagggacacatgtcatcctgggatatatatgactgtggtggagactggtataacatgagccactcagggaaaaaaacaaaacaaaacaaacaaaaaaactcccttcctagtaatacataaagctaaagagaaattgcatctgggttacaccagaagaaggaaatgaggtaagaaaaaggtgagaataaatcacctaatcaaaatactgggttataaaaataactagcccacctgcttcaggactgtaagaaactgagcaatgctttcaggaggccaggttgaaaaacacaaacctgtttagccacagcttgattccatgcaattcatgctccaagattctgtctcactgtggttaaaaactcatgttttttaaatggtgggctgacaaaattgcattattgtagatgtggaaggaataatataaatgaagtagcattggagaatcaatatttttggagcaccatcatgtgcctgaccctgtatgggtgactcatgtatgataaccgcttttactgctcacatcattcttatgagatagatacttcttttcattcctgttttgcaaatgaggaaattaaggcacatactggtaacatgacttacctaatgttagagctctaataataagttaaagaactgggatttaaaccagttaaatataataatgataataacagtaaacaattcgatcctcagaagtctttgtgtgasctctgagctctgatttccattattaacgccagcctgtctttcgagggttgtgaagattaaatgagatagtgcctgtaagaacttaacactgacttgcccaatcaacaagattaatagttgttattaataatagtaact

SEQ ID NO: 70678 - DNA, 946 bp, Homo sapiens
tgcatgaattcgattggattgtgtcattttaaagtattaaaaccaaggaaaccccaattttgatgtatggattacttttttttgtaaacatggttaaaataaaacttytgtggttcttctgaatcttaatatttcaaagccaggtgaaaatctgaactagatattctttgttggaatatgcaaaggtcattctttactaacttttagttactaaattatagctaagttttgtcagcagcatactccggaaagtctcatacttcttgggagtctgccctcctaagtatctgtctatatcattcattacgtgtaagtatttaacaaaaaagcattcttgaccatgaatgaagtagtttgtttcatagcttgtctcattgaatagtattattgaagatactaaatgatgcaaaccaaatggattttttccatgtcatgatgtaatttttctttcttctttcttttttttaaattttagcagtggcttattatttgtttttcataaattaaaataacttttgataatgtttactttaagacatgtaacatgttaaaaggttaaacttatggctatttttaaagggctattcatttaatctgagttttcccttattttcagctttttcctagcatataatagtcattaagcatgacatatccttcatatgatcactcatcttgagttaattagaaaatacctgagttcacgtgctaaagtcatttcactgtaataaactgactgtggtttcttaagaacatgacactaaaaaaaaagtgttttttttccaccgttgctgattattagacagtaggaaatagctgttttctttagttttacaagatgtgacagctttagtggtagatgtagggaaacatttcaacagccatagtactatttgttttaccactgattgcactgttttgtttttttaacagttgcaaagctttt

SEQ ID NO: 70679 - DNA, 878 bp, Homo sapiens
ctggggaaagagtgcacagacagagagatagcaagtgcaaaggccccggggcaggtatattcctgatgtgttagaggagcagtcaggcgtccagtgtgacaggatgggaaagagcaaaagggagtggggaggggatgagatctgagaggcagctggagacagggtcatgtagggcctcatcagcctccgtcagaactttggattttagtctgagcgagatggacagctacttcagagttttatacagaaacataagtgattgtatttgttctgttggtggaggttttgcgaggagaaaataaggtaatgtgcatgaaattgctttgtgaagcgggaagttaggttaaagaatattgccacggtcatataacaggccaggcagttgcaaagccagcgtacaatgcactttctctgaccctcggccacccttctttccayggcatcccgaatctcccccagaagggcaccgtgtcaacctagaaagagcttgaacccttaagcaaggtcaaagactcttcctcattcccaagccacagggctttgtgaaccttgtcgacctggcagcatttggcttttggaaagaaccacgggagcttgtgatcttaaatgggtagaaagaagggagttggaacagtctgaggcagtttgaagctgggtagaggagattgtcataaattaaatacagaccttgtctgctgaaggctggactagagaagcaaaaacatcaggatttaagaggcaaaaccaacagttatgatatgttttggagaactccattaatgtctagttaggaagccatagtgtggccaaaagcaatagtattggggtttgtaagaattcatagttgtttgtatagtattagacgtggattaaggaga

SEQ ID NO: 70680 - DNA, 878 bp, Homo sapiens
ctggggaaagagtgcacagacagagagatagcaagtgcaaaggccccggggcaggtatattcctgatgtgttagaggagcagtcaggcgtccagtgtgacaggatgggaaagagcaaaagggagtggggaggggatgagatctgagaggcagctggagacagggtcatgtagggcctcatcagcctccgtcagaactttggattttagtctgagcgagatggacagctacttcagagttttatacagaaacataagtgattgtatttgttctgttggtggaggttttgcgaggagaaaataaggtaatgtgcatgaaattgctttgtgaagcgggaagttaggttaaagaatattgccacggtcatataacaggccaggcagttgcaaagccagcgtacaatgcactttctctgaccctcggccacccttctttccatggcatcccgaatctcccccagaagggcaccrtgtcaacctagaaagagcttgaacccttaagcaaggtcaaagactcttcctcattcccaagccacagggctttgtgaaccttgtcgacctggcagcatttggcttttggaaagaaccacgggagcttgtgatcttaaatgggtagaaagaagggagttggaacagtctgaggcagtttgaagctgggtagaggagattgtcataaattaaatacagaccttgtctgctgaaggctggactagagaagcaaaaacatcaggatttaagaggcaaaaccaacagttatgatatgttttggagaactccattaatgtctagttaggaagccatagtgtggccaaaagcaatagtattggggtttgtaagaattcatagttgtttgtatagtattagacgtggattaaggaga

SEQ ID NO: 70681 - DNA, 1789 bp, Homo sapiens
tgcatgagggaattgtctccaagcttgtttccaccctgtgagctcctctcagagaatctgttcacagaggaacaagccacaggartacaggccctggagcaaaaacagcgagggaggggtagttaaaaaacagcatttcccagcattgcccgtgaagcattttcaaaaacagattcctggccctcccccaggttctgagttggcagatctagggaagggccaggaatcggggtatttttaaaagccccccatgtgattccatggattagctaaagtgggacccagtggcatcgccctcatgtcccatcccagcctctgcctgtcacagtggtggcctgtcttccccatggcctgagcgtcactgagtgccaagccccagctctcctcttcccatcctcctgggctgaaggcctgtgtttcaagtccccacccacccccagcacagtaagctataggcaccccttagagctccatcaaggcacagaagggagttgatacagacaggaacaaaggattctgattcccttccatgtttatgtagtaggaaaactaatggtaggaactaggagtattgagcctgaagaaaataagaataagaggagatttcatcaagaactttaaacaaatgctctaaggttccgttctccagtctgtgggctagaacataaagaaaaggacccaaattaagctgcaggcctggagttcagactaagaaattctatgtgacccaaagggacaggaagcactaggcagaggagctgagtgtggctgcaggatggccgttgtagacgtctttgtgatgagcacaggaggctcatggcctgctcgctagaggcaggagggtagatcagatcatagctgggtgtcacttaacactccttgctgcaatgcatatgagaaaagctgctcttcaggtctgtgggccacgcaattgactatttttctcaaactgttgagaggttgctatgaaccttttgcatttttccttcggttttcctcagatccatgagagattggcactggtgtgtcacctgaagcagtggcacaaaattgctttgtggggttcttcctatgcaaaactagatttgaccaacacagcgactgaatactcattcccaatattatgagcatggagcaccaccaaaatgagcccggctattgtttccaaactgatatccactctctgagtcatccatgcaaatgaattctgtgatcagcgtgacccaagtgctggatccatgttgaatgagatttgaagttccttgcttttatggagctgatgttttccttaaaaagccagttaggagatgaataaataaacaagatcactttggatagcaataagtgctgtggtagagaataacatggaccagggatggacaaggggcgtgggaaagttctcattgtgggagtgatgctggaatcgagaattgaaggctgagctgagggaggagctgggtggagagtgaggagaggagtcatgctaaggttttgctatggaagccggcttggcgtgttctaagaacaggaaggaagccagtgtggctgagatggagtatacaaaagattgcatggcaagagataaagttggagaggagtcaaagcccggatcatggtaagcattggaggccacagcacagggtttagatgtattcaaagttcatagtcatttggcttaagatgttcgtatgatggtatagaaaaggctgtatatcaaggattcatatctcaggatgctccttgacttacagtggggttatggtggataaacctgtcataagtcagaaat

SEQ ID NO: 70682 - DNA, 1789 bp, Homo sapiens
tgcatgagggaattgtctccaagcttgtttccaccctgtgagctcctctcagagaatctgttcacagaggaacaagccacaggaatacaggccctggagcaaaamcagcgagggaggggtagttaaaaaacagcatttcccagcattgcccgtgaagcattttcaaaaacagattcctggccctcccccaggttctgagttggcagatctagggaagggccaggaatcggggtatttttaaaagccccccatgtgattccatggattagctaaagtgggacccagtggcatcgccctcatgtcccatcccagcctctgcctgtcacagtggtggcctgtcttccccatggcctgagcgtcactgagtgccaagccccagctctcctcttcccatcctcctgggctgaaggcctgtgtttcaagtccccacccacccccagcacagtaagctataggcaccccttagagctccatcaaggcacagaagggagttgatacagacaggaacaaaggattctgattcccttccatgtttatgtagtaggaaaactaatggtaggaactaggagtattgagcctgaagaaaataagaataagaggagatttcatcaagaactttaaacaaatgctctaaggttccgttctccagtctgtgggctagaacataaagaaaaggacccaaattaagctgcaggcctggagttcagactaagaaattctatgtgacccaaagggacaggaagcactaggcagaggagctgagtgtggctgcaggatggccgttgtagacgtctttgtgatgagcacaggaggctcatggcctgctcgctagaggcaggagggtagatcagatcatagctgggtgtcacttaacactccttgctgcaatgcatatgagaaaagctgctcttcaggtctgtgggccacgcaattgactatttttctcaaactgttgagaggttgctatgaaccttttgcatttttccttcggttttcctcagatccatgagagattggcactggtgtgtcacctgaagcagtggcacaaaattgctttgtggggttcttcctatgcaaaactagatttgaccaacacagcgactgaatactcattcccaatattatgagcatggagcaccaccaaaatgagcccggctattgtttccaaactgatatccactctctgagtcatccatgcaaatgaattctgtgatcagcgtgacccaagtgctggatccatgttgaatgagatttgaagttccttgcttttatggagctgatgttttccttaaaaagccagttaggagatgaataaataaacaagatcactttggatagcaataagtgctgtggtagagaataacatggaccagggatggacaaggggcgtgggaaagttctcattgtgggagtgatgctggaatcgagaattgaaggctgagctgagggaggagctgggtggagagtgaggagaggagtcatgctaaggttttgctatggaagccggcttggcgtgttctaagaacaggaaggaagccagtgtggctgagatggagtatacaaaagattgcatggcaagagataaagttggagaggagtcaaagcccggatcatggtaagcattggaggccacagcacagggtttagatgtattcaaagttcatagtcatttggcttaagatgttcgtatgatggtatagaaaaggctgtatatcaaggattcatatctcaggatgctccttgacttacagtggggttatggtggataaacctgtcataagtcagaaat

SEQ ID NO: 70683 - DNA, 1789 bp, Homo sapiens
tgcatgagggaattgtctccaagcttgtttccaccctgtgagctcctctcagagaatctgttcacagaggaacaagccacaggaatacaggccctggagcaaaaacagcgagggaggggtagttaaaaaacagcatttcccagcattgcccgtgaagcattttcaaaaacagattcctggccctcccccaggttctgagttggcagatctagggaagggccaggaatcggggtatttttaaaagccccccatgtgattccatggattagctaaagtgggacccagtggcatcgccctcatgtcccatcccagcctctgcctgtcacagtggtggcctgtcttccccatggcctgagcgtcactgagtgccaagccccagctctcctcttcccatcctcctgggctgaaggcctgtgtttcaagtccccacccacccccagcacagtaagctataggcaccccttagagctccatcaaggcacagaagggagttgatacagacaggaacaaaggattctgattcccttccatgtttatgtagtaggaaaactaatggtaggaactaggagtattgagcctgaagaaaataagaataagaggagatttcatcaagaactttaaacaaatgctctaaggttccrttctccagtctgtgggctagaacataaagaaaaggacccaaattaagctgcaggcctggagttcagactaagaaattctatgtgacccaaagggacaggaagcactaggcagaggagctgagtgtggctgcaggatggccgttgtagacgtctttgtgatgagcacaggaggctcatggcctgctcgctagaggcaggagggtagatcagatcatagctgggtgtcacttaacactccttgctgcaatgcatatgagaaaagctgctcttcaggtctgtgggccacgcaattgactatttttctcaaactgttgagaggttgctatgaaccttttgcatttttccttcggttttcctcagatccatgagagattggcactggtgtgtcacctgaagcagtggcacaaaattgctttgtggggttcttcctatgcaaaactagatttgaccaacacagcgactgaatactcattcccaatattatgagcatggagcaccaccaaaatgagcccggctattgtttccaaactgatatccactctctgagtcatccatgcaaatgaattctgtgatcagcgtgacccaagtgctggatccatgttgaatgagatttgaagttccttgcttttatggagctgatgttttccttaaaaagccagttaggagatgaataaataaacaagatcactttggatagcaataagtgctgtggtagagaataacatggaccagggatggacaaggggcgtgggaaagttctcattgtgggagtgatgctggaatcgagaattgaaggctgagctgagggaggagctgggtggagagtgaggagaggagtcatgctaaggttttgctatggaagccggcttggcgtgttctaagaacaggaaggaagccagtgtggctgagatggagtatacaaaagattgcatggcaagagataaagttggagaggagtcaaagcccggatcatggtaagcattggaggccacagcacagggtttagatgtattcaaagttcatagtcatttggcttaagatgttcgtatgatggtatagaaaaggctgtatatcaaggattcatatctcaggatgctccttgacttacagtggggttatggtggataaacctgtcataagtcagaaat

SEQ ID NO: 70684 - DNA, 968 bp, Homo sapiens
tggagttcagggaagacgtccaggctggagacctaatcactatagaaggcatttaaagctataagattgcatgagatcaccaagagaatgagagtagatagagaaaatttccaaggaccaagtcccgggacactgctatgctgaagtttgggagcatgaggaggagacagaaaagagaattgaaaagggataggggagaatagagagtcccagaagtcaagaaagcatttcaaaggggcaggacaatcaattgtattagatgccactgataagtcaggcaaggagaggactgaaactaggagcttgtctgctgcctgagagaaaaatctgtgtcatcatcaatgtcatcatcatcatcatcaacaacaaatagatcactggaccaccattcaacaaatactaaaaactgggtcaatggtgggtcatcttgccaaagttctaagttttttctttttttaaaattccattgatacctcctaaagctagactggaaagtgggaatatttttattgttcacaaataatacataattatctctcctttgtaaaatcttccctttcccagccccacccaactccaaatcttgatataaatgcaagattctgtatcagaaccaataastaattgagaatctcactatgcctggggtcccacaactgccaccagcaagttccgggaactgaaccatgtgggcaggagctgggagcagagtggtgggaatggggagagccccctttacacatcacccttcacagtcaggtgctcaagctcgtccaggcttaagcttccagaccagggagaattattaatagcacttcttctttactctcaaaagtattccagattggacaatacattatattgtttcctgcctatttgattttttaaaatccttatttggcactaacttgtccccgtttctttttcccacttaaaaaaaagcccagttttctttattttttaatttt

SEQ ID NO: 70685 - DNA, 572 bp, Homo sapiens
gatattaaaacaccaaaagcaacaggaaccataataaaatgaccatgtgccaggcagccagatcccctagagctgctgaccagcgaatctttaccaaaccagttctacgggaggcgctgctgtgaagtggcttaaggcacagaatgtggtaaaagacaarcctccttttgacctagttggaagagattgaccacaaacatggaatatacccagtgcagtgggtcgcacaataagcggccagaaaatacgtattgaacttaataaagaaaatcaataatgtgggccggccatggtggctcacgcctgtaatcccagcactttgggaggccgaggtgggcagatcgtgaggtcaggagatcgagaccatcctggctaacatgatgaaaccctgtctctactaaaaatacaaaaaattagccaggagtggtggcaggtgcctgtagccccagctacttgggaggctgaagcaggagaatggcgtgaacccaggaggcggagcttgcagtgagcccagatcgcaccactgcactccaacctgggtgacggagtgagactccgtctcaaaaaaaaaa

SEQ ID NO: 70686 - DNA, 1094 bp, Homo sapiens
aaatggggaagtgcaacgtgtgtgtatttgtagggctgtcaaagggctttctctaaaggcgggaatccttcctgtaatgttcttgatcaagtcctctggcctgtgttgattgcctcatgtgacagggcactcactatcccctaagggtaaaccgtggggtctgttctttttagcctaacctgggaagcaaggcagactcaagacttcctgttaaaaattacagagctttagctctcattttcccagcagcatctataaagttgaggaaagccttttgacacttgagcccaagagggtcttactggtcttatctatccccgtattgtcagaggccccagaaaatccacacattccccaggcactgagtagacttcaaagaggcatatcagacttcccacgcttcaagccagtgagaaaaatgcaacggcctcaatattcaggtgtgtcatttgagctgcaagtcgctgttgcccgagcaccacatcttggcatttggcattcatgcttattgggtgggggaggctgacagtcaagaccctgtcccattgtatttactctgggtggcctggattcatcccttccctctctgaatgtagggatttccctctctgaccctagtaacgaggagccccagcttcttgttaacctcatacggaggttgcattcatagtacgtatgatgcctttaattcatggacccttgataggataaccacctcctcaagagccttctcctaatgactggagaattccggaaagttgctctgtctgtgcctttcccttgcttggcctctactgtaacactacccacggtgagcactttgctttgacttctgtgttgctatcggcagcttaccatcctcaggggcagctctgctctttccaggcatgtgcatatttgtgaacgttatctgtgtttcttcataagcatcttgagaaaaataagcagagaattttaattcagcatatttaatgayagacaggattctatggaagcacttcggaagaacatccaacactcctggggactcaggaggctttggagggagaggcgtttgactggagagcccagagataagtgagagtcagacaggc

SEQ ID NO: 70687 - DNA, 852 bp, Homo sapiens
tctaatgtattattctcagaggcttttgactctgccttttgatttcttggatatgccttctgagatgccctttcctttgtataagaaaaggcgtggctagcagttttttgcttgcttattttttatagacagttggaagcccaaggcatgaggatagtttgaagccaggaatttgagatgagcctgtacaacaaattgagacctggtttctacaaaaaaattaaaaattaaaagaaaaatacctgggctggtggtgtgccaataatctcagctactagggaggctgaggcaggaggattacttgaactcaggagttcaaggatgcagtgagctatgattgcaccactgccatccagcctggaagacagagcaaatgctgtctcttaaaaataaaataaaataaaaataatattaaaaaaagaaaattgggacacagaggcccctttttgtctttaataaccccaatctttttcagtctacattgttacaggtcttttaaatactttgtgggtttcctgtgcatcgygctttttattttccttttaggtgatgtaataattatgagttacagtgtgacatatctataagtgtatacaataattacaaaatgatcaaatcagtgtaattagtgtgctcacctcaaacatttattatcatttgtttgtgttatgaacattcaaaatcctgtcttttaattttttaaaatatacaataaattattcttaaccatagttaccctacagtactataaaacactagaatgtattcctcctatctagctgtaattttctatccgttagccaacctctccctattcttccctcccctcatacctttcccagcctttaataa

SEQ ID NO: 70688 - DNA, 1534 bp, Homo sapiens
tggtggtgaagtgtcaaaaatctcatggcaaagaagaatgcatacaagaatggaaaagtattgtaggtaagttctgcaagagattgacgggagataagttttaagagacttaaaaaaaaagcagataactttttgtaagtgtggaaaaaattgtgaatattcttacagattcagccagagggccaagagccaataagagttaaaaagatttaggcaagagagtagataaatattggagtaaatttccagaggtgatggaagaaaatgtgataaacagtatagaactgaatactcttcagtggacagaagaaaaagactactgatcttagacagaagggaaaaaccaaagatgtgtgtccgtggaatgaaatttggatgggggttgataattgaaataattctcccctggatatcattattttccaaatgagaaaaatgacaataaagtttgctgagttagtggaatagtaacttacaggttattggtaaagatgtagaataaactctgggagcaatgagagagttcatggaccagggctgaattaatgcgtttttgctgcatgtttaaggtgctgttgaggctgaagacaaataatttgtagtagcaagaaatgaagagctgagaaaggagagtcatgcagggaagatcatggctacctttttatttctgaaggatgacagagtactggcaacactgtgagaactaaaccacgggaagaccagatcagaagtaggaactgctatgatgaggctgcataacaaatttccctcaagcacagaagcttaaaacagccacactaatatattcatggatcctgttggtcaggaatacagaaagggtacaacagggacagcttatttctgttccatgaygtctgagacctcaagacttaaaagctgcaggtgctgtgggtgaattgatggcaggaggctgggattacatgaaagcttgttcacccgtatggctagttcctagaatgggaggaatagatgatgagcaccactagccagataacctatgcgggccactccatatggttcagcttccttgcagcatggctgcctgaggctggtttgacccctaccatgatagctctgggctccaggcatggggtgagtgttttagcaaataggtggaagctgagtcacactatatgattcagctttggaagtttcacagagttacagcattttattacttacaggcaagtcacaaaaccacctagatttaatgtaatgcaagaagaatagtttgcccctgttgatgtgtgcacagcaagttttagaagaccgtatgggttgggagatattcttgaggccatatttggaaaacccagtccatcatagagaatttgcagacatctgagcaaacagaggggaagcttggaaaaaaaggtagtgatagcagacacagagagacagccttgggtttgtaatattcttgacctacgtaactgatggaactgattgcatctcctgaatcttcttcctttatgaggatgtttcagggatcaggcatacagtcaaaaatgct

SEQ ID NO: 70689 - DNA, 1534 bp, Homo sapiens
tggtggtgaagtgtcaaaaatctcatggcaaagaagaatgcatacaagaatggaaaagtattgtaggtaagttctgcaagagattgacgggagataagttttaagagacttaaaaaaaaagcagataactttttgtaagtgtggaaaaaattgtgaatattcttacagattcagccagagggccaagagccaataagagttaaaaagatttaggcaagagagtagataaatattggagtaaatttccagaggtgatggaagaaaatgtgataaacagtatagaactgaatactcttcagtggacagaagaaaaagactactgatcttagacagaagggaaaaaccaaagatgtgtgtccgtggaatgaaatttggatgggggttgataattgaaataattctcccctggatatcattattttccaaatgagaaaaatgacaataaagtttgctgagttagtggaatagtaacttacaggttattggtaaagatgtagaataaactctgggagcaatgagagagttcatggaccagggctgaattaatgcgtttttgctgcatgtttaaggtgctgttgaggctgaagacaaataatttgtagtagcaagaaatgaagagctgagaaaggagagtcatgcagggaagatcatggctacctttttatttctgaaggatgacagagtactggcaacactgtgagaactaaaccacgggaagaccagatcagaagtaggaactgctatgatgaggctgcataacaaatttccctcaagcacagaagcttaaaacagccacactaatatattcatggatcctgttggtcaggaatacagaaagggtacaacagggacagcttatttctgttccatgatgtctgagacctcaagacttaaaagctgcaggtgctgtgggtgaattgatggcaggaggctgggattacatgaaagcttgttcacccgtatggctagttcctagaatgggaggaatagatgatgagcaccactagccagataacctatgcgggccactccatatggttcagcttccttgcagcatggctgcctgaggctggtttgacccctaccrtgatagctctgggctccaggcatggggtgagtgttttagcaaataggtggaagctgagtcacactatatgattcagctttggaagtttcacagagttacagcattttattacttacaggcaagtcacaaaaccacctagatttaatgtaatgcaagaagaatagtttgcccctgttgatgtgtgcacagcaagttttagaagaccgtatgggttgggagatattcttgaggccatatttggaaaacccagtccatcatagagaatttgcagacatctgagcaaacagaggggaagcttggaaaaaaaggtagtgatagcagacacagagagacagccttgggtttgtaatattcttgacctacgtaactgatggaactgattgcatctcctgaatcttcttcctttatgaggatgtttcagggatcaggcatacagtcaaaaatgct

SEQ ID NO: 70690 - DNA, 722 bp, Homo sapiens
aactgtaggaatattggaaggagattttaattactaatcttgtaaccttgggaaatttacttaatcttcagttttcttgtgaaattgaggtaataatgcttctttattctaagtttcttgccaatgataattgatatactttttaaagattatattttattgcataccttatggtctggggtagggcagacggacgggatgttgagcctgcattccaggcttactctggttttggggttgtttttctttttctacattaaacaactgatacttgtgatgtcacacacatacagaatctatgtcacttaccctctgaaacaaacacattaaattattctatggttcatcactaggatttccattgttgccttcaaagaaatagaaaacacgattctttctttaatatggagttttagccacagataaacttaatgtcaagtgatagttgattgtatatatatatatatatayacacacacacacacacacacacacacacacacacacacaggtttctagagtagatatgttgtgttgttatttatgttaacatattaatgtgctcattcttccaggtccagaaaaaactcatttgtgatccctcctccttgtacctctctggaatttgcaatctcttattcctgcaaatctaaagtatggcacttattgcatagtattttacttatttgtctgacttcaaaggtagtttgttggatatccca

SEQ ID NO: 70691 - DNA, 722 bp, Homo sapiens
aactgtaggaatattggaaggagattttaattactaatcttgtaaccttgggaaatttacttaatcttcagttttcttgtgaaattgaggtaataatgcttctttattctaagtttcttgccaatgataattgatatactttttaaagattatattttattgcataccttatggtctggggtagggcagacggacgggatgttgagcctgcattccaggcttactctggttttggggttgtttttctttttctacattaaacaactgatacttgtgatgtcacacacatacagaatctatgtcacttaccctctgaaacaaacacattaaattattctatggttcatcactaggatttccattgttgccttcaaagaaatagaaaacacgattctttctttaatatggagttttagccacagataaacttaatgtcaagtgatagttgattgtatatatatatatatatacayacacacacacacacacacacacacacacacacacacaggtttctagagtagatatgttgtgttgttatttatgttaacatattaatgtgctcattcttccaggtccagaaaaaactcatttgtgatccctcctccttgtacctctctggaatttgcaatctcttattcctgcaaatctaaagtatggcacttattgcatagtattttacttatttgtctgacttcaaaggtagtttgttggatatccca

SEQ ID NO: 70692 - DNA, 722 bp, Homo sapiens
aactgtaggaatattggaaggagattttaattactaatcttgtaaccttgggaaatttacttaatcttcagttttcttgtgaaattgaggtaataatgcttctttattctaagtttcttgccaatgataattgatatactttttaaagattatattttattgcataccttatggtctggggtagggcagacggacgggatgttgagcctgcattccaggcttactctggttttggggttgtttttctttttctacattaaacaactgatacttgtgatgtcacacacatacagaatctatgtcacttaccctctgaaacaaacacattaaattattctatggttcatcactaggatttccattgttgccttcaaagaaatagaaaacacgattctttctttaatatggagttttagccacagataaacttaatgtcaagtgatagttgattgtatatatatatatatatacacayacacacacacacacacacacacacacacacacacaggtttctagagtagatatgttgtgttgttatttatgttaacatattaatgtgctcattcttccaggtccagaaaaaactcatttgtgatccctcctccttgtacctctctggaatttgcaatctcttattcctgcaaatctaaagtatggcacttattgcatagtattttacttatttgtctgacttcaaaggtagtttgttggatatccca

SEQ ID NO: 70693 - DNA, 722 bp, Homo sapiens
aactgtaggaatattggaaggagattttaattactaatcttgtaaccttgggaaatttacttaatcttcagttttcttgtgaaattgaggtaataatgcttctttattctaagtttcttgccaatgataattgatatactttttaaagattatattttattgcataccttatggtctggggtagggcagacggacgggatgttgagcctgcattccaggcttactctggttttggggttgtttttctttttctacattaaacaactgatacttgtgatgtcacacacatacagaatctatgtcacttaccctctgaaacaaacacattaaattattctatggttcatcactaggatttccattgttgccttcaaagaaatagaaaacacgattctttctttaatatggagttttagccacagataaacttaatgtcaagtgatagttgattgtatatatatatatatatacacacayacacacacacacacacacacacacacacacacaggtttctagagtagatatgttgtgttgttatttatgttaacatattaatgtgctcattcttccaggtccagaaaaaactcatttgtgatccctcctccttgtacctctctggaatttgcaatctcttattcctgcaaatctaaagtatggcacttattgcatagtattttacttatttgtctgacttcaaaggtagtttgttggatatccca

SEQ ID NO: 70694 - DNA, 722 bp, Homo sapiens
aactgtaggaatattggaaggagattttaattactaatcttgtaaccttgggaaatttacttaatcttcagttttcttgtgaaattgaggtaataatgcttctttattctaagtttcttgccaatgataattgatatactttttaaagattatattttattgcataccttatggtctggggtagggcagacggacgggatgttgagcctgcattccaggcttactctggttttggggttgtttttctttttctacattaaacaactgatacttgtgatgtcacacacatacagaatctatgtcacttaccctctgaaacaaacacattaaattattctatggttcatcactaggatttccattgttgccttcaaagaaatagaaaacacgattctttctttaatatggagttttagccacagataaacttaatgtcaagtgatagttgattgtatatatatatatatatacacacacayacacacacacacacacacacacacacacacaggtttctagagtagatatgttgtgttgttatttatgttaacatattaatgtgctcattcttccaggtccagaaaaaactcatttgtgatccctcctccttgtacctctctggaatttgcaatctcttattcctgcaaatctaaagtatggcacttattgcatagtattttacttatttgtctgacttcaaaggtagtttgttggatatccca

SEQ ID NO: 70695 - DNA, 562 bp, Homo sapiens
cagcaagtaaagaagatatacagtcttgaaatctctcactatccccaaggagaggtggtctggggaaaggatatgctgctggacaaaccattttagggcaggaaacatgtttcccattactatggtctttatggtactaaggtgagaaatggccttgtcaattgcatgcggctttaggggagaagacaaatatactacttgagcaccaagtactctgggtttgggtgctgctgtttataggggttgtctgggaaaactagctgcctagcacctagagattttggggcctgtggctcattgcagcatytcctactagctgaggaggcccctagacctcctcgcagctgagttatggggagttctttctaggagaaaggagaagtaagccccagtaccaacaagctcattgttcagccaattctgagagaaccctcagagtcatttttagacaatcctgcttctcgtaaccacataaaactacctacagatgacacatatcagcatagtatgataagtgacaatattagtattgttactttgtcgctatgataataacatttta

SEQ ID NO: 70696 - DNA, 2608 bp, Homo sapiens
ggatcccattatataattctcagagcggagaaagtgactcctttgatccatccccactatctagggctctcccaaattccctgctgtgcttgtccaaaagtaatgaggtctctgagcaatcaagagcgtggtccaagtgacatgtgcattttcaggcgatacattacattttaatgttcattttctaattagtgtctaatatcaaagaacatatgattaaatacatattatagtaccaggcactgatcaaagcattttgtactcgtaagcttatttcgtcctcaccatagctctccaaaggaggtaytgtctctgttttacacattagaaaacaaaaacatagaaaagacactcacttcctttccgaatcgaaggcccggcttggcacttcctggaatggaagcccacttttttttatgctatactgtgcagacttcactgctgaacttcacattgactcttgcttgccctcagacagcatgaagacttcatcattgcatcaggtctttttctggtgagagagctatcacttaaactactttaagtaaaaatgagatttttgttctttacctcatattactgaaatgttcaggtgtacttccagacctagcttcagacttacctgtttccaaatgtcccaaagacattgtcagaatgctattaacatctcctgttttctgatccaccttctgtgttggcttcattctcatgtaggatgtttttcctgtggtgacagacacagtcttaccttttatcagctgagcaatgctagcagaacttgctgaaaattaaagttgctgtgttagtctgttttatgctgctgataaagacatacctgagactgggtaatttataaagaaaaagaggcttaatggactcagagttccacatagctggagaggcctcacaatcatggcagaaggcaaaaggcacatcttacatggcagcaggcaaagagagagaatgagagccaagccaaagggaaaacttctcataagatctcatgagacttattcactaccatgagaacagtatgggggaaactggccccatgattcaattatctcccactgggtccctcccacaatacctgggaattacgggagctacaattcaagataagatttggataaaccaaaccatatcagttgtcttaatagttccttccctccacaacttcaggtgaaatatggaaaagaaagttatattgcaagtcttgttgaggttgttgtattttaaacattcatttgtaagagttcctttatgtttgacccttttcttttttggctgctaataaaattaagacttaaaggagaggcctggtaggataagaaaaagacctaaatttgagggtcagaatcatttattaagtttcatttctaatatatgtgtcttcggagaagtcttgctatataaatggagtcataatggaatagatggggttacattatttgatctctgaggtcctttctggctctcaagctctatggagctgtccaagatgactttcgtaggggatcctgagtgtttaatgaaaggattttaacctatcacccagactttctggttcccaaacccatagatgatacagaatccaggaacccttctcattaataataacaggaaggctgctggtgggttttagggattaaagtcagaaggtatctctctgggattgagaaaaaaatatattctgactgagtctggggaagagagtggtgatgaagaaaaatgaaggcattagggtctcattctaatttgttaccttcacacttttgcttgaaggctgagtcctccatcatctgagtagattaaagtaaggtgagaaactgccctgtatggggggcagatgttaaggatatataattgcctactggaggggtgaggagactgaaagtcagggagtcagcctgaagctgtggggatcagaagtgggaacccaggagtggggaaagtgggtggatagtgggaaatctggaaatccatgatcccgagggagaggcacagcatacaaggctgaaaaatagaaaatggttcttaggcagtttcaggtctcaactgttcagttatacctttatttttttcaatcgtttctataagctagattcaaataaactaacttaaaagaggcaaacctacaagcaagaaaatatcaacttgaatgccaatttaagtaatttaccaagataagtttaactacctatataactggactacaatgctggaaaatctattctggaagtgattttaaaatgagaggcttgtctggtgagcacagaggtagaacaaggggagatagtcttaggacataaatgtttaataacaacggctgatagcccagggtgtcttcacaagagggacacacggggattggaaggctcaagatcatgaactagggccccactaacctgccaatgctaggctctctgattctgttttccaaagtcccagggtgtctctttcccatctcttatccttggcacactcattttttagataagctagtaccttttattatagaggatccattttaaaaatcttggttgtttactccaaatcattttgtctctaaggcatcttctgcatgtatatatatatatatatatat

SEQ ID NO: 70697 - DNA, 742 bp, Homo sapiens
taagtaaaataggattaaattttcttctagaggtagatgtttattgtttatatgactgagaaattcagaagtttcaaaaatatattttgatatacataaagacaattctactttttggccatttgaaatctctcaatatcttgtttaatcaatatacacactatctgaaaatcttaaacattaccagtttacaatatacattaaacatcttcaattctgagtgacagaatcatcattcttatgctcctttagaacataaatttaattgactcttctagatatactgtagctgcaatcacattcatgctccttttctttatcccatatgttcacaaacaattaaaataataacaaaataatagctgcccctggttccactataaaaatagtgctttagaaagagtttatttcaggttatcaaacactacttattttcacagtttcaagtctatcggcaaaattctattttcccataattttaatttctaccagcttagattatagtccttggagttgatgtttctcaaactaatcaagcttctttattgaaaaagaactttttcccacatttattttgtatctcccagttgtgactactttcagtgttttaattgcaggttagtttgggctatctgcataaagatgaattagtttggaagccaaatttcattactccwactacaaagataggctcaataacagatgcaacaaattttaactatcatttccgtcgggatcacag

SEQ ID NO: 70698 - DNA, 1117 bp, Homo sapiens
gtagatctgtttgacctgtaactcacctcagaacccagagtttcttaactcttgtgtttctgccacattgaccacttytcttttaattttaatgtcacaactaagtttgatacttctgcctttttttaaaaaaacaaaaaacaaacaaaaaaaaaacaacctcccaacagcctacagtggtcattctagcttaactacttttatgaggcagcagaattccttattttaaaataataaggagtcttacaaatttgaatttggaagctagaaatattgaatttatagttatatctgagatgtaaaaatttataacatctcagagatacaagtcatgactccatgactcattacagccacacatcacttaacaagtggaatacattctgaaaaacgtgtcttttggcaattttgttgttgcatgaatattaaagggcatacttaaacaaacctactacacacttaggctatttagtacagcctattgcttctaggcctcaaacctgcacaatcattatcatattaaatactgtaggctattgtagtacaaaggtaagtattgtgtgttaactatctaaacataggaaaagtaatgtgttgtgctatgacattatgacaactacagtgtcattcaggaataggaattttccactccattataatcttatgtgatcaaaacgttgtcatggagtaccaactgtactctaaaattaaattttttaaagggttgatgcctgtggatgaaatcttaactggatgttctaatctctaagaaagttaaaaatcaaatttcccccaaaactgaccaacaatagaagaaattggtttgaaatatcttcaaatttttatttcaagctatgtaatttcaagcaaaaaaaatcaaataatataggcatttatttgctaatataggtatttatttgctaatagcaaaatgttgactctatccactcctgctgcttctagctgggaagacacaccaagtgatagtaagtatttgtatcaactaaagagttaactaagagaagtgaacaagaaagcaaataagcatttttaaaaatttccttaatatacaccaatccatctcatataattatggtcaatatttatggaggaatat

SEQ ID NO: 70699 - DNA, 1117 bp, Homo sapiens
gtagatctgtttgacctgtaactcacctcagaacccagagtttcttaactcttgtgtttctgccacattgaccacttttcttttaattttaatgtcacaactaagtttgatacttctgcctttttttaaaaaaacaaaaaacaaacaaaaaaaaaacaacctcccaacagcctacagtggtcattctagcttaactacttttatgaggcagcagaattccttattttaaaataataaggagtcttacaaatttgaatttggaagctagaaatattgaatttatagttatatctgagatgtaaaaatttataacatctcagagatacaagtcatgactccatgactcattacagccacacatcacttaacaagtggaatacattctgaaaaacgtgtcttttggcaattttgttgttgcatgaatattaaagggcatacttaaacaaacctrctacacacttaggctatttagtacagcctattgcttctaggcctcaaacctgcacaatcattatcatattaaatactgtaggctattgtagtacaaaggtaagtattgtgtgttaactatctaaacataggaaaagtaatgtgttgtgctatgacattatgacaactacagtgtcattcaggaataggaattttccactccattataatcttatgtgatcaaaacgttgtcatggagtaccaactgtactctaaaattaaattttttaaagggttgatgcctgtggatgaaatcttaactggatgttctaatctctaagaaagttaaaaatcaaatttcccccaaaactgaccaacaatagaagaaattggtttgaaatatcttcaaatttttatttcaagctatgtaatttcaagcaaaaaaaatcaaataatataggcatttatttgctaatataggtatttatttgctaatagcaaaatgttgactctatccactcctgctgcttctagctgggaagacacaccaagtgatagtaagtatttgtatcaactaaagagttaactaagagaagtgaacaagaaagcaaataagcatttttaaaaatttccttaatatacaccaatccatctcatataattatggtcaatatttatggaggaatat

SEQ ID NO: 70700 - DNA, 1117 bp, Homo sapiens
gtagatctgtttgacctgtaactcacctcagaacccagagtttcttaactcttgtgtttctgccacattgaccacttttcttttaattttaatgtcacaactaagtttgatacttctgcctttttttaaaaaaacaaaaaacaaacaaaaaaaaaacaacctcccaacagcctacagtggtcattctagcttaactacttttatgaggcagcagaattccttattttaaaataataaggagtcttacaaatttgaatttggaagctagaaatattgaatttatagttatatctgagatgtaaaaatttataacatctcagagatacaagtcatgactccatgactcattacagccacacatcacttaacaagtggaatacattctgaaaaacgtgtcttttggcaattttgttgttgcatgaatattaaagggcatacttaaacaaacctactacacacttaggctatttagtacagcctattgcttctaggcctcaaacctgcacaatcattatcatattaaatactgtaggctattgtagtacaaaggtaagtattgtgtgttaactatctaaacataggaaaagtaatgtgttgtgctatgwcattatgacaactacagtgtcattcaggaataggaattttccactccattataatcttatgtgatcaaaacgttgtcatggagtaccaactgtactctaaaattaaattttttaaagggttgatgcctgtggatgaaatcttaactggatgttctaatctctaagaaagttaaaaatcaaatttcccccaaaactgaccaacaatagaagaaattggtttgaaatatcttcaaatttttatttcaagctatgtaatttcaagcaaaaaaaatcaaataatataggcatttatttgctaatataggtatttatttgctaatagcaaaatgttgactctatccactcctgctgcttctagctgggaagacacaccaagtgatagtaagtatttgtatcaactaaagagttaactaagagaagtgaacaagaaagcaaataagcatttttaaaaatttccttaatatacaccaatccatctcatataattatggtcaatatttatggaggaatat

SEQ ID NO: 70701 - DNA, 1117 bp, Homo sapiens
gtagatctgtttgacctgtaactcacctcagaacccagagtttcttaactcttgtgtttctgccacattgaccacttttcttttaattttaatgtcacaactaagtttgatacttctgcctttttttaaaaaaacaaaaaacaaacaaaaaaaaaacaacctcccaacagcctacagtggtcattctagcttaactacttttatgaggcagcagaattccttattttaaaataataaggagtcttacaaatttgaatttggaagctagaaatattgaatttatagttatatctgagatgtaaaaatttataacatctcagagatacaagtcatgactccatgactcattacagccacacatcacttaacaagtggaatacattctgaaaaacgtgtcttttggcaattttgttgttgcatgaatattaaagggcatacttaaacaaacctactacacacttaggctatttagtacagcctattgcttctaggcctcaaacctgcacaatcattatcatattaaatactgtaggctattgtagtacaaaggtaagtattgtgtgttaactatctaaacataggaaaagtaatgtgttgtgctatgacattatgacaactacagtgtcattcaggaataggaattttccactccattataatcttatgtgatcaaaacgttgtcatggagtaccaactgtactctaaaattaaattttttaaagggttgatgcctgtggatgaaatcttaactggatgttctaatctctaagaaagttaaaaatcaaatttcccccaaaactgaccaacaatagaagaaattggtttgaaatatcttcaaatttttatttcaagctatgtaatttcaagcaaaaaaaatcaaataatataggcatttatttgctaatataggtatttatttgctaatagcaaaatgttgactctatccactcctgctgcttctagctgggaagacacaccaagtgatagtaagtatttgtatcaactaaagagttaactaagagaagtgaacaagaaagcaaataagcatttttaaaaatttccttaatatacmccaatccatctcatataattatggtcaatatttatggaggaatat

SEQ ID NO: 70702 - DNA, 1370 bp, Homo sapiens
atgttgcatgtacaaattgaggatataactggcaggcagccaagaatatgcaactatggtactgtatctattaaaatagtatcatgaatagtcagttaaaattatcctattcatgtaatctttctcaaaaaagaacataaaatgtatgattacttctactagagatggaccaatattttagtataagtaaatgcgagaatgtaaaaacaagtcattaaaatttgtcaacaattaaaatgaaaacaaacattttttccagaaaaatgttcagctctattttcaataaagactatctttgaccaaaagaagaaaagaaagataaataatagtaatttaaactggtgttcagtataatccagatttgtggggctaccaggtttttttttatatttcacaatcatttgaagaagttccatttcaaaactatcaatggtgtttttgtaagtttccaaaatagacaattccagcaaattcagttatagtccatggcaggatttcttatagatgagactgaggaaacatgtaaaatgcaaaaacatacaggcctaagaacttcatacatagaaaagaggtgatggaggtgagaagccgtgctgttcccaagcagagagaagagcatgggccatgctaaggatatctgaattggaatgacctactggggaatcaaaatggagagatatagatgaagcagaaaaaacactgagggaggagtggaaattgaagaaataaatttaggttaggcacactggcaaatgactttgtgtgtcatattaggcaatggagagatattgacatcaattcaattgggagagtgatttgaatagattttgctgtaaaactagcatcgcctttgtgtgtgtgcagggtgtatatattaggatgtgaatgggtattggaaactcagttttagacatttcttaaaaaattaattccttatcattacagtttctgtcaatgtctacacatcctgtttctgtagcaagaagtagtgcaaattttcaatgtaacaattaaatttcttataaaaagaaaaagattattttgtgtattgatagtatattctctgaataaaataatttcaacccattaatccttctggattttcataacttctcattgaataacttctcccttatttatttatggtttcytatacaaattaggtattttaacactcagttataatatagtatgtggagattaaatagagctttagaaacagcatttacatatctatatagttttataatctcatgtataccattacttttaaatagagactaaaagtttactcattgataatctattggtaagagccaatcaatgaatgttcccgaagtcgtaataggtttaaacaaaattgaaaatca

SEQ ID NO: 70703 - DNA, 642 bp, Homo sapiens
tttcctaacaactccctccctgactttggcagggaggagacagaagagcctcccctcctccatgcccccattaccagcaccacctccattgctatccgtgtttagcccttgtttcttcctctctctggctgcacagccccctcactcatccctgcctacaagaaaactgaagggcaggcaccagctctgtgcctggtgactcaccatgcccggggggcagaggcagccagagacacagcccatgctcatgcactccaggtcrtagttctggcacgttttggtacactcgagcccttcagcccgcaggttgtcagcgggacacaccagcttgaccatggggggccgacaggataggctccttttgcctcgaaggtaggaaaagcaaagagatgattagtgaaggagagaatggacctaccttccacactgtcctttggtcccctagagtctgtgactaaattcaagagactcagagttgcccactcacggggaccagcagctgcctgagccagggtccctgtgtgggactgggagggcatcttctcacctgggcttctgacctctggcttacattggtggcagctcttctgaccccagctctcatctaatgtcccatacttgtcatcacccttaaccttgcta

SEQ ID NO: 70704 - DNA, 642 bp, Homo sapiens
tttcctaacaactccctccctgactttggcagggaggagacagaagagcctcccctcctccatgcccccattaccagcaccacctccattgctatccgtgtttagcccttgtttcttcctctctctggctgcacagccccctcactcatccctgcctacaagaaaactgaagggcaggcaccagctctgtgcctggtgactcaccatgcccggggggcagaggcagccagagacacagcccatgctcatgcactccaggtcatagttctggcacgttttggyacactcgagcccttcagcccgcaggttgtcagcgggacacaccagcttgaccatggggggccgacaggataggctccttttgcctcgaaggtaggaaaagcaaagagatgattagtgaaggagagaatggacctaccttccacactgtcctttggtcccctagagtctgtgactaaattcaagagactcagagttgcccactcacggggaccagcagctgcctgagccagggtccctgtgtgggactgggagggcatcttctcacctgggcttctgacctctggcttacattggtggcagctcttctgaccccagctctcatctaatgtcccatacttgtcatcacccttaaccttgcta

SEQ ID NO: 70705 - DNA, 642 bp, Homo sapiens
tttcctaacaactccctccctgactttggcagggaggagacagaagagcctcccctcctccatgcccccattaccagcaccacctccattgctatccgtgtttagcccttgtttcttcctctctctggctgcacagccccctcactcatccctgcctacaagaaaactgaagggcaggcaccagctctgtgcctggtgactcaccatgcccggggggcagaggcagccagagacacagcccatgctcatgcactccaggtcatagttctggcacgttttggtacactcgagcccttcagcccgcaggttgtcagcgggacacaccagcttgaccatggggggccgacaggataggctccttttgcctcgaaggtaggaaaagcaaagagatgattagtgaaggagagaatggacctaccttccacactgtcctttggtcccctagagtctgtgactaaattcaagagactcagagttgcccactcrcggggaccagcagctgcctgagccagggtccctgtgtgggactgggagggcatcttctcacctgggcttctgacctctggcttacattggtggcagctcttctgaccccagctctcatctaatgtcccatacttgtcatcacccttaaccttgcta

SEQ ID NO: 70706 - DNA, 642 bp, Homo sapiens
tttcctaacaactccctccctgactttggcagggaggagacagaagagcctcccctcctccatgcccccattaccagcaccacctccattgctatccgtgtttagcccttgtttcttcctctctctggctgcacagccccctcactcatccctgcctacaagaaaactgaagggcaggcaccagctctgtgcctggtgactcaccatgcccggggggcagaggcagccagagacacagcccatgctcatgcactccaggtcatagttctggcacgttttggtacactcgagcccttcagcccgcaggttgtcagcgggacacaccagcttgaccatggggggccgacaggataggctccttttgcctcgaaggtaggaaaagcaaagagatgattagtgaaggagagaatggacctaccttccacactgtcctttggtcccctagagtctgtgactaaattcaagagactcagagttgcccactcayggggaccagcagctgcctgagccagggtccctgtgtgggactgggagggcatcttctcacctgggcttctgacctctggcttacattggtggcagctcttctgaccccagctctcatctaatgtcccatacttgtcatcacccttaaccttgcta

SEQ ID NO: 70707 - DNA, 642 bp, Homo sapiens
tttcctaacaactccctccctgactttggcagggaggagacagaagagcctcccctcctccatgcccccattaccagcaccacctccattgctatccgtgtttagcccttgtttcttcctctctctggctgcacagccccctcactcatccctgcctacaagaaaactgaagggcaggcaccagctctgtgcctggtgactcaccatgcccggggggcagaggcagccagagacacagcccatgctcatgcactccaggtcatagttctggcacgttttggtacactcgagcccttcagcccgcaggttgtcagcgggacacaccagcttgaccatggggggccgacaggataggctccttttgcctcgaaggtaggaaaagcaaagagatgattagtgaaggagagaatggacctaccttccacactgtcctttggtcccctagagtctgtgactaaattcaagagactcagagttgcccactcacggggaccagcrgctgcctgagccagggtccctgtgtgggactgggagggcatcttctcacctgggcttctgacctctggcttacattggtggcagctcttctgaccccagctctcatctaatgtcccatacttgtcatcacccttaaccttgcta

SEQ ID NO: 70708 - DNA, 2009 bp, Homo sapiens
aacaaacgcctaaccaaaggatgacattaataataataacaaggcttttatgtagcacattaccatttcaaaacactccctcatctcattcactgctcacaaatactttgagaagtaatttaggcaggtgttatacacccattttgcacatgagaaactaaggctgaggaggattcaatgactcgcttaaggtcctatggccagtaaagaacagcacagagactaaaaacaagaggtctgggtgcaaatcccagtacccttttgtgctcccctaaaggcagatgagtgtagtctctatgcaaagtaccatgaagcaacaatgatgggaaactcagctccaggattctgttcagctttgcaatcaatcgagaaaaaaaaaatgctccttcctgcttggctggggcagcttcctctcatgacaagggatattggagggaacaacactgtacagagagcacctgggcggttgtccctggaggacacttagaggtcaaaagacacctgcccaactggcatagcacaagttcgaactcctctaaaaataacagagtggacagagtcaccccatgccatatggaactcattatcctaggagcctatacaaatcaagtattaataggccaaagaaggctttgaataatgatttggtcaattgatccaaattggattattaagaagggagttgggctattagtgttcccccttgtgtttgcagaaaatgctaagacagagatgtattcagcggacttgataggagcagatccagagcagagttttctgtgctcttgtgtggacaatttctgtggttttgataaacagtcccctagagaactattgaaactccttggcattgtgacagggctaatgtcaatgagagaatccaaatcataggctttattttcttccacttctaattttgagtcttacrgactttggaattgattcatttctgactatctagattaaaaaacacacaaaaatattggtttaatatgtcatgttttctagtgagctgtgctaacccctatagtcttatggtctggatcctattgaaggtctttttcaccttcaacaaggacagttttggggttttttggtgatgatctatttataaatttccttgcaccagggactcttccaggttgagtttttggggggaggaggggatcaaaggacaatgaggaagaaaaaagtgaagaaaaggctttataagtttatagggacggagcaaatagaaaaggtaagagaacatgcaaggcacaacgtgaggtaaataaaaatggtggcggttccacgaagagcctcactcaccatgtactacttcagcaaataaatgggaagagaagacaaaaaattccagaaaagaaggaagtggaacagagaactagaagaacagaaaaaaggagggaaagaataagaaccttgaaaaagaaaaggatgcaacctgaagttaaagatgaaccattcaaggcagcaacactgagacctgaagaacaagactccaaaagtaactaaagggctgtgagaagattaagggaagcggggctgtagaagtggagatgtatccaagaagtccccaggagctcttccctagataacaaagtatgcagcaatcaaacctgggaacgactctaccccctcactctccatctcccccagaaccatctcacacattctttgtcctaaattatctctctattaagtatgtctgacacacaccaagccggctgccgggatggccacaatctaaaataaacaacgacgaggaaggcgtccatgataacatagggctctaatcacccaagattcttatggtccctgttgctatcagcagccactgagctgggagtcatgcctggtccagttaatccctcccatgacatgaggacggtttcccaaggaaaagctgtaaatctttgtcattcctcctccagacttccagctcattagagcagttagagacgcactgagcacgtaataacagatcattagacgcatattggacagca

SEQ ID NO: 70709 - DNA, 2009 bp, Homo sapiens
aacaaacgcctaaccaaaggatgacattaataataataacaaggcttttatgtagcacattaccatttcaaaacactccctcatctcattcactgctcacaaatactttgagaagtaatttaggcaggtgttatacacccattttgcacatgagaaactaaggctgaggaggattcaatgactcgcttaaggtcctatggccagtaaagaacagcacagagactaaaaacaagaggtctgggtgcaaatcccagtacccttttgtgctcccctaaaggcagatgagtgtagtctctatgcaaagtaccatgaagcaacaatgatgggaaactcagctccaggattctgttcagctttgcaatcaatcgagaaaaaaaaaatgctccttcctgcttggctggggcagcttcctctcatgacaagggatattggagggaacaacactgtacagagagcacctgggcggttgtccctggaggacacttagaggtcaaaagacacctgcccaactggcatagcacaagttcgaactcctctaaaaataacagagtggacagagtcaccccatgccatatggaactcattatcctaggagcctatacaaatcaagtattaataggccaaagaaggctttgaataatgatttggtcaattgatccaaattggattattaagaagggagttgggctattagtgttcccccttgtgtttgcagaaaatgctaagacagagatgtattcagcggacttgataggagcagatccagagcagagttttctgtgctcttgtgtggacaatttctgtggttttgataaacagtcccctagagaactattgaaactccttggcattgtgacagggctaatgtcaatgagagaatccaaatcataggctttattttcttccacttctaattttgagtcttacagaytttggaattgattcatttctgactatctagattaaaaaacacacaaaaatattggtttaatatgtcatgttttctagtgagctgtgctaacccctatagtcttatggtctggatcctattgaaggtctttttcaccttcaacaaggacagttttggggttttttggtgatgatctatttataaatttccttgcaccagggactcttccaggttgagtttttggggggaggaggggatcaaaggacaatgaggaagaaaaaagtgaagaaaaggctttataagtttatagggacggagcaaatagaaaaggtaagagaacatgcaaggcacaacgtgaggtaaataaaaatggtggcggttccacgaagagcctcactcaccatgtactacttcagcaaataaatgggaagagaagacaaaaaattccagaaaagaaggaagtggaacagagaactagaagaacagaaaaaaggagggaaagaataagaaccttgaaaaagaaaaggatgcaacctgaagttaaagatgaaccattcaaggcagcaacactgagacctgaagaacaagactccaaaagtaactaaagggctgtgagaagattaagggaagcggggctgtagaagtggagatgtatccaagaagtccccaggagctcttccctagataacaaagtatgcagcaatcaaacctgggaacgactctaccccctcactctccatctcccccagaaccatctcacacattctttgtcctaaattatctctctattaagtatgtctgacacacaccaagccggctgccgggatggccacaatctaaaataaacaacgacgaggaaggcgtccatgataacatagggctctaatcacccaagattcttatggtccctgttgctatcagcagccactgagctgggagtcatgcctggtccagttaatccctcccatgacatgaggacggtttcccaaggaaaagctgtaaatctttgtcattcctcctccagacttccagctcattagagcagttagagacgcactgagcacgtaataacagatcattagacgcatattggacagca

SEQ ID NO: 70710 - DNA, 2009 bp, Homo sapiens
aacaaacgcctaaccaaaggatgacattaataataataacaaggcttttatgtagcacattaccatttcaaaacactccctcatctcattcactgctcacaaatactttgagaagtaatttaggcaggtgttatacacccattttgcacatgagaaactaaggctgaggaggattcaatgactcgcttaaggtcctatggccagtaaagaacagcacagagactaaaaacaagaggtctgggtgcaaatcccagtacccttttgtgctcccctaaaggcagatgagtgtagtctctatgcaaagtaccatgaagcaacaatgatgggaaactcagctccaggattctgttcagctttgcaatcaatcgagaaaaaaaaaatgctccttcctgcttggctggggcagcttcctctcatgacaagggatattggagggaacaacactgtacagagagcacctgggcggttgtccctggaggacacttagaggtcaaaagacacctgcccaactggcatagcacaagttcgaactcctctaaaaataacagagtggacagagtcaccccatgccatatggaactcattatcctaggagcctatacaaatcaagtattaataggccaaagaaggctttgaataatgatttggtcaattgatccaaattggattattaagaagggagttgggctattagtgttcccccttgtgtttgcagaaaatgctaagacagagatgtattcagcggacttgataggagcagatccagagcagagttttctgtgctcttgtgtggacaatttctgtggttttgataaacagtcccctagagaactattgaaactccttggcattgtgacagggctaatgtcaatgagagaatccaaatcataggctttattttcttccacttctaattttgagtcttacagactttggaattgattcatttctgactatctagatwaaaaaacacacaaaaatattggtttaatatgtcatgttttctagtgagctgtgctaacccctatagtcttatggtctggatcctattgaaggtctttttcaccttcaacaaggacagttttggggttttttggtgatgatctatttataaatttccttgcaccagggactcttccaggttgagtttttggggggaggaggggatcaaaggacaatgaggaagaaaaaagtgaagaaaaggctttataagtttatagggacggagcaaatagaaaaggtaagagaacatgcaaggcacaacgtgaggtaaataaaaatggtggcggttccacgaagagcctcactcaccatgtactacttcagcaaataaatgggaagagaagacaaaaaattccagaaaagaaggaagtggaacagagaactagaagaacagaaaaaaggagggaaagaataagaaccttgaaaaagaaaaggatgcaacctgaagttaaagatgaaccattcaaggcagcaacactgagacctgaagaacaagactccaaaagtaactaaagggctgtgagaagattaagggaagcggggctgtagaagtggagatgtatccaagaagtccccaggagctcttccctagataacaaagtatgcagcaatcaaacctgggaacgactctaccccctcactctccatctcccccagaaccatctcacacattctttgtcctaaattatctctctattaagtatgtctgacacacaccaagccggctgccgggatggccacaatctaaaataaacaacgacgaggaaggcgtccatgataacatagggctctaatcacccaagattcttatggtccctgttgctatcagcagccactgagctgggagtcatgcctggtccagttaatccctcccatgacatgaggacggtttcccaaggaaaagctgtaaatctttgtcattcctcctccagacttccagctcattagagcagttagagacgcactgagcacgtaataacagatcattagacgcatattggacagca

SEQ ID NO: 70711 - DNA, 2009 bp, Homo sapiens
aacaaacgcctaaccaaaggatgacattaataataataacaaggcttttatgtagcacattaccatttcaaaacactccctcatctcattcactgctcacaaatactttgagaagtaatttaggcaggtgttatacacccattttgcacatgagaaactaaggctgaggaggattcaatgactcgcttaaggtcctatggccagtaaagaacagcacagagactaaaaacaagaggtctgggtgcaaatcccagtacccttttgtgctcccctaaaggcagatgagtgtagtctctatgcaaagtaccatgaagcaacaatgatgggaaactcagctccaggattctgttcagctttgcaatcaatcgagaaaaaaaaaatgctccttcctgcttggctggggcagcttcctctcatgacaagggatattggagggaacaacactgtacagagagcacctgggcggttgtccctggaggacacttagaggtcaaaagacacctgcccaactggcatagcacaagttcgaactcctctaaaaataacagagtggacagagtcaccccatgccatatggaactcattatcctaggagcctatacaaatcaagtattaataggccaaagaaggctttgaataatgatttggtcaattgatccaaattggattattaagaagggagttgggctattagtgttcccccttgtgtttgcagaaaatgctaagacagagatgtattcagcggacttgataggagcagatccagagcagagttttctgtgctcttgtgtggacaatttctgtggttttgataaacagtcccctagagaactattgaaactccttggcattgtgacagggctaatgtcaatgagagaatccaaatcataggctttattttcttccacttctaattttgagtcttacagactttggaattgattcatttctgactatctagattaaaaaacacacaaaaatattggtttaatatgtcatgttttctagtgagctgtgctaacccctayagtcttatggtctggatcctattgaaggtctttttcaccttcaacaaggacagttttggggttttttggtgatgatctatttataaatttccttgcaccagggactcttccaggttgagtttttggggggaggaggggatcaaaggacaatgaggaagaaaaaagtgaagaaaaggctttataagtttatagggacggagcaaatagaaaaggtaagagaacatgcaaggcacaacgtgaggtaaataaaaatggtggcggttccacgaagagcctcactcaccatgtactacttcagcaaataaatgggaagagaagacaaaaaattccagaaaagaaggaagtggaacagagaactagaagaacagaaaaaaggagggaaagaataagaaccttgaaaaagaaaaggatgcaacctgaagttaaagatgaaccattcaaggcagcaacactgagacctgaagaacaagactccaaaagtaactaaagggctgtgagaagattaagggaagcggggctgtagaagtggagatgtatccaagaagtccccaggagctcttccctagataacaaagtatgcagcaatcaaacctgggaacgactctaccccctcactctccatctcccccagaaccatctcacacattctttgtcctaaattatctctctattaagtatgtctgacacacaccaagccggctgccgggatggccacaatctaaaataaacaacgacgaggaaggcgtccatgataacatagggctctaatcacccaagattcttatggtccctgttgctatcagcagccactgagctgggagtcatgcctggtccagttaatccctcccatgacatgaggacggtttcccaaggaaaagctgtaaatctttgtcattcctcctccagacttccagctcattagagcagttagagacgcactgagcacgtaataacagatcattagacgcatattggacagca

SEQ ID NO: 70712 - DNA, 1452 bp, Homo sapiens
ccccagccagtatagagacttggttggcatcttctgctgcagggactaaaagtatttgactggggcacatgtggctgttgtcattctttctgcatcccactgttcccctccaatttatgttattttctaccctgtttttcagttccatctctgctctgtcctatagctttataaaaccagagtgtgtggggctgaggtcaggagtataagtacctgccttaggcactattccttatataacaaaaatattaaatatttttttcctcagtaaaaggatgaaaattggtttcagttgtcttactctattccagtctttgcccactttcacacaaatgacaaggccaatatgttttgtttgttttttaatcattaagagtttttgtacaaaaggtgatggttttttttcttcattttaaaacaccagggtgtgggggagggatgcaaacaaataacaaaaaagatgcttttgtaacattattttccctgtttagaaagaaaaaaatcactccaatagtattgaaaagtccaaagatgaaatagtttcattttcttttcctaaggcttataaaaggccccctgcctgttgattccatccctcttttgtgtccagtggagccatgttactcttcagtggcccaggggttcactattaaagaaagatcagtccaggtttctgggcacatggcctaaacaggaagatggaagcatcagaggattaaaaacctttccccacagaaatgtgggcaagaagacacttccctgagccagcagaagggacaggtgcagcagcattccacacccagcgcagaggacagcagagccctcgatgtcccacttctgcttccgttccctttctagaagattgaaaaaaaggtcaaaaccacatgcctgtggagaaagtgcgacatgtttagaaatactggtagggaaccaggagtaagaaaagctttaccagcttttactacaaatggatgaaagacatcaggatcccaccaccgcaaggtaaagtgacttcccttttctggaacccctgtggcacaggagtaccaattttcctttccaacgaactggatttctggataggcattttggctgtatgtggacagataagaccacagtccttagcccaatcccagctatacagtcaccccaatttccacaaatgatgtgatggtaccgtataatcctgtaattgggaaatttcacatttttcctgtcctaatctcagaggtgggagaagcaagtctagaacatctccaggctcagactaaacgagagtacttggactgcaaccaagtaatcactgcaaagtagttccaagcagcaagaaataccagattctcatggaggctactatagggtacagaataacaacatgaaarcaatcaaccctgtataaataatgtttcttggcattttttttttaattaaagaaatccagtgtctcaaaaa

SEQ ID NO: 70713 - DNA, 681 bp, Homo sapiens
caggagacattatgggcacagccctgcagaacctggatggtctggtgcagatgcccagtggctrtggcgagcagaacatggtcttgtttgctcccatcatctatgtcttgcagtacctggagaaggcagggctgctgacggaggagatcaggtctcgggcagtgggtttcctggaaataggtaagttggttcagtctttctttcttgaacactctcctccactaggccctatgacagattgatgatacagggaattccagcccctcaagtgtcccatatccttgaacggcatgggggtgttttctgaagttgtcgctgtgatctaaaaccacatttggcttcccagggtaccagaaggagctgatgtacaaacacagcaatggctcatacagtgcctttggggagcgagatggaaatggaaacacatggtaatatcacccaattcccaatgagttctgtactccagagcataattcctgagccctctggaactattccactacctctccccttaacccctttccttcttgcactcagtcttctacctctttaatactgtttatttcaccctcatggatggtcaagtccctcgatcttcctgagcttgtgcctcccctgttcttgtcctcattggtgcccattaatgcctctcttttctaggcctgctatggcatatgttcc

SEQ ID NO: 70714 - DNA, 661 bp, Homo sapiens
attaattactagaacactttaccagtcctaacttaagctattgaatttgagaagcagcccccaaagcaggtttattattttatgtggttggcattttggcacaaaaagataaaagaacaaaaagggaaagaatttcacattattttaaaataccagcaggatacagattctggaaaatatgcttcctaccttatatggagaaaaaccaagaaaattaacttcacatgtaatctgatagatccaaaaggttatctgtatctgcacttgaaatccacaaattctgagtatgttcaattattcttaatgatgacaaaaattaacacgtcttcaaatttaaagtcatttctttttctctattaaatggtttttaaaaatcatttgtagagagacatattaagaggyaggtccgaggggaaagagagaaagagggagagaaaaagaaaggctaaggtctgagtagccaggaatgtggacaagtgtggttgtgagatctctctcctgggatcattaacaatctatgcttcctgacatctctggcgtgtcaacactaacttaacattagatgcctttgatagccacacctagatagtgggcaggatcccccttcaaacttatttccatatttatctaaaaacatcgtctcaggagggaaaaccacatt

SEQ ID NO: 70715 - DNA, 855 bp, Homo sapiens
tgcatgttttacagcagttgttcaaagcaatacaggaacagtaaggacagagccagtcattttacaamcacattctgttaaactgatgtctattagcagggtttttcctattttattaggaaggacttacacctgatatataacaaagcttgttttaatcaaggctcagaaaatgtttttcattagtttttttcctaaccatgaagaataactgctttgtaacacacatgctggctataaagcagacaaaaaattcactgtaggtgctgcctgactggcctctgtccgtgtttctgttggggctgcttaccacagcctctgcattatcattagctagtgtgttcacaataccaagttcccagtagcaaagaaaggtcaagctcttacgcatgccattcatttatctacactgtgcaggcgcactcaggtggcagggacaaagaccactcctttggcgcatctcaagttcagaattctcagtagaggggctccagctgtccttttgtcaggtgcccatgcctgctccaggcctgtgtggtcaggacacgtgttacagagtacagtgacattaatgatggggccatggatatggtcagcactcagaggatgttagtctcttcattgataaagtcacaaccacttttcctgttggaaataaaaagatttgacgtatccttgtctacagcaacacaggacaacagataatcagcaggtcatctaaatctgttcagagagaaaggagagctgtttcctgaaaatacatcttcccctgattttagtcttatttttttctgcctttattgctttctaccctcttcaaaccagcctcatttcctaaattaccttgaatatgca

SEQ ID NO: 70716 - DNA, 543 bp, Homo sapiens
gtaaaaatataaatttaaactgtgagtgacaaaataaacttccttaatatttgcctacatttagagaaatggagcattcagctcagaaaggaagaatgtctgtggttttaaggtaaaatccataytccaagactcagtgaagaaagttcagtgataaagaacagactactctcatcttatgaagaaatggagcaatttcacttggaaagactaggaagacaaaatgttacagacgtatttgttgtgccacaaaataggcaaggtcagttttgaacaataagaactccataaagtagaccagggcatctcagaagtgaggttccatgagcccaggtggggcacaggctgggtgatcttgagtggagaggaagaggggttttctgagcttcaagagctgggccacacagtgtgttggttttagctgggatggagttctagaacaaacctgcactttagaacacctttctacccacccccaaccacacaacttgctactattagtaaatgtataggctgaggcacggtggctcatgcctgtaatcc

SEQ ID NO: 70717 - DNA, 568 bp, Homo sapiens
caatacatgagatacatagaatattgtggtgggacaggggaaggaatgactaactcagttaagacttcccagaaacgtgaaatgtggagtcaaaagaaatcagacagaaattcaagaggtagttatgagaaagtcytaaggtaaaatctatatacagatacacatattatacaggaatgacaagtagttgtttatatttggagtgtgagctcatgctgagtgattgaagaaaattaaacttgaaaaataagttgggagaagattatgaaaggacttgtactccatgcaaaggaattttaatctctgcaaatgataaatagagatctttcagaagagtataaaataccataattgtacctcagaaagtgaaatgtgaacagtgggtaacagtggggagaagttgggggcagagaaaccagtttagagcacatagcaattatttataaataatatttacatttaaattatatatatgtttataaatcacatttgtattataagataacataaacttatataataacacaaaggaaataaaacctacagtcaagcaatgataataaaaaca

SEQ ID NO: 70718 - DNA, 757 bp, Homo sapiens
tacatgcccattacccaggtcatgtttttaaaaagggtgggggggagtgtcctttctgcatgggcattaatgtaaatgtaccactgcaaaatcaagttacagtcagagaaaccttatcaaatttgctatctcagcttcttctcatgagtctgacaaatgctaataaaaataatagattaacaaaagattggtgaagagtagagtttaaagactcatcgcaggaaagtggaaatgtttaaatggttattaagaaataggggaattttaaaaaccttggtgagatgaaactgagaggaaaacgaaaagcaaaaatgatgggactcatctcagcagagtgggaatctttagatagctattaagaaataaaatgagggactttatcaaagatggctgactagatgcagctgggaagtgctgtcctcacagagagaaaccaaaattttgactacaccaacataatttgaacagatctktgatgagaaaacaccaaatgtggatggggaaaagacacagttgctgagtcggaagagggggaaagctgggaatcccatgtggagtgcccaaatgctgtggctggtttctaaacaggacctgtcaaaggggtgagtaaataaaggggctggaggactgctcactcttgctgtggacctctaggatcctaccttcaggtgacttcactctaccatggacatggcagctggcaggagaatctccccagagattacacagagagagatgaagcaggcatagatcctgg

SEQ ID NO: 70719 - DNA, 757 bp, Homo sapiens
tacatgcccattacccaggtcatgtttttaaaaagggtgggggggagtgtcctttctgcatgggcattaatgtaaatgtaccactgcaaaatcaagttacagtcagagaaaccttatcaaatttgctatctcagcttcttctcatgagtctgacaaatgctaataaaaataatagattaacaaaagattggtgaagagtagagtttaaagactcatcgcaggaaagtggaaatgtttaaatggttattaagaaataggggaattttaaaaaccttggtgagatgaaactgagaggaaaacgaaaagcaaaaatgatgggactcatctcagcagagtgggaatctttagatagctattaagaaataaaatgagggactttatcaaagatggctgactagatgcagctgggaagtgctgtcctcacagagagaaaccaaaattttgactacaccaacataatttgaacagatctgtgatgagaaaacaccaaatgtggatggggaaaagacacagttgctgagtckgaagagggggaaagctgggaatcccatgtggagtgcccaaatgctgtggctggtttctaaacaggacctgtcaaaggggtgagtaaataaaggggctggaggactgctcactcttgctgtggacctctaggatcctaccttcaggtgacttcactctaccatggacatggcagctggcaggagaatctccccagagattacacagagagagatgaagcaggcatagatcctgg

SEQ ID NO: 70720 - DNA, 757 bp, Homo sapiens
tacatgcccattacccaggtcatgtttttaaaaagggtgggggggagtgtcctttctgcatgggcattaatgtaaatgtaccactgcaaaatcaagttacagtcagagaaaccttatcaaatttgctatctcagcttcttctcatgagtctgacaaatgctaataaaaataatagattaacaaaagattggtgaagagtagagtttaaagactcatcgcaggaaagtggaaatgtttaaatggttattaagaaataggggaattttaaaaaccttggtgagatgaaactgagaggaaaacgaaaagcaaaaatgatgggactcatctcagcagagtgggaatctttagatagctattaagaaataaaatgagggactttatcaaagatggctgactagatgcagctgggaagtgctgtcctcacagagagaaaccaaaattttgactacaccaacataatttgaacagatctgtgatgagaaaacaccaaatgtggatggggaaaagacacagttgctgagtcggaagagggggaaagctgggaatcccatgtggagtgcccaaatgytgtggctggtttctaaacaggacctgtcaaaggggtgagtaaataaaggggctggaggactgctcactcttgctgtggacctctaggatcctaccttcaggtgacttcactctaccatggacatggcagctggcaggagaatctccccagagattacacagagagagatgaagcaggcatagatcctgg

SEQ ID NO: 70721 - DNA, 1401 bp, Homo sapiens
aataagacgggaaaaagatgagaggggcagctggggacttgttcttccacctcctgcagacaatcagtggttaaatgttgttgtgctttgctacaaatacaagcatttttttgtggggagggagtagcaatttgtaaggttagttaatttcagctgctcagaaatgttaggtactgtttatagtttataaagcaaattaacaaataaaaaatacatgtccctaaaatatcaagctatgaaagtgttcataacagatacttcttcattattcctctcttcttagtagcagcaaaggtttaagatgattgaagcaaggaaaacttaaaggaaactttctcagcttaattgggagtttatgggcagtggtggtggtggggcgggggcggtaaaaactgccattctcctctgcactagaacacttaagcccagttcacaaaacagaagccatctccaggagtagagtttgggaaaaaaaaaaaaaaaaaaaaacaagaaaaaaacaacttatatgtaaggcaacctcagggagacagaaccacaaaaagaggattttaataaattttctagcagatatgacatccgacagattattttaatgcaaagcagatgaagaactaccctatgagtctaaactacacccattcacctttaatcatttggatcccttaatcctctaatcatgggatcattaacattcaaatatcctggaagattggcttatctgtattttaaaaggaagccggacctatagtttacgtcagttctttgaccattcgttggagctccggttttcagcctctttccgggctacctggtagcaatttgaggctctgtcatcagtttctgctacgtttcaaagatcctggagaagcctagtgttgtgtcaagacgccgatggacccatcacagtttaatccaacctacatcccagggtctccacaaatgctcaccgaagaaaattcccgggacgattcaggtaagccagataatgcccttcttgactatctgactataggggggttgggaggtcaaaaggctgccgtctttttttttttttttttttttttttttttaatgttgacttcagtctttgcaagaggaatgtatttaggtaaacctcaaaccagagggagtcaacacagagaggtcaaagactttattaaaagcggtgatggtggtggtgagaawtgtattattttattcactatgcttaggagtacttcagatttctttctttttttttctttttttttttttgagacggagtcttgctctgtcgcccaggctggagtgcagtggcgcgatctcggctcactccaagttccgcctcctgggttcacgccattctcctgcctcagcctcccaagtagctgggactacaggcgcccgccaccgcgcccg

SEQ ID NO: 70722 - DNA, 2404 bp, Homo sapiens
catggccgccacacccagctaatttttgtatttttagtagagacagggtttcaccatattggccaggatggtctcgatctcttgacctcgtgatccacctacctcagcctcccaaagtgctgggattacaggtgtgagccaccatgcccggccccaaatgtctcctttttaaagagctctcagcctctatttaaaattgcaacccaatggccatgcctccctccagcactggagattgtctcaactctgctttccttttctttttcagtagcacttatcaacttccagtagataatataatttactaatttaacacacctattatttatcacctttagaagcagatttctctgatgtatactatgcacccagcactgtacagaagagaattctgagcaggagaattggaccttttccagtatactgagacttcttccaaaacttaagaaaatgtttagctggaagatagtctgtgtcagtctgttttaaaatacaggcatgcacactgtgccatgatggctttcccatctcagtagtagactctgcttatcatgtccatcaacaatcagaaaataatgatttgttcctacatcaacactgcagttactcagttcatatatttgtttattgaactgagagcttctattaaattgtgaatatatcaaatagtgtttgttgagctgagagtctctttatgtgataagtttgtttctaaaactaattgctgctttagaatacctataatgcaaattattccgcctggtacccgctcctcctttgagaacaacgcttcccacctcgtcccacggttctggcaggagcagctctgttggtgcatggccttcttcctccccttggctacagttgacgggtccaaggatgggcatctgactttagctaatccaatcagagtcctgccttgagatttggctgactagaaccgaataagggaagctcgccctcagtgaaagctgcaagatgtaaaagtcaagggcaagagggtgctcatgtttcctcccaaatgaagaaagcagatctgtaaagagagagaagaaagctccgtgcagagaaaactcattccacacatgcccagaagatggactatattctttctgtccttccggttgatatttcattctttcttgattgttgttgttgctttgttttgacataatccttccaataaataccttgggatccatgctagtcccacttggggatctactccttgcagctcccaatccatgcattaagaggtcatgataaagacagtcacagctggccgggcacagtggcccacgcctgtaatcccagcactttgggaggccgaggcagrtggatcacctgaggtcagactggccaacatagtgaaaccctgtctctactaaaaatacaaaaataactgggcatggtggcaggtgactgtaatcccagctacttgggaggctgaggcaggagaattgcttgaacccaggaggcagaggttgcagcgagctgagatcaccccattgcactccagcctggccgacaagtgtgaaactcagtctcaaaaaacaaaacatgaccgggcgcggtggctcacgcctgtaatcccagcactttgggaggctgaggcgggtggatcatgaggtcgggagatcgagaccatcctggctaacatggtgaaaccccatctctactaaaaataaaaaaaaaaaaattagctgggcatggtagcgggtccctgtagtcccagctactcaggaggctgaggcaggagaatggcgtgaacctgggaggcggagcttgcagtgagccgagatcacgccactgcactccagcctgggcaactgagcaagactctgtctcaaaacaaaacaaaacaaaacaaaacaaaacacaaagacagtcacagcaactactgagacgggaaagctatcatggcatggtgtgcatgcctgtattttaaaacagacagatacttacagactatcttccggctaaacattttcctaagttttggaagaagtctcaataaattggaacaagtctcaattttcctgctcagaattctctgatgctcagatgatgatggttcaattggaggtagctcaccagggcaaacggcctgcttctgcactgccagaggaacgaaggtggaagccgctcaaaaagaggagcttcagttggagcaactcacctcagcactaaaagaaagatgtgaagtcccctggggaagtcagaagccgacaaaggatgacagagaaaactccagaaatgttaaagagaaagagatcaacaactggtacattaataatctgaatgatagaagaaacctagaaaatttgcaaactgcttcagttgatgaaacttttctcaattgtaataattatttgtccattccattattataaggcctctgttt

SEQ ID NO: 70723 - DNA, 2404 bp, Homo sapiens
catggccgccacacccagctaatttttgtatttttagtagagacagggtttcaccatattggccaggatggtctcgatctcttgacctcgtgatccacctacctcagcctcccaaagtgctgggattacaggtgtgagccaccatgcccggccccaaatgtctcctttttaaagagctctcagcctctatttaaaattgcaacccaatggccatgcctccctccagcactggagattgtctcaactctgctttccttttctttttcagtagcacttatcaacttccagtagataatataatttactaatttaacacacctattatttatcacctttagaagcagatttctctgatgtatactatgcacccagcactgtacagaagagaattctgagcaggagaattggaccttttccagtatactgagacttcttccaaaacttaagaaaatgtttagctggaagatagtctgtgtcagtctgttttaaaatacaggcatgcacactgtgccatgatggctttcccatctcagtagtagactctgcttatcatgtccatcaacaatcagaaaataatgatttgttcctacatcaacactgcagttactcagttcatatatttgtttattgaactgagagcttctattaaattgtgaatatatcaaatagtgtttgttgagctgagagtctctttatgtgataagtttgtttctaaaactaattgctgctttagaatacctataatgcaaattattccgcctggtacccgctcctcctttgagaacaacgcttcccacctcgtcccacggttctggcaggagcagctctgttggtgcatggccttcttcctccccttggctacagttgacgggtccaaggatgggcatctgactttagctaatccaatcagagtcctgccttgagatttggctgactagaaccgaataagggaagctcgccctcagtgaaagctgcaagatgtaaaagtcaagggcaagagggtgctcatgtttcctcccaaatgaagaaagcagatctgtaaagagagagaagaaagctccgtgcagagaaaactcattccacacatgcccagaagatggactatattctttctgtccttccggttgatatttcattctttcttgattgttgttgttgctttgttttgacataatccttccaataaataccttgggatccatgctagtcccacttggggatctactccttgcagctcccaatccatgcattaagaggtcatgataaagacagtcacagctggccgggcacagtggcccacgcctgtaatcccagcactttgggaggccgaggcaggtggatcacctgaggtcagactggccaacatagtgaaaccctgtctctactaaaaatacaaaaataactgggcatggtggcaggtgactgtaatcccagctacttgggaggctgaggcaggagaattgcttgaacccaggaggcagaggttgcagcgagctgagatcaccccattgcactccagcctggccgacaagtgtgaaactcagtctcaaaaaacaaaacatgaccgggcgcggtggctcacgcctgtaatcccagcactttgggaggctgaggcgggtggatcatgaggtcgggagatcgagaccatcctggctaacatggtgaaaccccatctctactaaaaataaaaaaaaaaaaattagctgggcatggtagcgggtccctgtagtcccagctactcaggaggctgaggcaggagaatggcgtgaacctgggaggcggagcttgcagtgagccgagatcacgccactgcactccagcctgggcaactgagcaagactctgtctcaaaacaaaacaaaacaaaacaaaacaaaacacaaagacagtcacagcaactactgagacgggaaagctatcatggcatggtgtgcatgcctgtattttaaaacagacwgatacttacagactatcttccggctaaacattttcctaagttttggaagaagtctcaataaattggaacaagtctcaattttcctgctcagaattctctgatgctcagatgatgatggttcaattggaggtagctcaccagggcaaacggcctgcttctgcactgccagaggaacgaaggtggaagccgctcaaaaagaggagcttcagttggagcaactcacctcagcactaaaagaaagatgtgaagtcccctggggaagtcagaagccgacaaaggatgacagagaaaactccagaaatgttaaagagaaagagatcaacaactggtacattaataatctgaatgatagaagaaacctagaaaatttgcaaactgcttcagttgatgaaacttttctcaattgtaataattatttgtccattccattattataaggcctctgttt

SEQ ID NO: 70724 - DNA, 701 bp, Homo sapiens
catcatgctatctgcaaaaagtgctacagagacagaggaggaaaggatgaattgtgtttcgatgatctttaagattcctttcgccgggcgctgtggcttacatctatattcccagcactttgggaggctaaggcaagaggatcgcttgaggtcaggagtatgagaccagcctgtccaacatggtgaaactccgtctgtactaaaaatacaaaaattagctgggtgtggtggcaggaacctgtaatcccagctaattgggaggccraggcaggagaattgcttgaattagggaggcggaggttgcagtgagctgagatcgcgccactggactccagactgggtgacagagtgaggaagtctccatctcaaaaaaaataaattcctttcagctctggtattcttagataccaagccttcttttcttagtatcttagatcttttcttcttgttgcagctggcccagagccttctgaatctcaacacagcagtagagaaggtttaaccttgccatcaccaggtactggtctgcttctgactgaatttcatctggtgtagatgtcattttagtctagttcagcagagttatcctgactcacgtttttaaattcggatggatgctcctcctaaacataagtctaccttagaagcctgggctagggcagaggaggaactgggtgcaggtcagtcattctcctgagcca

SEQ ID NO: 70725 - DNA, 701 bp, Homo sapiens
catcatgctatctgcaaaaagtgctacagagacagaggaggaaaggatgaattgtgtttcgatgatctttaagattcctttcgccgggcgctgtggcttacatctatattcccagcactttgggaggctaaggcaagaggatcgcttgaggtcaggagtatgagaccagcctgtccaacatggtgaaactccgtctgtactaaaaatacaaaaattagctgggtgtggtggcaggaacctgtaatcccagctaattgggaggccaaggcaggagaatygcttgaattagggaggcggaggttgcagtgagctgagatcgcgccactggactccagactgggtgacagagtgaggaagtctccatctcaaaaaaaataaattcctttcagctctggtattcttagataccaagccttcttttcttagtatcttagatcttttcttcttgttgcagctggcccagagccttctgaatctcaacacagcagtagagaaggtttaaccttgccatcaccaggtactggtctgcttctgactgaatttcatctggtgtagatgtcattttagtctagttcagcagagttatcctgactcacgtttttaaattcggatggatgctcctcctaaacataagtctaccttagaagcctgggctagggcagaggaggaactgggtgcaggtcagtcattctcctgagcca

SEQ ID NO: 70726 - DNA, 601 bp, Homo sapiens
catatatgtacacacacttttttttttttttttgaggcagagtctcgctctgtcacccgggctggagtgcagtggcgcgatctcagctcactgcaagctccgcctcccaggttcacgtcattctcctgcctcagcctcccaagtagctgggactacaggcgcccaccaccacgcccgactaattttttgtattttttagtagacacggggtttcactgttagccaggatggtctygatctcctgacctcgtgatccacccgcctcagcctcccaaagtgctgggattacaggagtgagccaccgtgcctagccaaaatattttcttttttaaccgagctccagggcaggggatgaagtctactccttgatgggctgagcaaggctgctctcctgtgatgtcattatctcctgttctaactcattccctactcccattttcttcttccctcaggcagctatcctaatgtgtgtaatgtgcatctttccctacgtgttcttgtaagatgtgtatagttaatatgtatgtaggtttccaaaacttttaattataaaatgctaatattttaataagtggtattttatagatgtcattccaatctt

SEQ ID NO: 70727 - DNA, 720 bp, Homo sapiens
tttataatagttttctgatgcattaaaaccaccttataattcaacacaccacttgcatgtagaaattaaaatgtattgatccacaactttcttcatgtttcagtttaagagtgattaaaggaaggagctgcatttttttcttttatatcactttcctgcaaaacggggagaaaacaaacacaggtgctttaaaattttcaaggtgcaaactaaattacacgatgcccaggagtgtgcagtagcatttctttgtttgagcatggaataaaagacagataattaggaaattgggagtctattaattttccaaatttactcatgcaagaaccactgagctatggtgatatttgcttacctcgtcattatgcaaaaatatattagctaattattttgactaatgcaattaagatatgcatatttagcataaaccatacaatagaaatgttacagtcagcaattgctgagttgcgctcatgggtaacagagaggcraaagtccctgctcagtctccaatggtaagccacaagattgctacaactctgcctgcactgttattattagtttggttgcagtaattaattttctttacagcatgactaggtggcacagctagcagtggtattaatttttgttatgagacacctgaagatgtcagcttttgagcagcaatgtttgcacctttaattgccttaatcagtggaaatgcagtatctttttcag

SEQ ID NO: 70728 - DNA, 1029 bp, Homo sapiens
ggtgtcgctgtcctcccacaaaagggagcacagaaagtgctgaagggagtaacacattggtgctgacggagtctcactgtgtcgtccaggctggagtgcggtgacacaatctcagctcactgcatcctccgcctcccaggttcaagacattctcaagcctcagtctctcgagtagctgggaccacaggtgtgcaccaccacgtccagctaatttttgtatcttagctgaggtttcatgttggcctgactggtctcgaactcctgacctcaagtratctgcccgcctcgtcctcccaaagtgctgggattacaggtatgggccaccgtgcccggcccgagactgcttttttaccatcttaatgttgtctgagatgatgagtgtgagatctggaccaccccacgtaagtgcgccaacgtcttttctaagaaagctgttgtgtttccagctttccctgcggttcctgccacttgtcctggtgggatggggtgggctcggctctgctggatccacgcctcactcatggatcagatcattcctttctcagtctgtgctcactaacctggcctccatctctttaccacttaattgatatttcagtttcctcatcacttactgatttatttcacttgaatcaccaagtccctagaagactgatggttacaaaattaagcatgaagctgaggaacggatcctggaacagggcggcctctggcaagcgctgcaccgccctggatctgagcacctttgaaaccgcagcaagcattgcttagtaaacgaaggtggttctgtggacaaaatcttcgcataatgggtatagaatacagagaggaagatgccgaggggtgtaaccatcgatcagcactccgctgctctctgtgtgtgggttccagatggggaagtcctccttggcattctgaccccagtgtgctctgctcccaccctgcacgcatctcttctctgttccttcttttgacttaaaagcagagaatataaaaaatgacttatttagagctccctgtggccatttt

SEQ ID NO: 70729 - DNA, 1029 bp, Homo sapiens
ggtgtcgctgtcctcccacaaaagggagcacagaaagtgctgaagggagtaacacattggtgctgacggagtctcactgtgtcgtccaggctggagtgcggtgacacaatctcagctcactgcatcctccgcctcccaggttcaagacattctcaagcctcagtctctcgagtagctgggaccacaggtgtgcaccaccacgtccagctaatttttgtatcttagctgaggtttcatgttggcctgactggtctcgaactcctgacctcaagtaatctgcccgcctcgtcctcccaaagtgctgggattacaggtatgggccaccgtgcccggcccragactgcttttttaccatcttaatgttgtctgagatgatgagtgtgagatctggaccaccccacgtaagtgcgccaacgtcttttctaagaaagctgttgtgtttccagctttccctgcggttcctgccacttgtcctggtgggatggggtgggctcggctctgctggatccacgcctcactcatggatcagatcattcctttctcagtctgtgctcactaacctggcctccatctctttaccacttaattgatatttcagtttcctcatcacttactgatttatttcacttgaatcaccaagtccctagaagactgatggttacaaaattaagcatgaagctgaggaacggatcctggaacagggcggcctctggcaagcgctgcaccgccctggatctgagcacctttgaaaccgcagcaagcattgcttagtaaacgaaggtggttctgtggacaaaatcttcgcataatgggtatagaatacagagaggaagatgccgaggggtgtaaccatcgatcagcactccgctgctctctgtgtgtgggttccagatggggaagtcctccttggcattctgaccccagtgtgctctgctcccaccctgcacgcatctcttctctgttccttcttttgacttaaaagcagagaatataaaaaatgacttatttagagctccctgtggccatttt

SEQ ID NO: 70730 - DNA, 589 bp, Homo sapiens
ttaaatactcaagcatctccttctgcctgctaccgtttgcattgccagcaaaatatcttttagagttactttttggagttagartaaatatttctatttccttcttgcagtggcagtacccaaagaacatagagaaagcccttagccagggctatataatgcccaactcaacatgacccttgtcttcctctccagccttatccccagcaaattccttgttcttagaaactcacattctaacagtagtgagcagcccgtaggccgcttcatacctctttgccttgtgtgatcttgctctctctccaactccattctaacatggttgaaaatgtgcttcctccattctgagaggatctgggcagcagagttcatctttgtgtcctctgtaccctatggtttgtccaaacacattctgctgttatcgaatcaggttcacagttttgccttgttttgtttcaatttggatcttctatactagtctgctcctcagaggtccagtcaatgtttacattcctttgggcatccttgccacttagcagagtgcctggcccataactgatgttcaacgaacaattgttagtgaatgagt

SEQ ID NO: 70731 - DNA, 222 bp, Homo sapiens
ccacctgagatgggaatggaataagaaccttgagttctagaaggggcactattttactctactyaaagttgaaatcacggtctctacactttgcattttcccagtgtctgaggcgcatggccccgggagaggaggagaatgggacggtggttcagatctgctgatgtagctgtggtcagtcactggggagaataggcctgtggatttctgctcctctgagat

SEQ ID NO: 70732 - DNA, 649 bp, Homo sapiens
tgtggtctcagctactcaagaggctgaggcaggagaaccaactgagccctcgaagtggaggctgcagtgagctgtgattgcaccacttcactccagcctgagtgacagcaagaccttgtctcaaatatatatatataaawatatataaaaatatatataaatatatatatataaaaatatataaaaatatatataaatatataaataatatatatataaatatatatataaatatatatgtataaaagcacagtcctttcattgatcaaacttagatatttaacatttagaaatatgatgtagaaaagcaaataattatacattttggtatcatttatgatgaaagcatatttgtttcattacaaaatattaaactggtgttacttttccttagtagcctgaggtgtttttttaatttttttaattttttaatatttcatcccttaagttaactcttcattatctgggagtagggacattaggtaagattgaactagtggggaaagtattttcgcatattcttggtgacctgtccactatttaaaaacttaacatttttttctagagaagaaaaaatagagcaaaggtaggcagaggtagaagcttttagaaagtttcacccaaactgtaatttatatcacttttgttg

SEQ ID NO: 70733 - DNA, 649 bp, Homo sapiens
tgtggtctcagctactcaagaggctgaggcaggagaaccaactgagccctcgaagtggaggctgcagtgagctgtgattgcaccacttcactccagcctgagtgacagcaagaccttgtctcaaatatatatatataaaaatatatawaaatatatataaatatatatatataaaaatatataaaaatatatataaatatataaataatatatatataaatatatatataaatatatatgtataaaagcacagtcctttcattgatcaaacttagatatttaacatttagaaatatgatgtagaaaagcaaataattatacattttggtatcatttatgatgaaagcatatttgtttcattacaaaatattaaactggtgttacttttccttagtagcctgaggtgtttttttaatttttttaattttttaatatttcatcccttaagttaactcttcattatctgggagtagggacattaggtaagattgaactagtggggaaagtattttcgcatattcttggtgacctgtccactatttaaaaacttaacatttttttctagagaagaaaaaatagagcaaaggtaggcagaggtagaagcttttagaaagtttcacccaaactgtaatttatatcacttttgttg

SEQ ID NO: 70734 - DNA, 649 bp, Homo sapiens
tgtggtctcagctactcaagaggctgaggcaggagaaccaactgagccctcgaagtggaggctgcagtgagctgtgattgcaccacttcactccagcctgagtgacagcaagaccttgtctcaaatatatatatataaaaatatataaaaatatatataaatatatatatataaaaatatatawaaatatatataaatatataaataatatatatataaatatatatataaatatatatgtataaaagcacagtcctttcattgatcaaacttagatatttaacatttagaaatatgatgtagaaaagcaaataattatacattttggtatcatttatgatgaaagcatatttgtttcattacaaaatattaaactggtgttacttttccttagtagcctgaggtgtttttttaatttttttaattttttaatatttcatcccttaagttaactcttcattatctgggagtagggacattaggtaagattgaactagtggggaaagtattttcgcatattcttggtgacctgtccactatttaaaaacttaacatttttttctagagaagaaaaaatagagcaaaggtaggcagaggtagaagcttttagaaagtttcacccaaactgtaatttatatcacttttgttg

SEQ ID NO: 70735 - DNA, 641 bp, Homo sapiens
ttgttggtggaaatgtatcttaattatcataagtaggtggtacttggaaaattttatgtcaatatacaaacatgatcttctaaacatatgtggccatatttatagatcctaaaactttagaacgtgtggcagactcagtagtatctaaatagtggtaacaagaagtaaagtgcgcattttcaaasttaatcttttaattgcagccgccttttcaagtgcaactgtttctatcatagatacttggcattgactaggtataattttacttatacataataaatttcattctcaaatatcccactgatttcataatgcagaggagaaaatgaagaactttattaagaaaattcaataactcctattcccatatctgtttacttgactataacttattgcctttgttctaaggaaatgttaaatctcgtacgtcaaaaagtgggggaagcacatcaatttaaaccttatcataatttatatgtgaataggtacctagcatgtaggagtaggagagttttcttcttcgtatttaggtttccatggattaactttattgcttagtttaatgtgttatgaatatttaggtatatttttattttctataagaaataaaacagaatccaaatccaaaaatttatcacatg

SEQ ID NO: 70736 - DNA, 2164 bp, Homo sapiens
aggggaaggggacaacatagtaagtgactaagtggcttttttttttttttttttgccaagtgaagctgagtcatatggcctctgtcattccaaaactattctctacggctgcattcctttcgctcttgccttcctttagaaccctggagaaggcctcctgaagcctggccctattatgtatcctgacaaagataaacttttccaaaaagctgcatgttgtttctagcacagtttttcctcgcagtgactacgtgatgaaagtaccatgcagaggaggtgtctgactgaggcgttcgtggtgtgtgacagagtcccctgcacaggacagccgcactcccctcttgcgtcctttcctcccatgtttgcaaagcctctttccctgtcagcagggggtgttctggcagttgacatttctgaaaactacagcctacatttttaaaaaatccagtaagtgaaaactaaaaaattaataccgtggtcataatagtgtggcatttgataactaatgaggcactgtcgtgccagctattattttcagacatttacagtccttttttaaatacaaagaaatatttggtgtgaaatgttccccgggagctggtgcaagcagaggcgacagggcaagggagcttgggttgtagcctcgaattcctccggccagggctaccgtcagcctgcggcacacaagtaaatcaaatataaaaccaaaatttctgtaagcaaatcagtttctaactcactgtaacgaattatctttcgcacatcacagaggcatctcttttcaytgtcgagtttggtttgcttggttacaaaaagggcagttcaaaagctttggttgctattgtgaaagtcagctgaattccttccaccgtgctggggtggggtggggttcacgcaggttctcttttgtcaccaggggtgctgtggattcacaagtaagcaagaggctcctcaggtcaagcctctggctgctccctgaggtcagctgcctagcttctcctcctctgagatagacgggaacaaagtctttgatgtgtgcatttctcaagcttgacaatgatacagctacataaaaacccatgatttcatatagatattccaaaacgtaaaagtaaaccatgcatccacagagacatggaattacagaactggatgctgagctggtcacttgggaggcaggcgtccttgccattggtttatgcctcagccccaccatgcagtggctggccaggtgacctaggccagtcctgcatcctcggctcctcacctgcctggtgggacagtgacatctctcctgcagcactgctgtcagggtgagggaggtagggcgcagtttcagaaaaccattgggctgcacctgcgtgagcacagctgcaggagcaaaagtcagaaaggtcagcaaaggatttcaggagcaaaggtcagaagaaaccctcaaggtggttgtgtctgcaggaaagtgctgtcgtctcctgcaatgctttcaagactattcagaagcacagtgtgaagggagagccggagcccatggggaaatgactccagagtgttccacgtgttggaaggcatctgttggaaaacggacattcaagcaaatagttgcctgcatagacaacgcagaatgactgggaaagccccaacaagttacctactggtaaatgaggtgagaagcttaaagtgagaaccccattgctgcctctttttcactttaaaaacatttaagttttgaattatggtaaaatacacgtaagatttactactgtaaccatttttaagtgtacggttcagtagtgttaagtatattcacattgctaaggaaccaatctgctacttttgtttattaattttttcctgaggggaaatatttttaaattttaaaatatttaattgacaaataaaaattgtgtatattcaaggtgtagaacatgatttcatatgcacgtacattgtatactcattaccacaatcaaagaaattaacacatccaacccacccatagttgccattgtgtgtgcgcggatgtgcgtgtatgtgtgtgtatgtgtgcacgtgtgcgcctgtgtgtgtctgtgtgtctctgtgtatacgtgtgtgtacatgtgtgtacgtgtgtgttcctgtgtatgtgtgtctgcgcacgtgtgtatgcatgtatatgggtatg

SEQ ID NO: 70737 - DNA, 2164 bp, Homo sapiens
aggggaaggggacaacatagtaagtgactaagtggcttttttttttttttttttgccaagtgaagctgagtcatatggcctctgtcattccaaaactattctctacggctgcattcctttcgctcttgccttcctttagaaccctggagaaggcctcctgaagcctggccctattatgtatcctgacaaagataaacttttccaaaaagctgcatgttgtttctagcacagtttttcctcgcagtgactacgtgatgaaagtaccatgcagaggaggtgtctgactgaggcgttcgtggtgtgtgacagagtcccctgcacaggacagccgcactcccctcttgcgtcctttcctcccatgtttgcaaagcctctttccctgtcagcagggggtgttctggcagttgacatttctgaaaactacagcctacatttttaaaaaatccagtaagtgaaaactaaaaaattaataccgtggtcataatagtgtggcatttgataactaatgaggcactgtcgtgccagctattattttcagacatttacagtccttttttaaatacaaagaaatatttggtgtgaaatgttccccgggagctggtgcaagcagaggcgacagggcaagggagcttgggttgtagcctcgaattcctccggccagggctaccgtcagcctgcggcacacaagtaaatcaaatataaaaccaaaatttctgtaagcaaatcagtttctaactcactgtaacgaattatctttcgcacatcacagaggcatctcttttcactgtcgagtttggtttgcttggttacaaaaagggcagttcaaaagctttggttgctattgtgaaagtcagctgaattccttccaccgtgctggggtggggtggggttcacgcaggttctcttttgtcaccaggggtgctgtggattcacaagtaagcaagaggctcctcaggtcaagcctctggctgctccctgaggtcagctgcctagcttctcctcctctgagatagacgggaacaaagtctttgatgtgtgcatttctcaagcttgacaatgatacagctacataaaaacccatgatttcatatagatattccaaaacgtaaaagtaaaccatgcatccacagagacatggaattacagaactggatgctgagctggtcacttgggaggcaggcgtccttgccattggtttatgcctcagccccaccatgcagtggctggccaggtgacctaggccagtcctgcatcctcggctcctcacctgcctggtgggacagtgacatctctcctgcagcactgctgtcagggtgagggaggtagggcgcagtttcagaaaaccattgggctgcacctgcgtgagcacagctgcaggagcaaaagtcagaaaggtcagcaaaggatttcaggagcaaaggtcagaagaaaccctcaaggtggttgtgtctgcaggaaagtgctgtcgtctcctgcaatgctttcaagactattcagaagcacagtgtgaagggagagccggagcccatggggaaatgactccagagtgttccacgtgttggaaggcatctgttggaaaacggacattcaagcaaatagttgcctgcatagacaacgcagaatgactgggaaagccccaacaagttacctactggtaaatgaggtgagaagcttaaagtgagaaccccattgctgcctctttttcactttaaaaacatttaagttttgaattatggtaaaatacacgtaagatttactactgtaaccatttttaagtgtacggttcagtagtgttaagtatattcacattgctaaggaaccaatctgctacttttgtttattaattttttcctgaggggaaatatttttaaattttaaaatatttaattgacaaataaaaattgtgtatattcaaggtgtagaacatgatttcatatgcacgtacattgtatactcattaccacaatcaaagaaattaacacatccaacccacccatagttgccattgtgtgtgcgcggatgtgygtgtatgtgtgtgtatgtgtgcacgtgtgcgcctgtgtgtgtctgtgtgtctctgtgtatacgtgtgtgtacatgtgtgtacgtgtgtgttcctgtgtatgtgtgtctgcgcacgtgtgtatgcatgtatatgggtatg

SEQ ID NO: 70738 - DNA, 338 bp, Homo sapiens
acaataaactggaaaaaactgtttgggacctccggtcagaaaaccaaaattataagcaacagaggtgaaaacagctgcagtaagtcaccgctttctgtttwgtttatggagttggttctaatgggtcctttatttgtatttagaatattgaagggctattcccatttaaattacttttttcagttccttaagaagcaaattaaaatcttaagattcctaactgtgaaattaccatgtgaattccattaaaactttttccagatcattaccattcaatgggatgaatttaccctgaggtttaggctaccaattatttgtaatgtaagtaactaaattta

SEQ ID NO: 70739 - DNA, 871 bp, Homo sapiens
aaggggaatctcaaacctctaggtggaggagtgcagagatgaccaggatggtggaagcctgcaggagagctgaacacctgaagacacccagtgggaagaccaggacctttaacgcccatatctgctgctcaagactggcagagagaagagggtttgtgatgagaaaaggtggtgaaaggcacaaggaggcacagagcatgtcaggtcccatatcccaaaaggaatgtgcttgggtgagggagagctcctccatggctggaggcattcagagaccaggcagtcgcttgtgggtttgtgattagagtgaggttcttttataaagggagtgagaagagaaggtctgtggatacttgagtgtatcggtaattaaraaataaattgtgtacatcccatttctttccacattttcctgggctgtcacagtggctgcaaagaaagcagtccgtgaactgaactgtgatcccagacaggcaagcacaccaggaatctcttctcagctgttgataatgagggagcgctggggagagaaatggggtcctctttgagtttcctctgtgccgatacctttctctttgttaaaacagctaattaaacactgaagcagtatagctctcttactatacactggtagtcatagttctcttactgttctcttcactgacagttctcttactatacactgatggtgacgcagaaattcagaattccccgcatgtgtcccggtttgaaagccactgtgctttgctgtggattaggatcagacagttgagtcttgttccaacaaggaaagttgcttattggaaagttttgctgcagggagccttgagttctgcatcaggcttggaagtgggctctgtggaggtcagaagga

SEQ ID NO: 70740 - DNA, 582 bp, Homo sapiens
tttggaataatatatgagttgagtatataaattcattattttctaaatagcaaactgattaccaaaacagttttattaaataatctgtctctttctcactggtttgtgatacctctatgactgtagtagttctcatggaagataaggtctaattcttataaatatgttttgtagtgttcatcgaggtctrtctaattttgttagtaccatgttcacttaagtattatagttttataacatttgatgtctattatgtcttgctcctcattttaattttttgaaaactagctctcctcatatgatttaacatatggaatttgaaattttaatttccagtttttcaaaaattatttcttttatttataataaaattacattaaataaataaaataatttagcatgaagatatatttaaatatgcatccctcttgcttgaagcatggtatatctatccaacttcttaagtctgctttaattctctctatatttggtagttttcattaaatatacactagacgtgtttcattgaggttacttttaggtattttgttaccacaaatgggaatgcaattataggcaaag

SEQ ID NO: 70741 - DNA, 582 bp, Homo sapiens
tttggaataatatatgagttgagtatataaattcattattttctaaatagcaaactgattaccaaaacagttttattaaataatctgtctctttctcactggtttgtgatacctctatgactgtagtagttctcatggaagataaggtctaattcttataaatatgttttgtagtgttcatcgaggtctgtctaattttgttagtaccatgttcacttaagtattatagttttataacatttgatgtctattatgtcttgctcctcattttaattttttgaaaactagctctcctcatatgatttaacatatggaatttgaaattttaatttccagtttttcaaaaattatttcttttatttataatraaattacattaaataaataaaataatttagcatgaagatatatttaaatatgcatccctcttgcttgaagcatggtatatctatccaacttcttaagtctgctttaattctctctatatttggtagttttcattaaatatacactagacgtgtttcattgaggttacttttaggtattttgttaccacaaatgggaatgcaattataggcaaag

SEQ ID NO: 70742 - DNA, 582 bp, Homo sapiens
tttggaataatatatgagttgagtatataaattcattattttctaaatagcaaactgattaccaaaacagttttattaaataatctgtctctttctcactggtttgtgatacctctatgactgtagtagttctcatggaagataaggtctaattcttataaatatgttttgtagtgttcatcgaggtctgtctaattttgttagtaccatgttcacttaagtattatagttttataacatttgatgtctattatgtcttgctcctcattttaattttttgaaaactagctctcctcatatgatttaacatatggaatttgaaattttaatttccagtttttcaaaaattatttcttttatttataataaaattacattaaataaataaaataatttagcatgaagatatatttaaatatrcatccctcttgcttgaagcatggtatatctatccaacttcttaagtctgctttaattctctctatatttggtagttttcattaaatatacactagacgtgtttcattgaggttacttttaggtattttgttaccacaaatgggaatgcaattataggcaaag

SEQ ID NO: 70743 - DNA, 582 bp, Homo sapiens
tttggaataatatatgagttgagtatataaattcattattttctaaatagcaaactgattaccaaaacagttttattaaataatctgtctctttctcactggtttgtgatacctctatgactgtagtagttctcatggaagataaggtctaattcttataaatatgttttgtagtgttcatcgaggtctgtctaattttgttagtaccatgttcacttaagtattatagttttataacatttgatgtctattatgtcttgctcctcattttaattttttgaaaactagctctcctcatatgatttaacatatggaatttgaaattttaatttccagtttttcaaaaattatttcttttatttataataaaattacattaaataaataaaataatttagcatgaagatatatttaaatatgcatccctcttgcttgaagcatggtrtatctatccaacttcttaagtctgctttaattctctctatatttggtagttttcattaaatatacactagacgtgtttcattgaggttacttttaggtattttgttaccacaaatgggaatgcaattataggcaaag

SEQ ID NO: 70744 - DNA, 437 bp, Homo sapiens
attaaattagtatttccacagaccaacaagtgttaccagagaggaagaaggacgactatgtagtgaacaagttaggcttcttttccaraaattaaacagaaggctttttagaaagccttttagaaagaaaagaacacaactgtacccccgctttcgccatggaaacctgtaagagtgcccactccacagctcccccggtactgcctgctcacttgtatcatgtgtttcattccttcgtccaacaatatttattgagtccagcacagtgtggggtcttgaggctgcagcagagcccaccacacgagcacgcgccatgaggtgagccagactcacaatttaaacacatgagcaggaacttagaaatcgtgaagcatgctaagaaggaaatgaacaggtgggtgggtggggcgggtcgggggtggggggcgtgctggggt

SEQ ID NO: 70745 - DNA, 437 bp, Homo sapiens
attaaattagtatttccacagaccaacaagtgttaccagagaggaagaaggacgactatgtagtgaacaagttaggcttcttttccagaaattaaacagaaggctttttagaaagccttttagaaagaaaagaacacaactgtacccccgctttcgccatggaaacctgtaagagtgcccactccacagctcccccggtactgcctgctcacttgtatcatgtgtttcattccttcgtccaacaatatttattgagtccagcacagtgtggggtcttgaggctgcagcagagcccaccacacgagcacgcgccatgaggtgagccagactcacaatttaaacacatgagcaggaacttagaaatcgtgaagcatgctaagaaggaaatgaacaggtgggtgggtggggcgggkcgggggtggggggcgtgctggggt

SEQ ID NO: 70746 - DNA, 1277 bp, Homo sapiens
gcattttacacataatttcatataatctatattatagctttgtgaaggaggtactattacttacactagcatcttctttctcatcctcgccctgctgttcaccatccctcactttgagaaattgaggtttaaagaggttatataattttcccaagtatattaggagtgtctgttctcatgctgctaattacccgagactgggtaatttataaagaaaaagaggtttaatgggttcacagtttcacatggctagggaggcctcacaatcacggtggaaggtgaaaggcacatcttacatggtggcaggcaagatagaatgagagccaagcaaaaggggaaaccacttataaaaccatcagatcttgtgaaacttattcactgccatgaggacagtatgggaaaaactgccccataattcaatgatctcccaccaggtccctcccaccacatgtgggaattatggaagctacaattcaagatgagatttgagtggggacacagccaaaccatatcaccaagactgcatatttaattgataatcggtaggtagtcctgggactctaacttaggagatcccagagtcaaggtctcggccattgcactaatttccttttaaggaatttcycaatctagtcaaattggtggttttctaacttgtctgagaaaaaagtcacccagggaatatcagtagttatttctgaattgagaaagaacttttctgtatttattttaaaatttcaaagtttattgatcaagtatagttaatcttatggcatgaaattctgaagatattgcatatgtctcaaggaacaacttggttttagaaatttattttaagcaaatgaagatattggtcaatttactagcctatgcctaccaattctttttaaaaaaatttttgtgaacacatagtagatgtatatatttacggagtacatcagttatcttgacaatccatttgaaactaaaagtgtttgacttattctacaatatttaaaataatatttatttcatttttacaactcttaggttaaattaaactttaaaaagaaccctatttagctactaatactgaaagtatttcaatgaatctaatcagaccatcagagtttttctcaatatggcataagtggcgactgtcatctactcaggttgaatatgataaggcagaggtgtggctggcaggcttatgatagtttgggggaacagaacatttttcatcttttttcttgaaaaagttatccttagaccattctaaaaaaattatctttatcatt

SEQ ID NO: 70747 - DNA, 2441 bp, Homo sapiens
taccacgcctcttctcttgtatggaaagaattttcaaagttatagcctgtaaaatmgtcttaaatatgtttgtaaaatctttgtgtaacatcaaacattgacaaataaggacatatttttaaaagggaaatactgtaaataaatgttaaactaatcaaaacatttatttgctaaagaaacaatttcactgttcaataagcattgtgtgtatgtgtgtgcatgtctcacttttgttcaggaagccaggcaaccatgtaatgttttcaaactgaactgtacacgggcctggatgaagatgcaagtaaaatccagcaagagttctgtactccaaaccctgcaattacaaacctacatctgctcagtggaaggaaaatcttttcctaatgcacacaaatgagttagtaatgggcctgcgaaacactataatgggccctgaaaagaaataggataaaaattaaaactacctttattaatcaaaaaaatgactaccactaagccagaatcaagtacaggcattcctgctctaacacaatatatgcacttctgtataacctcatgttctgcaaaataaaaatagttagacttattgtgaagatagtgccagaccacacaatacctaaggaacttttaaatctgagccctaacaaaacaataatgattattataaaaatggaaagtttccactggcatttgtacctaaaataaagcagtccacatttaaagcttcatatcctgggtctcttctttttttgatgtgcatccttgaagacattagttctaatagaaaccagtttaataaaaattaaaaatatcttctagagacagcatttttcattagtcaatttctttttaacacaagcaaaatatctttaaagcttagtcaacacagaaaaatgtatagccaataaaccagcaacttactgagctacaggaggatatttctataggacttttagcattttgtttagatcttcagctactgctaagaattcctctttagttgagaaaagcttgaccttgatcatttcaaaatgctaacaagtttgaagtaatctggaaacaacccacattgtggatacacacacaaagtgtgtaaaaatctacattatattgacatcattcccctaaatgccaaatacgtcacaaatttacattttaaaatgctgtaacagaatgaattacatacatttttaaaatattactagacattaaatgaaaaatatttctgacaatcttaaatatattatgcaacatattattttaaatgatcctgatgcttacatgcataaatttgaaatattgcatttcctcagtgctaaagatgccataaaatttaaatacaatcaatttcataacataattccctggggtgggaaaataatataatattaattctatacatctggccaggcacagtggctcatgcctgtaataccagcactttggtaggccgaggcaggcagatcatttgagctgaggagtttgagaccagactaagcagcacagcaaaaacctgtctctacaaaaaacagaaaaattagccaggcatggtggtgcatacctgtagtcccagatacttgggaggctgagttaagaaaatcacttgagcccaggaggttgaggctgcaatgagccatcattgtgccactgcactccaccctgggcaacagagcaagactctgactcaaaaaaaaaattgtacatatctatataaggtacatctattagaaacattaaaatgtgataaaaatgtgcattttggaatccaagaagcatgttacatcgaaagtacaaattttcatgagctgtgattttttttttacaactatgaaaatttattttatttttaaaaacagtgctaatcacagaaacagaaaaccaaatactgcatgttctcacttataagtgggggctaaatattgggtaaacatagacataaagatggcaacgatagacactggggactaatggaggggagaggaagggggtgggtaagggttgaaaagctaactattgtatattatgctcactacctggacaatgggatcaatcagaccccaaacttcagtatcatggaatatacacatgtaacaagcctgcatacataccctgtaaatctaaaataaaagatggcagtgttaaaaaaagttaatgatatcaattctataaaaaaaacttttagaaataatatttgcagtgtttagatttgtctaaggaagcttaacattgggacttacgctttttaaaaatcttttttagctttattaagattcaaatgacaaaaatattacatatttatggtgtacatatttatatattaacacaatgctgtcctatatgtacacattgtataagattaaaccatgctaattaacatatccatcatctcatatactttttctatggtgggaacatttaacattttttatggtaacaacatt

SEQ ID NO: 70748 - DNA, 530 bp, Homo sapiens
tttttttttgagatagcatctcactctgtcacccagactggagtgcagtagcacgatctcggctcactgcaacctcttcctcccaggctcaagtgattctcctgtcttagcctcccaagtagctgggattataggcacacaccactaccgcctggctaatttttgtacttttagtagagatggggtttcaccatgttggccaggctggtcttgaactcctgacctcaggtgatctgcccgcctcagcctcccaaagtgttggggttacaggggtgagccaccacgcctggcccccttccttcatcttagtcaatcctatgccacctcttcttcctccagtcccctcacctgatggtcccracacttcatcatccaccacctcctggagggggtaccctgaggtgctccgctgggggctccgctcttcctggggctgcggttgatggctcatcatgatctttcccaaaatctgtcccatctcaccaaacctagtctctgttctgtccttggtcttcttctggacactgctg

SEQ ID NO: 70749 - DNA, 778 bp, Homo sapiens
aatacaaaaattagcagggtgtggtggctcatgcctgtaatcccagctacttgagaggctgaggcacgagaattgcttgaacccaggaggcagatgttgcagcgagccaagatcatgccactgcactccagcctgggccacagaacgagactctgtctcaaaaaatccaaagaccaaatgagtgacttgaacataatcattgtagggaacaaaaccctcatattaaaaaaaaaaacaacaacaacctttattttatggtaattaagttccggaaaagttaacaaaagtagttgggtttccatatctccctcatctggcttctgacattaacagctttcataaccatggttcagttgtcagatccagaaaattaccactggttggctgggcacggtggctcactcctgcaatcccagcactttgggaggccaaggcaggcggattacgaagtcgagagatcaagaccatcctgggcaacgtagcgaaaccccgtctctactaaaaatacataaattagcygggtgtggtggcacgcacctgtagtcccagctactcaggaggctgaggcaggagaatcgcttgaacctgggaggcagaggtttcagtgagccaagatcacaccactgcactccagcctggtaatagagcgagactccttcccctcacccccgcaaaaaaagaaaattaccactggtataatactcttaactaaaggttttttttttctttcttgatttttcaccaatttcccactactgtcctctttctgtcccaggat

SEQ ID NO: 70750 - DNA, 778 bp, Homo sapiens
aatacaaaaattagcagggtgtggtggctcatgcctgtaatcccagctacttgagaggctgaggcacgagaattgcttgaacccaggaggcagatgttgcagcgagccaagatcatgccactgcactccagcctgggccacagaacgagactctgtctcaaaaaatccaaagaccaaatgagtgacttgaacataatcattgtagggaacaaaaccctcatattaaaaaaaaaaacaacaacaacctttattttatggtaattaagttccggaaaagttaacaaaagtagttgggtttccatatctccctcatctggcttctgacattaacagctttcataaccatggttcagttgtcagatccagaaaattaccactggttggctgggcacggtggctcactcctgcaatcccagcactttgggaggccaaggcaggcggattacgaagtcgagagatcaagaccatcctgggcaacgtagcgaaaccccgtctctactaaaaatacataaattagctgggtgtggtggcacgcacctgtagtcccagctactcaggaggctgaggcaggagaatcgcttgaacctgggaggcagaggtttcagtgagccaagatcacaccactgcactccagcctggtaatagagcgagactccktcccctcacccccgcaaaaaaagaaaattaccactggtataatactcttaactaaaggttttttttttctttcttgatttttcaccaatttcccactactgtcctctttctgtcccaggat

SEQ ID NO: 70751 - DNA, 1120 bp, Homo sapiens
aactgaaaaggctgcatatccaatgatatgacattctgaaaaaggcaaacctatggagacaataaaaaataaaatcagtggttgcctggggaggggggcaggaatggagcatagaagatagttaaactactccctataattctatagtggtggatacatgtcattatacatttgtccaaacctatacrcaaggagtgaaccctaaattaaactatggactttgggtgataatgatgtgtcaatgtacgtttatcaattgtcacaaatttgatactctggtgagggttattgataatatgggaggctatacatacacaggggcaggggaaatacaggaaatctctgtacttacctctcaattttgctgtgaacctaaactactctaaaaaatacaaaaaaaaacctctttctaaaaaaaaactctttaagttgaggaatgtatcttcttcattgtgtccccggtagctagtacagtggcagaattgatggcttttaagtatagctaatgactgaaggagcatgttataaaatatttattaaagcctgttctataatatttggcaggtaatagacatttaataattattagatcatagctgatgatttgactcttgacagaactaattgctacttacatttaaataatgctaattagaatgacaggctattggaaagcatgcagaagaaacatatggaagttaataaacctagagtcaaggcctgcccttctcacagttattcaaccctaataaatagctttctcttgctgactctcagtttcctcacttataaaacgagcacattacctacctcataacgctgttgtgatgttgtgatgactaaacatttcttacagttactaagtggctctatgatcacttcaataaaactatgtgccaagtttctatgtaatgatagcctgagaatccccaaaagtattggttgctttccgaccagtcaataatagcttactaatttatctgggatctcatgtgacttgcttcgtctgttccaataaatttagcataaattcaatttgttcaaaacccactactactactactactatctaacatttctagtatggctactttgtactaggttcttttctaagtattcc

SEQ ID NO: 70752 - DNA, 1120 bp, Homo sapiens
aactgaaaaggctgcatatccaatgatatgacattctgaaaaaggcaaacctatggagacaataaaaaataaaatcagtggttgcctggggaggggggcaggaatggagcatagaagatagttaaactactccctataattctatagtggtggatacatgtcattatacatttgtccaaacctatacacaaggagtgaaccctaaattaaactatggactttgggtgataatgatgtgtcaatgtacgtttatcaattgtcacaaatttgatactctggtgagggttattgataatatgggaggctatacatayacaggggcaggggaaatacaggaaatctctgtacttacctctcaattttgctgtgaacctaaactactctaaaaaatacaaaaaaaaacctctttctaaaaaaaaactctttaagttgaggaatgtatcttcttcattgtgtccccggtagctagtacagtggcagaattgatggcttttaagtatagctaatgactgaaggagcatgttataaaatatttattaaagcctgttctataatatttggcaggtaatagacatttaataattattagatcatagctgatgatttgactcttgacagaactaattgctacttacatttaaataatgctaattagaatgacaggctattggaaagcatgcagaagaaacatatggaagttaataaacctagagtcaaggcctgcccttctcacagttattcaaccctaataaatagctttctcttgctgactctcagtttcctcacttataaaacgagcacattacctacctcataacgctgttgtgatgttgtgatgactaaacatttcttacagttactaagtggctctatgatcacttcaataaaactatgtgccaagtttctatgtaatgatagcctgagaatccccaaaagtattggttgctttccgaccagtcaataatagcttactaatttatctgggatctcatgtgacttgcttcgtctgttccaataaatttagcataaattcaatttgttcaaaacccactactactactactactatctaacatttctagtatggctactttgtactaggttcttttctaagtattcc

SEQ ID NO: 70753 - DNA, 1120 bp, Homo sapiens
aactgaaaaggctgcatatccaatgatatgacattctgaaaaaggcaaacctatggagacaataaaaaataaaatcagtggttgcctggggaggggggcaggaatggagcatagaagatagttaaactactccctataattctatagtggtggatacatgtcattatacatttgtccaaacctatacacaaggagtgaaccctaaattaaactatggactttgggtgataatgatgtgtcaatgtacgtttatcaattgtcacaaatttgatactctggtgagggttattgataatatgggaggctatacatacrcaggggcaggggaaatacaggaaatctctgtacttacctctcaattttgctgtgaacctaaactactctaaaaaatacaaaaaaaaacctctttctaaaaaaaaactctttaagttgaggaatgtatcttcttcattgtgtccccggtagctagtacagtggcagaattgatggcttttaagtatagctaatgactgaaggagcatgttataaaatatttattaaagcctgttctataatatttggcaggtaatagacatttaataattattagatcatagctgatgatttgactcttgacagaactaattgctacttacatttaaataatgctaattagaatgacaggctattggaaagcatgcagaagaaacatatggaagttaataaacctagagtcaaggcctgcccttctcacagttattcaaccctaataaatagctttctcttgctgactctcagtttcctcacttataaaacgagcacattacctacctcataacgctgttgtgatgttgtgatgactaaacatttcttacagttactaagtggctctatgatcacttcaataaaactatgtgccaagtttctatgtaatgatagcctgagaatccccaaaagtattggttgctttccgaccagtcaataatagcttactaatttatctgggatctcatgtgacttgcttcgtctgttccaataaatttagcataaattcaatttgttcaaaacccactactactactactactatctaacatttctagtatggctactttgtactaggttcttttctaagtattcc

SEQ ID NO: 70754 - DNA, 1120 bp, Homo sapiens
aactgaaaaggctgcatatccaatgatatgacattctgaaaaaggcaaacctatggagacaataaaaaataaaatcagtggttgcctggggaggggggcaggaatggagcatagaagatagttaaactactccctataattctatagtggtggatacatgtcattatacatttgtccaaacctatacacaaggagtgaaccctaaattaaactatggactttgggtgataatgatgtgtcaatgtacgtttatcaattgtcacaaatttgatactctggtgagggttattgataatatgggaggctatacatacacaggggcaggggaaatacaggaaatctctgtacttacctctcaattttgctgtgaacctaaactactctaaaaaatacaaaaaaaaacctctttctaaaaaaaaactctttaagttgaggaatgtatcttcttcattgtgtccccggtagctagtacagtggcagaattgatggcttttaagtatagctaatgactgaaggagcatgttataaaatatttattaaagcctgttctataatatttggcaggtaatagacatttaataattattagatcatagctgatgatttgactcttgacagaactaattgctacttacatttaaataatgctaattagaatgacaggctattggaaagcatgcagaagaaacatatggaagttaataaacctagagtcaaggcctgcccttctcacagttattcaaccctaataaatagctttctcttgctgactctcagtttcctcacttataaaacgagcacattacctacctcataacgctgttgtgatgttgtsatgactaaacatttcttacagttactaagtggctctatgatcacttcaataaaactatgtgccaagtttctatgtaatgatagcctgagaatccccaaaagtattggttgctttccgaccagtcaataatagcttactaatttatctgggatctcatgtgacttgcttcgtctgttccaataaatttagcataaattcaatttgttcaaaacccactactactactactactatctaacatttctagtatggctactttgtactaggttcttttctaagtattcc

SEQ ID NO: 70755 - DNA, 672 bp, Homo sapiens
tgcattcctgctttaaggggagccttccattcacttgacacggactgtctgtwattatgcagggctaacttcaggctgcagtgtgcgtggagacgactattttgaagcaggtcctattccctttgattgaagttgaaatcctaagacttccacagccgagatcatttgtgcctctctgagtttcaatattccctttgaaatatttgtctgatgatacaccgtatggacagagcctcctacagttcagtttctgagcaattatcactccatggcaatttgacttcatgtagcagtggagaaataaaatacttaaggctgctgccagcctgcctaacaaagcttttgcataagttaaagactcagaaaggggtgggaaacagtagttaaacctttgctttatcttttaagtttgtaaaacatataaaatctgagttcaaaatcttagaggttgtgacagacttctccattagcaggtgaaattagcccccaaattataatcttgattgattcaataatgttcaactagtagtggaatgagttttattttgaataatttcctcactcctgtttctctgcatcctatttcagtttgcagtctgtcctttaaatggcatttcctttttgccaaagcaccaagctgtgaatttattgagaaatgggtgtgtttacaat

SEQ ID NO: 70756 - DNA, 672 bp, Homo sapiens
tgcattcctgctttaaggggagccttccattcacttgacacggactgtctgtaattatgcagggctaacttcaggctgcagtgtgcgtggagacgactattttgaagcaggtcctattccctttgattgaagttgaaatcctaagacttccacagccgagatcatttgtgcctctctgagtttcaatattccctttgaaatatttgtctgatgatacaccgtatggacagagcctcctacagttcagtttctgagcaattatcactccatggcaatttgacttcatgtagcagtggagaaataaaatacttaargctgctgccagcctgcctaacaaagcttttgcataagttaaagactcagaaaggggtgggaaacagtagttaaacctttgctttatcttttaagtttgtaaaacatataaaatctgagttcaaaatcttagaggttgtgacagacttctccattagcaggtgaaattagcccccaaattataatcttgattgattcaataatgttcaactagtagtggaatgagttttattttgaataatttcctcactcctgtttctctgcatcctatttcagtttgcagtctgtcctttaaatggcatttcctttttgccaaagcaccaagctgtgaatttattgagaaatgggtgtgtttacaat

SEQ ID NO: 70757 - DNA, 672 bp, Homo sapiens
tgcattcctgctttaaggggagccttccattcacttgacacggactgtctgtaattatgcagggctaacttcaggctgcagtgtgcgtggagacgactattttgaagcaggtcctattccctttgattgaagttgaaatcctaagacttccacagccgagatcatttgtgcctctctgagtttcaatattccctttgaaatatttgtctgatgatacaccgtatggacagagcctcctacagttcagtttctgagcaattatcactccatggcaatttgacttcatgtagcagtggagaaataaaatacttaaggctgctgccagcctgcctaacaaagcttttgcataagttaaagactcagaaaggggtgggaaacagtagtyaaacctttgctttatcttttaagtttgtaaaacatataaaatctgagttcaaaatcttagaggttgtgacagacttctccattagcaggtgaaattagcccccaaattataatcttgattgattcaataatgttcaactagtagtggaatgagttttattttgaataatttcctcactcctgtttctctgcatcctatttcagtttgcagtctgtcctttaaatggcatttcctttttgccaaagcaccaagctgtgaatttattgagaaatgggtgtgtttacaat

SEQ ID NO: 70758 - DNA, 781 bp, Homo sapiens
tcatttacactctggaagggaattgtggagagggaggtatagatgaggggatggaagggaagggcaccggcaaatattgttgatagcgagggaagggcggtattgtgatcggctttgactgtcagcctaaggaatttgaatttcattctagagatccaggggaggtgtgtaaaagacaggatcagaacgttagttcaggaagcttaatcttttctgcccccccatctgagatgtacaagagggttagaaagcagagttggagaagctgtttgggagggagcacttatttgtttttttgttttgttttgtttttttgagatggagtctcgctctgttacccaggctggagtgcagtggcgccatcctggctcactgcagcctccacctcccgggttcaagtgattctcctgcctcagcttcccaagtagctaggactacaagcacctgccaccatgcctggctaatttttgtatttttagtagagacggggtttccctctgttggccaggctggtgtcgaactcctgacctcaggtgatgcacccaccgaggcctcccaaagtgctgggattacaggcgtgagccactgcgcccggcagggagkgggtaaagtgagaggcataagggtcccggccaggtgttagcagggggcttcagaggtgaggagagagcagggcaggcagctgctaggcctgggggagcgggctgcggaggactgagaatctgaggtttttctcttggccgcctgggggaaatccagggggaaaaggagaatgaggaag

SEQ ID NO: 70759 - DNA, 571 bp, Homo sapiens
gaaaagagttaacacatgttgggaataaaaaatacccttttcaatggctgacatagccaatagatccatgctttcctttttctttctctctgtcaaagagccctgatatatatttcaaaaggcttatctggcatcccatggaacattccaacaggtgatccatagtgatttcatataaataaagcaacgttgtccagtgttgtcattcccttctctgcacatacactccctccatctgccmttcctgctcacaaataaacatcctacatgttagcctttgtttcagacttctctttccaggggtcccaggtgatgacagatgaaatcatgcaggaataaaccagtcctggattgcctagctctgagctttttatcttttatataaacaggagagttattgtagttttcagctcaataatttatctattgataaattattaatatttatctatggtcacattcacccaaagtagcttttatttatatattataaatattgatctattgataattaaactgataatttatcttttggttccttttttataatttttagtttttgatttatatt

SEQ ID NO: 70760 - DNA, 1413 bp, Homo sapiens
agttgcagtgatcagttctgtgagaggagtgatactggggttgtgtgaagtgagattttcactttagctacatattgcttccatttataaaataaatttgtgtttgtgcattgcttatgtgattaaaatgtgaattaaaatgttggtgaaagtattactgtaacastcacttgtgtcaaggtatatggatttgtggttttatcagcctctctgtgacttatttttttcaagaatgcaaatctatacttttgtctttttctacgaatcatctcaggaatcaaattataaaattctaacttgaaatatcagttaagtgtctaatagaaaaaagtaggaataaaaagtcataatgaaaagtagtaaaatttgtagtaaacatagtaaaacatgaatcacaggtaagttattcttttcagatgaatttggcatttttagaatgatgagaatatcaaagaatttatagattactctcagaaagatctccaccaaatactgtgatgcaaaaatggttctatattccacttgatatttattgtggaattggagacctacatgggaacattccatctgctgcctcttcattccctacttcccttattattcgggctacatggagaaagtattgacttttgttccaaacatatgtctttcttagtaggacttgccttctagaccctagggaccttgagcacctagtttgtgtgccagcagttctgtatttttgggtgatgaaaattgattttcctcctcttagcaggtgctgtctgagtgagcctctcccctcacgacctgtgcagatcgtgccatcaataggaggagaggggaaggggatgaatgttcggagttcttacactttacctgaggggcctggggaagcctcgtggcaatgagggtgcgataggaaaaacagtaacaataaacttagtttagaactcttctcatccttgatatttcctggactgattcaatatctatatgcattttctgggattatcaaaatcaacagatcttcttgaagggtttattatgctcttcatagttctaaatggatcatacttgttaaatgagtaatggaaagactccttttaaggaaaaagaataattataaaggatctcaggtgatggcttaaattatgttcgtcacagtgccacctatatttgttaaaacttaaaagtatgattatgcttagaactgttttattactgtgaaagccaagctacagagatgaggttttgcttggtacacactggaaaactaggagcctttgagtcaggaaatatatgcaaaagtaaattttgagcttgcgtatagaatagatttggagttttgagtctacagggtaatcaattcaaaagttattgcaggttcccaggtctaagttgttaagtgtctgaacaagtgtatggtggctt

SEQ ID NO: 70761 - DNA, 717 bp, Homo sapiens
gggaagaatcactgaaaattcgggtgcagataattaaggtagttcaggtgaaacatggacaaacatttggtttaatcatggaataagaggctgaattgcaactgcaattcctgtttcttaaccgtcaatctgatgagcttttcctcttccagttttaactcagtcacaaacttgtttggcagatactgttaatcatttccccaatatttattcttccccttttctacagtaatataagtttcagttgagcacattattgctaagttacattggttttagcttcccttgttgcaaggtgtggtcatgtgactaggttgtagtgaataggatatgatggaaagacatgcatataacttttgtgtcctgcccttgaaagaaacacatcctaatctttactttctccctttcccactggttagatcgcctttggccatgcaggtgagggcaacaccttgggaatggcaaggaacctgggcctctgacccccctgagctgccatattgccttggcccttctgcctggattgttttatgagaaggaaataaagtcactatattttaaaaatattattgcagctcagcctttatcctcatcaatccagttgtctgccccatgacattggattggaccttcatttctcatgaartttgtattctgaaacaatgattctcgatctgtgggtcccaggaccatgagggtctgtggtggtgacacaaa

SEQ ID NO: 70762 - DNA, 1405 bp, Homo sapiens
gccgcgacgggaccctggtcaccgggtgaggaggcagggagccccgtgctgtcgagggcagagggcctgagatttgggttgtagccgtgcctccgtgttcaagtcacttaaccaagctgagcccctgtttcctcctctgcagaatggggataggaatcgcttccttgcagagtttattcatcatccagtatcattgagcacttgcttgtatcaggcaatgtgccgcgccccggtgagatagccgtgaacaacacagtctttgccttaacagccctcccccattactagaaaaatcaacaaaagccgggtaaatagctaacatacattctgattgctgtgtgtgcagcaaagcaaccaacggggtgaacccgttgtaaatagtgttgattttasggagggtgatctggaacacgcctctccgaggtgacctttgagtgggaacttgaagatgaatcactaagtgagccaaggtcagaactggaggaagagcgtttcagtccaaaggaaccccacgcacaaaggctcagaggctcaggggggcttgtgtgtatgagggactgaaaaaggagtggggtgtcagaaacatcaactcatcaagactgatgatttttttttttttgagacagagtcttgctctgttgcccaggatggagggcagtggcatgataccggctcactgcaacctctgcctcccgggttcaagcgattctcctgcctcagcctctggagtagctgggactacggacgtgtgccaccacgcccggctgatttttgtatttttagtagagacgggatggggtggggaacgggggagtgggttcaccatattggcctggccggtctcgaactcctgacctcaagtgatccacccacctcagcctcccaaagtgctgggatgacaggtgtgagccaccacgccctggcaagattgatgatttgaattatttaaaattatcttaaaaattatttgagtctcaaaaaaaaagtatttgttgatgataaagcttgttctgatcctgagtgggaccaggtgggagagagcagtggagaaacaaggaagccaatgaagggccgtaacagggatcaagtggtagttgggctgggtatggcctggggattgagggccatagatggatttgagctctgttgggggatggtcatttctgttaaatgaaacagactgtttgcaaaggcttgtggggattgtattgtcagaaccctgtccagcttcagctctgacaacagggagattcctagggctgttaagttgtcccagctacactcaggccccaggaggttcctggggcatgagggggaatctagcagccaggttgggatggctagggagaaagagcctgactatctgcagttgcccctgctggtgagtgagcttcccaccttcccc

SEQ ID NO: 70763 - DNA, 1405 bp, Homo sapiens
gccgcgacgggaccctggtcaccgggtgaggaggcagggagccccgtgctgtcgagggcagagggcctgagatttgggttgtagccgtgcctccgtgttcaagtcacttaaccaagctgagcccctgtttcctcctctgcagaatggggataggaatcgcttccttgcagagtttattcatcatccagtatcattgagcacttgcttgtatcaggcaatgtgccgcgccccggtgagatagccgtgaacaacacagtctttgccttaacagccctcccccattactagaaaaatcaacaaaagccgggtaaatagctaacatacattctgattgctgtgtgtgcagcaaagcaaccaacggggtgaacccgttgtaaatagtgttgattttagggagggtgatctggaacacgcctctccgaggtgacctttgagtgggaacttgaagatgaatcactaagtgagccaaggtcagaactggaggaagagcgtttcagtccaaaggaaccccacgcacaaaggctcagaggctcaggggggcttgtgtgtatgagggactgaaaaaggagtggggtgtcagaaacatcaactcatcaagactgatgatttttttttttttgagacagagtcttgctctgttgcccaggatggagggcagtggcatgataccggctcactgcaacctctgcctcccgggttcaagcgattctcctgcctcagcctctggagtagctgggactacggacgtgtgccaccacgcccggctgatttttgtatttttagtagagacgggatggggkggggaacgggggagtgggttcaccatattggcctggccggtctcgaactcctgacctcaagtgatccacccacctcagcctcccaaagtgctgggatgacaggtgtgagccaccacgccctggcaagattgatgatttgaattatttaaaattatcttaaaaattatttgagtctcaaaaaaaaagtatttgttgatgataaagcttgttctgatcctgagtgggaccaggtgggagagagcagtggagaaacaaggaagccaatgaagggccgtaacagggatcaagtggtagttgggctgggtatggcctggggattgagggccatagatggatttgagctctgttgggggatggtcatttctgttaaatgaaacagactgtttgcaaaggcttgtggggattgtattgtcagaaccctgtccagcttcagctctgacaacagggagattcctagggctgttaagttgtcccagctacactcaggccccaggaggttcctggggcatgagggggaatctagcagccaggttgggatggctagggagaaagagcctgactatctgcagttgcccctgctggtgagtgagcttcccaccttcccc

SEQ ID NO: 70764 - DNA, 1329 bp, Homo sapiens
ttttagtaaagacggggtttcgccatgttggctaggctggtctcaaactcttgaccacagatgatccacccacctcggcttcccaaagtgctgggattacaggcgtgagccaccacacccggcctcaggtagttctttctcacagtgtggaaacggactaacacagtggccttggccatggcatccatcgctgcccatagttatacttgggtgtgagcctttggtctctgcttcatgatggcagaccctatctgtgtggtccccccacgatccgagccaccacctgccccctgagggcgaccaggaaacagcctttgaactgattttctcatgaggctacaagaggacagggcagtaaggtcctctcatggtgaccacccttgacaggttggtgtgcagcgtctggcccagcccacccctctggcctccacatgcccggcctcagaatcagccctcccagagacaaccttccaatgcctgtgtctattcctctgtgtccccctgggcctcagcctgtcgcctcacactgaggaccgatggccaaaacatgcagcttcacaaagagtgaatcgccagccccctgacaaactatgggacccctccttggataaagactctgccccagtgttcttcactctgggtgcccatgctcctgggatccttggagctccacctggaatttgaggtctagactcagcaccttccttgagccttaattttacccccacrggaaagaatttaaagcatcatttttagatgaaaaccagtgcagatccatcatgaagcagggtgcaaaatcataagtgcttttacagaatgcaaaaccttgaagaaactgcctgctccgcctccagaccttctccttcatttctgctgtggcatgcacaccgcatgcccaggtgacaggcagcttcccccagccatctcatcctcatgacaaacccacaagactggggctccagtggttcccatttaagggatgaagcacctgaggctcaaagaggaaaagtgatttgcccgaggtcacacagcaaccaggaagtgctggaggtcttaaccattacagttccctgtctctctgaaagcaacaacttggggagggttgtctaaaaagcacccttttagaatattctaaaatattcccatggaattctaggagtgaggggaagcccacatggaagggtttaagactccccttctcctcccctccaactgctccaaaaagttgagcttctgcccaaggtttcatttgaaggaaaatccctgcttcggaagcagagttagacgcgcagagctgggctctcctcacaccctagtgcggggctgtgt

SEQ ID NO: 70765 - DNA, 1329 bp, Homo sapiens
ttttagtaaagacggggtttcgccatgttggctaggctggtctcaaactcttgaccacagatgatccacccacctcggcttcccaaagtgctgggattacaggcgtgagccaccacacccggcctcaggtagttctttctcacagtgtggaaacggactaacacagtggccttggccatggcatccatcgctgcccatagttatacttgggtgtgagcctttggtctctgcttcatgatggcagaccctatctgtgtggtccccccacgatccgagccaccacctgccccctgagggcgaccaggaaacagcctttgaactgattttctcatgaggctacaagaggacagggcagtaaggtcctctcatggtgaccacccttgacaggttggtgtgcagcgtctggcccagcccacccctctggcctccacatgcccggcctcagaatcagccctcccagagacaaccttccaatgcctgtgtctattcctctgtgtccccctgggcctcagcctgtcgcctcacactgaggaccgatggccaaaacatgcagcttcacaaagagtgaatcgccagccccctgacaaactatgggacccctccttggataaagactctgccccagtgttcttcactctgggtgcccatgctcctgggatccttggagctccacctggaatttgaggtctagactcagcaccttccttgagccttaattttacccccacgggaaagaatttaaagcatcatttttagatgaaaaccagtgcagatccrtcatgaagcagggtgcaaaatcataagtgcttttacagaatgcaaaaccttgaagaaactgcctgctccgcctccagaccttctccttcatttctgctgtggcatgcacaccgcatgcccaggtgacaggcagcttcccccagccatctcatcctcatgacaaacccacaagactggggctccagtggttcccatttaagggatgaagcacctgaggctcaaagaggaaaagtgatttgcccgaggtcacacagcaaccaggaagtgctggaggtcttaaccattacagttccctgtctctctgaaagcaacaacttggggagggttgtctaaaaagcacccttttagaatattctaaaatattcccatggaattctaggagtgaggggaagcccacatggaagggtttaagactccccttctcctcccctccaactgctccaaaaagttgagcttctgcccaaggtttcatttgaaggaaaatccctgcttcggaagcagagttagacgcgcagagctgggctctcctcacaccctagtgcggggctgtgt

SEQ ID NO: 70766 - DNA, 1329 bp, Homo sapiens
ttttagtaaagacggggtttcgccatgttggctaggctggtctcaaactcttgaccacagatgatccacccacctcggcttcccaaagtgctgggattacaggcgtgagccaccacacccggcctcaggtagttctttctcacagtgtggaaacggactaacacagtggccttggccatggcatccatcgctgcccatagttatacttgggtgtgagcctttggtctctgcttcatgatggcagaccctatctgtgtggtccccccacgatccgagccaccacctgccccctgagggcgaccaggaaacagcctttgaactgattttctcatgaggctacaagaggacagggcagtaaggtcctctcatggtgaccacccttgacaggttggtgtgcagcgtctggcccagcccacccctctggcctccacatgcccggcctcagaatcagccctcccagagacaaccttccaatgcctgtgtctattcctctgtgtccccctgggcctcagcctgtcgcctcacactgaggaccgatggccaaaacatgcagcttcacaaagagtgaatcgccagccccctgacaaactatgggacccctccttggataaagactctgccccagtgttcttcactctgggtgcccatgctcctgggatccttggagctccacctggaatttgaggtctagactcagcaccttccttgagccttaattttacccccacgggaaagaatttaaagcatcatttttagatgaaaaccagtgcagatccatcatgaagcagggtgcaaaatcrtaagtgcttttacagaatgcaaaaccttgaagaaactgcctgctccgcctccagaccttctccttcatttctgctgtggcatgcacaccgcatgcccaggtgacaggcagcttcccccagccatctcatcctcatgacaaacccacaagactggggctccagtggttcccatttaagggatgaagcacctgaggctcaaagaggaaaagtgatttgcccgaggtcacacagcaaccaggaagtgctggaggtcttaaccattacagttccctgtctctctgaaagcaacaacttggggagggttgtctaaaaagcacccttttagaatattctaaaatattcccatggaattctaggagtgaggggaagcccacatggaagggtttaagactccccttctcctcccctccaactgctccaaaaagttgagcttctgcccaaggtttcatttgaaggaaaatccctgcttcggaagcagagttagacgcgcagagctgggctctcctcacaccctagtgcggggctgtgt

SEQ ID NO: 70767 - DNA, 1329 bp, Homo sapiens
ttttagtaaagacggggtttcgccatgttggctaggctggtctcaaactcttgaccacagatgatccacccacctcggcttcccaaagtgctgggattacaggcgtgagccaccacacccggcctcaggtagttctttctcacagtgtggaaacggactaacacagtggccttggccatggcatccatcgctgcccatagttatacttgggtgtgagcctttggtctctgcttcatgatggcagaccctatctgtgtggtccccccacgatccgagccaccacctgccccctgagggcgaccaggaaacagcctttgaactgattttctcatgaggctacaagaggacagggcagtaaggtcctctcatggtgaccacccttgacaggttggtgtgcagcgtctggcccagcccacccctctggcctccacatgcccggcctcagaatcagccctcccagagacaaccttccaatgcctgtgtctattcctctgtgtccccctgggcctcagcctgtcgcctcacactgaggaccgatggccaaaacatgcagcttcacaaagagtgaatcgccagccccctgacaaactatgggacccctccttggataaagactctgccccagtgttcttcactctgggtgcccatgctcctgggatccttggagctccacctggaatttgaggtctagactcagcaccttccttgagccttaattttacccccacgggaaagaatttaaagcatcatttttagatgaaaaccagtgcagatccatcatgaagcagggtgcaaaatcataagtgcttttacagaatgcaaaaccttgaagaaactgcctgctccgcctccagaccttctcctkcatttctgctgtggcatgcacaccgcatgcccaggtgacaggcagcttcccccagccatctcatcctcatgacaaacccacaagactggggctccagtggttcccatttaagggatgaagcacctgaggctcaaagaggaaaagtgatttgcccgaggtcacacagcaaccaggaagtgctggaggtcttaaccattacagttccctgtctctctgaaagcaacaacttggggagggttgtctaaaaagcacccttttagaatattctaaaatattcccatggaattctaggagtgaggggaagcccacatggaagggtttaagactccccttctcctcccctccaactgctccaaaaagttgagcttctgcccaaggtttcatttgaaggaaaatccctgcttcggaagcagagttagacgcgcagagctgggctctcctcacaccctagtgcggggctgtgt

SEQ ID NO: 70768 - DNA, 567 bp, Homo sapiens
tgtgccttgccctaatcttccctcctacacttatttttataacctaaatacaaaccttgcagagaaagggaaagattggatctctctgctccagtatatgcttttatttgtctcacccaattcagtctagtacttcaagtcastctaccaacgcaaaacaagatcaaatgctaaactgtcgagaagactaacaattccttccaaaagcatttactgtttatcttttcacataccactcagtccgctgtgattgctggtatccttggtattttatcttattttttcttaataatacatgcctttcttaaacattaaagtatcacttcttgtaagagcaagagttaaaagatagttaagatgttgaagaattccatttgctttaaaaacaaaagactgaaaccatcttgattccccttccaccttcatagataacagaaacataggtgccaatgctctcctcaatcctttaaagcaattgcctttttaaaccatttgcaatttgtttcctgcttaaagacatgaggaattcattacaaactatttagagaataaatatccaaggagtca

SEQ ID NO: 70769 - DNA, 607 bp, Homo sapiens
tcaataaggtactttaaaacatttttttaattgaagtctaatgtactcaaataaagcagcatttatcatagctgtttggccaaatgtcctggtccttggggtttgaggactactgccctagaggaagtcaagtttctttcttaactcctgtaacgagcaggtcgggtaacataggtcaactacaatttcaacctccttctcatggtattttcatcataaattccagcttaaattttaggaatttaaacttgactacaaacatggagatacttaacagaaatgctgtagggaatataagtattaccaatcagctagttctgggcccaaattgggtttctgattcctactagcaaggagacttgaacaaattagttgactagatcttagctttcttaacctgtaaagtggccttatgaatagtgcttacctcatcaggctgttttaagtacgaaataagaccatgttagaaggaaattttaacagtgcctggtgcaaactgatgttatatcaccattaagacctatgaccattawccttaccatcatcaacttcactttcttttgagtatcattaaaaacatcaaacaatctgctgcagaaatggatgg

SEQ ID NO: 70770 - DNA, 655 bp, Homo sapiens
caaactacaaattaaaaaatgggcaaaggatttgaacaaacatttctccaaagaagacagacaaatggccaataaacaacttagggaataaatgaataatggagggaaaggagagaaataggacgcctttgttctcctaccaagctgcttctaggtacttcattcctccatcccctgtcctacctgacaagagagaagagttgtttatctgaatggtctgaattaatgatttgaccccattaccactagtcaaggtcactgtcctttaaaatgcacaaactgtgactctaacccctctctttaacatcctcttcaagctctaacccctctctttaacatcttcaattccatgcgggcagcactagttggctgagcaaggtcctgtttgctttggttaaactcagctatatcttttctccttccttgctcytgacctcaacaaatatacccgggagaatgacttaagatgaagcctctcctacagatctgacctcttatacgttctttttaatatgtacctctgagagttcctgagcgagctagtcccaaggattggactggggataggatggaggaacagtggtccttttacagcctttaaccagagctaactccaagcatagggtgcttgcaaaactatgagtagaatggtcca

SEQ ID NO: 70771 - DNA, 795 bp, Homo sapiens
ctcctggtggccatcttgctaccatgtggaaaaacaatggccatgataagaccaacacagtgtaaggcagaactttgggatggcaaacatgagactgagttcctgcacccaagccagtaaagaggccctcagtgaacaaaatgtgtaaagaaacaacttcaaggacatgtaactaaaacacttaggaatttccttgggtcaggcaggtttggatcatcaacattttcatttccctctttatatccaaaatgaaatgttcacatggtaagaccaaccagttttttcttcttgtgtttatagtggaatttggatgagaactgtggatataatctacataattaatctccgccaactccaaatgccagataatctcttaaattgtttgtcaagataaataagacagaaaaattgactcacacaccaacctcctctctaatttaacaaaattggagaatcgcacaatgggtggaataytgacaatatgcaatagaagttgccctaaagggattatttagcaggaacaaggaaaactccaacagttggcagagtcatgatgaggttaaacaaaagatgaaactcttctccaaacctgggtgttgaattattgaaatttgtttcaaacatttcagcatctgagtagtgacatatgacaaacacatgcctatattacaatagaaaactaaacttgtaacaaagtaatctttatagttaccttggttttgtcatctgtaaaataggagaaataatagtgtctacttcatatgggtaaacagtcaattagatgattctcataaa

SEQ ID NO: 70772 - DNA, 978 bp, Homo sapiens
tatgagaagctggtgatttattagtaaacacagcaaattctaggtccctttgaatccagagtggaacaaaaagagacaatatcataaggtgaagactcgtatagcaaatatcttgttttatgtagaacagactgttttcctatcagtcaagtgggactgaaccggtgagcaatgattaaatacctctttcgtgccaggaactgtgcttggtgtttttcgtactgtctctaaattaccaacattcgacaaagtgggtattccttagttactctgtggcatgataattgtgattagccattaggtaactcatactgaatcacacaatgagggagcttaaatctgtaaccagaagtgatccctcatcaggtgctttccctttcctccaggtaattttattttcctcaaggtggtttggtcagtccacataatttatccacaggtttcattcttttccttgctatgggaagaaggggttattcacagcaaaaaaagaaaaaaataaataaaaataaaaccaagcaaccaaacaaaaaaacctggagaagcaaggtayatgtgcttctcaaagtgagactctccaaccagcagcatcagctgctgttaaaaaggcatattcttacagttattacaaaaaacggtgtggaggcttctcaaaaaattaaaaacagatctactgtatgatccagcaatccgactactgcatattcactcaaaggaaatgaaatccgtatgtcaaagagatctctgcacttccttcttcactgcagcattattcacaatagccaagatagggaatcaaactgaataccccacttttatagcagcacaattcacagtggcaaaaatatggaaccagcccaaaggcccaccaatccacaagtagataaaagaaagtgtggtatattggaatactatacatagatgaatacaatatataatatactatacatatataacagaaaacttacccaatataca

SEQ ID NO: 70773 - DNA, 978 bp, Homo sapiens
tatgagaagctggtgatttattagtaaacacagcaaattctaggtccctttgaatccagagtggaacaaaaagagacaatatcataaggtgaagactcgtatagcaaatatcttgttttatgtagaacagactgttttcctatcagtcaagtgggactgaaccggtgagcaatgattaaatacctctttcgtgccaggaactgtgcttggtgtttttcgtactgtctctaaattaccaacattcgacaaagtgggtattccttagttactctgtggcatgataattgtgattagccattaggtaactcatactgaatcacacaatgagggagcttaaatctgtaaccagaagtgatccctcatcaggtgctttccctttcctccaggtaattttattttcctcaaggtggtttggtcagtccacataatttatccacaggtttcattcttttccttgctatgggaagaaggggttattcacagcaaaaaaagaaaaaaataaataaaaataaaaccaagcaaccaaacaaaaaaacctggagaagcaaggtacatgtgcttctcaaagtgagactctccaaccagcagcatcagctgctgttaaaaaggcatattcttacagttattacaaaaaacsgtgtggaggcttctcaaaaaattaaaaacagatctactgtatgatccagcaatccgactactgcatattcactcaaaggaaatgaaatccgtatgtcaaagagatctctgcacttccttcttcactgcagcattattcacaatagccaagatagggaatcaaactgaataccccacttttatagcagcacaattcacagtggcaaaaatatggaaccagcccaaaggcccaccaatccacaagtagataaaagaaagtgtggtatattggaatactatacatagatgaatacaatatataatatactatacatatataacagaaaacttacccaatataca

SEQ ID NO: 70774 - DNA, 978 bp, Homo sapiens
tatgagaagctggtgatttattagtaaacacagcaaattctaggtccctttgaatccagagtggaacaaaaagagacaatatcataaggtgaagactcgtatagcaaatatcttgttttatgtagaacagactgttttcctatcagtcaagtgggactgaaccggtgagcaatgattaaatacctctttcgtgccaggaactgtgcttggtgtttttcgtactgtctctaaattaccaacattcgacaaagtgggtattccttagttactctgtggcatgataattgtgattagccattaggtaactcatactgaatcacacaatgagggagcttaaatctgtaaccagaagtgatccctcatcaggtgctttccctttcctccaggtaattttattttcctcaaggtggtttggtcagtccacataatttatccacaggtttcattcttttccttgctatgggaagaaggggttattcacagcaaaaaaagaaaaaaataaataaaaataaaaccaagcaaccaaacaaaaaaacctggagaagcaaggtacatgtgcttctcaaagtgagactctccaaccagcagcatcagctgctgttaaaaaggcatattcttacagttattacaaaaaacggtgtggaggcttctcaaaaaattaaaaacagatctactgtatgatccagcaatccgactactgcatattcactcaaaggaaatgaaatccrtatgtcaaagagatctctgcacttccttcttcactgcagcattattcacaatagccaagatagggaatcaaactgaataccccacttttatagcagcacaattcacagtggcaaaaatatggaaccagcccaaaggcccaccaatccacaagtagataaaagaaagtgtggtatattggaatactatacatagatgaatacaatatataatatactatacatatataacagaaaacttacccaatataca

SEQ ID NO: 70775 - DNA, 978 bp, Homo sapiens
tatgagaagctggtgatttattagtaaacacagcaaattctaggtccctttgaatccagagtggaacaaaaagagacaatatcataaggtgaagactcgtatagcaaatatcttgttttatgtagaacagactgttttcctatcagtcaagtgggactgaaccggtgagcaatgattaaatacctctttcgtgccaggaactgtgcttggtgtttttcgtactgtctctaaattaccaacattcgacaaagtgggtattccttagttactctgtggcatgataattgtgattagccattaggtaactcatactgaatcacacaatgagggagcttaaatctgtaaccagaagtgatccctcatcaggtgctttccctttcctccaggtaattttattttcctcaaggtggtttggtcagtccacataatttatccacaggtttcattcttttccttgctatgggaagaaggggttattcacagcaaaaaaagaaaaaaataaataaaaataaaaccaagcaaccaaacaaaaaaacctggagaagcaaggtacatgtgcttctcaaagtgagactctccaaccagcagcatcagctgctgttaaaaaggcatattcttacagttattacaaaaaacggtgtggaggcttctcaaaaaattaaaaacagatctactgtatgatccagcaatccgactactgcatattcactcaaaggaaatgaaatccgtatgtcaaagagatctctgcacttccttcttcactgcagcattattcacaatagccaagatagggaatcaaactgaataccccacttttatagcagcacaattcacagtggcaaaaatatggaaccagcccaaakgcccaccaatccacaagtagataaaagaaagtgtggtatattggaatactatacatagatgaatacaatatataatatactatacatatataacagaaaacttacccaatataca

SEQ ID NO: 70776 - DNA, 838 bp, Homo sapiens
acatggcacatgtatacctatgtatcaaacctgcatgttgtgcacatgtaccctagaacttaaagtataattttaaaaaattaaaattaaaattttttaaaaagtggtttcagggactcagtagcaacaaaatgaagcagttcctcagagacttgaagaagtcataaaataactaatgaaatttccaccactatcagctgagaacttacaggccccatgtcagcacaccacacagatcatttaacacagagaggcatggctgctcagtgttcagtgggttgggctcatattcagcccttccactcaccagctgtgtgttcttgggaacttacttaacttctatgtgcctctgtcatctcatgtatacgatgtggataataayagcatctgcctcacaggattgtgagtttacatgtgcgacatttttagaagaggaactggcacatagcaagtccaatataagtatttgctgttattattgctctcttacttaatttccagaaataaccaagggactacaaattattttaaagggaaaaagctgaccagaaagcagatgaagaagcatatgaagcagaaattcaagctgaaataagtgaactgttagaagagcacacggaggagtacgcacagaagatggaagaatacagaacgtcgttacaacagtggaaggcctggaggaaagtgcaagtgtgtaaacaaacactcagcctggaatagggctggccaggaagtgtctgggagggcagcctccagtacaggagtggggaaaccagactggcagactagggtatcctgtggctccctctgtctcttccccgtcccctggctaagggat

SEQ ID NO: 70777 - DNA, 838 bp, Homo sapiens
acatggcacatgtatacctatgtatcaaacctgcatgttgtgcacatgtaccctagaacttaaagtataattttaaaaaattaaaattaaaattttttaaaaagtggtttcagggactcagtagcaacaaaatgaagcagttcctcagagacttgaagaagtcataaaataactaatgaaatttccaccactatcagctgagaacttacaggccccatgtcagcacaccacacagatcatttaacacagagaggcatggctgctcagtgttcagtgggttgggctcatattcagcccttccactcaccagctgtgtgttcttgggaacttacttaacttctatgtgcctctgtcatctcatgtatacgatgtggataataatagcatctgcctcacaggattgtgagtttacatgtgcgacatttttagaagaggaactggcacatagcaagtccaatataagtatttgctgttattattgctctcttacttaatttccagaaataaccaagggactacaaattattttaaagggaaaaagctgaccagaaagcagatgaagaagcatatgaagcagaaattcaagctgaaataagtgaactgttagaagagcacacggaggagtacgcacagaagatggaagaatacagaacgtcgttacaacagtggaaggcctggaggaaagtgcaagtgtgtaaacaaacactcagcctggaatagggctggccaggaagkgtctgggagggcagcctccagtacaggagtggggaaaccagactggcagactagggtatcctgtggctccctctgtctcttccccgtcccctggctaagggat

SEQ ID NO: 70778 - DNA, 467 bp, Homo sapiens
tggtggtgtagtgcaacccatttattgtaaakatgaagaaatgcctggttgtcctcctacctctctggctgctcttctcaatctcctttgctggattctactctttttctaccatctaggctctttaggactctgtccttggacctctcctctttccacactcatattatttgatgattctttctaatcttatagcttttaattccatctgtgcactcttgattcacaaacttatacctccaggccagatctccctttggaactccagtcatatttccaactgcctaattgacacccttctgggaaatctaagagattgctcagagtttgcacgcctcaaatgagactctgggacttctgcaaagtctattctatcgtatttaatggcaactctgtccttccagttgctaggacccaaatatcttagtcatccttgactattcttttttttttttcgtatggcatgc

SEQ ID NO: 70779 - DNA, 1320 bp, Homo sapiens
tgagccaccatgcctggcctgcaccttgaaattttaaaacaatttttttttcatgtcctggaaccaaagctcttcatgccatgttggggtgggatttgataaaacactttacatgtttcccataaatagtattcccaacaattctgaggaaattctgtggttctataaaccactgcttgaaaaattagttttctatcatgacaaacagctcatctttgaaagtacaaagtatttgcaattgattttcagaatgaatcatattcttaataattgcacaagattactcacaaattcaagggagttagatttaaaaaactgactcaaaatcaaatgaacccaatttataacttgtgcttacaacatgttctcatatgacacccacaaatgtttcttttgtgaagactcaacctcaagttacagagaagggaaatttctacttccatgactttgccagtaacacaatcacagtggtaatatgcaatgttcttatttcatwatatggggcatagaacagtttgctgacttaattggcaaataactgtcttttcaagacaattgagaggtcaatatctgaagaatgagtgaaatggaaatattcagaaatgtcctaagtgaaccataaagaaagttgagtctccaagatctcaagatgaaagcattgatgatgagaaagctgcctgtgattccatgtgtacattgtgagtagtaatttagcaaagtcattcactgactgggaaatatctactatgcaccaagtctagagtcacaataatgagtttggcaaatgagctgaggggctatttgtatgaagctcatgaactaattaggggtaacaaagaaataataaaaaaataaagtgtaatggggaaaggcagagttctacaaggatagagagatcaagaaattttgctggttggctctcactgctttgatggcctggttttgatacctatgtagagccttggcaaaatacactaaaattatttttaacattagtgttgatgagaagatcaaactgttttaattctctggactgcttaagagtcacatgcccttacgacaagagtaggtttcatactgtaagctacaggtaagatttttttaggattgaggattaaatgttttattcctgtaaggttttctattcctttcatctaccaatatccaaggagatgctaatgtaaaaactcttcagaactgctttccatctcttttccttcccctacatcccattaaaaatggagtaggcaggaatataattaataacagtaggctattttctgggaggaaaacacccagctgtaggcactgagagatgca

SEQ ID NO: 70780 - DNA, 1320 bp, Homo sapiens
tgagccaccatgcctggcctgcaccttgaaattttaaaacaatttttttttcatgtcctggaaccaaagctcttcatgccatgttggggtgggatttgataaaacactttacatgtttcccataaatagtattcccaacaattctgaggaaattctgtggttctataaaccactgcttgaaaaattagttttctatcatgacaaacagctcatctttgaaagtacaaagtatttgcaattgattttcagaatgaatcatattcttaataattgcacaagattactcacaaattcaagggagttagatttaaaaaactgactcaaaatcaaatgaacccaatttataacttgtgcttacaacatgttctcatatgacacccacaaatgtttcttttgtgaagactcaacctcaagttacagagaagggaaatttctacttccatgactttgccagtaacacaatcacagtggtaatatgcaatgttcttatttcattatatgggrcatagaacagtttgctgacttaattggcaaataactgtcttttcaagacaattgagaggtcaatatctgaagaatgagtgaaatggaaatattcagaaatgtcctaagtgaaccataaagaaagttgagtctccaagatctcaagatgaaagcattgatgatgagaaagctgcctgtgattccatgtgtacattgtgagtagtaatttagcaaagtcattcactgactgggaaatatctactatgcaccaagtctagagtcacaataatgagtttggcaaatgagctgaggggctatttgtatgaagctcatgaactaattaggggtaacaaagaaataataaaaaaataaagtgtaatggggaaaggcagagttctacaaggatagagagatcaagaaattttgctggttggctctcactgctttgatggcctggttttgatacctatgtagagccttggcaaaatacactaaaattatttttaacattagtgttgatgagaagatcaaactgttttaattctctggactgcttaagagtcacatgcccttacgacaagagtaggtttcatactgtaagctacaggtaagatttttttaggattgaggattaaatgttttattcctgtaaggttttctattcctttcatctaccaatatccaaggagatgctaatgtaaaaactcttcagaactgctttccatctcttttccttcccctacatcccattaaaaatggagtaggcaggaatataattaataacagtaggctattttctgggaggaaaacacccagctgtaggcactgagagatgca

SEQ ID NO: 70781 - DNA, 1320 bp, Homo sapiens
tgagccaccatgcctggcctgcaccttgaaattttaaaacaatttttttttcatgtcctggaaccaaagctcttcatgccatgttggggtgggatttgataaaacactttacatgtttcccataaatagtattcccaacaattctgaggaaattctgtggttctataaaccactgcttgaaaaattagttttctatcatgacaaacagctcatctttgaaagtacaaagtatttgcaattgattttcagaatgaatcatattcttaataattgcacaagattactcacaaattcaagggagttagatttaaaaaactgactcaaaatcaaatgaacccaatttataacttgtgcttacaacatgttctcatatgacacccacaaatgtttcttttgtgaagactcaacctcaagttacagagaagggaaatttctacttccatgactttgccagtaacacaatcacagtggtaatatgcaatgttcttatttcattatatggggcatagaacagtttgctgacttaattggcaaataactgtcttttcaagacaattgagaggtcaatatctgaagaatgagtgaaatggaaatattcagaaatgtcctaagtgaaccataaagaaagttgagtctccaagatctcaagatgaaagcattgatgatgagaaagctgcctgtgattccatgtgtacattgtgagtagtaatttagcaaagtcattcactgactgggaaatatctactatgcaccaagtctagagtcacaataatgagtttggcaaatgagctgaggggctatttgtatgaagctcatgaactaattaggggtaacaaagaaataataaaaaaataaagtgtaatggggaaaggcagagttctacaaggatagagagatcaagaaattttgctggttggctctcactgctttgatggcctggttttgatacctatgtagagccttggcaaaatacactaaaattatttttaacattagtgttgatgagaagatcaaactgttttaattctctggactgcttaagagtcacatgcccttacgacaagagtaggtttcatactgtaagckacaggtaagatttttttaggattgaggattaaatgttttattcctgtaaggttttctattcctttcatctaccaatatccaaggagatgctaatgtaaaaactcttcagaactgctttccatctcttttccttcccctacatcccattaaaaatggagtaggcaggaatataattaataacagtaggctattttctgggaggaaaacacccagctgtaggcactgagagatgca

SEQ ID NO: 70782 - DNA, 2191 bp, Homo sapiens
tacagttctgctcttggacagctctggtccagcactgcaggtggtgaatgtaagagtgatagtgatgtgatctcttagagaagaatgatgtgttaattaatttgaggaatggaagagcatgcccttgacagtcactgtgacttgagtttgcgtgctagcacctccatttgagctcagatttatttaccttgtaattcctgtagaatatagatgatatgctgtacttcaaaatttcattgtgaatattaaaagaaataatacggccaggtgtggtggatcacgcctgttatcccagcactttgggacacccaggtgggatcacttgaagtcaggagctcgagaccagcctggccaagatggtgaaaccccatctctactaaaaatacaaaattagccaggtgtggtggcatgtgcctgtaatcccagctacttgggagggtgagccaggagaattgcttgaacccaggaggtggaggttgcagtgagccgagatcatgccactgcactccagcctgggcaacacgagcaaaactccatctaaaaaaataaaaataaaataagatagaaataatacacacagtgttcttagcaaattccttggtgcacaattatatggtagttattattatcaaaattataaagcagaaaaaagtctcaaagccaatgattatttatttatttattttaragttggagtcacggagtgcagtgtcacgatcatagctcacagcagcctagaacccctgggctcaagtaatcctcccatttcagcctctgaatacctaggactaaaggcatgggccaccatgcagctaattttttagttattttattttattttattttattttgtagatacagggtctcactttgttgtccaggatggtcaccaacactggcctcaagcagtcctcctgcctcagttttccaaaatgcagggataacaagcatgagccactgcaccaggcctgggaacttacagcctagtatattccgcaattatggagggggtacgacttatgtgaaaccttcaggaatgcatacccttttagagagaaataagtcttaagttagagatgagaaaaagcatgggaggctaccttctgaatattgaaggtaggtgtaagattataatggtagagaataagttcagatatgaagaataggcctaggttatggcagaccttgaacttcagagaaattttagctaaatatgaaggttagaaagagccattatacatttcagaccatggaagtaatataagctggtcgtttagaaaatttcatcaattgcgttatgcaagagtaactgaagttcaaagagatggtttttgagaaggtgactggaaggatttgcagttatcaagaaatgaggtgaagaggacttggagtaattttggctgagaaaaataaacctttacatacagctctaagtctataagaacaaagaatatataacaatccacatgtagagtataaaataataagaatgctatcagtaaaacaatagtgaaaaagaagcatcacatttagtccataaattaaatcgtgtccttaacttagtataaaaagatctaaggattatggtataaatattgcacactttttatgtggtggacatgaaagcaatttctgtgagtttaaccaatggaaaattggtactcttggataaatgattggccctatacttgaaccattaaaagagagaacattaaactaagtagacataattttgagagttccactacattaaaattgaagaacagcttactaaaaacagccagacttaagggtaccatattgtataaaaatgttatattttccatattataaatggtttggctgatagatacttaagaggaaaaatatagccagagtcttttaggttggccatatagtttcaagttttcaagttatcgaaaatcaacccatttatttatttaaaactcatactcacctgcttggagacataatttggaaatttataagttgtatatacaacttcataaaatctgaagaaataaatcaaaataggcattattgaaaagcagcaacataaatgtatgtcattgggattctacaatgggtttgctgtaattatatcgtacattgatgttaactctcagtttcctgacagctaaaacaaagagaaaaaaatattataggtattaaaatgtttatacaaatcatt

SEQ ID NO: 70783 - DNA, 785 bp, Homo sapiens
gggagcccataggaaggaaaatatttagatagtgatgaatgaaatgaaactacaagtacttaggagggagacttttccagcagtctctctcttgggtatctgagtgtctatgaaggttcttaagcttactggtttttgtggatttgaataaggcaggatctatataatgacaataattggattttaaaatttttaatgttttaatcttctgtgaagaatattcccaataacaacctaacaacatatgcatttgtactttgacttttgcacactcagctttcaaacatttgcggtgtttcarggggctccctgtagtgttctagggtgaagagaatcaatgggccctctttaagtagcttgcatgctgaagatccaagactcccattttcccgtgacacagattagtctttgaatcagaaatagataatgcagaagagacagtgccttttctaccttgttttaggttatcaggtttactccagttcagtaacaaaagttgtgtcagatatcaactggattttcagtttagcctttagggtagataatttataaggacaaattattgtctggccgtgccgttataatgcctgtcactatttgttacgggtttaagggtgagtctgcactggatatttcataggttgggagaggtggaggcagaaataggtaactgaaatgttttctaaaatggaagccatatcttaattataccaagaaatattatttaatatgcagataactgagtttcctcagactttgttttaccatttcttttggaggggaca

SEQ ID NO: 70784 - DNA, 785 bp, Homo sapiens
gggagcccataggaaggaaaatatttagatagtgatgaatgaaatgaaactacaagtacttaggagggagacttttccagcagtctctctcttgggtatctgagtgtctatgaaggttcttaagcttactggtttttgtggatttgaataaggcaggatctatataatgacaataattggattttaaaatttttaatgttttaatcttctgtgaagaatattcccaataacaacctaacaacatatgcatttgtactttgacttttgcacactcagctttcaaacatttgcggtgtttcaaggggctccctgtagtgttctagggtgaagagaatcaatgggccctctttaagtagcttgcatgctgaagatccaagactcccattttcccgtgacacagattagtctttgaatcagaaatagataatgcagaagagacagtgccttttctaccttgttttaggttatcaggtttactccagttcagtaacaaaagttgtgtcagatatcaactggattttcagtttagcctttagggtagataatttataaggacaaattattgtctggccgtgccgttataatgcctgtcactatttgttacgggtttaagggtgagtctgcaytggatatttcataggttgggagaggtggaggcagaaataggtaactgaaatgttttctaaaatggaagccatatcttaattataccaagaaatattatttaatatgcagataactgagtttcctcagactttgttttaccatttcttttggaggggaca

SEQ ID NO: 70785 - DNA, 825 bp, Homo sapiens
tttggaatctgaggtagagtactctcttgtgaaattaattttctcactctgaatctcattttttatattattttcttctaaaacttagcagttgtctacctatcattgttttatgttagtattacaacttttattagagataaccattttaaagaaatgggaggggttaattttaatttttttttactttggcaaataataaatagttgataaattctttgagaggtgtgatctgaaaaaaaaaattgctggaaaatacacagtgacagaaaaatggtgttcgggaacgctttcccacaatagaggagatacaaattttggtctaggcttatttgagtgtttttactttgagttgtatatcatatgagtgtgactaataatacctctgtttaaatgaatctttaatacatcagatgacttatcatagaaatcatggaatcactctgttayacatagcatgtggttttttttatttcttgtacacatattttgatatcatacactatttttgcagagagctatttccttatttttattcgtggctctataattagactaaaataatattagaaattgtggaaatttaactagacatggtatcatgtccatgtagtcccacctattcaagagatgaagccaggagaatttcttgagcccaggagtttaagaccaagcttggcaatataacaagagcttatctctaatttcaaaaagtcgtggaagtttagaaatttaaattctgttctcaaatctgtattagagaaggtttacacagtgttttccaagccttttttatttagagtatactttaaactctttatttaa

SEQ ID NO: 70786 - DNA, 660 bp, Homo sapiens
aagaaaacttacagcatagtaaagggtaccaggaatgctggagttggggtagacagggtacacttttaaataaagtggccaagagaggtctcattaagaaggtggcattcaaacacaaaaatggaaggaaatgagggaagtaactgtgtccacatatagggaagagcattacagacagagggaagaggcagtgcccagcatgttgaaagaacggcaagagggtaacatggccagaactgtgaatgaggaagagacagcaatagagatgtgatcacagcatggtgaggacccagtcatggcaggcccccatgtcactgtgaagactctgagtgaaatggagcgccctggcagggctctgagcagaggaatggccttttcttgtttttgtgtttaaagaaccactctgaatgctattttgagatgaactctaatgtggcaagggtggaggcaggtcagagccaatgcagtgatctagggaagagataatgctggctcgggctgggcagtgktgaaggtagtaagaagtggtcagattctgtgggtgttttgaatgtagagccacattgcaagactaccaagtcattaaatcaactgaaacctggagtttcaaaaaacctagacttaagaaaaccattttcataacagaggaacagaacatag

SEQ ID NO: 70787 - DNA, 1806 bp, Homo sapiens
gatgcctttggttgtcttcctgcctgtgggccatttggcgctcacagctgcttttctcttgttctctccctgtagttactggggcttccggatgcagatgacgatgcgtttgaagagtacagtgctgacgtggaagaagaggagccagaggcggaccacccccagatgggggtcagccagcagtaaatctgggggctcccctgagaaggagagtgagccccacagtaacctaggtggggtcactgcccctcctgggttagcattttgcattagcacttcgaaataggacatctggctcccagcatccaaattaaaatgaaatacctttttaacgaccacaaaatatctgtgatgagctttgctcagaagtgacctgaatttcactcccgcttcagtggggtttctatggagttgtcttggtagcctttgccattttgaatttagagtccattttgtggctgactattctcttaagtttatgttggagaattaacattcgctgactcgaatgtagagaactctgaatgtattaaggataggttttgagtcctcacaggtgaccttactgagggaaagcatggcagagaagaaatgcagtctgcactttttatgtactttttaagtgtccgtaagtgaaaggttttgcttataaagcatgaattttaatatctagtcattaaactgcacaagtgcaaatacaagggcaggaaaggataatcacttagctttggactaagagggtaagagaggcccagaagcctttaagtgttttgccattactgagttacctgggtatgtagcgactggttcgtggttaggtgtaaatgttacttgcttgttcgactgtttcaaaacatgctaattccaaagccacttttgaagtctatagtggaaaatatagatggggtgaaagatataatgtattgatttttaaagctgtttataagccgtcccacgtataaaatgaaacattttaccttctctctttctaatgagatggccgcttgttaaatcatgaaaacatccagaattcaagtgccgcttaaactttgaagccatagataaatttgttagaaaagtaaaccaggattaaaagtttttaaaaatatggtagaatccttctttactttttaagtcttttatttaaaaaaaaaaagtcaaaaaaaggattccattgtgtaatttatttaaaaatttaatcacatgtttcgagggacttaattgtggtgtatttgtaaagggacacgaaggtaggaatcttttaatcgtgggttagcttgrttaacagggaacgttttaataatcaagatactcagacaactcacagaaacaacttctgtaataactggaaatactgctgttatcgtttagccaacaattacttactggggacatcctttgtaatgctaacatggaattattcctggacccttctgcatccctggttttagttaacctaggatgcggaatgcctcctttacaacactagattaaacctagcatctggggtgggtacgtttaaacagtcacacatgtgcctgttaggttgtgaaagttttgaattaaaaacaagcagtagcagcagaggccacagaacttatgggagtcttgtatatcttccaggcatgtcggtgtaaacctgattgtctcgacattttctgtttaattgattggtgctgtgaggagttcggctgctcgtggtaaaacagcgtactccagttttaagtcatcgggtaaaataataggacagtgatttccatctgtgcttcagtacccactttgtgttcttttcttgaaaagtcatac

SEQ ID NO: 70788 - DNA, 647 bp, Homo sapiens
tcagccgcctagccaagactgcagggatggcccgcagcctcatcggggccaaggacacacgcctcctgtcagacacttctaggtgttggcttccttagagagcctggggttaggttagctttcctgcttttatcttctgccttggggacctgccaaacgaaatcccacacctgtacagaactgggataggcgcagtggagcgggttgcttggggggcgttggccgacttcttagagaaggccctccatgtgacttcctcccaggagccagatgcgatcctcaggctgctctcaccgtggcctgtccacggtccaggtccatctcagcagcgtgagggtgcactcagggtgttgttagagcgtctcgtgtgtgctagacgcacccctactcgttcctatagaacacagaggacataggaaacccttaaaacacacatgggattctctggtcacagttttgggttcaggctaygctgctttgggcaggtggagcaccccccgaggaagcctgcaagtccagggcacaggctgccttttggagggagggctggcccataggtgctgctggctccccgccaccagctgggcctcagccctcacggcattcctgctgagcaccgtggggcacccagggagcaggggcgtcag

SEQ ID NO: 70789 - DNA, 1045 bp, Homo sapiens
aagacaaagcacagctgttctcacgagttgctgacactgctctacccccaggaccacactttgagaaccagtggcataaactaacctgagtctaycacttttgactactagcgtggggattatgggaacatgtagatgttatttgatttttctgggtaatttaggtctgacccagcaatcttttggctcaggattttggcataagtatattaatgccttgctactcagggtatggttcaaggttcagtagaataaatattagctaagaatttgttatgaatgcaaattctcagccccaccccagaagtaccacattaaaatctgcattttgagcagaaaccctgggtaaattgtgtctaccttgaggtttggaaggcactgtggggacccacttccttgccttagtaaggttaagactgtttgcaagattggggagatagtacagcatttctaagtcattcctgagctccaggacagatgtatgatttgtaaagattgccttcactctaaagctgacctgagagcattccagtgtagttgtttttgttttttcacaaatgaaatcactgtttgaaattgtgattatttaataaaagtcctatcaccttatattcttgtttcttgtctcaaagtccagtggcctctagaaccaaaaaggtctgagttaaaggtcaacccctatctcgttcacgtacctgaagacagagatactatttaaaccagagtttggtaagccttgtctataaaagggtagatagtcaatatggctttgtaggccataaagagtcatactgttgagctgcaactcctcaaccctctgtggtagcatgaaagcagccattggacacaaaccaatgggagtcattgttctaatgccacttttttttttttttttttttttttttaacaaaagcaggtagtgagtcaggtttggtccatgggccataatttgcagatctatgttttaaactccttaagcctcagtttccttgcccataaaatgaccttcaaaaagatctatccagaagggtaggtataaagatga

SEQ ID NO: 70790 - DNA, 974 bp, Homo sapiens
atcaacagagatagcttgacggataatgcactctgagtttctaaacacagctcactcacaatgaatatgctcaacagcctctaatgcaaataaaggaatacagctggtgcctgggcccttggacagggggaaaaatgagttctgagaattaggtgcctttagctaaagtcacacagagctctaccattgtgggctatgtgcggaagaattgacagaaaggctgctgtgatggtgaagtaggaggttctggaagttgaggtcttgtgaatgccaataaaactacatgggaatgtgagataggcccaggatgttaagaacatccaggacagaatggaagtttgcagtcacaacaattagtaccagttgacaaggtcttttagaaacatgtcagcagaagaggccacatatggtatctcttttacacctttctaaagttgggagaagagtgagaggaggaggagaaatgctgaggggcctgatcattaagctgcgggtctggaggagcagcggcagcgggatcagctgcctgctgagcttggtcaaagggctgtggctgaactggtgcagccagctggagcaggggcggcaggaatagaggcagcaggtatagcagattgtaaaataacaggaaactgccatgcctcgggatccccatattcccttgcctgagaaatggccctcataagaggggtgtcattatcaggaaggtatgtaacctgttgcttatgggtagtaacagcagttgtgaccggaccagaagcagaaaggaaattggagttttgaatagaggagaarttgagagcctttaagccaggctgacgcgcggttgcctgctgtgcaggtctttcagaggcctgaactccaggctgctgcattgactgcagggcctgagttccaggctggtgcattgactgcagggcctgagttccaggctggtgcactgactgcaagtcagacttctgaggagcctgatg

SEQ ID NO: 70791 - DNA, 651 bp, Homo sapiens
actcctggatgcccaggggattcagatctcctgtggtttacacacagcactttagctatcgtgatgaattaatgtaaggcctagtaatgcacctttgagtatgtgaggctttttaaggctcttggaggtcaagcttgtggctgcataaagtacattttcccttggcacaccagagactctgacaacatgcaatgctatatttctattcctcacaggttccagatccaaatgtccaaagtcactattcggctcctttgggcagctgatgtttcaagcctgtgataattcaaggtaaatatttaccaaggcagcccaagcaggaacactttgcatgcttagtgaaatagcgatgtgtcaattcaggggagaggtaccatttttctttttgtccaaacacaaggcaggtgcaaaacccagggcagggcaccactgatcagaaatctcctccttggattgggatgggtgcctgctgtgagagttctgctaatctccatttaaaaggaaaggcgggagcaggtgtataaaacccgaatgcctccctgatcaatgttatttacacacataggtgatatagtgaagaggttctgggctgacagccacacagcttagtccytagtgataactccacactagctgtttggtcttccacga

SEQ ID NO: 70792 - DNA, 2693 bp, Homo sapiens
ttgctactgtaataaattacacaaatgtcgaatcttaaaagaatacaaattatctgacmgttctctaggttagaagtccaacaagaatctcattggactaaaatcaacatggtggcagggccaggttcctttctggagtctctgcctctttcctccacttctaagaactcttgtgataacattggaccaccaggataatccagaataatctctttaaaggccagctgattagcaactttaattccatctgcaaccttaaatctcctttgccatacaagctaacataggtagagcttctgggaattaagtcacaaacatctttggaggctattattctgcttaccacactctcgtttaggactcacacatgaagaataaggcccatcattcgagaaggagcaaaggcaatatgaggctgtctccaaaagggagaattcttggagcagaagcttgaagccagagcatctctactctccccttcccatccctcctcctctcatgtaagactgtaaggtgatattttagccaagagtattcttatagaggcagaaacccagagaaaagaaaggatgtcattcagttggaggcaggtagagttgcgagtagctacttgaaaccagggcagatcatttagagagctaatctttctcaccagttaatagtcgttgctatttatctttcagggtcttgtagagatccagtgagatagtggatgcaaagtgattagcatactgccttatccctttctggactgccccatttgtgtaggtttgttattggtttcagacctgtccaaggacaatcaatcaatcaatcaataaaagatgtttctgtagtatttgtttcccagaattttagtgatggaaaagagagagcaggatttaaatccctggttcataggcaataaactataaaaattgttaattgattacattgactcaggacttatttatttgggcatctttattgacatttgagaggataccaaaaagaaaaaaagtttttctatacacttaaagaaagttccctggcaaaacaaatgtgcataatttttaggaaaggctgcatgtcatgaaaacaggtgtttaatcataattcttactggcatgcatctaaaattaaatcatgcagagttagtaatgttaaaaaccataatattcttcaattattataataatatgttaccttaagcaaatgtgctacaagttccaaagcacatcaatttacattagttcaccttaaatgcaggtatagttcttgccccaacatcatttccagttggctcctaaattggtttatttatgctacttagcccttggaattaatcaaccattctgtcttgaatttacctaaacaaatagagcattcctgatataattagtccagatagtatggagtaatatgggatttaacatgaaaaatacatattttcctaggaaatgtcagacttttcagaatacaccttccacccctcctcatttaacattttatgatatattctacaggccaggcatggtagctcatgcctgtaatcccagcactttgggaggctgaggcaggcagatcacttgaggtcaggagttccaaaccagcctggccaatgtggtgaaaccccgtctctactaaaaatagaaaaatgagccaggcatagtggcttatgcctgtaaccccagctactggggaggctgaggaaagagcatcacttgaatccaggaggcggaggttgcagtaacctgagatcgtgcagttgcactccagcctgggtgacagagtgagactctgtctcaaaaatatatataataataaatgctacaattcctaattcgataaaagttctacacaacatctgtgctcacagacttagaatttttgaaggcagggtaagaatttgctgtgatattgctaactccacttgctagaataggaatcctctaacagggactttatagacaatgaaccataagggacattggctctgctgaaccagcttaccactgactgtgactgcctctttcagcatggagctgatggaacagactcctctctgtgagtcacagttgagctgagctggactcggatcctatgaccaacctgtaacatgagttcagcttcttttcccctaacccaagaacagtcagtatgatgctgcagctctcttactctccatcattaatgctctgtatatattcacaaaatacacacatggaatctgtgtcacacacatttttcctgtatgaggaaaaatgactggatgtgaggaagacagatggagtgggaatgaggaaccaaggtttcctgcttcttgttgaatctgagctcttctttgagttgtaccagtgtaaggaatattttaaatccattttgtcagaaagtattcactctgtactcagaaggaatatctcagaatgccactgtctaacagcgtcatacccggtcttacaagggtgaagtctagacaatcatacattacaatttaaaggatttaaataatcacttaaaataatgtttcacaaatggccaacatgaatgctaagtttactagcaaactagacatcttattttttaaattaccttaacatttaaaattctgaatagcttatacaaaagacacttagactactggataatgttgctaattgtgtctcttgtcctgttgcaatagctgaattcttacaaatactatgtctaagtta

SEQ ID NO: 70793 - DNA, 2693 bp, Homo sapiens
ttgctactgtaataaattacacaaatgtcgaatcttaaaagaatacaaattatctgacagttctctaggttagaagtccaacaagaatctcattggactaaaatcaacatggtggcagggccaggttcctttctggagtctctgcctctttcctccacttctaagaactcttgtgataacattggaccaccaggataatccagaataatctctttaaaggccagctgattagcaactttaattccatctgcaaccttaaatctcctttgccatacaagctaacataggtagagcttctgggaattaagtcacaaacatctttggaggctattattctgcttaccacactctcgtttaggactcacacatgaagaataaggcccatcattcgagaaggagcaaaggcaatatgaggctgtctccaaaagggagaattcttggagcagaagcttgaagccagagcatctctactctcccyttcccatccctcctcctctcatgtaagactgtaaggtgatattttagccaagagtattcttatagaggcagaaacccagagaaaagaaaggatgtcattcagttggaggcaggtagagttgcgagtagctacttgaaaccagggcagatcatttagagagctaatctttctcaccagttaatagtcgttgctatttatctttcagggtcttgtagagatccagtgagatagtggatgcaaagtgattagcatactgccttatccctttctggactgccccatttgtgtaggtttgttattggtttcagacctgtccaaggacaatcaatcaatcaatcaataaaagatgtttctgtagtatttgtttcccagaattttagtgatggaaaagagagagcaggatttaaatccctggttcataggcaataaactataaaaattgttaattgattacattgactcaggacttatttatttgggcatctttattgacatttgagaggataccaaaaagaaaaaaagtttttctatacacttaaagaaagttccctggcaaaacaaatgtgcataatttttaggaaaggctgcatgtcatgaaaacaggtgtttaatcataattcttactggcatgcatctaaaattaaatcatgcagagttagtaatgttaaaaaccataatattcttcaattattataataatatgttaccttaagcaaatgtgctacaagttccaaagcacatcaatttacattagttcaccttaaatgcaggtatagttcttgccccaacatcatttccagttggctcctaaattggtttatttatgctacttagcccttggaattaatcaaccattctgtcttgaatttacctaaacaaatagagcattcctgatataattagtccagatagtatggagtaatatgggatttaacatgaaaaatacatattttcctaggaaatgtcagacttttcagaatacaccttccacccctcctcatttaacattttatgatatattctacaggccaggcatggtagctcatgcctgtaatcccagcactttgggaggctgaggcaggcagatcacttgaggtcaggagttccaaaccagcctggccaatgtggtgaaaccccgtctctactaaaaatagaaaaatgagccaggcatagtggcttatgcctgtaaccccagctactggggaggctgaggaaagagcatcacttgaatccaggaggcggaggttgcagtaacctgagatcgtgcagttgcactccagcctgggtgacagagtgagactctgtctcaaaaatatatataataataaatgctacaattcctaattcgataaaagttctacacaacatctgtgctcacagacttagaatttttgaaggcagggtaagaatttgctgtgatattgctaactccacttgctagaataggaatcctctaacagggactttatagacaatgaaccataagggacattggctctgctgaaccagcttaccactgactgtgactgcctctttcagcatggagctgatggaacagactcctctctgtgagtcacagttgagctgagctggactcggatcctatgaccaacctgtaacatgagttcagcttcttttcccctaacccaagaacagtcagtatgatgctgcagctctcttactctccatcattaatgctctgtatatattcacaaaatacacacatggaatctgtgtcacacacatttttcctgtatgaggaaaaatgactggatgtgaggaagacagatggagtgggaatgaggaaccaaggtttcctgcttcttgttgaatctgagctcttctttgagttgtaccagtgtaaggaatattttaaatccattttgtcagaaagtattcactctgtactcagaaggaatatctcagaatgccactgtctaacagcgtcatacccggtcttacaagggtgaagtctagacaatcatacattacaatttaaaggatttaaataatcacttaaaataatgtttcacaaatggccaacatgaatgctaagtttactagcaaactagacatcttattttttaaattaccttaacatttaaaattctgaatagcttatacaaaagacacttagactactggataatgttgctaattgtgtctcttgtcctgttgcaatagctgaattcttacaaatactatgtctaagtta

SEQ ID NO: 70794 - DNA, 917 bp, Homo sapiens
agaaaatgttgacattttccatttgagctaagattatagggctttacaacttctttgatttcagacttgtatttctttttcactgagaataatsgttcctaatgatattaacacaattacttgtttgcttggttctataatatgcttcaactaaaacacgttcaaaataacaaaactaccattacaactgacaatgtagtttattttacaattcattttgtccttaggctctatcctactaaggacttgctgtcaaagttctatgtattgaagttacttgaaataattcttctctatatggttatgcaaatactttggcatagagttacatttatttgttaaatttcttctgatttttaaaattataatttgttttaatacaaaacatttacctggttagaaagccaaactataaagccaggtatattgggaaaaaaaactctagattccattttatcttctcaatgctgttttttcgtacatctatctataggtaatcatttatgttaggttttggtttgatctattaattgctttactttgaaaatatcaataatgtgtgtgtgtgtgtgtgtgtgtgtcctccatacagaagacagcatactctatacactattttgaaccatttacttttcacttaatggtatatcctaaatgtcattttatataaataagctgtaattttctcatttatgtttatggctgcatagtatatttttatatgaatgtcccatatttcatttaactgatcccttgttgttcaaaaaataatgccatgataaatagccttatcgatatgcccttttgtatttttctagtgtatcttttagatatatttctaaaaatgggaatcctgagataaggataaaatggatttataattttcatagatatgccaaattccttttcataggggt

SEQ ID NO: 70795 - DNA, 1100 bp, Homo sapiens
tgaggaagtaagaaaaggggaagaggaagagaaagattctgtgtgctttcayatacttgtacacacatacaaataaatgcttctacatacaatggaatagtattcagctgtaaaagaaatgaagtactgatacatgctgcattgtggatggaccatagtaagtgagcgaagccagacacaaaaggccacatagtgtgcaattccatctataagaaatgtccagaatagataaaagcagattgatgattgcaaggagctgagggagaggagaatggggagcagctgcttcatgggtttggcattttattttggggcaatgaacatgaaagaaagaggtgattgtgcaacattgtgaatgaactacacacccctgaattgttcaccttaaaatggtaaattttatgtaatgtgaatttcacctcaataaagaaattaataactcccagctaataaatgacttgactctgcctgatttgattcataactgaaaaatgaatataaatggattgtgatttactagatttggtaatttattttaaatgacatagggaagctagataagaaacaaaaatagctgtaactttatgctggaaattcttactctcactttaaaacctaggcccaaaacttgatgttttaaatttacagaattacgggttttagttttattcttagccctgtgacatttgtgaaaattaagtgaatcatttttttcctctgtataaattagagctcctttaaaaattcacttcactcacctcacaaaagctacaacgaataagagactgaataaaaggtagatattctctccatgtgaaaccctctaggtgtgaagggcaagtgagatacatacctttctcctctccattcagtctgtgtgccacctgtggtggtaaatcgacttcagtgtactcgtagatccgtaatttataaacagaaaagaacacatcactttgtcttttacccctaaaagtacattgaatgacaatagggtgatgtgctgtttccttatggtagatgcccaggagcatcttacctgcttttggggcagctggcacagcacgtgcgaggggtttgggttttccgagtcacgggtggtt

SEQ ID NO: 70796 - DNA, 761 bp, Homo sapiens
ggggttaggtaagtctaagtgtatgtcgaaatgggtcatagtgagagaagagcctggaaaattatcttgggatagccgtgtgggacctggaatggtgagattttggatttgatctcaattttagcataggaaggaatgatagcaatcaggatagcttcctcccatgactggagaagcttgctggagaccgcttgctggctggtcgctgccagagctggctgcggacctgagacagcacttgtctgagggcttttcccaggaaatgcggtgtctattgagcaaaatgaattcacagaaattctgtatctgatatcagttgtatttttcttaagtatcatatggtctgtattttaaaatttataattgatttactaaaccaaggaggtttcctggttatttttggcttttgaagtaggaatacacttctgttggttgccacaagatggcattggcctcaaagtttctctgttagatgtgtttttgggtatttagtatttttttttcctgcttttaaaaaatattttcttatatttatttttactttcttccaatattaactttaatagaactttaatatccattctatytctaatattagtgaagttcttttttcctttgccaatttatccttttaaaatcttttaaaaagttaggtgtttcttgtagaaaataaaaatgtttcagaaatgtgtaactgagaaggtgaaagcaccttataatccctctttcctatgggattgttacatgttatgctggatttt

SEQ ID NO: 70797 - DNA, 1118 bp, Homo sapiens
gtcttgtagcatacagaaacctcctctttgaaaactttgagaaaacaagttcagtggcctgtgagtatatatacgacacaggacagaatgaattatcagatccctgagtggtctgtgcttacgtaaatatcaaagaacatttcaaaagtgaatcaatttcctgttctttttattttattttattttttwaaattttatttttctgtgttgtttttttttttttttttttttttttaaacagagtctcgctctgttgcccagactatagttcagtggcgcagtctcagctcactgtaatctctgcctcctggattcaggcgattctcctgcctcagcctcctgagtagctgggattgcaggcccccgccaccccacccggctagtttttgtgtattaagtagagacagggtttcaccatgttggccaggctggtcttgaactccttgacctcaagtgatctacccacctcggcctcccaaagagttgggattacaggtgcaagagactatgcccagccttaaattttatttttgaattgaggtcatgctctgtcacccaggctggagtgcagtggtacaatcatggctcactgcagccttgaactcttgggttccagccatccttccactgcaacgtccctgggaactggcactacaggtgtgcaccaccataaccagcccatttcatgttcttttaaaaacagaaatttattatgtatcggtttgtaatggcaagctggtagactacaataaaagaatataattttgcacatctaagaaaacattttcaaaattggcatatcataatgttaatactgttagatactgcagaggatctcaagaaacagtaatgatccaaaaatgccatttttgggagtaccattcctggagaaattgacagagattttagatatcacatcttctgaacattaagactacttagcccctctaaaatatattattgttttattattgctttgctctttctcagccccatagagcttattaattcaataatgcatatatttgagaacactaaacaatattagaaaatatcatatggtattcatgtgatttaattcatctgctattattttatagaacctatcactgaaacag

SEQ ID NO: 70798 - DNA, 1118 bp, Homo sapiens
gtcttgtagcatacagaaacctcctctttgaaaactttgagaaaacaagttcagtggcctgtgagtatatatacgacacaggacagaatgaattatcagatccctgagtggtctgtgcttacgtaaatatcaaagaacatttcaaaagtgaatcaatttcctgttctttttattttattttatttttttaaattttatttttctgtgttktttttttttttttttttttttttttaaacagagtctcgctctgttgcccagactatagttcagtggcgcagtctcagctcactgtaatctctgcctcctggattcaggcgattctcctgcctcagcctcctgagtagctgggattgcaggcccccgccaccccacccggctagtttttgtgtattaagtagagacagggtttcaccatgttggccaggctggtcttgaactccttgacctcaagtgatctacccacctcggcctcccaaagagttgggattacaggtgcaagagactatgcccagccttaaattttatttttgaattgaggtcatgctctgtcacccaggctggagtgcagtggtacaatcatggctcactgcagccttgaactcttgggttccagccatccttccactgcaacgtccctgggaactggcactacaggtgtgcaccaccataaccagcccatttcatgttcttttaaaaacagaaatttattatgtatcggtttgtaatggcaagctggtagactacaataaaagaatataattttgcacatctaagaaaacattttcaaaattggcatatcataatgttaatactgttagatactgcagaggatctcaagaaacagtaatgatccaaaaatgccatttttgggagtaccattcctggagaaattgacagagattttagatatcacatcttctgaacattaagactacttagcccctctaaaatatattattgttttattattgctttgctctttctcagccccatagagcttattaattcaataatgcatatatttgagaacactaaacaatattagaaaatatcatatggtattcatgtgatttaattcatctgctattattttatagaacctatcactgaaacag

SEQ ID NO: 70799 - DNA, 842 bp, Homo sapiens
agcctattcatttggtttcatctactaaactgcaagtgttttgaaagcagtggccatgcttcatacctactttacaactaccatatatcttgctcaaaaaatacttattgattgattgacaaaggcttggctgagcaaaaattctttaatgcagcaataatgattcatgacagggaatgacccagcaagaaatatcacgtgccatctttatatgttctacagtgaataattactacacatgtcccgattttaaaagattatcatcttgtaaaatccccattttatttagctgtttagttctaggaggtatctgagttataaaaggatgacttaaatatgtttctgatttagatccttttgagacatatatctctatatacgtatatttacctatatttttgagacatatatatctatatttaggtctttttgagatgtacatattcacctatctagaagtctatatatctagaaataaatatatctagatatctaggtatctatgtatatatatgtgaggtgtgtgtgtatgtatgtgtatgtgtgtgtgtgtgtgtgtrtgtatatatatatatatatatatatatatataaaggattttttctctctgtgtgtgtgtgtgtatgtgtagatagatagatagatagatagatacatagatgtaatcatattgctaagatgcccagtttctatttgtagtcttttctcagtaaggcagtaggacattggtgctttcaagggagcttagaaacattgaatatgacattcatgtcattaaaaatagttagctttcttggctacattcataaaaattcccctaatgcttcctttaattggcagga

SEQ ID NO: 70800 - DNA, 852 bp, Homo sapiens
taatcttcaatctcatgtgtgaggattatccctaattgacagatgaggaaacaaaggcagaaagatgttaagcaacttacccaaggccacagagccaataagtaggtgatctggacaggattccaggcaactttggtcctgaaacataagtcactggatctatattgtgcactgccctccctacaggaccagaagtkttggaggcagaaggattgagggtcgtgatcaactcggtataccactggaggctgtatgagtgggcagcaaactgtttcttttgggtgcagaatgttggcaaactgacaaactgcgtctgccgcctggaaggactgctgaggacagtcacgacccagttgcaagtgtttcttatgattaggcgtaataattgaagcctgttagtaataacgagaacctgtgatcaattaagcagctgaccaatcgttacctcctcctccctgctcttgctacccaataaataagaagggctctggaagctcaggggctgcctttgctcactagaatcagggagctctcctcttcttccccacttcccttcctttaaaatagcttcttttgtcttaagttttcatttctacattcgtcccccttcgttcagtctcgtattgatggtttaaagtagtaacagtagtaactgttgtagtgaaggtctcaagtagcaactgtggcaaaccgcaacacagaagtagggggcctgcagctgatgtaaaggcagaaatggcaatgtatttctttggggttagatgtgcttgctctgaaacctgaaactggtgatgaagacaatagtttccctaaaattagtgcaatagcaatcctttccatctaaccaactta

SEQ ID NO: 70801 - DNA, 852 bp, Homo sapiens
taatcttcaatctcatgtgtgaggattatccctaattgacagatgaggaaacaaaggcagaaagatgttaagcaacttacccaaggccacagagccaataagtaggtgatctggacaggattccaggcaactttggtcctgaaacataagtcactggatctatattgtgcactgccctccctacaggaccagaagtgttggaggcagaaggattgagggtcgtgatcaactcggtataccactggaggctgtatgagtgggcagcaaactgtttcttttgggtgcagaatgttggcaaactgacaaactgcgtctgccgcctggaaggactgctgaggacagtcacgacccagttgcaagtgtttcttatgattaggcgtaataattgaagcctgttagtaataacgagaacctgtgatcaattaagcagctgaccaatcgttacctcctcctccctgctcttgctacccaataaataagaagggctctggaagctcaggggctgcctttgctcactagaatcagggagctctcctcttcttccccacttcccttcctttaaaatagcttcttttgtcttaagttttcatttctacattcgtcccccttcgttcagtctcgtattgatggtttwaagtagtaacagtagtaactgttgtagtgaaggtctcaagtagcaactgtggcaaaccgcaacacagaagtagggggcctgcagctgatgtaaaggcagaaatggcaatgtatttctttggggttagatgtgcttgctctgaaacctgaaactggtgatgaagacaatagtttccctaaaattagtgcaatagcaatcctttccatctaaccaactta

SEQ ID NO: 70802 - DNA, 852 bp, Homo sapiens
taatcttcaatctcatgtgtgaggattatccctaattgacagatgaggaaacaaaggcagaaagatgttaagcaacttacccaaggccacagagccaataagtaggtgatctggacaggattccaggcaactttggtcctgaaacataagtcactggatctatattgtgcactgccctccctacaggaccagaagtgttggaggcagaaggattgagggtcgtgatcaactcggtataccactggaggctgtatgagtgggcagcaaactgtttcttttgggtgcagaatgttggcaaactgacaaactgcgtctgccgcctggaaggactgctgaggacagtcacgacccagttgcaagtgtttcttatgattaggcgtaataattgaagcctgttagtaataacgagaacctgtgatcaattaagcagctgaccaatcgttacctcctcctccctgctcttgctacccaataaataagaagggctctggaagctcaggggctgcctttgctcactagaatcagggagctctcctcttcttccccacttcccttcctttaaaatagcttcttttgtcttaagttttcatttctacattcgtcccccttcgttcagtctcgtattgatggtttaaagtagtaacagtagtaactgtkgtagtgaaggtctcaagtagcaactgtggcaaaccgcaacacagaagtagggggcctgcagctgatgtaaaggcagaaatggcaatgtatttctttggggttagatgtgcttgctctgaaacctgaaactggtgatgaagacaatagtttccctaaaattagtgcaatagcaatcctttccatctaaccaactta

SEQ ID NO: 70803 - DNA, 852 bp, Homo sapiens
taatcttcaatctcatgtgtgaggattatccctaattgacagatgaggaaacaaaggcagaaagatgttaagcaacttacccaaggccacagagccaataagtaggtgatctggacaggattccaggcaactttggtcctgaaacataagtcactggatctatattgtgcactgccctccctacaggaccagaagtgttggaggcagaaggattgagggtcgtgatcaactcggtataccactggaggctgtatgagtgggcagcaaactgtttcttttgggtgcagaatgttggcaaactgacaaactgcgtctgccgcctggaaggactgctgaggacagtcacgacccagttgcaagtgtttcttatgattaggcgtaataattgaagcctgttagtaataacgagaacctgtgatcaattaagcagctgaccaatcgttacctcctcctccctgctcttgctacccaataaataagaagggctctggaagctcaggggctgcctttgctcactagaatcagggagctctcctcttcttccccacttcccttcctttaaaatagcttcttttgtcttaagttttcatttctacattcgtcccccttcgttcagtctcgtattgatggtttaaagtagtaacagtagtaactgttgyagtgaaggtctcaagtagcaactgtggcaaaccgcaacacagaagtagggggcctgcagctgatgtaaaggcagaaatggcaatgtatttctttggggttagatgtgcttgctctgaaacctgaaactggtgatgaagacaatagtttccctaaaattagtgcaatagcaatcctttccatctaaccaactta

SEQ ID NO: 70804 - DNA, 877 bp, Homo sapiens
cagtttcaggaaataacttagtgaaattttgatgatttctatgttctgatycttgaaattaaatcttttactatgttcattgcaaaagtatatatatgcacctcaaaaatctgccatccccacaaaggaatacgaaggaaaaggaattcaaatcattggagaccattgaattggggtcaaatatatcggaaaataattcatgaatttgagagcagagttattaaaactttttatcttctcaagccaaagggggaaaagcaagcacctagattaaaatcaaaagtcactttaccaactatgaaattataggaggattcgaaatcacaaaagcatacatttttttgtgtgtctgaatttgtctttttacatgtgttaatgtgtagaatcaaggggaatgaatgttaaaaaattcctgttctctcttttagtccattgtccctgccagtcaggtgctgtagaactgtttcttataacaccagagcaaatgtgtttattatttattttttttcctgacttctatccttctttagtaagcctacacactgctgctgccacaatgtagtacccagacttacttgctcttgaagatgtgtgttccactgctgacatcctgctcctctggctgaatcccttctgcaatggtagtcacagatgctctgtcaaaagtggaattgtaaaactactataaatggatattaagtggactctaaatgattatcagtgttttttctctaaatgtttcccttcgtttttagggtttactgtttttcgttgaaaatctggatatgcttaaatgaggattaactcattacacctgtaggtcaccttcactgactctggccttgtgttttgagcattttgtcttaatctcaaagta

SEQ ID NO: 70805 - DNA, 729 bp, Homo sapiens
ttgctttcactaatagtctttttcataagtcattattattcataagtcattgtctgtttggcttttgttttaataagggaaatttttatcctattttgctattctcctgaggagcatgctctttaacttcacttttgttttttagtcaagttgatattaatccctatttctttataggttgcttgctgaaacagatactacagtgactagtaatatcctaaaatttcctctaaaagccttgcacttattacatttgtagaactgggcaccaatccgctgaagagctcaggaattgaaaatggggctttccagggaatgaagaagctctcctacatccgcattgctgataccaatatcaccagcattcctcaaggtgatagaagattctycaaaacattttgaaaaatttaaattcaaaggctttaattaaaaaaaaaaaatcttgtggaaactggaattgtcacctaagaggccaaccttatttccagcaaattctctattactgctagtgtttcatccagtgtttatatttccagcaaattctctattactgctagtgttatatccagtgattcagtctggatgaccacggggccatccaggctcactgtagagatgggtagactcctgttaatgtctagtttaagacacaacttaatgcacagtgattttataatattgtaaaatcacaaagaaaaagtacatttatttaaaaaatagcatgccttg

SEQ ID NO: 70806 - DNA, 687 bp, Homo sapiens
tctgaattttaccagagtactgaatacacattcactgtcatggaacatttacaatgttgtatgtgaggtaggtgctatagactgaatgtgtccctttgaaatcctaatccctaaatggtggcatttagaggagattagttgataaagacagagcccccctgaatggaattagcgtttatataaagagagctcccccataccctcagccatgtgaggatacagcaaaaagatgaccatctacgaatcaaaaagatgaccatctaccaatcaggaagtatgagccttcacccaacaccaaatctgccagtgccttgatcttgcctgttccaccttccaaagtggggagaaatgaattcctgttttttgtttttgtttattttattttattttattttattttttttgagatggagtctcgctttgtcacccaggctggagtgcagtggtgcgacctcggctcactgcaagctccgcctcccaagttcacgccattctcctgcctcagcctcccgggtagctgggactacaggcacccgccaccacgaccggstaattttttgtatttttagtagagacggggtttcaccgtgttagccagaagggtctcaatctcctgaccttgtgatctgcccgcctaggcctcccaaagtgctgggattacaggcgtaagccaccgcacctggccaa

SEQ ID NO: 70807 - DNA, 913 bp, Homo sapiens
atacacaaatttttaccctgcagcgggatcataaaatattttcactgggttattgtcagtacccartgagatattgcataggaaagtgtttaggaacagttttacttcacaaaagccaataatggcaagatatagtagaacaaagactttgactatttgacctcttagcagctgtgccacattcaatttattccttattctctatgagccttggtttctccttctgagaataagtattttgttcttgcaagggttttctcaaggacaactgagtcaatgcttatgaatgtgttttttaaactgggcagacctatccaaggtaaagagctatactcttacttcatctgaatctgctcactcagatagattttgtcttcactattctttggtgtacccgatatatgacttaaaacaacagtgagtttaaaaaggatgcaaattttatttaatttaaaagtttaaataatttaatgtcccttttctcacagtacaaatctgtgtttgtataagcctcttttggaagcaacatggaagagaccatccaacaagataataaaagttagctctgtctggttaaaaattccagctcactgggccagtcacaattgaatactgagtcttggcttctcccagtgcatcccatggtcagtatctgtctctccaagtaaaagtcagtgacaacttgcctgtgagggaaagatccaattgcatctccagaatgaagatcgatacaatgactgcaagtaaaccgtgtctgaccttatcgtttgtaagaaggaaaagaatcaacagggcatgaaaagtgtcagcattttcagttttgggaggtgataaaggggaaacagtttgtgttgtgctcatccgtcattggacatcagtaagatcattaagggtaaaacgagaggtaaagaag

SEQ ID NO: 70808 - DNA, 913 bp, Homo sapiens
atacacaaatttttaccctgcagcgggatcataaaatattttcactgggttattgtcagtacccagtgagatattgcataggaaagtgtttaggaacagttttacttcacaaaagccaataatggcaagatatagtagaacaaagactttgactatttgacctcttagcagctgtgccacattcaatttattccttattctctatgagccttggtttctccttctgagaataagtattttgttcttgcaagggttttctcaaggacaactgagtcaatgcttatgaatgtgttttttaaactgggcagacctatccaaggtaaagagctatactcttacttcatctgaatctgctcactcagatagattttgtcttcactattctttggtgtacccgatatatgacttaaaacaacagtgagtttaaaaaggatgcaaattttatttaatttaaaagtttaaataatttaatgtcccttttctcacagtacaaatctgtgtttgtataagcctcttttggaagcaacatggaagagamcatccaacaagataataaaagttagctctgtctggttaaaaattccagctcactgggccagtcacaattgaatactgagtcttggcttctcccagtgcatcccatggtcagtatctgtctctccaagtaaaagtcagtgacaacttgcctgtgagggaaagatccaattgcatctccagaatgaagatcgatacaatgactgcaagtaaaccgtgtctgaccttatcgtttgtaagaaggaaaagaatcaacagggcatgaaaagtgtcagcattttcagttttgggaggtgataaaggggaaacagtttgtgttgtgctcatccgtcattggacatcagtaagatcattaagggtaaaacgagaggtaaagaag

SEQ ID NO: 70809 - DNA, 605 bp, Homo sapiens
catgttcaagactggccactcatcacctctgtcacactgggttcctcaacgctaaaggcattgcaaagtctttggaccacatgattctggattcattgacttttcagacttacttatttaactttccttactctctcagcatcttcatttgtgaaatgaagaatgaatgaataaatggatagatacatacatgtatgtatgtatctatctagtatctgtctatgtgtctatcatckatgtctatctatcatctatctatctatctatctatctatctatctatctatctatctatctatctaatcattcatctgtttctctctctctctctgtgtctctgagttttaattctaattcctacatgctcttttggctctacaagttgtgctgatttgtgtggaaatctcatgggttttcaaaatcctattttacagtgagatgtttataacttgggattaccagtacttcactttctcaaatcatttgtgtttgcttgtatgtgtgaatatttgcatgtgttcatgtgatggtctttaatacactatcttgagagttatattgcataatgaaggcactctaaggtcaaaatgtccaggttggatctt

SEQ ID NO: 70810 - DNA, 605 bp, Homo sapiens
catgttcaagactggccactcatcacctctgtcacactgggttcctcaacgctaaaggcattgcaaagtctttggaccacatgattctggattcattgacttttcagacttacttatttaactttccttactctctcagcatcttcatttgtgaaatgaagaatgaatgaataaatggatagatacatacatgtatgtatgtatctatctagtatctgtctatgtgtctatcatcgatgtctatctatcatctatctatctatctatctatctatctatctatctatctatctatctatctaatcattcatctgtttctctctctctctctstgtctctgagttttaattctaattcctacatgctcttttggctctacaagttgtgctgatttgtgtggaaatctcatgggttttcaaaatcctattttacagtgagatgtttataacttgggattaccagtacttcactttctcaaatcatttgtgtttgcttgtatgtgtgaatatttgcatgtgttcatgtgatggtctttaatacactatcttgagagttatattgcataatgaaggcactctaaggtcaaaatgtccaggttggatctt

SEQ ID NO: 70811 - DNA, 835 bp, Homo sapiens
ctttcccagtaaggggggagtatacacacacacacacacagacacacacacacacattcgtgcatgcgcacacacatcctatctatacacaaaatctatccaagttaggtaaacatttttattgtcattattaatatcaagtgycttctataatccaagtgtttgtttgaccatttacatgattctctcaccctgtggactggaagggaacaatgagttgtaaaatctgatgatgatcaaagatgatgcctctctgtgaaaaaaaaaaaaaaaaaaaaaaaaaggagtcagtattgtaggagccctcatttccacaggaaaagcacactttctgcatttgatttggcacattctctgtgtcttaatttcaatgattccaaaatgagatgctcttaaagaaggaaaatgttcagtattggagagggggcattttcctcccctaccttcatttcccttaaaacataagcacagaactaatgaatgctattaaaggcacttgtagaaatgattctgatttgtatctgatgactaactaacctattattgcacttcttgggcagagattaatgggtaattcttaaagaataaagactctaacaagccttagaaatatgtgtgggcccagactgtaccacgtgacctcagaaagccgaaccctggctgttaatatccttgactaatgaaccaaggctacagtccgtgctagcaaagtgtcaagaaataagtaaccagagaggtgaccttttaacatgcttctaaatgtaatttttaacagaacagtgtcaataagttcaaaatcccatatgcttttgatctgatatggaagtacaatgca

SEQ ID NO: 70812 - DNA, 625 bp, Homo sapiens
aagttaaaatattctaggtttttgtaattyttgggatgaaggtaacaatattaaccaactttggactttgataatttacatctccatgttaaaatgactagggtgctgggcacaatggtttgagcctgtagtcccagctactagggaggccaaggtgggaggattgcttgagggcaggagtttgagaccagcctgggcaacatactgagacccccatatctaaaaaaaaaaaaaaaaaaagtggctaggataagaacagacagagaaaatgtagaacatatagcataaaccttcgaaacaataaggaaaacagaatgagaaataaaagacttaatctaaaaaaaaggaactaaagaaaatttaaaaagagatacagacaataacaggggaatagaaaatagaatataggccgagcgtggtggctcacgcctttaatcccagcactttcggaggccgaggcgggcagatcacctgaggtcaggagttcaagaccagcctggccaacatggtgaaaccctgtctgtactaaaaatacaaaaattagcagggcttggtagtgggcacctgcagtcccagctactagggaggctgaggcaggagaattgcttgaacccagaaggtggag

SEQ ID NO: 70813 - DNA, 976 bp, Homo sapiens
acatatgtaactaacctgcacattgtgcacatgtaccctaaaacttaaagtataataaaaaaaaaaaaaggatgagttcatgtcctttgcagggacatggatgaagctggaaaccatcattctcagcaaactttcacaaggacagaaaaccaaacaccacatcacatgttctcactcataggtgggaattgaacaatgagagcacttggacacaggacaggaacatcacacaccggggcctgttgggggctggggtgctgggggagggatagcattaggagaaatatctaatgtaaatgacaatttgatgggtgcarcaaaccaacatggcacatgtatacctatgtagcaaacctgcacgttgtgcacatgtaccctagaagttaaagtgaaagaaggaaagaaagaaagaaagaaagaaagaaagaaagaaagaaagaaagaaagaaggaaggaaggaaggaaggaaggaaggaaggaaggaaggaaggaaaggaaggaaggaaggaaggaaggaaagaaagaaagaaagaaagaaagaaagaaagaaagaaagaaagaaagaaagaaagaaagaaaaagaaagaaggaaagaaagaaagaaaaaagaaagaaagaaagaaagaaagaaagaaagaaagaaagaaagaaagaaagagagaaaataaacagatatgtgaaaataggcactgttaatgtagcactttttggaactgccaactgccctaatatttcttgctatttaggctgagagcagaggcaggtaccacaaaaaataaaaaaggaagtgttctgatccttgactgggtcttgttgccagcgtttggtcttatcctctgcagtgaataatttgtgataaaactggcaagataatgtatgcttcaataacttggccaattgcattaggcaaacacagaaccttaaacagtattgtttatgataaaagctgaccaagaattcttacattagaagaatg

SEQ ID NO: 70814 - DNA, 976 bp, Homo sapiens
acatatgtaactaacctgcacattgtgcacatgtaccctaaaacttaaagtataataaaaaaaaaaaaaggatgagttcatgtcctttgcagggacatggatgaagctggaaaccatcattctcagcaaactttcacaaggacagaaaaccaaacaccacatcacatgttctcactcataggtgggaattgaacaatgagagcacttggacacaggacaggaacatcacacaccggggcctgttgggggctggggtgctgggggagggatagcattaggagaaatatctaatgtaaatgacaatttgatgggtgcagcaaaccaacatggcacatgtatacctatgtagcaaacctgcacgttgtgcacatgtaccctagaagttaaagtgaaagaaggaaagaaagaaagaaagaaagaaagaaagaaagaaagaaagaaagaaagaaggaaggaaggaaggaaggaaggaaggaaggaaggaaggaaggaaagraaggaaggaaggaaggaaggaaagaaagaaagaaagaaagaaagaaagaaagaaagaaagaaagaaagaaagaaagaaagaaaaagaaagaaggaaagaaagaaagaaaaaagaaagaaagaaagaaagaaagaaagaaagaaagaaagaaagaaagaaagagagaaaataaacagatatgtgaaaataggcactgttaatgtagcactttttggaactgccaactgccctaatatttcttgctatttaggctgagagcagaggcaggtaccacaaaaaataaaaaaggaagtgttctgatccttgactgggtcttgttgccagcgtttggtcttatcctctgcagtgaataatttgtgataaaactggcaagataatgtatgcttcaataacttggccaattgcattaggcaaacacagaaccttaaacagtattgtttatgataaaagctgaccaagaattcttacattagaagaatg

SEQ ID NO: 70815 - DNA, 1444 bp, Homo sapiens
taagggcaaattggctctctgttcaatccacacttcaggcaatggcttccctctctgcttttctatttaccttccagcatctaaaattaagtttcctgtcactgatgtcttctctatcaatccctgtgaccttgttggtttatatattatatttctttaacagagtcttaggaaggagagtacakaatcctccacgtctaacgctttacctttaataaaaagacagactgagttaagtcatatttttaaaatacagtcattatatgattccttttataggaaatatccagaataggcaaatcatagagacagacaatagattagtggttagcaggggcagcggggaggatggaatgagtagtgactgctcaatggctatggggcttcctttcagggtgacagaaacattctggattaaatagaggtgacagtgtgaatgtacttaacgccactaaattatacatttttaaattgttaaaatggaagttttatattacatgtattttaccacaataaaaaaaatacatagtaaaaaatatacagtgaccatggagagcttacaaaagattttcacaaacagtatattcaggttatgctgccattagagtcctgttgttctgtaattggtggtaatatcctttaccatggaaatttaaaaataccagccttccccatttagatttttaaaaatcaactcatatttggatactcccagttgttgttgttgaaacagtggtcttactctgtcacccaggctggagtgcaatggctcaatcacagctcactgcatccttgacctcctggactcaagcaatcctcctgcctcagcctccgaagaagctgggaccacagtcatacaccaccctgtccagcttatttatttatttatttagtagagatggtgtctccccatgtttcccaggctggtcttgaacttctgggctcagtcgatcctcctatcttagcctcccaaactgttgcgattacaggcatgagccaccacacaagtcctattcccaattttgacttttcctccacaattatttaatttctgacacctgatgtctcttagctatcctaaaaccaaataaaagatgttctcttatttactgtaagaatagatatatagaattatttcaagtgtaaaatatcagtatctcttgtcattccacaaagagcccaagccacccctaaattttctctctttcatttgcttagaaagtataatactcagctgttaatcaaatgaacaaataaaatagcagctttttatgaagagttattgtaaaactacgaactatttcattaactaaatcagaaaatgcaaatagcaacttagctattgagcagccttgggtgtttggaagaaacaggcccacacatctgggaagtgataattcactgaacaaaggtggccagatttccctgacctcatcaaccccag

SEQ ID NO: 70816 - DNA, 1444 bp, Homo sapiens
taagggcaaattggctctctgttcaatccacacttcaggcaatggcttccctctctgcttttctatttaccttccagcatctaaaattaagtttcctgtcactgatgtcttctctatcaatccctgtgaccttgttggtttatatattatatttctttaacagagtcttaggaaggagagtacataatcctccacgtctaacgctttacctttaataaaaagacagactgagttaagtcrtatttttaaaatacagtcattatatgattccttttataggaaatatccagaataggcaaatcatagagacagacaatagattagtggttagcaggggcagcggggaggatggaatgagtagtgactgctcaatggctatggggcttcctttcagggtgacagaaacattctggattaaatagaggtgacagtgtgaatgtacttaacgccactaaattatacatttttaaattgttaaaatggaagttttatattacatgtattttaccacaataaaaaaaatacatagtaaaaaatatacagtgaccatggagagcttacaaaagattttcacaaacagtatattcaggttatgctgccattagagtcctgttgttctgtaattggtggtaatatcctttaccatggaaatttaaaaataccagccttccccatttagatttttaaaaatcaactcatatttggatactcccagttgttgttgttgaaacagtggtcttactctgtcacccaggctggagtgcaatggctcaatcacagctcactgcatccttgacctcctggactcaagcaatcctcctgcctcagcctccgaagaagctgggaccacagtcatacaccaccctgtccagcttatttatttatttatttagtagagatggtgtctccccatgtttcccaggctggtcttgaacttctgggctcagtcgatcctcctatcttagcctcccaaactgttgcgattacaggcatgagccaccacacaagtcctattcccaattttgacttttcctccacaattatttaatttctgacacctgatgtctcttagctatcctaaaaccaaataaaagatgttctcttatttactgtaagaatagatatatagaattatttcaagtgtaaaatatcagtatctcttgtcattccacaaagagcccaagccacccctaaattttctctctttcatttgcttagaaagtataatactcagctgttaatcaaatgaacaaataaaatagcagctttttatgaagagttattgtaaaactacgaactatttcattaactaaatcagaaaatgcaaatagcaacttagctattgagcagccttgggtgtttggaagaaacaggcccacacatctgggaagtgataattcactgaacaaaggtggccagatttccctgacctcatcaaccccag

SEQ ID NO: 70817 - DNA, 1444 bp, Homo sapiens
taagggcaaattggctctctgttcaatccacacttcaggcaatggcttccctctctgcttttctatttaccttccagcatctaaaattaagtttcctgtcactgatgtcttctctatcaatccctgtgaccttgttggtttatatattatatttctttaacagagtcttaggaaggagagtacataatcctccacgtctaacgctttacctttaataaaaagacagactgagttaagtcatatttttaaaatacagtcattatatgattccttttataggaaatatccagaataggcaaatcatagagacagacaatagattagtggttagcaggggcagcggggaggatggaatgagtagtgactgctcaatggctatggggcttcctttcagggtgacagaaacattctggattaaatagaggtgacagtgtgaatgtacttaacgccactaaattatacatttttaaattgttaaaatggaagttttatattacatgtattttaccacaataaaaaaaatacatagtaaaaaatatacagtgaccatggagagcttacaaaagattttcacaaacagtatattcaggttatgctgccattagagtcctgttgttctgtaattggtggtaatatcctttaccatggaaatttaaaaataccagccttccccatttagatttttaaaaatcaactcatatttggatactcccagttgttgttgttgaaacagtggtcttactctgtcacccaggctggagtgcaatggctcaatcacagctcactgcatccttgacctcctggactcaagcaatcctcctgcctcagcctccgaagaagctgggaccacagtcatacaccaccctgtccagcttatttatttatttatttagtagagatggtgtctccccatgtttcccaggctggtcttgaacttctgggctcagtcgatcctcctatcttagcctcccaaactgttgcgattacaggcatgagccaccacacaagtcctattcccaattttgacttttcctccacwattatttaatttctgacacctgatgtctcttagctatcctaaaaccaaataaaagatgttctcttatttactgtaagaatagatatatagaattatttcaagtgtaaaatatcagtatctcttgtcattccacaaagagcccaagccacccctaaattttctctctttcatttgcttagaaagtataatactcagctgttaatcaaatgaacaaataaaatagcagctttttatgaagagttattgtaaaactacgaactatttcattaactaaatcagaaaatgcaaatagcaacttagctattgagcagccttgggtgtttggaagaaacaggcccacacatctgggaagtgataattcactgaacaaaggtggccagatttccctgacctcatcaaccccag

SEQ ID NO: 70818 - DNA, 580 bp, Homo sapiens
acaaagttgcctatgtacattttaaagcctctaaatttagcgataactatttaaattttaaaagaccattcattttgacctagcaattacatttctcaaatttatcctctagctatactcataaatttgcaccaaaaaaagaaaagaaagagaatcctatatgtaaggatgttcactacaagattatttacaatagcaaaaagaactgcaacaacctaaacatccatcaataagggactagttaagtaaattatagtacaagcgtaggatgaactacatggagccatttaaaaaggaacatggggcaaagggtgggaggggggcgagagataaaaggctacaaatagggtgcagtgtatactgctcggctgatgggtgcacaaaaatctcacaaatcaccactaaagaacttactcatgtaaccaaataccacytgtaccccaataacttatagaaaaatttaaaaaatttttaaaggcacaaaaaagggaacattgtaaatcttttaagtacactaatggaaagcaattcaaaatgctattaatttaacagacacacaatgcaaatcacaaatggggtc

SEQ ID NO: 70819 - DNA, 844 bp, Homo sapiens
ttggtaaaaaatatagtctttgtttaaacactgtatttttgatatttttgacctagttcatttgaatcttagcaacattattttattgtgaaatgtttctttagtgggttgcagcgtatctttttaagcatcaccacaaagactggaaacagataagtgcagaaagagcactgggctaaaagtcaagagatttcattcttggctttcactttgttgctatgcagtgtggccttggaaaaatattttatacaatcatctttaaatttcttaaagctttgttgtctcataaggtgaatacaacgattgccttacttcttactttgacttttctttgtcctttttttttaacgtagaaatcaagctatgatcagttcctcttaccaaggcaaactctgggcaaaatgtatagatgaaaaatatgccttagaccccaagacctatctcttatctgttttcccttccatgacccrcttcctccctcagtatccctttcccatacccacaggccactttgtctcaccagtaaactactgtctcatcaaaccgggctctccttcaaggtttccagttaactatttaccccatagtaagaaagagctgtctagttactgtcccttgttgtatttgcacttatttctggttgcagagctctgatttccctctcctgttatagaaatgcaagcaataagtacccaaccagtagaagtcttagggtgtcagtaaagaatggtttctactgtctctccagggtgggaaatggggtgtatacaacacaatatagaaacttgaggctcaatcttggtacaggttgtagagagagactatggtaaggccaggaaaaggg

SEQ ID NO: 70820 - DNA, 844 bp, Homo sapiens
ttggtaaaaaatatagtctttgtttaaacactgtatttttgatatttttgacctagttcatttgaatcttagcaacattattttattgtgaaatgtttctttagtgggttgcagcgtatctttttaagcatcaccacaaagactggaaacagataagtgcagaaagagcactgggctaaaagtcaagagatttcattcttggctttcactttgttgctatgcagtgtggccttggaaaaatattttatacaatcatctttaaatttcttaaagctttgttgtctcataaggtgaatacaacgattgccttacttcttactttgacttttctttgtcctttttttttaacgtagaaatcaagctatgatcagttcctcttaccaaggcaaactctgggcaaaatgtatagatgaaaaatatgccttagaccccaagacctatctcttatctgttttcccttccatgacccgcttcctccctcagtatccctttcccatacccacaggccactttgtctcaccagtaaactactgtctcatcaaaccrggctctccttcaaggtttccagttaactatttaccccatagtaagaaagagctgtctagttactgtcccttgttgtatttgcacttatttctggttgcagagctctgatttccctctcctgttatagaaatgcaagcaataagtacccaaccagtagaagtcttagggtgtcagtaaagaatggtttctactgtctctccagggtgggaaatggggtgtatacaacacaatatagaaacttgaggctcaatcttggtacaggttgtagagagagactatggtaaggccaggaaaaggg

SEQ ID NO: 70821 - DNA, 985 bp, Homo sapiens
tggctattaagcaaagaattaatgatgtctaatagttcataacctcttcactagaaactatgaaacgcttcctctggctttagagagtatttgtcaagattagaaaactcagtcttgaagcatttctaaacaatttcattgaaaattgaccccgcaatagatgagtccctctcttttaatctgtattaataaaccaagagcaagggaattgactagaggggcttttcacccacagcagaggtttgggaggatgaaatgttgatttgttgatatcatagtaattgcatatgtactttcttgcagttgacaaatctgtttctttaaaaaacaagtaaagctcagaaaagggaaaaatctggattgaatttgtcctacttgagacatgatagggtagtatggtggcaatcctatcatggcaggtcttgggcaaatgacgtygctgagtaactgactaaagtatgccagtatgaagttcttcaatgtatctaaaatccacccgctctaattcaaattgagaatgtgcctgtagttttggatcattctatgcttctaaaggagcaatcccaaattactatggaagcctgaaacttaaatttcaatgagaatgcaacttctgtaaagaaatagaactatggtctagatgaagaatgagaggctggatgtacttgactcagcctgggtccccacagcattaacagtcctgcctgctcctcaggccaacaatgaggctgaagagattagacaaacaaaaacaaaaatgacatttatattccctttacaggcaaatgaaactcaaaagatctggatctttgaatggattctgtagtcataaatagacttcagggtaagctgcctatatttcctctcaccagtgaatccaatctgctgtgaaaaattttcactgtctccaactcatcatgaaaacattctcagctaattgagacattcccaaacaattaagataaccagatgcgtctgttatttg

SEQ ID NO: 70822 - DNA, 687 bp, Homo sapiens
ccgctgtgtctggccacaccaagcacgttcctacctcagagcctttgcacatgctgttccctgtgcccggaacactcttgccccagatatccatttcctcccttctgctcaaatgttttttccctaaccaccatctcactcttcattgtgctacctcacatgatattatgacacttgtttatccatagactgtcttctccacaggattataaacttcaagaggctcaggaccttgtcaagatgttcaccattatttcccctgtgyttagagcagcactttcacatagggctaacaatatgtttttattaacatttatgtgtttatttttgagacagggtctttgctctgttgcttaggctggagtgcagtggtgtgatcatgtctcactgcagcctcaactttccaggctcaggtgatcctcccatctcagcctcccaagtagccaggaccacaggcatgcaccaccatgcctggctaattaacaatatgttgagtgaatcaattaatgaatgggtgtcaccacccccagcaccaccccacccccatcctgcctcctcctcatccctcactaactttggcaaaggggatggaaggaaatgcatgatgtcaagaccccataattctttctggtgcccccaaactttcccaacacattggtcaggagcaggtcttccttccttctttcc

SEQ ID NO: 70823 - DNA, 533 bp, Homo sapiens
ttattattaaaaggaatccactatgaacatgattttttgcccatttggctcacttaggaagcatttttaaagtcttgatgcctgcaaccactccagaacaattaaattggaacctctgggggtctggcatccaggaatccagactgtttaaggctctccgggtgctggcagtgtgcacagccagggttgagaatcagaagcagtacatttgcagcctatcaggtctgtacctgaatatgtggagtgagtagaatgtgtggagtgagcagaatgtgtggagtgagtgtggggcaattgtgtgggtaagtacacagatactctgtcacatacagtggcctgatggcttaaaacaaaacaaacggccaggtgcggtggctcacgcctgtaatcccaacactttgggagcccgaggcgggtggatcacgaggtcaggagatcgagaccatcctggctaacacggtgaaaccmtgtctctactaaaaatacaaaaaattagccgggcatggtggcgggtgcccgtagtcccagctact

SEQ ID NO: 70824 - DNA, 775 bp, Homo sapiens
tctttaaccatcctctcattatgtcgtcctcatctctgccctgcctttccagcctctagtaaccactattccacactttacttctatgagttcaacttctttagcttctgcatgtgagtgagaacatgtggtgtttatctttctgtgtctggcttatttcacttaacataatgtcctccaggctcatctatgttgctgcaaatgacaggatttcattcttttttatggctaaataatatcgcattgtgtatatgtaccacattttatctgttcatctgttggtggatgcttgggttgattccatatagtactttgcattgttgctttttaatgtgcatagaagataaggaatacaggagtaaaagagtttggaggcaaaaactcaaactgtgtttttcctctgctctcacaccactctgcaatcaacacagatgacttctgtgaccaaatgtggggagttttccccatacaccragcaagcaatcagttctgcagcagacaccagctgagtatcctccaattcagttctgaccctgtctgcctggagatagcatcagctcctacaggttgagagctcaatcccacaagactccaaccaacttcagatgccagtcgcaagtccaggcatccagaacttctggccactggcttcaagttaggttcccacgaccctctctttggattggacaaatgtgctagaatggctcaaagaactcagggaaacacttacatttactggcttattataaaggatattgcaagggatacggatgag

SEQ ID NO: 70825 - DNA, 775 bp, Homo sapiens
tctttaaccatcctctcattatgtcgtcctcatctctgccctgcctttccagcctctagtaaccactattccacactttacttctatgagttcaacttctttagcttctgcatgtgagtgagaacatgtggtgtttatctttctgtgtctggcttatttcacttaacataatgtcctccaggctcatctatgttgctgcaaatgacaggatttcattcttttttatggctaaataatatcgcattgtgtatatgtaccacattttatctgttcatctgttggtggatgcttgggttgattccatatagtactttgcattgttgctttttaatgtgcatagaagataaggaatacaggagtaaaagagtttggaggcaaaaactcaaactgtgtttttcctctgctctcacaccactctgcaatcaacacagatgacttctgtgaccaaatgtggggagttttccccatacaccgagcaagcaatcagttctgcagcagacaccagctgagtatcctccaattcagttctgacmctgtctgcctggagatagcatcagctcctacaggttgagagctcaatcccacaagactccaaccaacttcagatgccagtcgcaagtccaggcatccagaacttctggccactggcttcaagttaggttcccacgaccctctctttggattggacaaatgtgctagaatggctcaaagaactcagggaaacacttacatttactggcttattataaaggatattgcaagggatacggatgag

SEQ ID NO: 70826 - DNA, 1254 bp, Homo sapiens
tgcatgttatatctcaaaaagacaattgttttaaagaatgaactcagagatgcctagaaytcttagaaaaatcaaagtaatactttatatttgtcccatattttaaacttttctaggcaattccacattcagtgagctaaaaaaatcttgagatagattgagctgccaacatgctgtttttagaacagagaaatggtaacttacatgggatgttagtggtagattctgcaccaaaacctttgtctccaccaattcctaatctagtaacagcattttaattattcccacctggatgaacctaacgttaatgcaattcaaccctgcagatattgacaaagacattaaacaacctattcctttttatttgaaacagggtctcattctgttgcccaggctggagtgcagtagcatgattttggctcactgcagcctggaccttccaggctcaagtgatcctcccaccacagcctcctgagtagctagaactataggtgctggctaccatgctcggctaattttttgtaattttttttatttttttatttttatttttttgtagcgacaggatttctccttgttgcccagcttgtctcgaactcctgagctcaagcaatcctccccctcagccttccaaagtgctgggattataggcatgagccaccacgcccagccaaccacctatttttgagacagatatttcctagtgatgggacagatgttgtgacatttaatctactgatttatacttactatacgctaaattgcagatgtttttaattgcctaaggggtgtgtgtgaagccaccactgacccagctgataaacagctttatggttcctgctttaaatattccatgatactggacacttcaaataaccaatgacaacattggcattctacagcaagttatttctaaaaaaattttattttaggtttgggggtacacgtggaggtttgttatataggtaaactcgtgtcatgggggttcgttgtacagattatttcatcactcaggtattaagcctagtactcaatagttatttttcctgctcctctctctcctcccaccctccaccctcaagtaggccccatgtctattgttcccttctttgtgttcataagttctcatcatttagctaccacctgtaaatgaaaacatgtggtatttggttttctgttcctacattagtttgctatagataataacctctagctccatccacattccctcaaaagatatgattgtattctttt

SEQ ID NO: 70827 - DNA, 1254 bp, Homo sapiens
tgcatgttatatctcaaaaagacaattgttttaaagaatgaactcagagatgcctagaattcttagaaaaatcaaagtaatactttatatttgtcccatattttaaacttttctaggcaattccacattcagtgmgctaaaaaaatcttgagatagattgagctgccaacatgctgtttttagaacagagaaatggtaacttacatgggatgttagtggtagattctgcaccaaaacctttgtctccaccaattcctaatctagtaacagcattttaattattcccacctggatgaacctaacgttaatgcaattcaaccctgcagatattgacaaagacattaaacaacctattcctttttatttgaaacagggtctcattctgttgcccaggctggagtgcagtagcatgattttggctcactgcagcctggaccttccaggctcaagtgatcctcccaccacagcctcctgagtagctagaactataggtgctggctaccatgctcggctaattttttgtaattttttttatttttttatttttatttttttgtagcgacaggatttctccttgttgcccagcttgtctcgaactcctgagctcaagcaatcctccccctcagccttccaaagtgctgggattataggcatgagccaccacgcccagccaaccacctatttttgagacagatatttcctagtgatgggacagatgttgtgacatttaatctactgatttatacttactatacgctaaattgcagatgtttttaattgcctaaggggtgtgtgtgaagccaccactgacccagctgataaacagctttatggttcctgctttaaatattccatgatactggacacttcaaataaccaatgacaacattggcattctacagcaagttatttctaaaaaaattttattttaggtttgggggtacacgtggaggtttgttatataggtaaactcgtgtcatgggggttcgttgtacagattatttcatcactcaggtattaagcctagtactcaatagttatttttcctgctcctctctctcctcccaccctccaccctcaagtaggccccatgtctattgttcccttctttgtgttcataagttctcatcatttagctaccacctgtaaatgaaaacatgtggtatttggttttctgttcctacattagtttgctatagataataacctctagctccatccacattccctcaaaagatatgattgtattctttt

SEQ ID NO: 70828 - DNA, 1254 bp, Homo sapiens
tgcatgttatatctcaaaaagacaattgttttaaagaatgaactcagagatgcctagaattcttagaaaaatcaaagtaatactttatatttgtcccatattttaaacttttctaggcaattccacattcagtgagctaaaaaaatcttgagatagattgagctgccaacatgctgtttttagaacagagaaatggtaacttrcatgggatgttagtggtagattctgcaccaaaacctttgtctccaccaattcctaatctagtaacagcattttaattattcccacctggatgaacctaacgttaatgcaattcaaccctgcagatattgacaaagacattaaacaacctattcctttttatttgaaacagggtctcattctgttgcccaggctggagtgcagtagcatgattttggctcactgcagcctggaccttccaggctcaagtgatcctcccaccacagcctcctgagtagctagaactataggtgctggctaccatgctcggctaattttttgtaattttttttatttttttatttttatttttttgtagcgacaggatttctccttgttgcccagcttgtctcgaactcctgagctcaagcaatcctccccctcagccttccaaagtgctgggattataggcatgagccaccacgcccagccaaccacctatttttgagacagatatttcctagtgatgggacagatgttgtgacatttaatctactgatttatacttactatacgctaaattgcagatgtttttaattgcctaaggggtgtgtgtgaagccaccactgacccagctgataaacagctttatggttcctgctttaaatattccatgatactggacacttcaaataaccaatgacaacattggcattctacagcaagttatttctaaaaaaattttattttaggtttgggggtacacgtggaggtttgttatataggtaaactcgtgtcatgggggttcgttgtacagattatttcatcactcaggtattaagcctagtactcaatagttatttttcctgctcctctctctcctcccaccctccaccctcaagtaggccccatgtctattgttcccttctttgtgttcataagttctcatcatttagctaccacctgtaaatgaaaacatgtggtatttggttttctgttcctacattagtttgctatagataataacctctagctccatccacattccctcaaaagatatgattgtattctttt

SEQ ID NO: 70829 - DNA, 1254 bp, Homo sapiens
tgcatgttatatctcaaaaagacaattgttttaaagaatgaactcagagatgcctagaattcttagaaaaatcaaagtaatactttatatttgtcccatattttaaacttttctaggcaattccacattcagtgagctaaaaaaatcttgagatagattgagctgccaacatgctgtttttagaacagagaaatggtaacttacatgggatgttagtggtagattctgcaccaaaacctttgtctccaccaattcctaatctagtaacagcattttaattattcccacctggatgaacctaacgttaatgcaattcaaccctgcagatattgacaaagacattaaacaacctattcctttttatttgaaacagggtctcattctgttgcccaggctggagtgcagtagcatgattttggctcactgcagcctggaccttccaggctcaagtgatcctcccaccacagcctcctgagtagctagaactataggtgctggctaccatgctyggctaattttttgtaattttttttatttttttatttttatttttttgtagcgacaggatttctccttgttgcccagcttgtctcgaactcctgagctcaagcaatcctccccctcagccttccaaagtgctgggattataggcatgagccaccacgcccagccaaccacctatttttgagacagatatttcctagtgatgggacagatgttgtgacatttaatctactgatttatacttactatacgctaaattgcagatgtttttaattgcctaaggggtgtgtgtgaagccaccactgacccagctgataaacagctttatggttcctgctttaaatattccatgatactggacacttcaaataaccaatgacaacattggcattctacagcaagttatttctaaaaaaattttattttaggtttgggggtacacgtggaggtttgttatataggtaaactcgtgtcatgggggttcgttgtacagattatttcatcactcaggtattaagcctagtactcaatagttatttttcctgctcctctctctcctcccaccctccaccctcaagtaggccccatgtctattgttcccttctttgtgttcataagttctcatcatttagctaccacctgtaaatgaaaacatgtggtatttggttttctgttcctacattagtttgctatagataataacctctagctccatccacattccctcaaaagatatgattgtattctttt

SEQ ID NO: 70830 - DNA, 2005 bp, Homo sapiens
aggctcagctgatcccatggggagatctggagttaagatggtccttcaaagttgtactgaattaaggtaaggggcaagtcctccatatcaagaattattgggtgcaggctgtccctggggaggaaccaaactcctggggaggagaaagtcagctgagggcaattcccagagtagactcggctatgagccacctcagctgtgagtggttctcagttgtcctagagcagcatgttcagagttgagtaggttttgggggggtgtttttgtgkttttttttaatcacccatgctggagtgcagtggtgccatcatagctgacagcagcgttaaactcccgagctctagtgatcctcctgcctcagccttctgagtagctgggactacaagcgtgcaccaccacacctggccattttttttgttgcagagacagggtctcactatgttgccaaggctgatctcaaactcctggcctcaagttattctcctgccttggactcccaaagcactggaattacaggcgtgagtcataacacccagctcccacctttagaatttttgattcagtaggtcagggttgaggcctgataacttgtatctctaacatcttcctagtgaaactgatgctgcttgtccagagtgctctctgagaattactgccctaggaccaatattgggaattgggaagccttgctcagtctccaaaatatctcctccacaagccaaatgtggtgaatcttcctccctcactggctcagtcctttttctccagtggatatatgcaaggaattctaagaaaattaaggggcacacactcaaactgatgatagctgctttcctgaaggcaaaatttgtagttgagggaagaatagggagcctctgaacacctgagggtgcaagggtgcactgttccacacaaagaaagatagatgcagagaaagccaggggcatacaaacaagtttcatcgagtttcagaggagcagctcagcatcctcatttcccccttgtgagtcttgaccttgaacatcagcagccatctgagtttttacctgatattctgaactcactcaaggttgtttttttttaagcaatcgaacaattgctgtttctttgggaaacagtttcctgtggggaaaatttaatgcattgcctttgcaggctggagccagtacaatcatattctgatggtttatcaaattgatttggctatagctcagattcatttgatagttcagattcaaacactgagttatttgtataagaatggttctcttccattaccagtgtacccacagtcctatagatagtaaattgcctttttatccagcctgggatcatgaaagagaggtcttctagccatctgtcagtgtagtatacaccagaaatgtgctctcacttatggaaatgattgacctgtaataacatctttgctgggaaaaatagaaattgttcaaatcaaatttgtggcactggctataacacactttattaaatggggcacagagtgctttttaactcctgcctctcctgcctcagcctcttactaccctcctacccatgcagtctctcttgctactctgtatctcaaaatgaagagtactaacaatgtggaaacaattttaaattactaagtctcttctgtgcaagtcataatcccatggggtatccactggtcttttcaagatttaaattctcaaaactactcactatctgaatatagcatgtgttgcaacgttaaaagtgatatttttaaaagaaagaccaaaatcattagaagagaccagcctgaaagataaagtttaaaaacaccagtccacaactacccctccccgcttgtccagcccaccagttccaggcacaagggcaggaataaagtaaacattctcaagcactcattgagggcatcaagtcttacatgacatacatttagtggatgttgattaaacacctactgtgtgtctggcaaggggtaagaaatatatgtgaaaacagaaaacagtacctactg

SEQ ID NO: 70831 - DNA, 2005 bp, Homo sapiens
aggctcagctgatcccatggggagatctggagttaagatggtccttcaaagttgtactgaattaaggtaaggggcaagtcctccatatcaagaattattgggtgcaggctgtccctggggaggaaccaaactcctggggaggagaaagtcagctgagggcaattcccagagtagactcggctatgagccacctcagctgtgagtggttctcagttgtcctagagcagcatgttcagagttgagtaggttttgggggggtgtttttgtggttttttttaatcacccatgctggagtgcagtggtgccatcayagctgacagcagcgttaaactcccgagctctagtgatcctcctgcctcagccttctgagtagctgggactacaagcgtgcaccaccacacctggccattttttttgttgcagagacagggtctcactatgttgccaaggctgatctcaaactcctggcctcaagttattctcctgccttggactcccaaagcactggaattacaggcgtgagtcataacacccagctcccacctttagaatttttgattcagtaggtcagggttgaggcctgataacttgtatctctaacatcttcctagtgaaactgatgctgcttgtccagagtgctctctgagaattactgccctaggaccaatattgggaattgggaagccttgctcagtctccaaaatatctcctccacaagccaaatgtggtgaatcttcctccctcactggctcagtcctttttctccagtggatatatgcaaggaattctaagaaaattaaggggcacacactcaaactgatgatagctgctttcctgaaggcaaaatttgtagttgagggaagaatagggagcctctgaacacctgagggtgcaagggtgcactgttccacacaaagaaagatagatgcagagaaagccaggggcatacaaacaagtttcatcgagtttcagaggagcagctcagcatcctcatttcccccttgtgagtcttgaccttgaacatcagcagccatctgagtttttacctgatattctgaactcactcaaggttgtttttttttaagcaatcgaacaattgctgtttctttgggaaacagtttcctgtggggaaaatttaatgcattgcctttgcaggctggagccagtacaatcatattctgatggtttatcaaattgatttggctatagctcagattcatttgatagttcagattcaaacactgagttatttgtataagaatggttctcttccattaccagtgtacccacagtcctatagatagtaaattgcctttttatccagcctgggatcatgaaagagaggtcttctagccatctgtcagtgtagtatacaccagaaatgtgctctcacttatggaaatgattgacctgtaataacatctttgctgggaaaaatagaaattgttcaaatcaaatttgtggcactggctataacacactttattaaatggggcacagagtgctttttaactcctgcctctcctgcctcagcctcttactaccctcctacccatgcagtctctcttgctactctgtatctcaaaatgaagagtactaacaatgtggaaacaattttaaattactaagtctcttctgtgcaagtcataatcccatggggtatccactggtcttttcaagatttaaattctcaaaactactcactatctgaatatagcatgtgttgcaacgttaaaagtgatatttttaaaagaaagaccaaaatcattagaagagaccagcctgaaagataaagtttaaaaacaccagtccacaactacccctccccgcttgtccagcccaccagttccaggcacaagggcaggaataaagtaaacattctcaagcactcattgagggcatcaagtcttacatgacatacatttagtggatgttgattaaacacctactgtgtgtctggcaaggggtaagaaatatatgtgaaaacagaaaacagtacctactg

SEQ ID NO: 70832 - DNA, 2005 bp, Homo sapiens
aggctcagctgatcccatggggagatctggagttaagatggtccttcaaagttgtactgaattaaggtaaggggcaagtcctccatatcaagaattattgggtgcaggctgtccctggggaggaaccaaactcctggggaggagaaagtcagctgagggcaattcccagagtagactcggctatgagccacctcagctgtgagtggttctcagttgtcctagagcagcatgttcagagttgagtaggttttgggggggtgtttttgtggttttttttaatcacccatgctggagtgcagtggtgccatcatagctgacagcagcgttaaactcccgagctctagtgatcctcctgcctcagccttctgagtagctgggactacaagcgtgcaccaccacacctggccattttttttgttgcagagacagggtctcactatgttgccaaggctgatctcaaactcctggcctcaagttattytcctgccttggactcccaaagcactggaattacaggcgtgagtcataacacccagctcccacctttagaatttttgattcagtaggtcagggttgaggcctgataacttgtatctctaacatcttcctagtgaaactgatgctgcttgtccagagtgctctctgagaattactgccctaggaccaatattgggaattgggaagccttgctcagtctccaaaatatctcctccacaagccaaatgtggtgaatcttcctccctcactggctcagtcctttttctccagtggatatatgcaaggaattctaagaaaattaaggggcacacactcaaactgatgatagctgctttcctgaaggcaaaatttgtagttgagggaagaatagggagcctctgaacacctgagggtgcaagggtgcactgttccacacaaagaaagatagatgcagagaaagccaggggcatacaaacaagtttcatcgagtttcagaggagcagctcagcatcctcatttcccccttgtgagtcttgaccttgaacatcagcagccatctgagtttttacctgatattctgaactcactcaaggttgtttttttttaagcaatcgaacaattgctgtttctttgggaaacagtttcctgtggggaaaatttaatgcattgcctttgcaggctggagccagtacaatcatattctgatggtttatcaaattgatttggctatagctcagattcatttgatagttcagattcaaacactgagttatttgtataagaatggttctcttccattaccagtgtacccacagtcctatagatagtaaattgcctttttatccagcctgggatcatgaaagagaggtcttctagccatctgtcagtgtagtatacaccagaaatgtgctctcacttatggaaatgattgacctgtaataacatctttgctgggaaaaatagaaattgttcaaatcaaatttgtggcactggctataacacactttattaaatggggcacagagtgctttttaactcctgcctctcctgcctcagcctcttactaccctcctacccatgcagtctctcttgctactctgtatctcaaaatgaagagtactaacaatgtggaaacaattttaaattactaagtctcttctgtgcaagtcataatcccatggggtatccactggtcttttcaagatttaaattctcaaaactactcactatctgaatatagcatgtgttgcaacgttaaaagtgatatttttaaaagaaagaccaaaatcattagaagagaccagcctgaaagataaagtttaaaaacaccagtccacaactacccctccccgcttgtccagcccaccagttccaggcacaagggcaggaataaagtaaacattctcaagcactcattgagggcatcaagtcttacatgacatacatttagtggatgttgattaaacacctactgtgtgtctggcaaggggtaagaaatatatgtgaaaacagaaaacagtacctactg

SEQ ID NO: 70833 - DNA, 552 bp, Homo sapiens
cacacacacacacacagtgttgatcccttgcccccacccgaatcctgccaagttctctttctcctggtctctcctaagtgtcttttccagctgacttcttccagacaggacctaaacaaggaccacattttcagtctctttgcctgtgagttccctgtctctccccacccgcatcatttatttgttgaagaataggttgctgcctgctgtacgagtcacctgtgtcctggactaggctgactgcatccccgtggtgccgtgtgacatgttcctctgttccctgcatctctgggtgggcaaagctagaagcgtggtcagattcctagtggggtctggcgagcatccacctccatgagctatgccctgccccttcctgctcctgcttcctgcactcccaccctcttttccccatccccatcctcctgcccctcccattctttcccctggattcgtctttcccatctctgtctctctgtccatctgtgtctgttgtggctctgtccctccctctccctctgtcccttcttgcccagccmttccttctcttaaccc

SEQ ID NO: 70834 - DNA, 1063 bp, Homo sapiens
ctcatctctctgtagtgaagggaccagtgatttggttactgttttctaatacgttgcagaccaataatacacaataaaaacagatactagataaaataaaaagacaaacacataatacaagtcccatttttaactatcagattcaactgtagtcaaattgcattatttaaatgcaatttagatattgaaartatctatcaaaatagaaattgaaaacacatggatgttgtgacaaggtcagattgatctctctatttatttgtcatggatttgtagccaacagttggtgcaccagtagggtgcaccagtggtctatggaccccactgtgaatagggctgttctagatttcagtttaaaagtcatctatttagggggctttcctggacagctcatctaaagcagattcttgcacacacacccagtgctgttagtctctcttctgtacctcctattggtctccagtgtggcacagagaatttgtgattagatgtaacgtgagcagtttcttatcttgaaatcagtctgttgcttagctgatgagtaatttcttccacctctctgaccacccatattccctgctgaaggtactttgggcacctgcctatgattgcggggacagagcagctccctaccaccctgtatcagaaaacaacacctgagcctacaccaagactcaagcagattttagtcaccagttctcagtggtagaatccaatctgtagcatcagggtggggttggagactcagcagggtccctgcattatctacactgagggaccaagaccatgagacatccccacgtgacctgccctctcttgatagagactgttccatccacagactctccttcttcctgtttattttgtcttttccattgctccccagctgcactggccccttgaagtctcacctctcacctttcctagacccgggcccttttcctggcctcctcttgtgtctggagactcctcagtttctcccacatagggtgcacatggcagctgttctctctggcccatctccattgcagaggaagcaaggtgggctggcctttagtttttt

SEQ ID NO: 70835 - DNA, 1063 bp, Homo sapiens
ctcatctctctgtagtgaagggaccagtgatttggttactgttttctaatacgttgcagaccaataatacacaataaaaacagatactagataaaataaaaagacaaacacataatacaagtcccatttttaactatcagattcaactgtagtcaaattgcattatttaaatgcaatttagatattgaaaatatctatcaaaatagaaattgaaaacacatggatgttgtgacaaggtcagattgatytctctatttatttgtcatggatttgtagccaacagttggtgcaccagtagggtgcaccagtggtctatggaccccactgtgaatagggctgttctagatttcagtttaaaagtcatctatttagggggctttcctggacagctcatctaaagcagattcttgcacacacacccagtgctgttagtctctcttctgtacctcctattggtctccagtgtggcacagagaatttgtgattagatgtaacgtgagcagtttcttatcttgaaatcagtctgttgcttagctgatgagtaatttcttccacctctctgaccacccatattccctgctgaaggtactttgggcacctgcctatgattgcggggacagagcagctccctaccaccctgtatcagaaaacaacacctgagcctacaccaagactcaagcagattttagtcaccagttctcagtggtagaatccaatctgtagcatcagggtggggttggagactcagcagggtccctgcattatctacactgagggaccaagaccatgagacatccccacgtgacctgccctctcttgatagagactgttccatccacagactctccttcttcctgtttattttgtcttttccattgctccccagctgcactggccccttgaagtctcacctctcacctttcctagacccgggcccttttcctggcctcctcttgtgtctggagactcctcagtttctcccacatagggtgcacatggcagctgttctctctggcccatctccattgcagaggaagcaaggtgggctggcctttagtttttt

SEQ ID NO: 70836 - DNA, 942 bp, Homo sapiens
tgcatcacacccattttatgttcaaagacttatgacccattacatcggttaaaatattcattcagcttctctgagacaattgtcgccaaccccaaagcaaacaggttgttaggcaaaggaagcaaaaaagtaaagcatgttttaaaaccagccactgaaatatcctactctcactcatccatagttggagagaatcagatttcactttgcgattcacaaacatgtctgcttctccatgttgcttagcgcttgccaataatgcagttgtccctgcttaatggagaaggatgcagagtagaggacccttcctgtgacaagaccacaacaaaaggtatctccaaaagaaaatattttaacctgagcccaatttttaattataaaacatttaaacatgtaatttttatattagatagtactgaaatgaacagtgcagaatcacaaatctaacaatgcagttgattaaaattactctaaaagcaagacgaccgtttcatatttctttcaaataactcaagataagtgcttagtcatagtcaagtttgtggattgggttactcttaagggagttgagaccttactaaatagcagctggtcaatcggttaatctgtaattcgatgcacttggtaatactaaactcaaagataagttttagtgttacagtagaataaagtgcaaaatttttaagtaataatggatgaaatatttatttgaaatgctttcaaaacaattccattctaaagaaagaggcctaaaggctcctgcacttgtaaataattctccayggccagcataaagcgggttctatcacatcatatagaaaaaaaacccctgcgctttaagtgacccgaaattctgacactgctttttagactgcacagtggaggagacggtattgttctatgaaacggatacattctactgtcacgctctaaaggaaaaat

SEQ ID NO: 70837 - DNA, 655 bp, Homo sapiens
aatgatcaaaaccacacacacaaaaagactattaaattccagatgagattactgcttcctgtgattcccaccattcgggaatgcctttctgcttcgtgattgcccactgacagacttacacaagcaagatgtaaacatagtaggattatctcttacactatcacatatgttttatgctaaatcattagacatctaggatgkttttagccatggcctgttttcagtgccagtggtggtatatttttgtactagtgtacgtgctttaactcacaagtaattgcaatattttctaggcatatgcaaggcagaaactgttttattttaaaatggcacctgttggaatagtttaatatgtaattttcattttcacgtaattattcagatacattattgaataacttacgcatcttgtattcaacaatatggggaacagtatactgtgtgtctacagtcttgggctgctgatagttcctctgcattcattagaggaatgactggggcatcttgggctgaaaccttgttatcgctgctctttgtaagcaggttgtgttgtcactgtagggagggagggctgttttaagcttcgttcccacatttctttttgcagggctggtaggaccaccacctcaggcagtctttcactgccctgtaacgt

SEQ ID NO: 70838 - DNA, 616 bp, Homo sapiens
tatcgaaatcccaatctcaggtgatccacctgcccggacctcccaaagtgctggcattacaggcgtgagccactgcacctggctctctttattgttttaaacagaactctaatttttcttcaggccactgatttagtttcttattatacatttatttatttatctgtttcttattgcctgtccccccaactagaccaattgcaaaaaattcaactgcagaaatatamggtaagtttttcatggatgattactcattaactataaatacataaaaattttatgtacacatttatctgagctgccctcatatggccttctacagaatgcttgaagttagattaaaaataatctacagataaatattcactgatagaatgcttaaagttgaagcctactggtgaaaatgttgttcctttctcaccagaaatgaagtagatacatttatttctggacttgctattatgcttcattagtgtgtgtttatttttatccagtgccatgccgtttgcttattgtagctttttttttttttgagacaaggtctcattctgttgcccaggatggagtgcagtggcttgatcatggctcactgtggcctcgacctcacaggatcaaa

SEQ ID NO: 70839 - DNA, 616 bp, Homo sapiens
tatcgaaatcccaatctcaggtgatccacctgcccggacctcccaaagtgctggcattacaggcgtgagccactgcacctggctctctttattgttttaaacagaactctaatttttcttcaggccactgatttagtttcttattatacatttatttatttatctgtttcttattgcctgtccccccaactagaccaattgcaaaaaattcaactgcagaaatataaggtaagtttttcatggatgattactcattaactataaatacataaaaattttatgtacacatttatctgagctgccctcatatggccttctacagaatgcttgaagttagattaaaaataatctacagataaatattcactgatagaatgcttaaagytgaagcctactggtgaaaatgttgttcctttctcaccagaaatgaagtagatacatttatttctggacttgctattatgcttcattagtgtgtgtttatttttatccagtgccatgccgtttgcttattgtagctttttttttttttgagacaaggtctcattctgttgcccaggatggagtgcagtggcttgatcatggctcactgtggcctcgacctcacaggatcaaa

SEQ ID NO: 70840 - DNA, 616 bp, Homo sapiens
tatcgaaatcccaatctcaggtgatccacctgcccggacctcccaaagtgctggcattacaggcgtgagccactgcacctggctctctttattgttttaaacagaactctaatttttcttcaggccactgatttagtttcttattatacatttatttatttatctgtttcttattgcctgtccccccaactagaccaattgcaaaaaattcaactgcagaaatataaggtaagtttttcatggatgattactcattaactataaatacataaaaattttatgtacacatttatctgagctgccctcatatggccttctacagaatgcttgaagttagattaaaaataatctacagataaatattcactgatagaatgcttaaagttgaagcctactggtgaaaatgttgttcctttctcaccagaaatgaagtagatacatttatttctggacttgctattatgcttcattagtgtgtgtttatttttatccagtgccatgccgtttgcttaytgtagctttttttttttttgagacaaggtctcattctgttgcccaggatggagtgcagtggcttgatcatggctcactgtggcctcgacctcacaggatcaaa

SEQ ID NO: 70841 - DNA, 616 bp, Homo sapiens
tatcgaaatcccaatctcaggtgatccacctgcccggacctcccaaagtgctggcattacaggcgtgagccactgcacctggctctctttattgttttaaacagaactctaatttttcttcaggccactgatttagtttcttattatacatttatttatttatctgtttcttattgcctgtccccccaactagaccaattgcaaaaaattcaactgcagaaatataaggtaagtttttcatggatgattactcattaactataaatacataaaaattttatgtacacatttatctgagctgccctcatatggccttctacagaatgcttgaagttagattaaaaataatctacagataaatattcactgatagaatgcttaaagttgaagcctactggtgaaaatgttgttcctttctcaccagaaatgaagtagatacatttatttctggacttgctattatgcttcattagtgtgtgtttatttttatccagtgccatgccgtttgcttattgtagctttttttttttttgagacaaggtctcattctgttgcccaggrtggagtgcagtggcttgatcatggctcactgtggcctcgacctcacaggatcaaa

SEQ ID NO: 70842 - DNA, 809 bp, Homo sapiens
aaaaaaaaaaaaaaaaagaaataagggaaaaaaagcccaggccgggcgtggtggctcacgtctgtaatcccagcactttgggaggccgaggcgggcggatcatgaagtcaagagatcaagaccatcctggccaacatggtgaaaccccgtctctactaaaaatacaacaaattagctgggcgaggtggcacgcgcctatagtcccagctacttgggaagcggaggcaggagaatcgcttgaacccgggaggtggaggttgcagtgagccgagattgtgccgctgaactccagcctgrtgacagagcgagactccgtctcaaaaaaaaaaaaaaaaaaaaaaaaaagccctgagaggtatctttattatccccactttatagatgaggaaactaaaaaagtaatattaacataattaatcatcgtattagctcctatgtgccaggcatgaagataagggtttaggtacaatacctcatttaacccaatttaaaatcccatgaggttattttgttcattgtttctttttgccattttagccactttttattatggtaaaacatacatgacaaaatttaccgttttcaccattttaaaggattcagtggcattaagtacattcacatcgttgtgcaaccatcaccaccgttcatctccagattttttttcatcttcccagactgatgtgtgttctgatctggattctatcaccttctaaatgtgtgacctcaggcaagttgcttaatgtttctgagcttcaagtgcctgctctttaaattggaggacctgaggtgagccgctgctatcgggg

SEQ ID NO: 70843 - DNA, 809 bp, Homo sapiens
aaaaaaaaaaaaaaaaagaaataagggaaaaaaagcccaggccgggcgtggtggctcacgtctgtaatcccagcactttgggaggccgaggcgggcggatcatgaagtcaagagatcaagaccatcctggccaacatggtgaaaccccgtctctactaaaaatacaacaaattagctgggcgaggtggcacgcgcctatagtcccagctacttgggaagcggaggcaggagaatcgcttgaacccgggaggtggaggttgcagtgagccgagattgtgccgctgaactccagcctgatgacagagcgagactccgtctcaaaaaaaaaaaaaaaaaaaaaaaaaagccctgagaggtatctttattatccccactttatagatgaggaaactaaaaaagtaatattaacataattaatcatcgtattagctcctatgtgccaggcatgaagataagggyttaggtacaatacctcatttaacccaatttaaaatcccatgaggttattttgttcattgtttctttttgccattttagccactttttattatggtaaaacatacatgacaaaatttaccgttttcaccattttaaaggattcagtggcattaagtacattcacatcgttgtgcaaccatcaccaccgttcatctccagattttttttcatcttcccagactgatgtgtgttctgatctggattctatcaccttctaaatgtgtgacctcaggcaagttgcttaatgtttctgagcttcaagtgcctgctctttaaattggaggacctgaggtgagccgctgctatcgggg

SEQ ID NO: 70844 - DNA, 809 bp, Homo sapiens
aaaaaaaaaaaaaaaaagaaataagggaaaaaaagcccaggccgggcgtggtggctcacgtctgtaatcccagcactttgggaggccgaggcgggcggatcatgaagtcaagagatcaagaccatcctggccaacatggtgaaaccccgtctctactaaaaatacaacaaattagctgggcgaggtggcacgcgcctatagtcccagctacttgggaagcggaggcaggagaatcgcttgaacccgggaggtggaggttgcagtgagccgagattgtgccgctgaactccagcctgatgacagagcgagactccgtctcaaaaaaaaaaaaaaaaaaaaaaaaaagccctgagaggtatctttattatccccactttatagatgaggaaactaaaaaagtaatattaacataattaatcatcgtattagctcctatgtgccaggcatgaagataagggtttaggtacaatacctcatttaayccaatttaaaatcccatgaggttattttgttcattgtttctttttgccattttagccactttttattatggtaaaacatacatgacaaaatttaccgttttcaccattttaaaggattcagtggcattaagtacattcacatcgttgtgcaaccatcaccaccgttcatctccagattttttttcatcttcccagactgatgtgtgttctgatctggattctatcaccttctaaatgtgtgacctcaggcaagttgcttaatgtttctgagcttcaagtgcctgctctttaaattggaggacctgaggtgagccgctgctatcgggg

SEQ ID NO: 70845 - DNA, 1907 bp, Homo sapiens
ttgtcttggctattatccaatgtctgggccctggccattctctatggccagggatatgatcagggctggccagatgcacagggagggcacgacatgggggaagtgtacgcatttacacctgccaggctggaagaccatccttttgaccaacatgagctcctacgagacataacaaggcttttttccctttgcttggaacgaggaaccatagaatttgctgaggtggggaggttctagtgggtcatcaaatctagcctctcccatctgatgcaagaatcggcgttacaacttctctgacgttgctcaaccagcttctccttgaacacccccagatgtgagctaacttgatctcctcaccccatttttttggaaagctttatgtgttaggcaattcgtataattctctgtcaggcttgatctgattccctaatccacccatgggtcccatttctacttcttgggatgacatagaagagttctaatccctcttccatgtgatagctcttcaaatatttgaaggcagacgtgatgtcattcttagtcttttcatgctgaggatgcccagtgtgtgccagttttgcaattcttaggattcttagtaatgtcaatctcacttgcagggcatacttgagttaatgcataaataatgagcttttaccatgtgccaactcccttcaaagacattatggaattcaattctcatgtccaacctgtgagataagaaccctttttattttatagaggagaaaagaaattaatgaggttaggggtttaagccaaggtcatgtagttagacatggacagaactggcacattaacctgagccttttaccaaacacatgtgcattatttttttctctatatgagtttcaccagggcaaggatggtgcaaacatccaagatacaggtcttgtcatccttaatacataggatcatagagaagcggtgatctatatatatctctgcagtcttaagtcttacttgctagagccattttctgcctctacttctcccccacctaattctggctgtaaattgtaacaagatatcggatagcctctccatttttttgcacatagagaaacagagcagagaggttgatgtccaggatactgtttacttggggacacagtgtcaaaatcagaattaaatctccaagtcttcaaagacaatcatttattgcacataaacagaaattgctaatttcacatgtgtatgcttggagtgcaaaatattggagacatttggcattttccataatatttttggaatacaggagccctctggtggccaaaattgtagcaaggaggtatcgttcggaaagctgatctgagatttcctaccagtactcctcttagtgccctctggctttgtttgagggtcaccccttttccattttgcctctttcttcctcttttcatacacggttacttgctttttgcccaccctttctcctttccccttcaagctcctctctgcatcttccccttcaactccagctgtcacccctgatcccactggaatctctccttgctgccatctttggcctcggaggaccctttctgaaatctggccagttcccctgtggcaggtgctgagtgacagctgctgccttgctgctgcttcagtagtgaattcaaatcccttgtgggtgtttagagcctgcagatggattaactgatgattcctgttcatcaacaagcatttgcagtatcctgctragcatgttagggatactgagcggcccctagaagcaagtgctcttggaagaggcaggtgagcttcttcccccttaggcacaaggagctcaccacacatcacctggtccctggggttgaccagctgtccagacctgggccattctaagtttctatgtatagctcttaactgtgcaaatgtctgttttc

SEQ ID NO: 70846 - DNA, 912 bp, Homo sapiens
attctagcaagatgaagttgatagactatagtctggcaattctgatatgtatatatttgttggtttaaattggtcttgacaagtttagtggtaaaatttttaaaaaacaaaacacagcaaaaaccaaagttgtccccagaataatgggtcaataatgtttcataatccaggattccccaacaattctaagaacgtctttaccacagtcttccttacatttatatgttctaaaaactatgctaactctaaatttaattacacggcattattttgaaaaaataataggcaaaaaagaacactggtataattcacatcatttaagcaaaatacaggcactgacagaaatttagagaaaattagaaggggcctctttagaaaaaaatggaataaatgtgggtaaaaatctaaccataattaattgtaaccaaataatacattatgaattggctctgtgctcatctttacctgctttacaacctgattctctaacacatattgaaacgaatattgaaatcatattgaatttttttktttttgagacagagtctcactctgtcgccctggttggagtgcaatggttaagatctcagctcactgcacctctgccttctgggttcaagtgattctcctgcctcagcctcccaagtagctgggattacaggcacctgccatcatgccaggctaatttttgtatttttgtagagatggggtttcatcatgttggccaggctggtcttgaactcctgacctcatgtgatttgcctgccttgccctcccaaagtgctgggattacaggcatgagccaccacacctggccccaaatcattttttttctaacaaatattttcattatttacataacatagaaacatctggaaaagtaaagacaagagtgttgtttttttaaatgca

SEQ ID NO: 70847 - DNA, 912 bp, Homo sapiens
attctagcaagatgaagttgatagactatagtctggcaattctgatatgtatatatttgttggtttaaattggtcttgacaagtttagtggtaaaatttttaaaaaacaaaacacagcaaaaaccaaagttgtccccagaataatgggtcaataatgtttcataatccaggattccccaacaattctaagaacgtctttaccacagtcttccttacatttatatgttctaaaaactatgctaactctaaatttaattacacggcattattttgaaaaaataataggcaaaaaagaacactggtataattcacatcatttaagcaaaatacaggcactgacagaaatttagagaaaattagaaggggcctctttagaaaaaaatggaataaatgtgggtaaaaatctaaccataattaattgtaaccaaataatacattatgaattggctctgtgctcatctttacctgctttacaacctgattctctaacacatattgaaacgaatattgaaatcatattgaatttttttttttttgagacagagtctcactctgtcgccctggttggagtgcawtggttaagatctcagctcactgcacctctgccttctgggttcaagtgattctcctgcctcagcctcccaagtagctgggattacaggcacctgccatcatgccaggctaatttttgtatttttgtagagatggggtttcatcatgttggccaggctggtcttgaactcctgacctcatgtgatttgcctgccttgccctcccaaagtgctgggattacaggcatgagccaccacacctggccccaaatcattttttttctaacaaatattttcattatttacataacatagaaacatctggaaaagtaaagacaagagtgttgtttttttaaatgca

SEQ ID NO: 70848 - DNA, 577 bp, Homo sapiens
ctcctctccctaggttagtgtagagcaagcaggaggaaacaaataagcaaataaaaacacacttctaagtagtatggcctaccatacaactagttgccacagcccctmccctcaactgagggataaaacaaacaaacagtaaaaaacacccagtttcctgcttctatctatgcagggaaagagttgaacaagcatccaacgatacaacctttgggggcttcccaagaaaatggcttccaaagaaaatgagtcttgcttgtctcagagcactgaaatgacccagcattctctagatgcctagggggtgctaagaacaaagaaaactgtcagaatagtcaaaagtttgagaggcttccaaaatctatgactgggatgattggtgaaggtcttctcctatatggagctagtccacaaagattaaaagaggtggctgttttgtctaatatgaagatatcaacatagagaaccaaggtaaatttaaaaacagggaaatatgtttcaaacaaagaaacaaaataaatttacaaatatcaaccctaatgaaatggagatatatgatgtgcctgacagagaattc

SEQ ID NO: 70849 - DNA, 3351 bp, Homo sapiens
gaccgcaagaatagaacaacataaaaatacaatggaaaacaggaacccatttgttcagattaggtgttagctgtagataaaatcaaggaaagagtaaaaaggttttcatcaatgaaagttatacctcttattattattgttgttgtcatgcatttcaatttgttagctatttgtagagctataaaagaaaaaacattttctatgctctgcttgctacagtacatgttatacctgctaggaaaaaccacaatgataaatgactaccatttgctttttaaaaaatgttactcacaaagaccagggactgaatctgctgaaagtacttcaagcctttcatacccagtgctatcaaatgtttctcttcactctaaatgttcagaaaaacacaattatcctatcttctgcccaacctatactatctattggtcaaatatatttatgggggaaacagctattgcaaacagagactaaaaatgttctccttgaccttgggcacatatttactatatccatgaggtctatgaggtgcagaaactaggagtattgctaaaccgcctgtccatcacacagaaatcacagcgaccagcacaaaaccttctggagagagtaggtggtggctctctgcaccatacatacctcattgctttcttttttctttctttttcttttttgaaatgaagtctcactcttgttgcccaggctggagtgcaatggtgtgatcttggctcactgcaacctccgccccccaggttcaagcgattttcctgcctcagtctcccgagtagctgggattacaggcacctgccaccacacctggctaatttttttgtattttgagtggagacagggtttcaccatgttggccaggctggtcttgaattcctgacctcaggcaatccacctgccttggcctcccaaagtgctgggattacaggaatgagccaccgtgcccagcccctcattgctttctaatcttctgtctcaatcatctccttagtggaaagccacataattatggcattcatgccagggtcccctaaacaccagtttaaatttgctttagcaaaattttctggaaatgtaatgacatgaatgaaatgcaacaatagcctaggttatcaatcatgtaaaatagggaaacacaactgggtgacagaaactagccagtcctgctatgagatggtgctatgaaagcaggtcaacaaggaccaagacccccaaacatgtcagagtagtgataggctcaagagaacttgtcgtctctgaggtttatgtcatgcattcatacattcattcactcatttatttacttatttgcttgttttctttgtgatattagctctgaccaatgcctgaaagtagtgtgtcaatcacgcaactggtcgggatgagacaattgaagatactttcattatccttctgcccagcatgaaattccatacttatttataaagtaggttattgtaactgatcataggcatttttctaataaagcaattaaaaaatttttttctaacaaattttaaaataataaaagaaataatttatggtaacattttgatatatttagttgtattcattttctaatcatacaagggtttatcttacaaaacatgagtcatgtttctgagaaaagttatagtaatggatatataatactttattgcttattctatttatcaagttatttaacagttctattagcattaaacactagttggtttcatttttaaatgttactctaacactgtgagaaagatctttggtttgtaacccaacaattattaggttacacatttcaataatttaaatactaaacactgctctatttctttatgatgtctccattaaacatgttttgggggtttctgctcaacattataagaaatttttaaaaaatttcaaaaacatagaatcatacaatgaacttccaagtgcccaccacctaggatcctcaatagacatgtcaccacatttgctttatcacgtcttcccacctatctgccttgatttgagtcatcttccagtcaattgcaatatagcttcataaaatgctttttaggaattctatggaaagtctctagcaccttatgtaattggtaatgtctttctgctgctttcctacatgaccaactattgacttggggtagaattactgtattgtgtttctttgtgctcaaaatttgtatgttgttctaatagcttctgacctttagtaytgatatggataagtcagagaacaacctaattgttgttcatttgtagtgctttcttatttccaacctagatgcttgcagaactttttttttaaactttaaactcaaatatttaaaagaatacatttcaatgtagtctctccccattaagtttgctttttttggtgatttcttatgatccacatgcaggaattccatcaactaggaaaacttcagtttgagcatgtttttttctattatactggccacttctgcttctgtaacattcttatagtctcttcttcaggatgaacttctacccatgagctgtatcttcactccttggtccctaaatctatcatctttgcttgtgcttctctttatgtgttgggagaactcctccagcttgtcctcatatcactaaatcgattctctatagtgttgcttctcgtctttaccacatctcatgcaaattttaattctaatattacatttcctccccttaaaatcttttctcatgttattgagttcccttttcatctgcctttcaaagtgactttcttttcttctcaatatggttgccttatcatctcacccttcatcttttgtttcacctatcgaggtcatcttgagttttactgacaacaaaaaggaaggcaattttcaaattttgtctttgtatgtcaggtaatttttgttattgttgcatgttctctaaagaaacttttaactctggcatgcaataattattttttcttttgtattgctctataggtgtttgctaatctaaaaatgtatttacttgcttagttttctcaaatcaggagaaatctctataggcttgatgtttacagtagacgtggaaacattttctttgttccattttactcgctatctggggactcttagatatccttttcagaacaggagctggagagggatttatcaagtcttgacatagaatcacctgctctgaatcccctaaatatatgtgtcaaaggatatacttctgtgagagtagcagcaggccccaaatggcctggatgcttcagaaaggaatcccatactcatggcggggtagatgcgagttgtctctgatcgagggtggagatggatgacactctcagatattttcccttgcctggctcaggtatta

SEQ ID NO: 70850 - DNA, 479 bp, Homo sapiens
acatcatcccactccttttccccacggcatacaccctcatccaggaagcctcagttgggtggcagtggggctgagagggcagaggccccattactcaatgactcggccctcagacactccatcacactttgactgcaaggctcctgagagamaggcataggatgtgcggaatcctaattagggaaaaaaaagtcagactagcagtaccaagggaaagcaaagacagaaagcagataaactgtaagtttgcctttcttcatggcccaggacacacagctcttctgagcaaataactcagaatcttccagcacccaactatcaccagacacctgcaagttagctcactacaaccttggcattatcagtactgcatatagccccctggagcccaggaactatcctataaatatccagcaagcctttgtttctttgcagtcagctcctctctggctgtgctgcccattgcaaccttgtaatgt

SEQ ID NO: 70851 - DNA, 479 bp, Homo sapiens
acatcatcccactccttttccccacggcatacaccctcatccaggaagcctcagttgggtggcagtggggctgagagggcagaggccccattactcaatgactcggccctcagacactccatcacactttgactgcaaggctcctgagagacaggcataggatgtgcggaatcctaattagggaaaaaaaagtcagactagcagtaccaagggaaagcaaagacagaaagcagataaactgtaagtttgcctttcttcatggcccaggacacacagctcttctgagcaaataactcagaatcttccrgcacccaactatcaccagacacctgcaagttagctcactacaaccttggcattatcagtactgcatatagccccctggagcccaggaactatcctataaatatccagcaagcctttgtttctttgcagtcagctcctctctggctgtgctgcccattgcaaccttgtaatgt

SEQ ID NO: 70852 - DNA, 871 bp, Homo sapiens
tccctacttcacagcactatcatcataagaatggcaggatgtggtgtgtggaaagtgcttgtctcagggtctggcacatagcagtcttagtaagtgtcgactgctgctgctgctgctatgttattccaagcgtgctaaggacaaatacatcccagacaagttgaagccatcctacccttggcccacaaatattttaaagatgtctctgtcatcaccccatttctccattctcctctgtgtctgagccaaggcctcagcccctattcagaatccagacgccctgcctaactagccctttcctttctctttcttggaactggactcttggttgctgttagatttttgttctagaaccagagggatcttttccaccaacctgtagtaggaccctactgcacatgcacgcgcatgcaagygcacgcacacacacacactcgtgcacacacacatgcatgctcccacaatgttggcatcgccactgttgtaagactcctgcattgtatcctcccaaccagactgcatttgcccttggacatggatgtcagcctggctcaaagtcatcacccaaatccttgcggggctctcccttgcagttgtctgcctctgcactcccagaaaaccaggaagtatggaggagtgggcagagaaatataaacccttgtgattataggacaaatattttaaaggacatagaggaagaattctcctagaggaaaaacaggtatccgaaaactgaagacaccccagatacacttgagctatgcggccacatctccaaacacagaggcacccaagtagaaaagtaacttggaatcaatctcctcacctaaacaacgcattcaagaacagagagaatcccagatcctgctgg

SEQ ID NO: 70853 - DNA, 871 bp, Homo sapiens
tccctacttcacagcactatcatcataagaatggcaggatgtggtgtgtggaaagtgcttgtctcagggtctggcacatagcagtcttagtaagtgtcgactgctgctgctgctgctatgttattccaagcgtgctaaggacaaatacatcccagacaagttgaagccatcctacccttggcccacaaatattttaaagatgtctctgtcatcaccccatttctccattctcctctgtgtctgagccaaggcctcagcccctattcagaatccagacgccctgcctaactagccctttcctttctctttcttggaactggactcttggttgctgttagatttttgttctagaaccagagggatcttttccaccaacctgtagtaggaccctactgcacatgcacgcgcatgcaagtgcacgcacacacacacactcgtgcacacacacatgcatgctcccacaatgttggcatcgccactgttgtaagactcctgcattgtatcctcccaaccagactgcatttgcccttggacatggatgtcagcctggctcaaagtcatcacccaaatccttgyggggctctcccttgcagttgtctgcctctgcactcccagaaaaccaggaagtatggaggagtgggcagagaaatataaacccttgtgattataggacaaatattttaaaggacatagaggaagaattctcctagaggaaaaacaggtatccgaaaactgaagacaccccagatacacttgagctatgcggccacatctccaaacacagaggcacccaagtagaaaagtaacttggaatcaatctcctcacctaaacaacgcattcaagaacagagagaatcccagatcctgctgg

SEQ ID NO: 70854 - DNA, 1884 bp, Homo sapiens
tgctcccctcaaagttgggcacatgccaccagaggttctgattcctaagaaagtagggaaatggagccccagcgcacctgcagacctgaaggtagactgtggtgggaaactgagctagaagctccaggcacaaagcagcacaggccccacaggtgtgcatgtgaggccacccactgcatggccgcctgaaagcacagctgggtccctccaaaacccacctttgccagggtctctcctcagatatgagccccttgtaggacatgaaggtgtcaccatccatccacttgatgcccttgggcaatgagcagggatggcagttgtggtaccccaggcagagccatcatatgtagtcaaagatgtagacatggttttttcccttatctctcactgctccaaatgaggtgggagagatggaggaagaggacaggtgtgtgacagcagcccatcaccacctttattccacccactagtctcagctcccatctcccatgagcagagtagaggaaaagaaaagcttggaatcaaatgattaaagttttaacatgaaccagagctgaatctgataaaccccaaatgactcttcgaagcaccagaagtgactgcaaaactatgaaacctagcagaaataactgaagggagcttctacctaatggaaaaaaagggcttgactttggggaaaaaaaatcatgtttctaccatgctgccttgaactcaattacctggctacacctctcttccacttgccacaacagtctatggggctgttgtgattataaagtgagatttcatttgacactcttcctaccttgatggcacatctctagaaaagactaccccaaaatgttcacccatccaatcctgaagcctagggctgagtgttgtgtctttaattcattcattcctctgtgtttctgaggcaagaaggaggcatgtacaatccgggctccagtcagctctctgcatgcatttttattgcttcctgacaaatcaaggttgcatgttctttttagaatccctttaggaagcgaaggaaaaacaccagggcgctccctgggggacacgtggggcwatcgctggagccctcacttgggtttgggacttaacgctgctcatctgcctgggttgtaaggtcccttctttgtcactgaggtcagactaccagatacctccctggaacatccacagggttcgtgttgtggcggacagaccctcaggggcagacagagcgaggcgaggatgagccctgaagacaggccgttctttcccaggccgctccgtcctcagcaaagcaggaccgaccctcccttcaccccgcaccaccgccaccgccacccctccccacgggccagcgggacctccaagcatgatctcagtacttatttcaggctagtttcacccgaagacaatttccccgagtaccaagggaaaaccacgatagattatttattctaaataagccaaaacaatgtcccaaatggacacgcctggtggaggttttagccatgggtttaattgaaaccagacagctcagaggagagcacagctctgtttcaagctcccagatggctcctggccgcaacgctttcccacactcaggcctgatgtggtgtggagccgggccatcacctggcccctaggtcagaaacaggtgccggagctgttgcctcttcctcaggtgggggctgggggtgtcacagtcaggtcagccataaccccttgtgactagtgttgcattttttaaaaagaaagagaaaaagagagtctctcatcaaatggctttcttccatgattttcctcctgctctctctctgcatctcctcactcccctacccccagccatcttcccaccccttccttgtggctgtctcctccatctattagatc

SEQ ID NO: 70855 - DNA, 1884 bp, Homo sapiens
tgctcccctcaaagttgggcacatgccaccagaggttctgattcctaagaaagtagggaaatggagccccagcgcacctgcagacctgaaggtagactgtggtgggaaactgagctagaagctccaggcacaaagcagcacaggccccacaggtgtgcatgtgaggccacccactgcatggccgcctgaaagcacagctgggtccctccaaaacccacctttgccagggtctctcctcagatatgagccccttgtaggacatgaaggtgtcaccatccatccacttgatgcccttgggcaatgagcagggatggcagttgtggtaccccaggcagagccatcatatgtagtcaaagatgtagacatggttttttcccttatctctcactgctccaaatgaggtgggagagatggaggaagaggacaggtgtgtgacagcagcccatcaccacctttattccacccactagtctcagctcccatctcccatgagcagagtagaggaaaagaaaagcttggaatcaaatgattaaagttttaacatgaaccagagctgaatctgataaaccccaaatgactcttcgaagcaccagaagtgactgcaaaactatgaaacctagcagaaataactgaagggagcttctacctaatggaaaaaaagggcttgactttggggaaaaaaaatcatgtttctaccatgctgccttgaactcaattacctggctacacctctcttccacttgccacaacagtctatggggctgttgtgattataaagtgagatttcatttgacactcttcctaccttgatggcacatctctagaaaagactaccccaaaatgttcacccatccaatcctgaagcctagggctgagtgttgtgtctttaattcattcattcctctgtgtttctgaggcaagaaggaggcatgtacaatccgggctccagtcagctctctgcatgcatttttattgcttcctgacaaatcaaggttgcatgttctttttagaatccctttaggaagcgaaggaaaaacaccagggcgctccctgggggacacgtggggcaatcgctggagccctcacttgggtttgggacttaacgctgctcatctgcctgggttgtaaggtcccttctttgtcactgaggtcagactaccagatacctccctggaacatccacagggttcgtgttgtggcggacagaccctcaggggcagacagagcgaggcgaggaygagccctgaagacaggccgttctttcccaggccgctccgtcctcagcaaagcaggaccgaccctcccttcaccccgcaccaccgccaccgccacccctccccacgggccagcgggacctccaagcatgatctcagtacttatttcaggctagtttcacccgaagacaatttccccgagtaccaagggaaaaccacgatagattatttattctaaataagccaaaacaatgtcccaaatggacacgcctggtggaggttttagccatgggtttaattgaaaccagacagctcagaggagagcacagctctgtttcaagctcccagatggctcctggccgcaacgctttcccacactcaggcctgatgtggtgtggagccgggccatcacctggcccctaggtcagaaacaggtgccggagctgttgcctcttcctcaggtgggggctgggggtgtcacagtcaggtcagccataaccccttgtgactagtgttgcattttttaaaaagaaagagaaaaagagagtctctcatcaaatggctttcttccatgattttcctcctgctctctctctgcatctcctcactcccctacccccagccatcttcccaccccttccttgtggctgtctcctccatctattagatc

SEQ ID NO: 70856 - DNA, 1884 bp, Homo sapiens
tgctcccctcaaagttgggcacatgccaccagaggttctgattcctaagaaagtagggaaatggagccccagcgcacctgcagacctgaaggtagactgtggtgggaaactgagctagaagctccaggcacaaagcagcacaggccccacaggtgtgcatgtgaggccacccactgcatggccgcctgaaagcacagctgggtccctccaaaacccacctttgccagggtctctcctcagatatgagccccttgtaggacatgaaggtgtcaccatccatccacttgatgcccttgggcaatgagcagggatggcagttgtggtaccccaggcagagccatcatatgtagtcaaagatgtagacatggttttttcccttatctctcactgctccaaatgaggtgggagagatggaggaagaggacaggtgtgtgacagcagcccatcaccacctttattccacccactagtctcagctcccatctcccatgagcagagtagaggaaaagaaaagcttggaatcaaatgattaaagttttaacatgaaccagagctgaatctgataaaccccaaatgactcttcgaagcaccagaagtgactgcaaaactatgaaacctagcagaaataactgaagggagcttctacctaatggaaaaaaagggcttgactttggggaaaaaaaatcatgtttctaccatgctgccttgaactcaattacctggctacacctctcttccacttgccacaacagtctatggggctgttgtgattataaagtgagatttcatttgacactcttcctaccttgatggcacatctctagaaaagactaccccaaaatgttcacccatccaatcctgaagcctagggctgagtgttgtgtctttaattcattcattcctctgtgtttctgaggcaagaaggaggcatgtacaatccgggctccagtcagctctctgcatgcatttttattgcttcctgacaaatcaaggttgcatgttctttttagaatccctttaggaagcgaaggaaaaacaccagggcgctccctgggggacacgtggggcaatcgctggagccctcacttgggtttgggacttaacgctgctcatctgcctgggttgtaaggtcccttctttgtcactgaggtcagactaccagatacctccctggaacatccacagggttcgtgttgtggcggacagaccctcaggggcagacagagcgaggcgaggatgagccctgaagacaggccgttctttcccaggccgctccgtcctcagcaaagcaggaccgaccctccctycaccccgcaccaccgccaccgccacccctccccacgggccagcgggacctccaagcatgatctcagtacttatttcaggctagtttcacccgaagacaatttccccgagtaccaagggaaaaccacgatagattatttattctaaataagccaaaacaatgtcccaaatggacacgcctggtggaggttttagccatgggtttaattgaaaccagacagctcagaggagagcacagctctgtttcaagctcccagatggctcctggccgcaacgctttcccacactcaggcctgatgtggtgtggagccgggccatcacctggcccctaggtcagaaacaggtgccggagctgttgcctcttcctcaggtgggggctgggggtgtcacagtcaggtcagccataaccccttgtgactagtgttgcattttttaaaaagaaagagaaaaagagagtctctcatcaaatggctttcttccatgattttcctcctgctctctctctgcatctcctcactcccctacccccagccatcttcccaccccttccttgtggctgtctcctccatctattagatc

SEQ ID NO: 70857 - DNA, 1884 bp, Homo sapiens
tgctcccctcaaagttgggcacatgccaccagaggttctgattcctaagaaagtagggaaatggagccccagcgcacctgcagacctgaaggtagactgtggtgggaaactgagctagaagctccaggcacaaagcagcacaggccccacaggtgtgcatgtgaggccacccactgcatggccgcctgaaagcacagctgggtccctccaaaacccacctttgccagggtctctcctcagatatgagccccttgtaggacatgaaggtgtcaccatccatccacttgatgcccttgggcaatgagcagggatggcagttgtggtaccccaggcagagccatcatatgtagtcaaagatgtagacatggttttttcccttatctctcactgctccaaatgaggtgggagagatggaggaagaggacaggtgtgtgacagcagcccatcaccacctttattccacccactagtctcagctcccatctcccatgagcagagtagaggaaaagaaaagcttggaatcaaatgattaaagttttaacatgaaccagagctgaatctgataaaccccaaatgactcttcgaagcaccagaagtgactgcaaaactatgaaacctagcagaaataactgaagggagcttctacctaatggaaaaaaagggcttgactttggggaaaaaaaatcatgtttctaccatgctgccttgaactcaattacctggctacacctctcttccacttgccacaacagtctatggggctgttgtgattataaagtgagatttcatttgacactcttcctaccttgatggcacatctctagaaaagactaccccaaaatgttcacccatccaatcctgaagcctagggctgagtgttgtgtctttaattcattcattcctctgtgtttctgaggcaagaaggaggcatgtacaatccgggctccagtcagctctctgcatgcatttttattgcttcctgacaaatcaaggttgcatgttctttttagaatccctttaggaagcgaaggaaaaacaccagggcgctccctgggggacacgtggggcaatcgctggagccctcacttgggtttgggacttaacgctgctcatctgcctgggttgtaaggtcccttctttgtcactgaggtcagactaccagatacctccctggaacatccacagggttcgtgttgtggcggacagaccctcaggggcagacagagcgaggcgaggatgagccctgaagacaggccgttctttcccaggccgctccgtcctcagcaaagcaggaccgaccctcccttcaccccgcaccaccgccaccgccacccctccccacgggccagcgggacctccaagcatgatctcagtacttatttcaggctagtttcacccgawgacaatttccccgagtaccaagggaaaaccacgatagattatttattctaaataagccaaaacaatgtcccaaatggacacgcctggtggaggttttagccatgggtttaattgaaaccagacagctcagaggagagcacagctctgtttcaagctcccagatggctcctggccgcaacgctttcccacactcaggcctgatgtggtgtggagccgggccatcacctggcccctaggtcagaaacaggtgccggagctgttgcctcttcctcaggtgggggctgggggtgtcacagtcaggtcagccataaccccttgtgactagtgttgcattttttaaaaagaaagagaaaaagagagtctctcatcaaatggctttcttccatgattttcctcctgctctctctctgcatctcctcactcccctacccccagccatcttcccaccccttccttgtggctgtctcctccatctattagatc

SEQ ID NO: 70858 - DNA, 1180 bp, Homo sapiens
ttaagttatcctctatgcctgacacatttgtgcccaccttaggctcttccagttcccctttaggtctacaataggatagaaggaagaaaagactaacacttactgagttccaggtattagactatgtacatgcaagggagatgactattttccttaggctcagatgagaatgctaaatctcagacaggttaaacaactcactcaggccacacacttgctacaagatggggccaggatacaaatgcacatctatttggccccagaggccagaagtgctctgcacaattctacactttcacaatccaatgaatctggccccttcaccttgggcatgaatttataaaagattggccgtgactggagaatgtggcaggctgttgtcacagttataggcagtgggtccatggccatgggacatgatagagctacctggctcttgaaatggattcaggatcccattggcagcaccttcttctcaagtgtgttttcgtaatgtctccccaactttgacctcaatgaattggagagatagagatttctggatctctatgacttgttgcttaaaaggaatagggtacatgaatatccccattttttcagactacattgttctctacctctgtaatcctcaattcctaacactcaacaaatgctagaggactgatgacactccatgtgcaggacactgctctgggaacactgaaacaatcaacaacacactgcacctgccatccaggagctccaaggctagggttaacactgaggccaactgacccaaagctgtgaccacactttcctgctgcaggcccagcccatcctggttatgaaaaccactcatttttgtccacagacaccaggggataaacaccagcccccacttctgaggctgctcaccaagctgaacttgctgcctgtcagcctaggattggtttattagatttctgtgtgtacatttccctctaccttcatttcttcatctctatcattgaaaaytatcccttttgtatccccttccttcttagttgatttcgttcttaaaatttggtgggataaagtgattttcactgcaggattaaattatcagtcctcagtggcatttgattattagcaatgtactcctaaaaattaaagaattactgttctaacgggaaattttcaggtgtaaagtctgttcactgat

SEQ ID NO: 70859 - DNA, 1577 bp, Homo sapiens
agagttatttaatttttttctgatgcctgggagttcctatgtataaaaacaaacaaaaatgacctgatttggtgcaaaactacagaagtgctaccaaggtttcacagtggtagctcactctgctctcaacagcatggttgataatgatcaggactcactctagaagtgcttctaaaagaaatctgctacatatgaaatctacacaccatcaccttcagctggccctgagctatttcttacaggtcagtctcaagtctctataaaactacctacatatgtaggtaggtacatctaaaaagaaacatgttcggtaagtgtgggtgatgctttcagttggctgtgctcatttcatggaagttatgcaacccaatttcgagtattctggcacaatctagggccacctcatgagtaaaatgcaaagcccttccgtgttgccctctctcactgccgccagctgtgggttgcgattggctgccagacacacacttcctccactagcactgccacctggctcccagtgagcccctgcagactggactagggtgtttctgcatcaaccccatccctgctccccaccagggatgccacccaggaagctgacactgccccattcgcaacacattaatattatcgtgaagtccgagctgctgatttcatttgactgggggcatgtagacaacaggagcagctgaattttaaaactgactttcatgcaatcgtcacttgtcattggtaaggatcccctaaaaggaaatcctatcaaagtaatctcctttcattaaggtcactaagaaaataagcagagagagataaacttattytgttccataacaaagaatgtatttcatgtcataggaagagtaggaaagaaaaggatgtggtgattatctgacctttcagattactgcatatttgagttgctgaacaaaggacaagagggctgtgaaatacattttgaaaagaaagggttactcacttcatttggaaaaagtaagatcctgtgtcattcaactcaactggccaaaactccaaaacacaatcatgcaaagcaattctcgaggaactccttgggttcagctccacatgttcctgtgatccactgcttttgtaccagcttttggtggttgtttcaatctcatgtgcaagtgaacacgagcaatgtttcagatagaaaggttccccttcaaccacagtaatgtggggacgtgaagtacaagattcttcaaaagattagtaaagtaaaataaataaaaacaaaaaccaaaatgacaaggtaactttttttggtctcctaatgcattaggtgaagaagcaaggttagcaagaaagtcctgagaaatctcggtgtcaatttcctgtgggttctttatttttgcgtcaatctttccaacactagaaaggataaggcactttcagaacatagatgaaaacacaacttctgacagtttctccccaacaggaaggtatcagaacttaaccaaccatagctagaagactgataattgtgtcacctcttagaagaaaatattacacattacaacttcttcatagggaaagccacagaagtcacggtgctg

SEQ ID NO: 70860 - DNA, 728 bp, Homo sapiens
cttcgcagagcagcttcttgggcattagcttatcgtttaatccccagcacaacccagggagtatttcctctttatttttttgagatggagtctcactctatcgcccaggctggagtgcagtggtgcgatctcggctcactgcaagctctgcctcccgggttcacaccattctcctgcctcagcctcccgagtagctgggactacaggcgcccgccaccacgcctggctaatttttttgtatttttagcagagacggggtttcaccgtgttagccaggatggtctcgatctcctgacctcgtgatctgcccacctcggcctcccaaagtgctgggattacaggcgtgagccactgcgcccagcctgtattttctcttcttaaggtcgygtttctttattgctcaaaagcaaagcaaacctggtgctgtggctgctcttgacaaagccggcaagaagagcagaatgggagggccgcacagccgccctcacctcacagccaatgcagaggagggcactcgaggcacagccctgtcaccactgctgccacccaccatcgtgagacttgcacttctgcagtggggctgagtctccacagagctgctgtaggtggacaaggtggcagcgtacatcctgacagttccccttggacactggggccatctgggcagcttcttctctcaggatggcagcaagagaggcatggccagcaccccaggaccccaacatctg

SEQ ID NO: 70861 - DNA, 1564 bp, Homo sapiens
gtcttcttccacccacgtgttcctctcaatgtccagccgcttctgtgtgtgcctgctaggctctcgcggtttttataggcacaggatgggagtgtggtgggccagggtggtcttgggaaatgcagcatttgggtgtaaaggcaggagtgtctgtcctcacctagggctgtgggcatgggcccaggggtggagccctcgacagggacccgcccttctcctcccagcacttccctgccccacttccgtatcagctgggagttcaggaccagtctggacaacatagtgagactccgattctattaacraaaatggaagaagtggttgagattgtgacactactgatttgtgcttgtttccctcctcatcctttctatcacaaaatagggcctgacaacctgatgttaccgcacatctatcctgtttattaaagtggggccggaatcatccagccatcggccacgattttagccagaagctggtgctgagccttctccttcttccagcaactcctccaggtacaggagaaagaggctttccaccggggctgctatacagcacggggccgtggtggacacgggaaaggaacccttcagacagggctggggtttcagccctggggctggtgccggctcaaggtcacagcttgttttcctcaggggatccctgggtaaaaggtgactgggggtaggccaggtgtggccccctccctctcccttcccagctgctcctgctttctggcatagcacgcttttttttttttcctgcctaaagaagtcactgctgcttcctaacaggaggacggttttgttgttgttacagtcggggatgggattatgcatggaggaaaaacacgctttcttgattttcttctgtaaactgcaggtggggaaaacaaaacgagtaaataactgttctacaaacacctcatggggagggaggtcgtgatatttacaagaacatcggctttctgctggatttccatttggagggatctaataaagatgcaggaggcatttctgctcttcctaacacactccgcggaggaaacgctgtcacaggcgacgatctaaagccaatcagagcagaattctgccatggccgagccccacagggtccactccctctgcatccccctggggtggttcccgggcccctgccacagcttccctggcccacatcagcaccacataaggtaaagacatggcctcagatgaagaggaaagataacagtgcagaagaacacggggaaagcacgcaggagaaagagcaaaacctgagagagctgacaacctgggctgggccaggagttgagaaggccatgtggctggcctggcttggtgggtactgcaagcctctcatgtcccacctcagccaccctcacatttactaaaaggaggctgttcctcaaaaggagagcacaggccctgaggaggaacggaaggctcctacgtcaagcctggacagcatcaccatctttttttttagacacagagtctcgctgtgtcacccaggctggagtgcagtggtgcaatcatagctcactgcagcctcaacctcctgggct

SEQ ID NO: 70862 - DNA, 577 bp, Homo sapiens
tgttgcctcccaataatttgtcaatttgctttgtgtgtttttaaggggtacgattcagtgrttttcagtttattattcaccaggtcctacagccaccaccactatctaattccagaacgcttttcattacccccagaagaaaccccgtgccccttaggagtcgcttcccatccctcctccccactccctgcaatcacgaatctattttctgtctctttagaattgcctattctgcaccgctcatgtacacagaatgatagaatatgtggtcttctaaatgcgccacttctaaaaaagtcactctccttcataaacagccacctctctgcagttctgttgactaacaggatttatggagctcccctgactttctctaaaaatagtaaatcccctccccaagtccagtgatagtcagtgatacctaaatacagactaagccggcgcagccatggccgacccatcctcagagggcaggctcggaggtactgccgggaacattgacagagaccattcctaagaaccagcctgcacctcctgggggactgagaaaccagccactgaggactgtgaaaaacgg

SEQ ID NO: 70863 - DNA, 577 bp, Homo sapiens
tgttgcctcccaataatttgtcaatttgctttgtgtgtttttaaggggtacgattcagtgattttcagtttattattcaccaggtcctacagccaccaccactatctaattccagaacrcttttcattacccccagaagaaaccccgtgccccttaggagtcgcttcccatccctcctccccactccctgcaatcacgaatctattttctgtctctttagaattgcctattctgcaccgctcatgtacacagaatgatagaatatgtggtcttctaaatgcgccacttctaaaaaagtcactctccttcataaacagccacctctctgcagttctgttgactaacaggatttatggagctcccctgactttctctaaaaatagtaaatcccctccccaagtccagtgatagtcagtgatacctaaatacagactaagccggcgcagccatggccgacccatcctcagagggcaggctcggaggtactgccgggaacattgacagagaccattcctaagaaccagcctgcacctcctgggggactgagaaaccagccactgaggactgtgaaaaacgg

SEQ ID NO: 70864 - DNA, 577 bp, Homo sapiens
tgttgcctcccaataatttgtcaatttgctttgtgtgtttttaaggggtacgattcagtgattttcagtttattattcaccaggtcctacagccaccaccactatctaattccagaacgcttttcattacccccagaagaaaccccgtgccccttaggagtcgcttcccrtccctcctccccactccctgcaatcacgaatctattttctgtctctttagaattgcctattctgcaccgctcatgtacacagaatgatagaatatgtggtcttctaaatgcgccacttctaaaaaagtcactctccttcataaacagccacctctctgcagttctgttgactaacaggatttatggagctcccctgactttctctaaaaatagtaaatcccctccccaagtccagtgatagtcagtgatacctaaatacagactaagccggcgcagccatggccgacccatcctcagagggcaggctcggaggtactgccgggaacattgacagagaccattcctaagaaccagcctgcacctcctgggggactgagaaaccagccactgaggactgtgaaaaacgg

SEQ ID NO: 70865 - DNA, 2381 bp, Homo sapiens
atggcctataactgtctctgaatagcatctattccattttttctctcataagaggagttgtacagctttctctattgttcttttctctgaaacagctttaataaaattggtaaattagaattaagttcagctggaaatggcagaaaacccaaattgcaatagataaaacaaaatggaagttgacgtctcgctcatatcaaatccaggtgggtggtgttggtctgatacggcagctgcatactcatcagggacccaggctccttctgtctgcttgtttgttgccctggagatctcccacctgtggttgcctcacacagcactgccttctcctacaggcttcatgaaaccatcttcacaaccctggcttccaaaaaacatgacccttgcctaccacaaccaacatctttctctgctagaattgctggacctagattgggtccctttcacatctaagcaatcaccaggttccacttggcccacagtaatgcatacacctctaccacaccattggtagagggcagctcactccaccgcagccctctctactcaccctactagtgttgggtagccctttacctttaactcttctgggcatgagtcaggtatctctgactccttcccttctcttgcacactatatgcaaagcatcagcaaagcttcttggctttacttcagaatatcttcacaatcttaccacctgccccatctccactgccactactctggtccaagtcaccactgtctctcactggacacctgtaacagcctcctaactcagctccttgcttctgctcttgcctctctccaaccccacatcccacccctaagagtctatcccagcacagcgagtagagggatcctgttaaaagctatcgtaaatgtcactgctatgcctaaaactctccactggtttcccatcttactcagaataagtcaatgtctttacagtggatgccccaggcctatgtacatgacttctctagatctccataaattccccccacctcctctcatactactatggcctcggctcactgtattccagacctgctcaggcccttttgctgttccttcaacatgcaaggcacactcgagtcctgggggagttggccattgctgttccttttgcctggaatgctctttcaccatttatctgagtggctacttctctttccctcttcaggtctgtggaactaaagcttggacacacagcaacatgcatcacccagtgcaggctagaattcatagtgaaagggatcagcaaaaacagggtctccttctctgcatacccagtagagacgcatcctaggcagaggcccagatggatacaccactggagttggctgcaggacatggaccttccctgggttgctctcctttttataaggcaaaggtgagagtggctttgcaggagagaaataaaaattttagacccaggtgccaagtattctaagcttggttgccacatgctcaaggaaagttctacaaaatgccagcttgcccagcacttataattcttagaggctcctgatccagtgagaagctgagtccaagcacagtccctcccaatatgagaaagagagggagccctggagtcatcactagacaattctgtttattccactgggggttgtttggagtttttttaacttcatcgtttgaaataattcaaacttggaaaaatggtacagagtccagagtaaccttcaccctgcttccccagtggtgacattttgcataattatagtacattatcaacaccaggaaattgaccagttcacaagactatagaccttactcagttttcacaaggccttaaacctatacccacgtgtgtgtgtgtgtgtgtgtgtgtgtgtgtgtgtgtgtgtgtagttttatgcaatttcatcaaatgtatagatttattcatctactaccacaatcaagatataatctgtccaggcattctggctcacacctccaatctcagtgctttaggaggaggccaaggcaggaggatcgcttgagcccaggagttagagaccagcctgggcaacagcaagaccccatctctaccaaaaaaaaaaaaaaaaaaaaaaaaaaaagaagtcaggcatggtagtgcacacctgtagtcccagctactcagggggctgaggtgggaggatcacttgagtccaggagtttgatgatgcagtgagctatgattatgccactgcactctagcctcaatgtggcactgattatcacaggtgagttgatcgctggggtcatgagccatgatccaagaagcatggcrtcgccaaaggtcagccttagggtcatgagtgcttcctcatggagccaacctgaatcccgaccagagatgggttctctaggagggatgctcctaggaaatc

SEQ ID NO: 70866 - DNA, 656 bp, Homo sapiens
tcccaggcaggctgatgtacagcctttaactactctgcctccgtgtctgcatcttcatctgacacaagccctgtactctgtgtcctgttcatccccctgttgcttgcccctttccaggctcctgagactgcctgcctcctgggagagcacattcccagcctggtctcttatttttctggatgtgtgagttctctctcattgagtaacaaattgctcccgaaacttagtggcttaaaactgtaaacatttattatctcatagtttctaagggtcaggaatccaggtgtgactcagctggctgcctccagttcaaggtctgtaatgaggctgcagtcttatctgaaggcttgatgggtctgtaatcccagctacttgggaggctgagacaggagaattgcttgaacccgggagacgaaggctgcagtgagcgaagatggcaccactgtactccatcctgrgcaacagaatgagacgctgtctcaagaacaaaaaaattcactcctgaaggcttgatggtggtagcatccatctccaagcccactcacatggttgttggcaggattcagttccttaaaggctgttggactgaaggcctcactccctcaccagcagtttgctggaggcaaccctcagttccttgccatgtgcatttctcc

SEQ ID NO: 70867 - DNA, 707 bp, Homo sapiens
cactaccagaaaaatgctgacacctttcagctgaaccttaaatgccaataatactgtatctttatcatagtgggtttgccagccatcttgtttagtcaggcatagtgcctgacttaagaggaaactgtgggcactttgatggtgagaaacgtcctctttccaaccttcttcttaggctttgtggcatgtacatgacacaaactgggttgaccttaaaataatactcaatggctaatcctaatgagttataaggaaatagaaagggatggctttttatgcacaacctaaacacattttaattatattttcctaaacacattttaattatattttgctcatttttggagaacccattcccttttacatctattatgaacattctaaaacttaaakttgtgaaaacaaaactctgggagatagatagattgtaattttattccatgaggaaggtgttaaaccagctttgcagtttgaattttattcttaaaggctctgcagttcttacctggatgtcgaaatgatttttaatttcaactgctgtagacctcatcctgtgggaactagaaataatgtccaactgccgtccagtctggcgacattccagccgttcccccaccccacgataacggcctgactcttcctcaattcatgacagcccattctacacataacctttctcctctggcaccggtcctcccagcagagag

SEQ ID NO: 70868 - DNA, 1062 bp, Homo sapiens
aaagtatgctttggaattggtcatagtcttttcgtatcatgagtgtgtatcccagaagatacagaatgcggtcattttacctgaaattatttgagaacactggatgtatctggtctgtgtaaaaagttagcacttaccctcttttcttcctggccaagccctctgaattcatctgttaatatcaaattgtatttttgccacatttctgtattggtgaaaagcgaatctgcagaataactgycaacgtttttcattcttgttttacaaacctattttttaaagtgagaataaggttggtttttaccaaatatttgttcctccttgacaaaagtagctctgtgtggataatatgattttattactacagttccagtcacttggttatatttatcttagcatgagcctttcacaccaagatttctatattttgtaacataggtgaaatatttaaaacatcaaaaactgtaaatctagatttttaaaaaatccaactgcaatgtcttttcctttgattgagatgatttgtgtaaactcaccagtcttgctttggagtgagcagaagagaatgactattttacgtggagcatcattgtgtgactgttgacctggacagtcccaagggctatgcagatggactccattggcacagggaggtttgacctcttccctgctattatccctcctcccaactgtacagatttgtttgttgtagtttatgtacttcttgatactgtcaaaaaattatctggaaatggttttattttgtgaagtgaacaatactttgtaatttatgatagtgtaaatggaaggcaaagcatcacatgtattaaattcttctgtctattattctggagtatgtgcaagaaagtggtttggagggatggggtggtggatcatcaaaacattgtttccagatagacgctggcaacaaattttcagtcatcactgaaacacaatgagaaaacagcatctcatcgagtccccactccttctgcaagctcccttctagagagcctgcttcaagattaaggccctgaggctccacattcactttccataagc

SEQ ID NO: 70869 - DNA, 2945 bp, Homo sapiens
agtgcacagtatgagattcacctgtggtagcactgagcaaagatgagctcccaaaactttgcttgagcctcccgacagcctgtgacttaggaaagcagccatgttttaagtcctgccaactatgtccatctgacattggccttgatacaggttaggaaaccaaaagattcacttcctgcatcatgttacccttccatcagatatctaccttctacctgtgcacctgtgacgtaatgtgctgacacatcgacaaaccacaagagagaaaataagacctggcaaatggagcataaccaaatcagtgctttgaaaagggatattaacaacagcaggtagcaggtcaccttctaaaggagctaggctaccccagctttgacctggaaccaggtgatcagctagagaacattgccttggagggtaacacgtgacttctactcacatcaatgattttctaacaaataactaagttgaattatctttgttttctaagagagtatggacacgttgtgaagccttatttgaggatttcatgccctccaagtcgttcatttattccctaagtacaatatttaagaaaatctcagcagccattctctgataggtcattattctgccccatctgtatcctatcacccaactttatctccttcaaaggcattacaatatgccccatctgtatcctatcacccaactttatctccttcaaaggcattacaatataatattcttccaatgtggtaacaacaaaacaaaaatgtatcagatactttggtttacatgttgtactcacatttcagaattaaagaaaatcaagctattattacaagtaatgacaaattggattgtattctttgccatttttattacatttgcttttacaagtcagtagtgttataatcaatgaagcattgatttgtatgcattctatggtatctcattcaacaatactgaaaaccattattgctgggtgccacaccaggtgctaaagattcatcaatgagatgtcttagcactcatggagaaacacacagcacagtgattagttaggtcccgggacttggaagccagtctttctggggtcagacgctggtcctttaagcttcccagctgtgtggccttaggaacataaagtaagttcttgatgtctcagtttcctcacctgttataataatagtgtctgtttcagagggcttttaggaacattaaatgagataatgtttacattatgttttatgtttacagtttatcatggagctgtacctgatacataggaaacatcatgtaaatgatcattaaaaatgaaactcactttctagtgagggagtctcataataaacaaataaataagaaaattatagtcaatgggacaaacaccaagcaaaccatttacaatagaattaaaacacactcatttctatcagtggcaggctaggttatttggatgaattctcctgctgagaactgggcacagaaacaactccagttttgacagtccctggagcaaaagcgaccaattaaacccaaggttaaccaaaaatagattaataggagattctcctaaatcagggtataggcaaaccagaagtaaaccatacccatatccacccacaagactgcacagacagttaagttactttggcacaaaaaggaggttgtaggggagggaaaaatgaatggactgatccctgggagggtgactatgggctagcagtgctcctatggatcagttgttttgtccaagaaacctcaagccacgaactcagtgttcatgtctggtaactcccctaacctcttgaaaatcctttctagagtaagtcacctttgtcttaggccttaaattttccaaaaataatttttaaagtagaatgaggaacacaaaatagtatctaagaatatcaagaaacaagaccctatgagtggaaactggcaggaaaaaaaaaaaaaagaccaaagaaacaccttcaaagacttcagattttttaatgtatcagccaaagattataaaataactgtttagtatgtttaaagtttaaaaatacaagtttaaaaatatcttcaaggaatagaaaagtatagcgtcctatttgaaataagactagatagaacatttagaaaagaaaaagttaaaatgtataaattaatgaaggaatttaacagatgtttagatgcagcagaagacagaattaatgaactgtcacatagatcagaaagaattctctagaatgcatcaaagaaggcaaaaaataaaaaagagtaggttaagaagcatggtaggggagactgagaaggtgtaacaaatgtctaattgggattccagaaaaagaaaagaaagagggccaggctgggtgtctcacacctgtaatcccagcactctgggagaccaaggctagcagattgcttggtccaaggggatcaagaacagcctgggcaacatggcaaaacyctgtctctacagaaagtacaacaaattagccaggtttggcgccttgtgcctgtagtcccagctactcaggaggctgaggtgggaagatcgactgagcccaggaggtcgaggctgcagtaagccgtgatcgcgccactacactccagcctgggtggaagagtgagactctgtctcaaaaaaaataaaaaataaaaaataaaaataaagaatagaatggggaagagagtatgtttgaagagataatagttgaaaattttctaaaactgaaataagaagcctataatccagagctgtgggaccatggcagtagcagaggaacagaatccagaggatggagaagaggatgaaggaggagggagaacagttagttctcatggaattatcaggaattattgattcagactttctctcgaaatgtgaaaataaatgcaaaattttgagaattgacaccaagaggccctttctgcaagtggacagctatgtcttggctggggagtctgaa

SEQ ID NO: 70870 - DNA, 2945 bp, Homo sapiens
agtgcacagtatgagattcacctgtggtagcactgagcaaagatgagctcccaaaactttgcttgagcctcccgacagcctgtgacttaggaaagcagccatgttttaagtcctgccaactatgtccatctgacattggccttgatacaggttaggaaaccaaaagattcacttcctgcatcatgttacccttccatcagatatctaccttctacctgtgcacctgtgacgtaatgtgctgacacatcgacaaaccacaagagagaaaataagacctggcaaatggagcataaccaaatcagtgctttgaaaagggatattaacaacagcaggtagcaggtcaccttctaaaggagctaggctaccccagctttgacctggaaccaggtgatcagctagagaacattgccttggagggtaacacgtgacttctactcacatcaatgattttctaacaaataactaagttgaattatctttgttttctaagagagtatggacacgttgtgaagccttatttgaggatttcatgccctccaagtcgttcatttattccctaagtacaatatttaagaaaatctcagcagccattctctgataggtcattattctgccccatctgtatcctatcacccaactttatctccttcaaaggcattacaatatgccccatctgtatcctatcacccaactttatctccttcaaaggcattacaatataatattcttccaatgtggtaacaacaaaacaaaaatgtatcagatactttggtttacatgttgtactcacatttcagaattaaagaaaatcaagctattattacaagtaatgacaaattggattgtattctttgccatttttattacatttgcttttacaagtcagtagtgttataatcaatgaagcattgatttgtatgcattctatggtatctcattcaacaatactgaaaaccattattgctgggtgccacaccaggtgctaaagattcatcaatgagatgtcttagcactcatggagaaacacacagcacagtgattagttaggtcccgggacttggaagccagtctttctggggtcagacgctggtcctttaagcttcccagctgtgtggccttaggaacataaagtaagttcttgatgtctcagtttcctcacctgttataataatagtgtctgtttcagagggcttttaggaacattaaatgagataatgtttacattatgttttatgtttacagtttatcatggagctgtacctgatacataggaaacatcatgtaaatgatcattaaaaatgaaactcactttctagtgagggagtctcataataaacaaataaataagaaaattatagtcaatgggacaaacaccaagcaaaccatttacaatagaattaaaacacactcatttctatcagtggcaggctaggttatttggatgaattctcctgctgagaactgggcacagaaacaactccagttttgacagtccctggagcaaaagcgaccaattaaacccaaggttaaccaaaaatagattaataggagattctcctaaatcagggtataggcaaaccagaagtaaaccatacccatatccacccacaagactgcacagacagttaagttactttggcacaaaaaggaggttgtaggggagggaaaaatgaatggactgatccctgggagggtgactatgggctagcagtgctcctatggatcagttgttttgtccaagaaacctcaagccacgaactcagtgttcatgtctggtaactcccctaacctcttgaaaatcctttctagagtaagtcacctttgtcttaggccttaaattttccaaaaataatttttaaagtagaatgaggaacacaaaatagtatctaagaatatcaagaaacaagaccctatgagtggaaactggcaggaaaaaaaaaaaaaagaccaaagaaacaccttcaaagacttcagattttttaatgtatcagccaaagattataaaataactgtttagtatgtttaaagtttaaaaatacaagtttaaaaatatcttcaaggaatagaaaagtatagcgtcctatttgaaataagactagatagaacatttagaaaagaaaaagttaaaatgtataaattaatgaaggaatttaacagatgtttagatgcagcagaagacagaattaatgaactgtcacatagatcagaaagaattctctagaatgcatcaaagaaggcaaaaaataaaaaagagtaggttaagaagcatggtaggggagactgagaaggtgtaacaaatgtctaattgggattccagaaaaagaaaagaaagagggccaggctgggtgtctcacacctgtaatcccagcactctgggagaccaaggctagcagattgcttggtccaaggggatcaagaacagcctgggcaacatggcaaaaccctgtctctacagaaagtacaacaaattagccaggtttggcgccttgtgcctgtagtcccagctactcaggaggctgaggtgggaagatcgactgagcccaggaggtcgaggctgcagtaagccgtgatcgcgccactacactccagcctgggtgraagagtgagactctgtctcaaaaaaaataaaaaataaaaaataaaaataaagaatagaatggggaagagagtatgtttgaagagataatagttgaaaattttctaaaactgaaataagaagcctataatccagagctgtgggaccatggcagtagcagaggaacagaatccagaggatggagaagaggatgaaggaggagggagaacagttagttctcatggaattatcaggaattattgattcagactttctctcgaaatgtgaaaataaatgcaaaattttgagaattgacaccaagaggccctttctgcaagtggacagctatgtcttggctggggagtctgaa

SEQ ID NO: 70871 - DNA, 944 bp, Homo sapiens
agcaaattaacacagaaacagaaaaccaaatactgcatgttctcacttacaagtgggaggtaaacactggctactcaaggacataaagatggcaacaatagaaactgggggctattacagcagggatggaggggggaaagggttgaaaaactatgtattggatgctatactctgtatctgggtaacaggatctatcatactctaagcctcagcctcatggaacatatccaggtaacaaccctgcacatatatcccagaatctaaaataaaaatggaaattataaaaaaaaaagaaattaaattgtgaagaagacaaagtatcaaaagaccttttctgttagagtctaacaatgttcaaatttagcttcttggaaataacttttaaatagctaagagcatcaacagaaaactgtggactacaggaaaagaactgcttcatatttcccgaatcttctcaaacttggtatctgcatatcaatgactttagattttatttttatgttgctgttacttttgctaaggaagtattatggtatacatagatactgtctatgctattttaaaaaatatctaggaaaatacattaagatctgtttrttattactattagtggtttcttgtgtatgtgttggtttgacaagtagaggttgttttctaaccaaaaacataacagaaaagatttagtacaggattacctgtgcagacagctgtgacaaagacacagggagacaaatgaaaattcaagctactcatgtttattaactgatctacatttgacaaaacaaagataggggcacaaagagctgtttgacaaagtcaaatcccaggtatcgaacaatagtattcccctggctgccctagagggcacttgtgcccactctgagggggatgtcctctgccatgcgaccgctcagttatcacactgcactgctgttgggttgcat

SEQ ID NO: 70872 - DNA, 1453 bp, Homo sapiens
taacttccgaggtggagataccctaccaaagaattgtccaaaaaggtacaaaagagaatatgttaatactcacgaagttctttaacacagtcgctgacaagctgttgttccttttcttcataggtaacagtttctgtctttatgtgacaagccttcaagaaaaaaatcagtatgtgacaataccttctagtgattttatagaaataactacaaaaacctttaattctcatttgaagactaaatttcatcacttacaaaggaaaaaacccaacaacctgttcatacatctctacctggctcatccctggccttggctaaaatgatccttgcttaagtaggacttccttgatgcccatactatacaagttcacagaatattgtgattttctgagatagttcttatcacagttgtaactacttagttacttgtgtaaaagttatcacagttgtaactacttagttacttgcgtaaactccacaagatacattttctatcctgtgactttcactattgtactgtcaacctgctactatccacttttcagtgggatctaagaacagtggaaggcaagaaaaatacagctccttgtccacgactctctaattggaatgccaatagcaaatccttacttatgccatatttcacctcaatagtacctggacctgaactttatagcctttaaagtaaaggaaaatggcaattaggttgaacgtaccttggatcgaagagccatattctcttcttccagttccttgagcttttcttgcagcatttccaactgcagcaacccttgagataagctaaaggactcattgaaccgaagaggtgtagaacagctggaatcagtttcactttcttcagaagcaatggagacgattcgaagtaactcatctttcttgcatagctcatgctgcagctgattaacctgtccatataaaatgcttgattttcatgttctttattttgcattatttatagcaatatagcttctaattcatggaacaattatttttcatcacaaaagaaaatcacaaaatcagctgctaggttttactgactaacgcaacaagtactaaaaagagaataacaaaccccagatacctcctaagttacaattttagagcattaattcaacagtacagcttttttccctcctaggtgagaagaaaagctaattttcttattgtatatatatgataggaatataggagaaaaattcacktaagataataatacattcatagttgaaaacatgacaaaactgaagaaccttcaaagtatcagaatagatccctacttcaaactcttatcataagggcttgtaattttaagatgtatatcactgtgcatgtcttcctaggagtactgattttagttctcggaacaaatagtttcaacctaaaggctcaaatgctatcatccataatgcattcataaaatacaaacgaaacc

SEQ ID NO: 70873 - DNA, 686 bp, Homo sapiens
tgcaggattccaacccaagacattctggaaaggcaggactatggagccagggcaaagatcggcagttgccaggggctggggaaggagggacgaagaggcggagcacaggggagtttcaggtcagcgaggacgacccgcgcgatgctgtgatggcgggtccttgtcattaggcatttgtccaaacccacagaatgcaaaccaccaggagtgagccctaagtaaaccagggacttcagttaacaacaaggggtcaatattataccaaagccatcagttgtaacaagtgcaccacattaacaaaacatgttaataagaggcactgggcagtgyggactgcacgagaatcccctgtactttctgcttaatttttatgtcaccataaaactgctctaaaaagtcgattaacttgaaaaatcaggagctgctaagtctagtggagaactcagggatgcctggggtggttccatcttaagaatgtgtcttccagtgagaactgtttttccaacagcaaggtaaagcacagatatgatcttgacttgttttgcccatggagtcctatgaaaatcagaccgtgctgagctgggttgtggggaggtgccctgttctgacccacgcgggggactgtaacatcccggaatctgaggtaagctgaaaaggccttcccaaagcaaaagctgtgacagcct

SEQ ID NO: 70874 - DNA, 1130 bp, Homo sapiens
gattctgaaaaagatgaacaaaatggggcacttatcctaccagatattaagacatactacaaagctttaataagataaaccatatggttattgtccgtgaacagtcaaatggttgagaaaatagagctcaaaaaaccatccaggtatagataggggtttgatataccacagtaatgactccaaaatccacaggctacagatgggtagtttagtagatgtatttgaaaaccaggctcacactaaagaaaatgttacaaggggactctacactatataaaggtaatctccaggaggatttaaggaactaaatgttaaaattatacctcaaaatgaagaatgtatagaagattgtgactttggagaagggaagttcttcctcccaaggactatagaagcacaaactgtaatgagaaaaaaagtcaatatatatgaccatgtcaagtcatggataattattcaagcacacaaaagttaacagattgagagaaggtatatgaagcatccaaatcaatgagatatgtgtcaaaaattatcaactaatataagtaagaaaaaataaaccaaaattaaaaatgaatgaaatataaaaatacaaaaaatgggaaatgacaacaaatatatgaagatatgctaatgcaaactcatcagtaatgaagtaattcctaattaaaataactgatacactgccttatgcttaatagattttttaaataaacaaattggattatttggaaatagggaacacaagtctttaygtacttctaattggtatgcaaactagaattggctctctggaaagtaactgacagcatttagtgaaattaagcatggcaaaatcctattgtccagcgatcttatatgttcagaggatagagaacttcttaataagttcacgagggaaacctatataaattcattcattgcagcactgcttgtgctatcaggaactgttagacaaatagatacccaaaactaagaaaatgagtgtgtatcaagtgatagaaataactgtgtagatggtagttgtaaagaatttgatgtacctaagttatatgaattcatttaaaaactcagtcttgactaaaggggggaaaacataagaacctataacactatctcatttttataag

SEQ ID NO: 70875 - DNA, 1487 bp, Homo sapiens
tgcatatttgaggcataaagtaatttcctactagtcccagaatgagaaactgtaatgtgaaacaaattacaaaagtagaaattaagtacaagaattaacaatgagcatattggcccccaacagaagccccccttccaggaaatactgacctcatccaacagcaccttcctgtccctctacaaggaatttcatacccagtgcacgcacgggaaaagtgacagctggggagagaggggctgtcacaggaacccaggtttcttcctcaaggcctagggcccagtgcaggggaaggaggcatttttcctgctgtgtagccacagtgcatttattaaacagcttctttttcttgaggaatttcccacaacgttcctccacaatgttgaggaattccattcttattcctgaggaattcccccacattgtgagccctgccttctaggatagaagctaggcacaggcaaggtggcacacagcaggcgcaccccagatagtatcagaacctgctggaggtccacttctggggacagcggcagcagaggtgcccagagctgggggaagctcatcctggcacctggtattccatgtctgtcaaaacataggctgcgctgtcctcaccatgagacctgcacggagcagtcccaccgcatggctcctgctgtgtctagctacattaatctccattcctctgtctctagcctctccccagctcccttccatattggaaggggccctgagcatgcacacaggtaggtgtcgaagtccacctgtgtctatccccctctgtacagccctggccagtctatgaaccaggcagttgagtccatgggaatgaccacacaggccctggaattagggtccagggtgtttggggagggaattcagggatcccaggtacatgagggacatggttaagaacaggggtgctggtgggttaggattaggccaagtgggcacatcctcttgaccttccacacttcttgccatgctgagggatgtgtctggccaagctgcagagcagagcccgccaaggcatagggccaaatctctacagaggcccaagaggagagaacagayggcagtaaatgactcctccttcttccagggacctgacatagccaagccccaaatctgagatttacaagaaaatcctcactgcactttctacatttccacctgatagcaacacactcttctaccttcccatggagtaatgagtaaatgcatttacagcatcatttaatacagcccctcatcccaaatattaaccaatatgtgcatatgtgtagatctgatgtaatggagagatacttagaaaattaggctccaacttatttgccataactgagaagtgaccatgaatgagtcctgaaaaaacaagggctaaagcaggttctttagctcatgaaatgtcacagcccatgtgttctactgaaaatcggtggaaacatgtacggggaatgtgttacagtactgaaaccaagcccata

SEQ ID NO: 70876 - DNA, 1487 bp, Homo sapiens
tgcatatttgaggcataaagtaatttcctactagtcccagaatgagaaactgtaatgtgaaacaaattacaaaagtagaaattaagtacaagaattaacaatgagcatattggcccccaacagaagccccccttccaggaaatactgacctcatccaacagcaccttcctgtccctctacaaggaatttcatacccagtgcacgcacgggaaaagtgacagctggggagagaggggctgtcacaggaacccaggtttcttcctcaaggcctagggcccagtgcaggggaaggaggcatttttcctgctgtgtagccacagtgcatttattaaacagcttctttttcttgaggaatttcccacaacgttcctccacaatgttgaggaattccattcttattcctgaggaattcccccacattgtgagccctgccttctaggatagaagctaggcacaggcaaggtggcacacagcaggcgcaccccagatagtatcagaacctgctggaggtccacttctggggacagcggcagcagaggtgcccagagctgggggaagctcatcctggcacctggtattccatgtctgtcaaaacataggctgcgctgtcctcaccatgagacctgcacggagcagtcccaccgcatggctcctgctgtgtctagctacattaatctccattcctctgtctctagcctctccccagctcccttccatattggaaggggccctgagcatgcacacaggtaggtgtcgaagtccacctgtgtctatccccctctgtacagccctggccagtctatgaaccaggcagttgagtccatgggaatgaccacacaggccctggaattagggtccagggtgtttggggagggaattcagggatcccaggtacatgagggacatggttaagaacaggggtgctggtgggttaggattaggccaagtgggcacatcctcttgaccttccacacttcttgccatgctgagggatgtgtctggccaagctgcagagcagagcccgccaaggcatagggccaaatctctacagaggcccaagaggagagaacagacggcagtaaatgaytcctccttcttccagggacctgacatagccaagccccaaatctgagatttacaagaaaatcctcactgcactttctacatttccacctgatagcaacacactcttctaccttcccatggagtaatgagtaaatgcatttacagcatcatttaatacagcccctcatcccaaatattaaccaatatgtgcatatgtgtagatctgatgtaatggagagatacttagaaaattaggctccaacttatttgccataactgagaagtgaccatgaatgagtcctgaaaaaacaagggctaaagcaggttctttagctcatgaaatgtcacagcccatgtgttctactgaaaatcggtggaaacatgtacggggaatgtgttacagtactgaaaccaagcccata

SEQ ID NO: 70877 - DNA, 664 bp, Homo sapiens
agcccaggaaacaccaagcctggcaatgctcctatcagtagaggaatcctaaagccttgttcatagttatcaatggcttatttacccatgtaaatgggagaaggaaagttttatttttatcattgaggatgcacaaggatatgaagataaagtaaaaatttcccaagaggtttcaagtgtcgctatgaaatctcaattattcagctaatacaaggcgaaaagccacaagattggtggtttcaactaaggcatgtggattttaagggcaaaagtggcaatgagacacagaaagacaggatcaccgtcaccagatgccacagatggggatggacctaccccaagcctcttgaccactaggttctaggttgaagtctgacttttccatctcacccctacaaaccttctagggctcctggacaacagaaccagaacccagagacagggatgggcctcatctcttgtcctttgtcccctttctaaatgccctgccttgtgcttcccagcctcccctatamctccaacacatctcctctccagccaccagggtctacgatgccaaggccactattgcactggacttgtcaaaaagttgactgagaaccagagacctttctccctggagcactgcctcccagtcaggcaagaacagctgtttctcagattg

SEQ ID NO: 70878 - DNA, 1827 bp, Homo sapiens
attgggggacatctgaaccatctcgacccagtgcaacgcacccaccttgtcaatgcaaagttgaagatactgcaactatgcaacctacatgggccacacagtgagacagaaacacaatttccttctaaataatccagattcgccatataaatactgctgagcaagctcctatttgccgtttgctgcaaggttggatgtcaaaacctgccatgcaaggctccactgcctcccaaacaaagcccagaccactcagtatagcattccagatgctcctcagtctcccttgatcctaccttttggaatgtgttcctctcctcgcccttgatgtacccatgtttactatgtgcccatttccttgcaagtttccctaatgtctacctcttttcttgctcgtgcagtttcctctacccagaatacaacccttctttctcctccagctcaagtcttcttcttccgccttctcccccctccaaggcctatcccaaatactgcaccacttctttagggttttcccatccctccgaccaggagaaacaggcaactatctctccctgctctgaaaccttgaggtttttcatctccccctctctgatggcactttgcagcccctactttgcattgcttgagttctctcccctgctgttcagttaataagcttaaaagtaggctgagattgagtataacttgaacagagcagatgtttaaatatttgccaaataaatgaaagtggctacgtttacacaacttatatccacagtgccttaaaaaactgaaagcacacttactaggtagagagcccttgataacttccagtaacaaagttttctgaggaaatggtcctaaatttccccaccaggcaggatttggcaatcactatggacaggcttggtctaaccagcttcttgtttacttgggtaatttactgactcggcractgtctacttctcgggtcagtggttctcaacccacattacactaactgcacagtatgatcacctgaggactttaaaaagccaggctgcatgcattcccatcacatcagaacttctggagttaggatccaggcatcagtgtttaaaaggctcccaggtgattccaatatgcagccagggttgacaactactggcctagatgacaaagagtaattccattcaggagacatttcccctatttgtatgtcaccgaggcagcagcaatgtccattttcagcactgacgtggcagactggggcccagccaagaaagggaactcaactccaggggcttacattcacacacactgggtttccctagaacaacaatttacaatcaggacatcagttccagactaaagtaaaggtctgcctctacttccaatccaaagcattttttaccttcctatgagcctaggttctatagatatatgtcatatttccttaccaacttaaaataaatttcaactggagaaaaaaagaagcttagagttctgatcttgcggttacataaatcccagagtttgaggttgatgataaagattcaagcacagtgagtgataccgagtgtaatttcccacattatcacaatagcaaaaatgtaacctccccttctccctgtgagtcagcccagaaacccactacgttaatctcgagaaatgcttaaaccttgagggaaacttattcaaagaggttgtcatggcaggttcacatgagactttttaaatcaattaagttccagtacacattccttcactgttgacaataatcacatattttccctacaggaaagaacccctgtgaaccttcgcatgtggttttacagattctttagcagacagctgatactatttgtg

SEQ ID NO: 70879 - DNA, 606 bp, Homo sapiens
gtaaagaagtgttggtctggattggatgagatcagagagttgaaggtacagtgtctgggagggtgtttagaagccatctattcaaactcccactaccaataacttgttttacttgccaatcccatggatgtcacataactgattaaagttaacacaaggtaatccaggtgtcaccactgactttgccaaggtccaactcaaaaaacaagagaaaaatgtataaagaatacgcataacacacgtttatatgtaaacacacatatatatacatatagaatgaaaatatatattcaatgagttagataattaatgagttaaatatatatatatttaataaaatgtcattgtttttctgataataaaaatgatgcactgaaaaacttcatgaaatgcagaaatgtttagyaaagaagaaaataaaaatcaccaaatcctccatctggagcagaccatgttttaaatgacagcaaaatcccttcctgtattgttttacttttctaaaagccattgtgaaaattccttctacctcttcacttagcagaaggtcaatgagaaaatgggtgctcctgactggacaatgtggtggatttaaacggcctgcaaatt

SEQ ID NO: 70880 - DNA, 1012 bp, Homo sapiens
tgggctgccttccagccccactccattccagtttgcagtaatgaatgttatacacacactcatacacacacacacacacacacgcacacacacatacacacacacatgcacactgattttttttaggagccgtcaatgaagttttaagttgttgacaattattgttggtcatcaggccagcaattcttctgagtgaagtgttgaacaaggctgggcctcagagctacacagatgtatggcttcctgaaagccatacatctgtgtgtgcctgggtaacttgagaaatagtactatgcatgtgataagtgtgccacaaagacttagaaagatagaaaactcctcacagatttttcacttaaggaggtaatgtcctcttgaaaatgttattaagtacaaattaaacaaatgttcaaggtgcacctacctgacacaccaggggcgcctgacaaatatttctggaatgacagaatgattctttgctctgtggtctgaagcaaatgacttgccttggttgggtcccagtctcctttctgtgaatagaggtaatcacacctcctccatgggtggtgaaggctgaggaaaaacgctttgtccaggagggttgtgctgcgaataggagagcaggtttgggggaggtggctaaccttggcacccacctgggctcgcagaagccagtgggaggtatgagataaactgcccagggacctcctcagccacccttacatcttatctgccctgtagccacgtcctcccctgcagtcaggctgcttatcaggggctgacaccaggcgcagccaactttgtgctttgattcttgccaggtttcttctgtggaaggggtttccagcccccgcacccccttagccaaagtttgccctttaaagtcaatctccggtcacacatctccagtaagccttcaaacctcactccagagccgmctctctcctccatcctcccctatgccttctgcccccacactaaggcagcaggttgcattcgccgggcactgccc

SEQ ID NO: 70881 - DNA, 1390 bp, Homo sapiens
ggccagaaccacactgcagaagtagcttgccctgagagccgctacctctaccacaatctggaaagtggggaatcaactctgaaatacaccacctgcaattcagagaccaggagttgccgcttatgcaactccagtgtgtcaagtaatgccacatcaggaagagccaccccaacaaataaagtggaatactcagctcccacagaactggagactggacacttcaatgctgctggagaaatttccgtgtctccagggctctgctttccagcagaaagagcaggaagatcctccatcctcacctttacctttcagcaaagccagctggagacatggaattccatccagagccttagcagtaggtgactcagcaaaatgtaaggtggtatggtcattttgttcctgtgtctttttagttttatggcctctacaggataaaaagactcaccatgggcattacacttttccacctgaactttctatccattcaactcacttttctatcttaactggaattagcccacctgacctctctacttttgtctaatttccaagctctttcaggtatcatttcctttcctgtccatcctggattcacgtgtccatcacttgaatcacttcccttccagtacctcaactctgcagccctccgtccttccagcatcttcacctgcaaagacccattctgatggatcccttcatccctctcctgcaagccttcaaccagagagcagagcactataggagataatcacataaacaggggtcttggtaccactacaaattcattacatctccatctatttacttacattactctttcaaattttccccataacatctccttacaattagaaaaattaggggccctcagacatgagttcctccttttccctaatttttcagttctactttataactttctgaaatgaaccgcacttcttaacttgatttctaggatagtccaaatgatcagcatgccaccattctcaaggccttccaatgtattcactatagccccacagaaggacttttctcaaatgtgaatttgctcatgccattctcctgatggtaggattcactgttgaaatgctttaggttggcataaatggtgtttattttctagcaccatctttctayatgtgccctaaactctaaccaaggcccccaaacaccattctctttctcacccaacgcctttgcacctgctgcttccctctaattactgaccttccttgccgtacccaccaggctaactgtgttcactcttcaagcacagttcaaagtcaccttttccaggaagcatagccatggacattcccagggtctgctctagttttgctttctttatgttcacctcatgctgtaataaaattcttagtttacttgtctg

SEQ ID NO: 70882 - DNA, 2120 bp, Homo sapiens
ttcactctcatgtaatatgtcccacaaaattgcattcataagtgaggaaagtgttcataccagctttgattctaagacccagaagttggaaatgactcaagagtctaacaataataataatgaaatagtacacagcaaagaaaatggatgaaatatagccacatgaaacagcatagatgattcccactgttttgctattgagccaaggaagctagacataaacactacatatgattttattcaaattaaataaaattcaaaaactggtaaatccaatctatgatagcataaatcagggaagtggttatttgggggactagggaggcatagtttttgcaagatggaagaggtgggccttcggaggtgctagtaatgttttctttcttaactttcatgggaaagggtaattaaaaggtatgttcactttctgataatccaacaagcttgtccaattatgatttctgcattttatatgtatacgttatacttcaatgaaaaggggtttttttaatgcattgcaaacaatcatacccaggatatataaatatataaaatctcctataagtcacaagaaaatggcatgaaaagtaaaataagaaatataccaaaagatatgagtgggcagttcagaagaggatccagaaatggccaataaactgaaaaatgtggtcaatctcactaataattaaggaaaagcaaaataaaataaaaaggtacattttatacccaccaaaytgattttaaaaatcaaaggcttataatacaaagttcaacacaaggttgtaggaaatctagaatactcctggtgagccatgcatggtggttcatgcctgtaatcctaccactttgggaggccaaggcctgaggaccacttgaggccaggagttcgagaccagtctgggcatcatagcaagattctgtcacacaaaaaatttaaaaaattacctgggcttccacttgagcccaggaattaggctgcagtgagccatgatcacaccactgcactccagcctggacaacagagtgagactctgtcataaaataaagtaaaataaaatactcctggcaaaagtataaactgatacaaaattctgtgaagcaatttgtgtaacatcaacaaagttgaatactttgttcatctgcatgccctacaaatgagcaattctagggctagtaatcttaaaggaatgcattcactggcaaacgtgccttaaaatacaggtataaggacactcacttccacatttcttgtaaaagagggaaactaaacaacctaaatgaacatgaaacatataacagaaaggatcaacaaagtcaaaagttagcttttgaaaagagtactagaactgacaagtctctgatgaaactaatcaagtaagtgtgtgtgtgtgtgcacgtgtgtgtgtatgtgtgtaagagagaatgaataatgactgaaggtgaaccttactttgaaggttttgatgtctgcagacattaaaagagaagagctgctaaacaattttccagaatatatgagacctttaatgaaatgagaaacttcctaagacacaaaatcttaccaaactcacacaagagaaagtaagaaatttgcgtaattctttcaccattaaagaaattgaatcaatagatgaaaatcttcccataaagaaaactcatgacccagaggggtgtgctggcaggcgttaacaagcaggaaaaactaattccaatctcaaatgactagcctgtgctcctccatgccaagagttaccttctatgtcaacatatgccaggatcatcaagaaaagagaacttttgaagatgaaaacacaaagtgcagaaagatgagcgtaaaaaaggaagggctagaaagagctagactatatatttttatttgctagtatagcatcatacaagaataatcacagggcactaatcatggtagccacagttgaggaaggtgtgatgagcccagaacaaatatggaacggtagcaggaaagaggttttccagggggtgacctcttagaatttgtgattattgaaccatgtgcacatagtatgcatttaaacaaatataattaatgttagaaaaataaagaaaagcctgaaaaataagaataactggaggaaggtggt

SEQ ID NO: 70883 - DNA, 2120 bp, Homo sapiens
ttcactctcatgtaatatgtcccacaaaattgcattcataagtgaggaaagtgttcataccagctttgattctaagacccagaagttggaaatgactcaagagtctaacaataataataatgaaatagtacacagcaaagaaaatggatgaaatatagccacatgaaacagcatagatgattcccactgttttgctattgagccaaggaagctagacataaacactacatatgattttattcaaattaaataaaattcaaaaactggtaaatccaatctatgatagcataaatcagggaagtggttatttgggggactagggaggcatagtttttgcaagatggaagaggtgggccttcggaggtgctagtaatgttttctttcttaactttcatgggaaagggtaattaaaaggtatgttcactttctgataatccaacaagcttgtccaattatgatttctgcattttatatgtatacgttatacttcaatgaaaaggggtttttttaatgcattgcaaacaatcatacccaggatatataaatatataaaatctcctataagtcacaagaaaatggcatgaaaagtaaaataagaaatataccaaaagatatgagtgggcagttcagaagaggatccagaaatggccaataaactgaaaaatgtggtcaatctcactaataattaaggaaaagcaaaataaaataaaaaggtacattttatacccaccaaactgattttaaaaatcaamggcttataatacaaagttcaacacaaggttgtaggaaatctagaatactcctggtgagccatgcatggtggttcatgcctgtaatcctaccactttgggaggccaaggcctgaggaccacttgaggccaggagttcgagaccagtctgggcatcatagcaagattctgtcacacaaaaaatttaaaaaattacctgggcttccacttgagcccaggaattaggctgcagtgagccatgatcacaccactgcactccagcctggacaacagagtgagactctgtcataaaataaagtaaaataaaatactcctggcaaaagtataaactgatacaaaattctgtgaagcaatttgtgtaacatcaacaaagttgaatactttgttcatctgcatgccctacaaatgagcaattctagggctagtaatcttaaaggaatgcattcactggcaaacgtgccttaaaatacaggtataaggacactcacttccacatttcttgtaaaagagggaaactaaacaacctaaatgaacatgaaacatataacagaaaggatcaacaaagtcaaaagttagcttttgaaaagagtactagaactgacaagtctctgatgaaactaatcaagtaagtgtgtgtgtgtgtgcacgtgtgtgtgtatgtgtgtaagagagaatgaataatgactgaaggtgaaccttactttgaaggttttgatgtctgcagacattaaaagagaagagctgctaaacaattttccagaatatatgagacctttaatgaaatgagaaacttcctaagacacaaaatcttaccaaactcacacaagagaaagtaagaaatttgcgtaattctttcaccattaaagaaattgaatcaatagatgaaaatcttcccataaagaaaactcatgacccagaggggtgtgctggcaggcgttaacaagcaggaaaaactaattccaatctcaaatgactagcctgtgctcctccatgccaagagttaccttctatgtcaacatatgccaggatcatcaagaaaagagaacttttgaagatgaaaacacaaagtgcagaaagatgagcgtaaaaaaggaagggctagaaagagctagactatatatttttatttgctagtatagcatcatacaagaataatcacagggcactaatcatggtagccacagttgaggaaggtgtgatgagcccagaacaaatatggaacggtagcaggaaagaggttttccagggggtgacctcttagaatttgtgattattgaaccatgtgcacatagtatgcatttaaacaaatataattaatgttagaaaaataaagaaaagcctgaaaaataagaataactggaggaaggtggt

SEQ ID NO: 70884 - DNA, 2120 bp, Homo sapiens
ttcactctcatgtaatatgtcccacaaaattgcattcataagtgaggaaagtgttcataccagctttgattctaagacccagaagttggaaatgactcaagagtctaacaataataataatgaaatagtacacagcaaagaaaatggatgaaatatagccacatgaaacagcatagatgattcccactgttttgctattgagccaaggaagctagacataaacactacatatgattttattcaaattaaataaaattcaaaaactggtaaatccaatctatgatagcataaatcagggaagtggttatttgggggactagggaggcatagtttttgcaagatggaagaggtgggccttcggaggtgctagtaatgttttctttcttaactttcatgggaaagggtaattaaaaggtatgttcactttctgataatccaacaagcttgtccaattatgatttctgcattttatatgtatacgttatacttcaatgaaaaggggtttttttaatgcattgcaaacaatcatacccaggatatataaatatataaaatctcctataagtcacaagaaaatggcatgaaaagtaaaataagaaatataccaaaagatatgagtgggcagttcagaagaggatccagaaatggccaataaactgaaaaatgtggtcaatctcactaataattaaggaaaagcaaaataaaataaaaaggtacattttatacccaccaaactgattttaaaaatcaaaggcttataatacaaagttcaacacaaggttgtaggaaatctagaatactcctggtgagccatgcatggtggttcatgcctgtaatccyaccactttgggaggccaaggcctgaggaccacttgaggccaggagttcgagaccagtctgggcatcatagcaagattctgtcacacaaaaaatttaaaaaattacctgggcttccacttgagcccaggaattaggctgcagtgagccatgatcacaccactgcactccagcctggacaacagagtgagactctgtcataaaataaagtaaaataaaatactcctggcaaaagtataaactgatacaaaattctgtgaagcaatttgtgtaacatcaacaaagttgaatactttgttcatctgcatgccctacaaatgagcaattctagggctagtaatcttaaaggaatgcattcactggcaaacgtgccttaaaatacaggtataaggacactcacttccacatttcttgtaaaagagggaaactaaacaacctaaatgaacatgaaacatataacagaaaggatcaacaaagtcaaaagttagcttttgaaaagagtactagaactgacaagtctctgatgaaactaatcaagtaagtgtgtgtgtgtgtgcacgtgtgtgtgtatgtgtgtaagagagaatgaataatgactgaaggtgaaccttactttgaaggttttgatgtctgcagacattaaaagagaagagctgctaaacaattttccagaatatatgagacctttaatgaaatgagaaacttcctaagacacaaaatcttaccaaactcacacaagagaaagtaagaaatttgcgtaattctttcaccattaaagaaattgaatcaatagatgaaaatcttcccataaagaaaactcatgacccagaggggtgtgctggcaggcgttaacaagcaggaaaaactaattccaatctcaaatgactagcctgtgctcctccatgccaagagttaccttctatgtcaacatatgccaggatcatcaagaaaagagaacttttgaagatgaaaacacaaagtgcagaaagatgagcgtaaaaaaggaagggctagaaagagctagactatatatttttatttgctagtatagcatcatacaagaataatcacagggcactaatcatggtagccacagttgaggaaggtgtgatgagcccagaacaaatatggaacggtagcaggaaagaggttttccagggggtgacctcttagaatttgtgattattgaaccatgtgcacatagtatgcatttaaacaaatataattaatgttagaaaaataaagaaaagcctgaaaaataagaataactggaggaaggtggt

SEQ ID NO: 70885 - DNA, 730 bp, Homo sapiens
tccctgtacccccacactctctgaacgggtggcaccggtgaaaagcagagtgagggtaagcagcatttcctcccatttcttggacatattacttatctccaagcagtctgggtcagtacawctgtctgctcaatagcttgactttgagagcagccacgtcaaactgttcctacaaattgaggtttaaaacaacttaaatatttcattcaacggccgtttgcactttgcatttttgtgcttttattttcaccactagtcggtgctggtggctacaccatcaactgtatactttaggcatttctaaaggtagaagtatctcttctgaattgcagagaacagaatccgtgagtttttttcttaccttttcgcctcaggtactgagacttcccactctaggtcagaatctttgatgtaccattttatgacagggttaaagaccctttcaaagccaaatcgtgctttgcagctaatagttaaaggctttcctgaaaatgaagaggccagagaaaacaagaaggaagctggtgagaatactttgtcctacatctgggaggaagacgtcgccagaagctgtctcctgatgcaatcaggtttgcaggtagaatatgtgtgccagaaataatgaaacgtctacacagctctcattcagaaatgcataaaaccaggtacattttttctaatgggcaatccttctatctcaaccatatgactatatgttcttaaaatgaag

SEQ ID NO: 70886 - DNA, 730 bp, Homo sapiens
tccctgtacccccacactctctgaacgggtggcaccggtgaaaagcagagtgagggtaagcagcatttcctcccatttcttggacatattacttatctccaagcagtctgggtcagtacaactgtctgctcaatagcttgactttgagagcagccacgtcaaactgttcctacaaattgaggtttaaaacaacttaaatatttcattcaacggccgtttgcactttgcatttttgtgcttttattttcaccactagtcggtgctggtggctacaccatcaactgtatactttaggcatttctaaaggtagaagtatctcttctgaattgcagagaacagaatccgtgagtttttttcttaccttttcgcctcaggtactgagacttcccactctaggtcagaatctttgatgtaccattttatgacagggttaaagaccctttcaaagccaaatcgtgctttgcagctaatagttaaaggctttcctgaaaatgaagaggccagagaaaacaagaaggaagctggtgagaayactttgtcctacatctgggaggaagacgtcgccagaagctgtctcctgatgcaatcaggtttgcaggtagaatatgtgtgccagaaataatgaaacgtctacacagctctcattcagaaatgcataaaaccaggtacattttttctaatgggcaatccttctatctcaaccatatgactatatgttcttaaaatgaag

SEQ ID NO: 70887 - DNA, 733 bp, Homo sapiens
gtcatattcataagagttaatgttactcaggttggcgaatttgtagtcataactgatagacctaaccaacatgtacgaaaccacctgttcctggggaagttaaggaagaataaaatctattgatcaggtttcatgctccagccacttaacatacattgtcccattatttctcagtataatttttttttttctttgagatggaatcttgctctgycacccaggatggagtgcaatggctcgatctcggctcactgtaacctccgcctcccaggttcaggtgattctcctgccttgtcatcctgagtagctgggattacaggcacccacacccacgcccggctaatttttgtagttttagtagagatggggtttcaccatgttggccaggctggtctcaaactcctgacctcaagtgatctacccacctcagcctcccaaagtgctgggattacaggcataagccaccatgcccggcctgcaatataatcttttagggtcagttttatgatagctatttgcggatttaagtactgaggcttaaaggatgaagtaactgtgcaaagtcacaaaactagtcaatggctgagttaagattcacacccaattctgtttgactggaaatcccaatgctgttttccttctatcacacttagacctgctcccagcagcacgatgtcattcaaaggcgatgaggcccagcttaccaagttctacttccagtgtgtcctcgaca

SEQ ID NO: 70888 - DNA, 1226 bp, Homo sapiens
gtgagatcctgtacaggaacaggctcagcagatgacaaacacttgcacactgaaggaatgtcccagtccccagccccaatgtaccggctttccccagggcaggctgtgacctttcctcatgctctcccttaaggtgttctggcggcggatcagaatctctttagcctgcttctcacttgtttggggtttgaggttgtatttgttgtaggacagggtctgcagagaaaatggaatgtcaaatacgtaaggactcctccatacaactttcagccaaggaagccatggaaacatcaggaacctaagaccaggagaacaggtgagcaccttggaggtcagctaagcatttgccttgattacgaatgaacaagcctcagcgccaagaagaaaagtctatgaccccaggtcactgctttcagggcggagctgtggctagagcctctgccttctgctctaacccttacagaggtctttctcttagttacccacagacttggcctgccccttacatacactttcctttccaggtcatgtttttgatgccaggccagtgaatttaataagaaaggaaaatatctaaactactttgggaatttccataaggctcttggtttttaattttgccaattaaggatacctacacacgcaagcacacaaacacacacacacacacacacacacacacaattcctatcaccattatcatcaattcaggaagaaagtctcttaaccaaagtcacaggaagaacataatttgagatttaaaaaaaacagtccttcaaactgaatcaatttagctttatgagaatgtcttccttgtcctttaccccagaccagtggaaacttgtcatggaccctaggccaacattagtcagtcctcagacagatgtttgcaaaatgcttaactgaaatttcttctccctcctggtgctcactaaaggtccaccagcaaatgctcagtttgccaggggtcagtagrtgacacactgtatgcactgataaaccacaaagtcctggaggatgataggattgggacagcaggggctctccctcccaagtgacggatgctgtaatagggatagtcagtttcacttcaatagagaaaatgttctatgtgccaggtgctgtggaaggcacaggattacataagtgagtaaattagaattacagtcttcaaaaggcttacagtttcctggagaagtcaaatcaatagggataagatgctatgc

SEQ ID NO: 70889 - DNA, 961 bp, Homo sapiens
tataatgcagtacacagatcatttttctccattgcctccaggtgccttttgatctcttttctacccagaagctgcgaagatcccattgtctctcttcgtaaagcctcccaatgcttctcattgcgctcaggacaaaaaccctttttcacacttaaaaggctatgcatgtacttactaccagcactgtccaagaaaaatatgagtcatgtatgtacctttacattttctaggagtcgtcttaaaaaagtaaaaataaataggtgaaaytaattttaataatgtattttatcaaacccaaaatgtccaaaatgtcatttcagtatgtaatcgatgtatgaaattgagagagtttcattttttcacagtcttcaaaataaagtgtgtattttacatttacagcccatatattttgaactagccccatttcaagtgctcaatagctgcgtacgtgctagataccccttccccaccttcagcttcactttcacttcttttctgcccagctttgtatgttgaccttctttccattcctccaatcaccgtgttgtctcctgttctgaggtttttgcacaagccgttccacccccatccacccccgcaccttctcccagtaagctctcgttttcctctcaggtacaaagcgtctcctgctcagtaaagtccttcctacatccctgtttttgtgtggttctttgccttcagtcttgtagaagcatatccctccttcagagtgcacgcttcagtgtgtcattgtaaattcattagtgttgttgtttatcagcccctggctgtttaatagacaaaaaaccttatgagagtaggagtcttgcctgtttcttctcaaacttagaatcctagcagcaccttggactgtacctaggccattgtacagattgttgaatgagtgaattaatgaatcaatcaattgaatgggtgaatgactacatgcaagaaccaaatg

SEQ ID NO: 70890 - DNA, 961 bp, Homo sapiens
tataatgcagtacacagatcatttttctccattgcctccaggtgccttttgatctcttttctacccagaagctgcgaagatcccattgtctctcttcgtaaagcctcccaatgcttctcattgcgctcaggacaaaaaccctttttcacacttaaaaggctatgcatgtacttactaccagcactgtccaagaaaaatatgagtcatgtatgtacctttacattttctaggagtcgtcttaaaaaagtaaaaataaataggtgaaattaattttaataatgtattttatcaaacccaaaatgtccaaaatgtcatttcagtatgtaatcgatgtatgaaattgagagagtttcattttttcacagtcttcaaaataaagtgtgtattttacatttacagcccatatattttgaactagccccatttcaagtgctcaatagctgcgtacgtgctagataccccttccccaccttcagcttcactttcacttcttttctgcccagctttgtatgttgaccttctttccattcctccaatcaccgtgttgtctcctgttctgaggtttttgcacaagccgttccacccccatccacccccgcaccttctcccagtaagctctcgttttcctctcaggtacaaagcgtctcctgctcagtaaagtccttcctacatccctgtttttgtgtggttcwttgccttcagtcttgtagaagcatatccctccttcagagtgcacgcttcagtgtgtcattgtaaattcattagtgttgttgtttatcagcccctggctgtttaatagacaaaaaaccttatgagagtaggagtcttgcctgtttcttctcaaacttagaatcctagcagcaccttggactgtacctaggccattgtacagattgttgaatgagtgaattaatgaatcaatcaattgaatgggtgaatgactacatgcaagaaccaaatg

SEQ ID NO: 70891 - DNA, 633 bp, Homo sapiens
aaagaacagtgaactggtatacaggttaaaaaaaaaattaaccaaatgaaagagtgagaaaaaccctgaaaaactgaaaaagactacagagaatgtcgatgatctatgggacaataccaagtcactaatatatgtgtacctggaatccaaaaaggagaagagagagagaatgaagtaaaaaaaaattaaaaaratattgaccttaagagcctaggaagtaaaaaaaaaaaagaaaaagaaatgacaaagaaatactgacctcaagatttccaagtttgatgaaaatcctaaatccctgaaattaagaagctcaatgaattccaacaggataaatacaatgaaattcacacacagtcaaacaactaaaaatgaaagataaggagaaacatccaacaagtagtcaaaagaaaaacaataacatatacagtcatccttggtatcctcaggagaactggttccaggatgtggaacccatggatatggagggccggctgtactgagaaacaaaaagactgttgacttctctccagaaacaatgcaagctactagacaatagaagataatatctgaaatgctaaaaacaataaaacaaaaaactatcaacctagaatcctgggcctagaaaaaataatc

SEQ ID NO: 70892 - DNA, 633 bp, Homo sapiens
aaagaacagtgaactggtatacaggttaaaaaaaaaattaaccaaatgaaagagtgagaaaaaccctgaaaaactgaaaaagactacagagaatgtcgatgatctatgggacaataccaagtcactaatatatgtgtacctggaatccaaaaaggagaagagagagagaatgaagtaaaaaaaaattaaaaaaatattgaccttaagagcctaggaagtaaaaaaaaaaaagaaaaagaaatgacaaagaaataytgacctcaagatttccaagtttgatgaaaatcctaaatccctgaaattaagaagctcaatgaattccaacaggataaatacaatgaaattcacacacagtcaaacaactaaaaatgaaagataaggagaaacatccaacaagtagtcaaaagaaaaacaataacatatacagtcatccttggtatcctcaggagaactggttccaggatgtggaacccatggatatggagggccggctgtactgagaaacaaaaagactgttgacttctctccagaaacaatgcaagctactagacaatagaagataatatctgaaatgctaaaaacaataaaacaaaaaactatcaacctagaatcctgggcctagaaaaaataatc

SEQ ID NO: 70893 - DNA, 588 bp, Homo sapiens
atgcgatctcggctcactgcagcctccacctccctggttcaagtgattctcctgcctcagcctcccgagtagctgggattacaggtgcatgtcaccacgcctggctaatttttgtatttttactagagatggggtttcatcaaaaaaaaaaaaaaaaaaaagaatttttttttttttttttttgagatggagtcttgctctgttgcccaggctggagtgcagtggcgggatctcggctcactgcaagctccgcctcccgggttcacaccattctcctgcctcagcctcccaagtagctgggactacaggcgcctgccaccatgcccggctaattttttgtatttttagtagagacggggtttcaccgtgttrgccaggatggtctcgatccactgacctcgtgatccgcccgccttggcctcccaaagtgctgggattacaggcatgagccaccgtgcctggccccagaattaatttttaaaaattaaaaaaaataacttagagaaaacctaacttacatcaaattttctggggaaaaagaacaaaatattttaggcaaaacagatctttcacaagtcagctggctag

SEQ ID NO: 70894 - DNA, 1318 bp, Homo sapiens
tgggttagctatctctggagtcactctgttataaaagtgagttcaagccccttcttgctctctgtcttgacatactcacttgcctttccaccttccaccatatgataacacagcacaaagggcagaaccatgctcttgaagttcccagcctccagaaccacaggccaaataaacttctactgtttataaattacccagtctgtgctattctgttatagcagcagaaaacagactaagacagaaatgttattttatcttcttctaaatgtcttatttgaaaatagcataaaactaagctcacatatcaaatttaaaacaaaatcctgatatactggccaataaatcttaagggaaaattatcaagactactaaactacatactattttaataacctttagggggtgaaacaataaaaacttcagctgcaatgatcatgattgacataaatttttcttcttcactcactttaagtatgctccacagaacacaattcaaaaccaaccttcaggttgaaacacttactccttgctggagacaagaggtaagaacttttagttagttcatatgcttctgtactgtgaattttacagtgagcacrtattattcctataatttaaaaaaaattaaacaatccttcagctgtggacaaagcagcctgtcagtcaatataaatgatcaatgtgaccaattaccagaaatctgagagggcaatggtcttttctccaaatttaaagaaatagtcaagcaattaaaaaaaaatgcttccattcagatgaaccatcttaaaaaaaattgttcccataatcaaccactaaaattacatgtttttctttggtatttagagacaatagattaattttccaggttccaatatagttctgtttagaacagtattctaaaaattcaaagctggccaggtgcagtggctcatgcctgtaatcccagcattttgggaggccgaggtgggtggatcacttgaggccaagagttcaaaaccagcctggccaacaaggtaaaaccctatctctactaaaaatacaaaaattagttgggcgtggtggtgggcacctccagtcccagctactaaggaggctgaggcaggaagaattgcttgaacctgtgaggcagaggttgcagtgagctgatatcacgccactgcactccagcctggacaacagagtgagactccatctcaaaaaaataaataaattaaataaaataaaaataaaaattcaaagctgaaatgctgaaagaaatttgggtagtaccaaaggaagcagcaagtgacacaagatgacaaaagggtagacagtcttt

SEQ ID NO: 70895 - DNA, 1318 bp, Homo sapiens
tgggttagctatctctggagtcactctgttataaaagtgagttcaagccccttcttgctctctgtcttgacatactcacttgcctttccaccttccaccatatgataacacagcacaaagggcagaaccatgctcttgaagttcccagcctccagaaccacaggccaaataaacttctactgtttataaattacccagtctgtgctattctgttatagcagcagaaaacagactaagacagaaatgttattttatcttcttctaaatgtcttatttgaaaatagcataaaactaagctcacatatcaaatttaaaacaaaatcctgatatactggccaataaatcttaagggaaaattatcaagactactaaactacatactattttaataacctttagggggtgaaacaataaaaacttcagctgcaatgatcatgattgacataaatttttcttcttcactcactttaagtatgctccacagaacacaattcaaaaccaaccttcaggttgaaacacttactccttgctggagacaagaggtaagaacttttagttagttcatatgcttctgtactgtgaattttacagtgagcacatattaytcctataatttaaaaaaaattaaacaatccttcagctgtggacaaagcagcctgtcagtcaatataaatgatcaatgtgaccaattaccagaaatctgagagggcaatggtcttttctccaaatttaaagaaatagtcaagcaattaaaaaaaaatgcttccattcagatgaaccatcttaaaaaaaattgttcccataatcaaccactaaaattacatgtttttctttggtatttagagacaatagattaattttccaggttccaatatagttctgtttagaacagtattctaaaaattcaaagctggccaggtgcagtggctcatgcctgtaatcccagcattttgggaggccgaggtgggtggatcacttgaggccaagagttcaaaaccagcctggccaacaaggtaaaaccctatctctactaaaaatacaaaaattagttgggcgtggtggtgggcacctccagtcccagctactaaggaggctgaggcaggaagaattgcttgaacctgtgaggcagaggttgcagtgagctgatatcacgccactgcactccagcctggacaacagagtgagactccatctcaaaaaaataaataaattaaataaaataaaaataaaaattcaaagctgaaatgctgaaagaaatttgggtagtaccaaaggaagcagcaagtgacacaagatgacaaaagggtagacagtcttt

SEQ ID NO: 70896 - DNA, 1318 bp, Homo sapiens
tgggttagctatctctggagtcactctgttataaaagtgagttcaagccccttcttgctctctgtcttgacatactcacttgcctttccaccttccaccatatgataacacagcacaaagggcagaaccatgctcttgaagttcccagcctccagaaccacaggccaaataaacttctactgtttataaattacccagtctgtgctattctgttatagcagcagaaaacagactaagacagaaatgttattttatcttcttctaaatgtcttatttgaaaatagcataaaactaagctcacatatcaaatttaaaacaaaatcctgatatactggccaataaatcttaagggaaaattatcaagactactaaactacatactattttaataacctttagggggtgaaacaataaaaacttcagctgcaatgatcatgattgacataaatttttcttcttcactcactttaagtatgctccacagaacacaattcaaaaccaaccttcaggttgaaacacttactccttgctggagacaagaggtaagaacttttagttagttcatatgcttctgtactgtgaattttacagtgagcacatattattcytataatttaaaaaaaattaaacaatccttcagctgtggacaaagcagcctgtcagtcaatataaatgatcaatgtgaccaattaccagaaatctgagagggcaatggtcttttctccaaatttaaagaaatagtcaagcaattaaaaaaaaatgcttccattcagatgaaccatcttaaaaaaaattgttcccataatcaaccactaaaattacatgtttttctttggtatttagagacaatagattaattttccaggttccaatatagttctgtttagaacagtattctaaaaattcaaagctggccaggtgcagtggctcatgcctgtaatcccagcattttgggaggccgaggtgggtggatcacttgaggccaagagttcaaaaccagcctggccaacaaggtaaaaccctatctctactaaaaatacaaaaattagttgggcgtggtggtgggcacctccagtcccagctactaaggaggctgaggcaggaagaattgcttgaacctgtgaggcagaggttgcagtgagctgatatcacgccactgcactccagcctggacaacagagtgagactccatctcaaaaaaataaataaattaaataaaataaaaataaaaattcaaagctgaaatgctgaaagaaatttgggtagtaccaaaggaagcagcaagtgacacaagatgacaaaagggtagacagtcttt

SEQ ID NO: 70897 - DNA, 593 bp, Homo sapiens
ttttttttttctgagacagagttttgctcttgttgcccaggctggagtgcagtggtgcaacctcagctcactacaacctccacctcctgggttcaagtgattccccttcctcagcctcccaagtagctgggactacaggcgtgcaccaccacacccggctaattttttgtatttttagtagagacagggtttcatcatgttggccaggctggtctcgaactcctgacctcaggtgatccgcccacctcggcctcccaaagtgctgggattacaggcatgagacaccacacctggccggccaaatacaagtaattttaaatgtcacttttgagggctactttattatttttttgaaacagaatctggctctgatgcctggactggactgcagtggcagaatctcggctcacggcaacctccacccccacgactcaagccattctcccaccacagcgtcccaagtagctcagagtacaggcgcacagtacaatgcctgctgaatttttgtattttttgtaaagatggggtttcgcygtctcgcccaggctggtctcgaactcctgagctcaaaagatccacacaactcggcatcc

SEQ ID NO: 70898 - DNA, 697 bp, Homo sapiens
ggtatcaatgtcagctgcctgaattgtgttaaaaagcaattcagcaacaccaactccttcaacattgatcaagtgaggctgaaataaagcttctggtgcttcaaatctctctcccccaactttgatgatacgtccatctgggagctagaaaccaagaataatcaggtactaatcagcaaaagattaaaatttcccagtgttctccggaacactagtacttataaatacatctgttctgtaaccaaaatcattaccaacaacaatttttcctaaaatatatttggggaaaaaaaggtaaattaaatagatttaggtaactgctcttatcacattctgttttgcttttaaaaatgttatgccaggcygggcgtggtggctcacgtctgtaatcccagcactttgggaggctgagctgggcggatcacaaggtcaggagattgagaccatcctgactaacacaatgaaaccctgtctctactaaaaatacaaaaaattagccgggtgtggtggcgggcgcctatagtcccagctactcggggaggctgaggcaggagaatggcgtgaacccgggaggcagagcttgcagtgagccaagatcacgccactgcactccagcaggggcaatagagcgagactccatctcaaaaaaaaaaaaaaaaaaggtatgccacgcccccaaatatcaggaatttcttgg

SEQ ID NO: 70899 - DNA, 619 bp, Homo sapiens
ggatccagttggggatctcctgttcatctatgacctctttggtctctgccagtctggagccgttcctcaaagctgtctttgattttcatgaatcgtttgaagatggcagaccagctgatctgcagaatgcccctcgatttgggttggccaggacccgcgtcctggcgaaggggttccggttactgaccttcgatgggaacagcacagaagtgataccgcgctggctccactctgtcctctggtggcacgcaattccagtgttccccgcactgatgactttcttgtacygaatatttacattaattacattctttatagttataatgtaatattacatatgagaccatggggttcatctgattaggtctgcccaatttagcctgccctgcttgctttgggtcacttgcttttgttattttttttctgtgaagctgaaggccgcgccactgagcgctgtaacttaaccttgccggcttccttacagataacatgtatgtcactactgtcatgatcgttcaaattgtttttcaggaacttggggcagctcctgcctagttcaaaccagttgagaccgtgagctttcaagtaggcttgtgcaaacaaaagaagtggccttttg

SEQ ID NO: 70900 - DNA, 761 bp, Homo sapiens
gttggaggcttttcacacaataaaatgtacctctctttgtttttaacatgtttctcccttcctctcttctttttttgtgaaatgtgtatttactttatttgtagtaagtcacttccatgcacatattaattttttaaagtaataagtatgtgtattgtctacgtgtgaaataaaacacacatttatttttatgctttggaagttatccagaatcatggaattctcaatcacagtcaatcacccaacctactcacctttccagtgtaatcttmgtcaaatttttttttgttatccaatgagatgcagtatttcaactcagaaagataaatagagtgaatttatagagactattaactaagaacatacagttttatttatactcagaagcaagtagattatgtacatatatatgaagataaaaattaaaaggataattgtgtaaatttgcatgtagagggctttgaaaacctgtttacttgttaatgccgttttgatgtattgtgtctttgttctcccgacccatcatccagagctctctgcaggagctaagtgctcatcagttccatgacttggaaactgtctaagtttagaggcacttgtatttgttagtaaataaggcaagatgatattgtttcacaggttttagtgccgaagactgaatagataagctgctccacccagtacactggtgttcatttcatggtcatctcatctgttaaccatggatataaaacatttatcttcaatgatggggttttacc

SEQ ID NO: 70901 - DNA, 656 bp, Homo sapiens
agtccaagttcatgtactacaattggttactttggtctctttgcttctggaacagtccccaacatttattgtggcattgactttttatagagtctaattctataattagaatgccctgctctggatctatcagaggaaatgcttcctcgtgcatttaacctgcttctccactctctgggtttactgtacactggactgctggtagragcctgattagaggcaggtttaatgtggcaaaaattcctcctagcggtgcaaggcccccttccccagaaggcaggcagtgtccatctgctccaggattggtgtgtttctatcaagaatggatgttggattttggcagttccctttttggcagctcttgagatgatcacgtggtgaatcattttctattactacagtgaattacagtcacttgaattccatcctactgggtcgtgctgtagtatcctttttatgtatgctggatttgatttgctaaaatcttgttaagaatttttttgtctatgttcatgataaactgtggtctatagttttcatgtaatacctggtttgggtatcagggtttttgccagccttataggatgagtttcgaagtgttctctcctcttcagttttccagaagagtttgtgtagaattggcattacttcttccc

SEQ ID NO: 70902 - DNA, 656 bp, Homo sapiens
agtccaagttcatgtactacaattggttactttggtctctttgcttctggaacagtccccaacatttattgtggcattgactttttatagagtctaattctataattagaatgccctgctctggatctatcagaggaaatgcttcctcgtgcatttaacctgcttctccactctctgggtttactgtacactggactgctggtaggagcctgattagaggcaggtttaatgtggcaaaaattcctcctagcggtgcaaggcccccttccccagaaggcaggcagtgtccatctgctccaggattggtgtgtttctatcaagaatggatgttggattktggcagttccctttttggcagctcttgagatgatcacgtggtgaatcattttctattactacagtgaattacagtcacttgaattccatcctactgggtcgtgctgtagtatcctttttatgtatgctggatttgatttgctaaaatcttgttaagaatttttttgtctatgttcatgataaactgtggtctatagttttcatgtaatacctggtttgggtatcagggtttttgccagccttataggatgagtttcgaagtgttctctcctcttcagttttccagaagagtttgtgtagaattggcattacttcttccc

SEQ ID NO: 70903 - DNA, 656 bp, Homo sapiens
agtccaagttcatgtactacaattggttactttggtctctttgcttctggaacagtccccaacatttattgtggcattgactttttatagagtctaattctataattagaatgccctgctctggatctatcagaggaaatgcttcctcgtgcatttaacctgcttctccactctctgggtttactgtacactggactgctggtaggagcctgattagaggcaggtttaatgtggcaaaaattcctcctagcggtgcaaggcccccttccccagaaggcaggcagtgtccatctgctccaggattggtgtgtttctatcaagaatggatgttggattttggcagttycctttttggcagctcttgagatgatcacgtggtgaatcattttctattactacagtgaattacagtcacttgaattccatcctactgggtcgtgctgtagtatcctttttatgtatgctggatttgatttgctaaaatcttgttaagaatttttttgtctatgttcatgataaactgtggtctatagttttcatgtaatacctggtttgggtatcagggtttttgccagccttataggatgagtttcgaagtgttctctcctcttcagttttccagaagagtttgtgtagaattggcattacttcttccc

SEQ ID NO: 70904 - DNA, 606 bp, Homo sapiens
ggccggcccagctctcctgtgggcaccacctggctctgctgactgggctgagctgaaggggtgtggggggctcaggtgtgggtggctaccctgggcctgagtgggacactggaggcctagtgagtcccaccaggtggctcctcgctgagggtgccaggtgtgctgggactgggtggagggtgagaacccaccagtgctcccctggagtccattagtgcccctcgtgggttggggtctccgcagagcaggtggcctcggggggtacaaaggcaatggtggggtgatggggccagccaggaaggggcccatccttctccccgggagcacagggacaaccagagaccggcatgtaaccaacaagtcatggggcagggtgtgcctgcggagatgtgtgtgtggtcccaaggcagtcccaagtcaaagcattcgtggaagccccttggggcccccttcaggggttcacttggccgaggagaggcctgggtgtggtgaggatgcattggtggtgtcagagctggtgctgttggggacrgcagcaggagcatgtgtttgagctgccctcacctcccccgccgcccccggccccacggcaggcggtggagcacc

SEQ ID NO: 70905 - DNA, 529 bp, Homo sapiens
ggccaccttggcagacttgcagagggggaaacatctggcagcttcctttgttscaatgggtttattttaggcctctgagtctctgatacctagtggaagcctggcacacaaaaataatactaatccaggtacagctataaaacaaatgactctttcaaagtgggggaggttggggataaagcatgtagcttggttatcccaggttactgttagaaaggagaagcccaccctggggtaagggtcgttatccttcctgggatgtgtctcaggacaggctcaggcatgacttgcagccagcacccccggaatgcccggccttcctcattttggtctcttgcaggccaccttcccttaagtcactatcggtcactgacctcttccccagaaaaggcttaagaggtctctagacttacaatgatttctatgtccactcttaggaacttttatttgctcatttgggccaggtggcataaaatcaaatggtgcttagaagtgaccacactggtatcaggtcatgaagtgtgcccca

SEQ ID NO: 70906 - DNA, 1125 bp, Homo sapiens
agaaacaaccaacacgccaaatctgagaggcagtctacaaataactgaccagtactcttaaaatattctgaagttatggaagacagactgagaaacagccccagattggaggagacaaggagagatggcaactaaatacgctgttgggaccctggacccaaaaaagaacatttgtggacaaatggcaaaatgtgaatataagttatagagtagttcatagtattgcatcaccattaggttcctgattttgataatgtactatgttttgtaggaggttaactttgggagaagctgggtgaagattcccagcaacttctctgcaccagggcatggagaaaagcactcaggtgtgggagcaggaaaggtctggactaggttcgaaacttgtttctgatgactatcagctgagtgactcggggcaggtcccattacctggctgagcttctgtttcctgatctgcaaccggggatgaactgcccgcctcctggtgttactgcaaggataaatgaggtgctgtgtttggttcacagtaggtgatactcccttcctactgccttgcctccccagctgtaaaccatcaactcctcttctttccttctttccagcctttcccctgacctgtcccttatctctgccaaccctcaccatgcaccctcttggatggtgttttcaaacaaagcctgcaggtgcatttactcccaaggtctagaaatctgagatgagaaactttctctgtttcttgctggatggagcctgaggtaaaattgagccctgcatcctgcctcagctgtctttttgtgagttctggcttcccatagaattatcattcaaagggttctacctgacctgcctgcagttcgcagtgtggtccctggaccagcagcatcagcatcatctgagagcttgttggaaatgcagaatctcgggccccacccacagactcaagactgcacgtgtgcaagattcctgggtggttcatgattcaagcttgagactttctccactcgaggacttgtcatagaggttgattcccaggtgaaagaacagcttgccttctcatygtgtgcctccacagtggaggctgaataggagtcagtgtgagaactgagaaatgtgaagatgggt

SEQ ID NO: 70907 - DNA, 1087 bp, Homo sapiens
tggatccatcatatagcattcattgtctgttacatattgctgtgtctcatggactatactatgtcatttaataaacgcagtgggaactcaaagtgccagaatcctcagagaaagggagccagggtgaatcctgactctagcatcctttaggttataatctattctggaagcataagtgtctctatagttgagggtttatcctttaagtgcttttgaagcatccatagagttatcccatatctgtctttttgggggccatcgaggcttatgtggtccgtgtcccatgccgtcctggactgcaggggtgccctctggcttctgtcacctcagtgctgctgcttgtcttctgtgctgtcagtgtctgcctggcactttccccatcaccctctctaatcccattgtagatcttaactgcacgcattctaggtctttctaagtgttgctcatcctgacttcagaacttgcccttcaagctgtcatttatctaaataaatcattgctatcagctgcttttgtgtgatttgccactcttctcaaagtagggtacagaaaaagaaattatagttcattgcagytttcatctgcttggggctgtgctgttctcagaggatgaggaccaagctccaggccactaacagacacaacctcttaggcccggatctactggtccatgttggaacccaggagagtctcaggaagacacctctctcttcctcgggcatacgctgaagcagcttcctaacccctgcgggcccttgtggagggcaggaactgtgtgttcatcttgtcccccagacacacggcagtttctgaaatataggaggtattcagtataagtttgcagaatcagcagaagaaaggcggggaggaagaggcagaattgaaaatatgagataccagattcccttccagggcaaaaagttagatggtgtcaagtggaggatttagtacgtgggcttattgctgcttcatatgtctgaaatttcctcccagggagtatctgatatgctagaagaatctgatatcataaatactgaaataaataccataaactggaagggtttccaataaggttagaaataaaatc

SEQ ID NO: 70908 - DNA, 1214 bp, Homo sapiens
tgtgtggtggtgcacacctgtagtcccagctacttggaaggctgaggtgggaggatcatttgagcctaggagtttgaggctgcagtgagccgtgagcacaccactgcactccagcctgggcaacagtgcaagatcccatctcttgtttaaaataaaaaaaaaaaaaaaaggaagagacactagaagaggtctytccaccacatgagggcacagtgagaaggtggccgtctgcaagccaggaagcgagccctcaccaggaactgaagcaggtgtccccttggtcttggacttccagcctccagaaccgtgaggaataaatttctgctaagccacccagtctgtagtattttattacggcagcttgagctggctgagactgtccctaaaagataaaactaatttgtgagaacttgaccaaatctcatctcctctccgagcctcaggtacccctcaaccagaacaggggtgtccatacaatgtcttccaggtgtctcaaacccttctgattgggactggagggcaccgattctcctcactaggccctttctatctgggtatctgctgtggtcacttgtctggtgttggggtgcagggcaatgtcctgctttaaatggcattggaaacctctggagaagacattttttctctatgaagcaaccccatccatggtcagttacctgcccagcaatccttcacctcctgcctgtaagtcccacaggctgaagcagctgaggcaaccccagcgcagccccagccaggcaggcatgtgggtgagtggtccagagtaatgggggccgacagaggcgctgaccctgtcctgggaggcacggccgctcagctcagttgacttgtcctttgacaatgcaggtgggagggggtcacacagaaaagccagaaatccaggatcttctgttaaatcttcaaaattgctgatcttggcaactgatttttaacaaaaccctttgcgggaccagaccagaacatctgggggccagattgaaattgtgggggccataagtttgagacccaggctccaggcactccctagctgccttgctcatctcggggagggatcccacttctttcgacgaggcccgcagaggactctccttgtgcctccttttcttccctctggcttctccataaggccccatttgctcactctctctatcttgggcagcccatgaaggaggtttcattatacagatgaggca

SEQ ID NO: 70909 - DNA, 1059 bp, Homo sapiens
atttaagaacagataaagttaaattatggcaatagaaatctagcattcgttgcctaagaacatagggtttgactagaagagacacaagatgactttctgggagtggtaaatatgttttgtgtcttaattgcagtggtggttacatgagtatatatttatcaaagctcattgaattgtatactttagatctgtacatttccttgtgttactgtttaatattctaaagatcagataattagaatatattggcattttttctaaattatttgatggtgctcagaatcagataagggccagcagagacagmaaaagaagcctactatctgagtaatataatcagcttatagaaaaaaaggcaatgtgtcatacataagcacagtctattttactcaaaaggcagtacagtaaaagaattaagagcacaaactttataaccaaactaagttcaaatcctggttctaccacttgtgatcttaagcaatttaactccctctgtgttactcctttctggtatgtaaaacttgaaacttaaggttgtaagaactaaataagttactacacgccaagtgcttagaatggctggtgtattacatagtaagcatccatgtattatttgctattctttttaatttacttttcatttcttcttcttatttatttttactttctcatctatctccttattgttattagttataaagttctggcaggtatataaaacaatgtatttacttcgtcacactctgatgccttcacttttctacctaaagctctcaaaaagcaatttccccttcttaccttgctagctcctgcttactgcaagattgttcaggctacaactcctccaggaagctttccctggctgctaaatcatatacaccttttctttgttcccccagcattctctattcactttcattggtatgcagatcatttgtcttacggttttcttcagtgtttctcttgctacacagtaggctttgtgaagtcagatataatttgttatttttctttgtgcttaaatccttgtctggtacaggctagtagtcaattcatcct

SEQ ID NO: 70910 - DNA, 1059 bp, Homo sapiens
atttaagaacagataaagttaaattatggcaatagaaatctagcattcgttgcctaagaacatagggtttgactagaagagacacaagatgactttctgggagtggtaaatatgttttgtgtcttaattgcagtggtggttacatgagtatatatttatcaaagctcattgaattgtatactttagatctgtacatttccttgtgttactgtttaatattctaaagatcagataattagaatatattggcattttttctaaattatttgatggtgctcagaatcagataagggccagcagagacagcaaaagaagcctactatytgagtaatataatcagcttatagaaaaaaaggcaatgtgtcatacataagcacagtctattttactcaaaaggcagtacagtaaaagaattaagagcacaaactttataaccaaactaagttcaaatcctggttctaccacttgtgatcttaagcaatttaactccctctgtgttactcctttctggtatgtaaaacttgaaacttaaggttgtaagaactaaataagttactacacgccaagtgcttagaatggctggtgtattacatagtaagcatccatgtattatttgctattctttttaatttacttttcatttcttcttcttatttatttttactttctcatctatctccttattgttattagttataaagttctggcaggtatataaaacaatgtatttacttcgtcacactctgatgccttcacttttctacctaaagctctcaaaaagcaatttccccttcttaccttgctagctcctgcttactgcaagattgttcaggctacaactcctccaggaagctttccctggctgctaaatcatatacaccttttctttgttcccccagcattctctattcactttcattggtatgcagatcatttgtcttacggttttcttcagtgtttctcttgctacacagtaggctttgtgaagtcagatataatttgttatttttctttgtgcttaaatccttgtctggtacaggctagtagtcaattcatcct

SEQ ID NO: 70911 - DNA, 1059 bp, Homo sapiens
atttaagaacagataaagttaaattatggcaatagaaatctagcattcgttgcctaagaacatagggtttgactagaagagacacaagatgactttctgggagtggtaaatatgttttgtgtcttaattgcagtggtggttacatgagtatatatttatcaaagctcattgaattgtatactttagatctgtacatttccttgtgttactgtttaatattctaaagatcagataattagaatatattggcattttttctaaattatttgatggtgctcagaatcagataagggccagcagagacagcaaaagaagcctactatctgagtaatataatcagcttatagaaaaaaaggcaatgtgtcatacataagcacagtctattttactcaaaaggcagtacagtaaaagaattaagagcacaaactttataaccaaactaagttcaaatcctggttctaccacttgtgatcttaarcaatttaactccctctgtgttactcctttctggtatgtaaaacttgaaacttaaggttgtaagaactaaataagttactacacgccaagtgcttagaatggctggtgtattacatagtaagcatccatgtattatttgctattctttttaatttacttttcatttcttcttcttatttatttttactttctcatctatctccttattgttattagttataaagttctggcaggtatataaaacaatgtatttacttcgtcacactctgatgccttcacttttctacctaaagctctcaaaaagcaatttccccttcttaccttgctagctcctgcttactgcaagattgttcaggctacaactcctccaggaagctttccctggctgctaaatcatatacaccttttctttgttcccccagcattctctattcactttcattggtatgcagatcatttgtcttacggttttcttcagtgtttctcttgctacacagtaggctttgtgaagtcagatataatttgttatttttctttgtgcttaaatccttgtctggtacaggctagtagtcaattcatcct

SEQ ID NO: 70912 - DNA, 1059 bp, Homo sapiens
atttaagaacagataaagttaaattatggcaatagaaatctagcattcgttgcctaagaacatagggtttgactagaagagacacaagatgactttctgggagtggtaaatatgttttgtgtcttaattgcagtggtggttacatgagtatatatttatcaaagctcattgaattgtatactttagatctgtacatttccttgtgttactgtttaatattctaaagatcagataattagaatatattggcattttttctaaattatttgatggtgctcagaatcagataagggccagcagagacagcaaaagaagcctactatctgagtaatataatcagcttatagaaaaaaaggcaatgtgtcatacataagcacagtctattttactcaaaaggcagtacagtaaaagaattaagagcacaaactttataaccaaactaagttcaaatcctggttctaccacttgtgatcttaagcaatttaactccctctgtgttactcctttctggtatgtaaaacttgaaacttaaggttgtaagaactaaataagttactacacgccaagtgcttagaatggctggtgtattacatagtaagcatccatgtattatttgctattctttttaatttacttttcatttcttcttcttatttatttttactttctcatctatctccttattgttattagttataaagttctggcaggtatataaaacaatgtatttacttcgtcacactctgatgccttcacttttctacctaaagctctcaaaaagcaatttccccttcttaccttgctagctcctgcttactgcaagattgttcaggctayaactcctccaggaagctttccctggctgctaaatcatatacaccttttctttgttcccccagcattctctattcactttcattggtatgcagatcatttgtcttacggttttcttcagtgtttctcttgctacacagtaggctttgtgaagtcagatataatttgttatttttctttgtgcttaaatccttgtctggtacaggctagtagtcaattcatcct

SEQ ID NO: 70913 - DNA, 659 bp, Homo sapiens
ttcacacacagtttccatatgcacacacattctcccacacacctgacacatacatcatgctttcrcagatcaagtttccagtttcacatctgtgtcacctccagtacattttcgtacacaccctcaaaagacatctctgcaagaaattccaagactccccacccccttcctggcccaccatcgtccttttgggtgtattcaggggcagcctggggcacagttattaaactgtatcccaaagagctcttccactatgcaatctgcttttgcctgagatctctgtatcctttactgagaaagtctgattcatttcccagaaatttttatctgctattaatctttcaggatatagttagtgttgtgatatattcagatattgtttttgggtggcagggggaggggagggcagatttcaagtggccgtcccctggcagtttcagagattactcagtgcttataagcagctcagaactgtgtgacagcatttccaagcaagggacttacaatcatgtttcattaattcgacgtgaatgaagcctcatttctggccttgaggagcttaagatgtatgtgaaattaataacagaacagatgtcttcacaatttggttcctctggaaaaaaaaaaaaaaaaggaacctgattactttgaaaatttca

SEQ ID NO: 70914 - DNA, 659 bp, Homo sapiens
ttcacacacagtttccatatgcacacacattctcccacacacctgacacatacatcatgctttcgcagatcaagtttccagtttcacatctgtgtcacctccagtacattttcgtacacaccctcaaaagacatctctgcaagaaattccaagactccccacccccttcctggccyaccatcgtccttttgggtgtattcaggggcagcctggggcacagttattaaactgtatcccaaagagctcttccactatgcaatctgcttttgcctgagatctctgtatcctttactgagaaagtctgattcatttcccagaaatttttatctgctattaatctttcaggatatagttagtgttgtgatatattcagatattgtttttgggtggcagggggaggggagggcagatttcaagtggccgtcccctggcagtttcagagattactcagtgcttataagcagctcagaactgtgtgacagcatttccaagcaagggacttacaatcatgtttcattaattcgacgtgaatgaagcctcatttctggccttgaggagcttaagatgtatgtgaaattaataacagaacagatgtcttcacaatttggttcctctggaaaaaaaaaaaaaaaaggaacctgattactttgaaaatttca

SEQ ID NO: 70915 - DNA, 659 bp, Homo sapiens
ttcacacacagtttccatatgcacacacattctcccacacacctgacacatacatcatgctttcgcagatcaagtttccagtttcacatctgtgtcacctccagtacattttcgtacacaccctcaaaagacatctctgcaagaaattccaagactccccacccccttcctggcccaccatcgtccttttgggtgtattcaggggcagcctggggcacagttattaaactgtatcccaaagagctcttccactatgcaatctgcttttgcctgagatctctgtatcctttactgagaaagtctgattcatttcccagaaatttttatctgctattaatctttcaggatatagttagtgttgtgatatattcagatattgtttttgggtggcagggggaggggagggcagatttcaagtggccgtcccctggcagtttcagagattactcagtgcttataagcagctcagaactgtgtgacagcatttccaagcaagggacttacaatcatgtttcattaattcgaygtgaatgaagcctcatttctggccttgaggagcttaagatgtatgtgaaattaataacagaacagatgtcttcacaatttggttcctctggaaaaaaaaaaaaaaaaggaacctgattactttgaaaatttca

SEQ ID NO: 70916 - DNA, 696 bp, Homo sapiens
cacacmgcctggaagctgtcacttcccagctgctggacctcagggaaggaggcccagagagtagcccagggagggtacagcaggcggcgactgtttatggactgggtgttaaatggctgcagaacatggcagcttcaggcctcggggcccagggaaaagttcgttcctgcttctacccagagttttaggtggtggagaggcttgaaatggggagttactggcgtctcttaaccaggccttctggggggtaaatattgtgaatattactcctgcctggaataacccttctagggtttccaactagaggcacctggcctggtcagacttcctcattcagccagtgtaatggtggtgttgctttcagatgggcttgaatgtgttaggcactctccagtttgccacaagcaccaccactccctactgtctcagttcagtcctgtgatcagttttattgctgccagattgtaggacccaccctgcccctggaagaattgaggttgcgagctcacaagcaggcggtccccattgcaactcctgcctctttggccagaagcagccatgatcagccattgtgaaaaccgagactgtggtcccaataggggccaccttccaagcctaagtgcctctccaccatagtgctgatccctgccatcccaggacttcagattgatccttgaggccaaatgtagattcctt

SEQ ID NO: 70917 - DNA, 735 bp, Homo sapiens
taaatgagatttgagatgatatttaacagttcaagtgccattccagaaagaattctcttttgcagaaccccaaaatagatctttgacatttttatacaaccgaatatgcatggattgataaagatttaggcacatgcagacttctgttcagtcgctgctttctactctcgaacacaaaataatttaagatttagaatgtttcagggtgtgaaaggtaggagtggagattttttttyctaaatgatattaaatattcaccaaaatttagtagatgcaagatgaactaggagttcttgagcagccaaaatcccttccctgagcctcaacatccttgtccacaaaatgaaaaatttggactagagggtctctaggtaatgtccagctataaccttcccagttcttgagaagaaagcaaaaagtgatgcaaatgttcttcctttattatcgatggggcctgagctatgaggagttttagaggctaggacctcgtctgtggtcttgagggctcacaagtgtcctagagccttaatagggggttttctatatagggtaaaatttgggggcccagcaaggttgctgtagctgctggccaaggggagtctttgccaggtgccagaggtaagggcagttaatgatctaaagatgctggtttctcagcccctccgagctgcaaccgtgctcacttgatcaggtgctgaaatggaggccagacagtatcttagagaaactcctgtc

SEQ ID NO: 70918 - DNA, 735 bp, Homo sapiens
taaatgagatttgagatgatatttaacagttcaagtgccattccagaaagaattctcttttgcagaaccccaaaatagatctttgacatttttatacaaccgaatatgcatggattgataaagatttaggcacatgcagacttctgttcagtcgctgctttctactctcgaacacaaaataatttaagatttagaatgtttcagggtgtgaaaggtaggagtggagatttttttttctaaatgatattaaatattcaccaaaatttagtagatgcaagatgaactaggagttcttgagcagccaaaatcccttccctgagcctcaacatccttgtccacaaaatgaaaaatttggactagagggtctctaggkaatgtccagctataaccttcccagttcttgagaagaaagcaaaaagtgatgcaaatgttcttcctttattatcgatggggcctgagctatgaggagttttagaggctaggacctcgtctgtggtcttgagggctcacaagtgtcctagagccttaatagggggttttctatatagggtaaaatttgggggcccagcaaggttgctgtagctgctggccaaggggagtctttgccaggtgccagaggtaagggcagttaatgatctaaagatgctggtttctcagcccctccgagctgcaaccgtgctcacttgatcaggtgctgaaatggaggccagacagtatcttagagaaactcctgtc

SEQ ID NO: 70919 - DNA, 735 bp, Homo sapiens
taaatgagatttgagatgatatttaacagttcaagtgccattccagaaagaattctcttttgcagaaccccaaaatagatctttgacatttttatacaaccgaatatgcatggattgataaagatttaggcacatgcagacttctgttcagtcgctgctttctactctcgaacacaaaataatttaagatttagaatgtttcagggtgtgaaaggtaggagtggagatttttttttctaaatgatattaaatattcaccaaaatttagtagatgcaagatgaactaggagttcttgagcagccaaaatcccttccctgagcctcaacatccttgtccacaaaatgaaaaatttggactagagggtctctaggtaatgtccagctataaccttcccagttcttgagaagaaagcaaaaagtgatgcaaatgttcttcctttattatcratggggcctgagctatgaggagttttagaggctaggacctcgtctgtggtcttgagggctcacaagtgtcctagagccttaatagggggttttctatatagggtaaaatttgggggcccagcaaggttgctgtagctgctggccaaggggagtctttgccaggtgccagaggtaagggcagttaatgatctaaagatgctggtttctcagcccctccgagctgcaaccgtgctcacttgatcaggtgctgaaatggaggccagacagtatcttagagaaactcctgtc

SEQ ID NO: 70920 - DNA, 735 bp, Homo sapiens
taaatgagatttgagatgatatttaacagttcaagtgccattccagaaagaattctcttttgcagaaccccaaaatagatctttgacatttttatacaaccgaatatgcatggattgataaagatttaggcacatgcagacttctgttcagtcgctgctttctactctcgaacacaaaataatttaagatttagaatgtttcagggtgtgaaaggtaggagtggagatttttttttctaaatgatattaaatattcaccaaaatttagtagatgcaagatgaactaggagttcttgagcagccaaaatcccttccctgagcctcaacatccttgtccacaaaatgaaaaatttggactagagggtctctaggtaatgtccagctataaccttcccagttcttgagaagaaagcaaaaagtgatgcaaatgttcttcctttattatcgatggggcctgagctatgaggagttttagaggctaggacctcgtctgtggtcttgagggctcacaagtgtcctagagccttaatagggggttttctatatagggtaaaatttgggggcccagcaaggttgctgtagctgctggccaaggggagtctttgccaggtgccagaggtaagggcagttaatgatctaaagatgctggtttctcagcccctccgagctgcaaccgtgctcacttgatcaggtgckgaaatggaggccagacagtatcttagagaaactcctgtc

SEQ ID NO: 70921 - DNA, 1329 bp, Homo sapiens
ctccttgacccagcaattccacctccaggtatcactatctacccccaggaaagtccttgtacatgaaccaaggactcttggcacaaagatgttcatggcagcattgtttagccagcaattggaagcaacctaactttttctccaaagttcaaaaatgcacagtcctgtggtagccatcacctcctccaggttgatttcatgtccccagtcccctgtggtcaacatgaactttcagtgatgactaagggatagaactcaatgcacagacttggaaatctctctaagacttaccatttggtgaaaataatcaatacacagaaagatccagaatgaaataaactacgtaagagcaacaacacacaacatacaatcaaaactatagaacaaacccaaagcaatataatgtattcctaaaagtacatagatacataaaagtctatagaaaaaggacaggaagggaaccctccaaatgatagtagttacctctggcatagggtgtgagactgggggaggtggttaagaagatattgagctttatatcaactgaaaataatttttacaaatgaacgtaatcttgtgctatttatgaaattaaaagtraatttactgacagaattggaggaaggatatgtggaggtgtgttattttctgtcaacttgtgtatttgtccacattctctatgagaaaaatttaaaattaaaaaaatacaattgatattataaaagtcattatctcactgagatatggctccttctgagaggttcatttgatgtgcccagctcttccctaaggtgaacttggctgactttggccctctgtatcatggacagagactggtggtctcattcactgaataaataaatgaatagatggatagatggatggttccagtgaagcaaagcaagatcttgtcccttgatgacccatttctggtatttctggaggcttcagggtgtgccgtgacctctttgggcccagtagaaaatgtggctcacattcttcttcaggactagagaggtgggtatcttggagtggtgggtatttctgacagagaaaaaaactttgccaacacatagcagaaaaaaggaaacatgtttcatatgacttgaacaataaaaattaccatttgtacagtctgcaaaatgttaagaatatggaatgtatcctgctcccaaccccatctgcaacatgagattcctggatagcagcccaagctgttccttcatcagggctctgggctaagtcctggcatgcagaagtgttttcagggatggttactagacgactcaacaggctgagcgaagggacttgatgtgaagagtcccggag

SEQ ID NO: 70922 - DNA, 1345 bp, Homo sapiens
cacgttgtaacctggctgcctgagggtggggctctccactggggtgatggctccctccctcaatgtcttatgtcccattttgggctaagggacttgtgaacaccagccctggagttgatagatgaaggcagtctttcgtcatgttcactggtgattgtgatgaaattttatcccatgatcacttaaacaaagccagctggaagtagctgttgaggagacacaaacaagaatttggtccaagatatctttgtttaacaccatattttggctgtgcccagcttcaagtccaggagaaagggagagaccaaaacattaattagttgtgatgggaactctgcgtttaaatgcgtgccttcctttagcccagtggtttagaaatggtaagttgacttgaattttatggaaaagctccraaacctcttgatctatgtatctatgttcctgcctcaactgaattttagaaccaacgtgggcaggatgtgattctaagcactgctgcaggtgcaaacacagatgccttcaaaggcctttaatctggtagaaggggctagatggggtgggatggggtgagtgtgtaaggcagaatgctagtgccataaggtgtgtaaaagacaaagcatggaggttttagggaagaaagagttgaatccacagtggaattcattcatacatgcaatatacatatatatatgtatatatatatatatatatattcatctgtgtatatctatatacctatatatacactgagtgcctactgtatgactggcactgggaattcaacaaaatggtcaaggtcaaggatccctgtcctcacagatctcacgtttcagaaagtgaaaaagacaataaataagtaaacagatgaataaccaccatcatttcagactgggaaggaaacaagaaaggtgacaggatgtgactaggatgtggtggggagaaggtaactttggactgggtcagtagagagggtctcctgactggtgaccttcaagctgagactcaaaacatgagcaaaataaaagagaaatggcttcacaaaggaagcagccatcacaagttgaggaatcccaaataatatttgtcattgtttttatatgagtttttggtttatttgtgtaatgctttgatgtttgagaatacattctcataacaatttctcagaattagagtggtacccaaaccaagcatggtgcgtaagtagaagtggtgtgtggttcaccttatttctttggcaacactgactgcaacatagctattaatatcaaagtgctggttttgacgctgctgtggcttcactgtgtgacctcaggtaaatcacttaacttctctgggctactactcc

SEQ ID NO: 70923 - DNA, 1345 bp, Homo sapiens
cacgttgtaacctggctgcctgagggtggggctctccactggggtgatggctccctccctcaatgtcttatgtcccattttgggctaagggacttgtgaacaccagccctggagttgatagatgaaggcagtctttcgtcatgttcactggtgattgtgatgaaattttatcccatgatcacttaaacaaagccagctggaagtagctgttgaggagacacaaacaagaatttggtccaagatatctttgtttaacaccatattttggctgtgcccagcttcaagtccaggagaaagggagagaccaaaacattaattagttgtgatgggaactctgcgtttaaatgcgtgccttcctttagcccagtggtttagaaatggtaagttgacttgaattttatggaaaagctccgaaacctcttgatctatgtatctatgttcctgcctcaactgaattttagaaccaacgtgggcaggatgtgattctaagcactgctgcaggtgcaaacacagatgccttcaaaggcctttaatctggtagaaggggctagatggggtgggatggggtgagtgtgtaaggcagaatgctagtgccataaggtgtgtaaaagacaaagcatggaggttttagggaagaaagagttgaatccacagtggaattcattcatacatgcaatatayatatatatatgtatatatatatatatatatattcatctgtgtatatctatatacctatatatacactgagtgcctactgtatgactggcactgggaattcaacaaaatggtcaaggtcaaggatccctgtcctcacagatctcacgtttcagaaagtgaaaaagacaataaataagtaaacagatgaataaccaccatcatttcagactgggaaggaaacaagaaaggtgacaggatgtgactaggatgtggtggggagaaggtaactttggactgggtcagtagagagggtctcctgactggtgaccttcaagctgagactcaaaacatgagcaaaataaaagagaaatggcttcacaaaggaagcagccatcacaagttgaggaatcccaaataatatttgtcattgtttttatatgagtttttggtttatttgtgtaatgctttgatgtttgagaatacattctcataacaatttctcagaattagagtggtacccaaaccaagcatggtgcgtaagtagaagtggtgtgtggttcaccttatttctttggcaacactgactgcaacatagctattaatatcaaagtgctggttttgacgctgctgtggcttcactgtgtgacctcaggtaaatcacttaacttctctgggctactactcc

SEQ ID NO: 70924 - DNA, 1345 bp, Homo sapiens
cacgttgtaacctggctgcctgagggtggggctctccactggggtgatggctccctccctcaatgtcttatgtcccattttgggctaagggacttgtgaacaccagccctggagttgatagatgaaggcagtctttcgtcatgttcactggtgattgtgatgaaattttatcccatgatcacttaaacaaagccagctggaagtagctgttgaggagacacaaacaagaatttggtccaagatatctttgtttaacaccatattttggctgtgcccagcttcaagtccaggagaaagggagagaccaaaacattaattagttgtgatgggaactctgcgtttaaatgcgtgccttcctttagcccagtggtttagaaatggtaagttgacttgaattttatggaaaagctccgaaacctcttgatctatgtatctatgttcctgcctcaactgaattttagaaccaacgtgggcaggatgtgattctaagcactgctgcaggtgcaaacacagatgccttcaaaggcctttaatctggtagaaggggctagatggggtgggatggggtgagtgtgtaaggcagaatgctagtgccataaggtgtgtaaaagacaaagcatggaggttttagggaagaaagagttgaatccacagtggaattcattcatacatgcaatatacatatatatatgtatatatatatatatatatattcatctgtgtatatctatatacctatatatacactgagygcctactgtatgactggcactgggaattcaacaaaatggtcaaggtcaaggatccctgtcctcacagatctcacgtttcagaaagtgaaaaagacaataaataagtaaacagatgaataaccaccatcatttcagactgggaaggaaacaagaaaggtgacaggatgtgactaggatgtggtggggagaaggtaactttggactgggtcagtagagagggtctcctgactggtgaccttcaagctgagactcaaaacatgagcaaaataaaagagaaatggcttcacaaaggaagcagccatcacaagttgaggaatcccaaataatatttgtcattgtttttatatgagtttttggtttatttgtgtaatgctttgatgtttgagaatacattctcataacaatttctcagaattagagtggtacccaaaccaagcatggtgcgtaagtagaagtggtgtgtggttcaccttatttctttggcaacactgactgcaacatagctattaatatcaaagtgctggttttgacgctgctgtggcttcactgtgtgacctcaggtaaatcacttaacttctctgggctactactcc

SEQ ID NO: 70925 - DNA, 639 bp, Homo sapiens
gggatcctcctagggtcctaagttgctgttccctccccacctgcccacccccctaccaaggacaggatctgtctcctctcactccaaattcccgctccacactggagctccactggctgtctgccatgatgtccccatcccagtccgtaccttctcgccatcctccaaaccaatgatgtgggacacagaccctactgaaagcttcagaataatgggggcagggccactgccctgagagcttctctcatytcctcccagcccgaattccaaaccttctctcaggtcaccagtgctagcgagaaattcctaaattcacgttactctattacacagagtcacagcctctctctttttctcactggcttctcactagagcagcccagataacttcactttaaaaatttttttaaaaattaaattgtggtaaatacacataatattaaatttaccatcttaacccatttaagtgaaccattcagcaatgtacagtcaataagtacattgatactgtcctgcaaccgtcaccactatccacctccagacctcttccatcttccaaactgaaattctgtccccattaaacaataactccattccctttccctgccctcattcttgcactgctataaagaaatacct

SEQ ID NO: 70926 - DNA, 1086 bp, Homo sapiens
gaattctctccaggccaaaggatcactttgaaaatcacttgtaatgcctactaggacagagaccctacttgaccatttacctgccctgtgatcttaggcaagtcactgaacccctccttattttataaataggtataatgatgatagtgatggcaataatattaatgacccttctctcattccctgagcatgaaatgagaatgtcgaagtgaaagtactgtgacaactcaaaatggtaacacaagctttagttactgtttttattatggtaactagtgattatttactacattccaggtgctataccagccactttacagacaatatctcacttaagactcatcattaccttatgagtcaggtactgagattatgcctattttatacatgaggaaactgaaactcagagaggttatataattcatgtaaaatcagtagctattataaggcagactcaggtctgaactgagtttggtctaatgtttccaacagcatcacaatgcttaaaaacatcacaaaatgatcattgtagtagtggttgaaataattatttgtactaagctatttcttgtattataagcaaatctctatcttaagcatgtcacatgtattaactcttttaacaacaatcttgaggtgggaagctattttgttttctgtttttcttggatggttataacaaagtatcacaggtgactcaagagaagtgatgacaagttgaaaataaatttaagttgctctaagtacatgactaccttattgttttaatctccaatatatttgcaatgtctaataggggcttgattaataccaattaatatctgtaggcatcaatacctattggasaagtgaatgaatgagagaatgaatggaaattgattactcttcagaggtgctgcaaacatgatttgacagaaaacacacttctactattgcatattctacactcctcaacctttgctctagcctgctacggagacctctttgtagtttccagattattcactggaataagataaaaatgagtaactcctcagaatcaaatccctattaacccaggggtcttgctgcaaccaatatgggttt

SEQ ID NO: 70927 - DNA, 520 bp, Homo sapiens
aaatgccctctttgttcttagaatgttttctttttttctaaaattatttagaatttttaaaggcacgaatagcatacaaagtgaagcatttcagaatgatacagagtttttaaaaagygattgggaaagtacattcctaaagatttgtgggtagagatgtagttttttgagttaactcttgaaaattatgagtctgggtaccgtggctcacacctgtaatcccagcactttgggcttacttgaggcctggagcccgagaccagctgggtaacatagtaagatctcatctctacaaaaaaatatttttttaattagccaggtgttgtggtgcatacctgtagtcctagctactcgggagtctgaggcaggaggatcccttaagcccaggagttcaaggttacagtggcaccactgtaatttattctaatcattgtaattatgttgtatgtgtaatgctgaactatgatggcatcactgcactccagcctgggtgtcacagcaagaccttgtctctaaacaa

SEQ ID NO: 70928 - DNA, 1161 bp, Homo sapiens
ttgtgtaactttttggtaatccacatcttttatttttatctggacaaactaatgtatgtttctctatgaaatatctgtgccaaataaaataggtgaagttattttaattgttatgataaaaactataatgacaaaaatttttacttttttatatgtctcactaacttatatgtcttactagcttataaaaaattatacctaattgagtacagtactttttgtttgtttatttagatatgaggtctcactatgttgcccaggctggtcttgaaccccaggactcaagcattcctcccatcttggcctccaaaagtgctgggtttacaggcacgcatcatcacgcctggcctgatatttttatagtttaaagaatattatgtaaacttgagagagacctaagctttaagamtaatttatttgtaataaaattaaaatttcagaattttaatccttaaaaataagtactcgcttattctgattttatcttgtaatcataatatagtatgcttttttaataaaatagaaaatgaaggcacacatataagtaagactatacttggactacatagaaatataggaatattaattacagtgatcaaagagagtctaaatttgcagaaggatatgagaagagaacaaaatataagagaaattattttattattcatcatagtcttaattgcattgcaattcatattagtacttttttttttataaaactagtcaagtgtagtcgtgagaaggggaaaagtagagttcaatctgtagctctgaacaacccattaaataactaccttcagaccagccatattatatttttaaacaagcataaaaacaaatataataaatggttattgagaatatacctagcttaaaacatattttaaattgcttatttatgtaactatatgtaatctactttaaaatatcaaaagattatccaaaattaataagccagagaccaccaactctttctgtggaaggctcaattagtaaatatttcaagctttgtgtgccacataagatctctgtcacacattcttgtttgtttgtcataatcctttaaaaaggtaaaaaagccattcttagttggcaagccagatttggtccacaggctgtagtttcccaattcctacattaaacccaaatcataattgtttg

SEQ ID NO: 70929 - DNA, 846 bp, Homo sapiens
taagagttttaataaccaaccctaccaccttgtgccacaggctggctgtgctccaccaacgactagtgataaaatcctcattgccagccagatggcaagcgatccaactcccatgccctatcttattgcctgccttatcaaaccactcctagcaccatctgtcacaggttgggttctctggaagcaaatgctggaacagagtttgacgtgcagaaataattcatgcaggatgaacccctgtggaaaggaggaggaggaagtagagtggggcacagggagaagttgaattgcaatgcaggctcattaaaacttggccaatatatagcactatgaccagtwgaattatatcgcaggggaaccaaagtagccaggcctttttcccctgccatgatcagtcgctggatgttggccacctcaggaagggtgtgtcattgggcaagaaggctttctgcagcttaggcaaaccctgaagaagctgggagcagaaggctgtctatagacagtattcccagcacctcctgaaaaaagttcttccttcaaaaatatttgactgatgtatctttgtgtgcatcacaaacatgctacaaagcaaaagacaactactgcatgtaacattatagtcaaatataatactgaatagaagcagccagaccgaaatgaatatataccataagattccataaggttcagaactcaggcaaaactgattgaaatgttggaattcagaatagccttctctttcaaaagggcatgtggactggagggagtccaagggagctttctggggtgttggtcctgcttcactacttaatctcatactggttgcataggtgtattcactttgta

SEQ ID NO: 70930 - DNA, 846 bp, Homo sapiens
taagagttttaataaccaaccctaccaccttgtgccacaggctggctgtgctccaccaacgactagtgataaaatcctcattgccagccagatggcaagcgatccaactcccatgccctatcttattgcctgccttatcaaaccactcctagcaccatctgtcacaggttgggttctctggaagcaaatgctggaacagagtttgacgtgcagaaataattcatgcaggatgaacccctgtggaaaggaggaggaggaagtagagtggggcacagggagaagttgaattgcaatgcaggctcattaaaacttggccaatatatagcactatgaccagtagaattatatcgcagkggaaccaaagtagccaggcctttttcccctgccatgatcagtcgctggatgttggccacctcaggaagggtgtgtcattgggcaagaaggctttctgcagcttaggcaaaccctgaagaagctgggagcagaaggctgtctatagacagtattcccagcacctcctgaaaaaagttcttccttcaaaaatatttgactgatgtatctttgtgtgcatcacaaacatgctacaaagcaaaagacaactactgcatgtaacattatagtcaaatataatactgaatagaagcagccagaccgaaatgaatatataccataagattccataaggttcagaactcaggcaaaactgattgaaatgttggaattcagaatagccttctctttcaaaagggcatgtggactggagggagtccaagggagctttctggggtgttggtcctgcttcactacttaatctcatactggttgcataggtgtattcactttgta

SEQ ID NO: 70931 - DNA, 846 bp, Homo sapiens
taagagttttaataaccaaccctaccaccttgtgccacaggctggctgtgctccaccaacgactagtgataaaatcctcattgccagccagatggcaagcgatccaactcccatgccctatcttattgcctgccttatcaaaccactcctagcaccatctgtcacaggttgggttctctggaagcaaatgctggaacagagtttgacgtgcagaaataattcatgcaggatgaacccctgtggaaaggaggaggaggaagtagagtggggcacagggagaagttgaattgcaatgcaggctcattaaaacttggccaatatatagcactatgaccagtagaattatatcgcaggggaaccaaagtagccaggcctttttcccctgccatgatcagtcgctggatgttggccacctcaggaagggtgtgtcattgggcaagaaggctttctgcagcttaggcaaaccctgaagaagctgggagcagaaggctgtctatagacagtattcccagcacctcctgaaaaaagttcttccttcaaaaatatttgactgatgtatctttgtgtgcatcacaaacatgctacaaagcaaaagacaactactrcatgtaacattatagtcaaatataatactgaatagaagcagccagaccgaaatgaatatataccataagattccataaggttcagaactcaggcaaaactgattgaaatgttggaattcagaatagccttctctttcaaaagggcatgtggactggagggagtccaagggagctttctggggtgttggtcctgcttcactacttaatctcatactggttgcataggtgtattcactttgta

SEQ ID NO: 70932 - DNA, 846 bp, Homo sapiens
taagagttttaataaccaaccctaccaccttgtgccacaggctggctgtgctccaccaacgactagtgataaaatcctcattgccagccagatggcaagcgatccaactcccatgccctatcttattgcctgccttatcaaaccactcctagcaccatctgtcacaggttgggttctctggaagcaaatgctggaacagagtttgacgtgcagaaataattcatgcaggatgaacccctgtggaaaggaggaggaggaagtagagtggggcacagggagaagttgaattgcaatgcaggctcattaaaacttggccaatatatagcactatgaccagtagaattatatcgcaggggaaccaaagtagccaggcctttttcccctgccatgatcagtcgctggatgttggccacctcaggaagggtgtgtcattgggcaagaaggctttctgcagcttaggcaaaccctgaagaagctgggagcagaaggctgtctatagacagtattcccagcacctcctgaaaaaagttcttccttcaaaaatatttgactgatgtatctttgtgtgcatcacaaacatgctacaaagcaaaagacaactactgcatgtaacattatagtcaaatataawactgaatagaagcagccagaccgaaatgaatatataccataagattccataaggttcagaactcaggcaaaactgattgaaatgttggaattcagaatagccttctctttcaaaagggcatgtggactggagggagtccaagggagctttctggggtgttggtcctgcttcactacttaatctcatactggttgcataggtgtattcactttgta

SEQ ID NO: 70933 - DNA, 644 bp, Homo sapiens
aacacaaaacatttgaaacccctaaccctgagtccttggaatgtattcttttagagaactggagggagaaagagcaaaataagtaggagtcaatatctttcttaaaaagataaccctggccaggcatggtggctcacacctgtaatcccagcactttgggaggccaaggtaggtggatcacttaaggtcaggagtttgagaccagcctggccaacatggtggaaccctgtctctattaaaaataaaaaaattagctgggcatggtggcccactcctgtagtcccagctactcaggaagctgaggcacaagaatcrcttgaacccgggaggcggaggttgcagtgagccgagatggcgccactgcactccagcctgggagacagagggagattctgtctaaaataaaataaaataaataatgcaaattttttttccttctaaataacaaaaattctggagaacaataattctctcaaccatggtactcaattcttcttaataatgacagtagaccacaagattcagaagccattctggttctgatggtgatagaaagtgatcagaagtattttactgatctgagacaaagtctctggaaaatttcaaccttaatccacttttgccctgtgccaggcttttagaag

SEQ ID NO: 70934 - DNA, 1010 bp, Homo sapiens
acacacattcttttccttttccatctctccttcttctccttttcccttcttcctccacattcttccttcctttctttttgccaagtacttggccaaggaaaacagagtatcccactgtcctgctcagacctgccgagattcagaactgaaagacttccgggtataggagtctcccagttaaaatctttcacagtggctgctgtttctgtctcctccagctctgcctccactgcttatctctgagaatccagcgtcaggacgcttgtgaacctagaatctgccctggtttctttttttttttttttttttttttttttgagatggagttttgcttttgctgcccaggctggagtgcaacggcacaatctcaggtcactgcaacctccgcttcctgggctcaagggattctcrtgcctcaacctcccaagtagctgggattacaggcacccgtcaccacacctggctaatttttgtatttttagtagagacagggtttcaccatgttggccaggctggtctcgaactcttgagctcagttgatccgcccgcctcggcctcccaaagtgctgggattacaggagtgagccaccacgcctagccgccccagtttcttaaaaccaagaaaggtccatcccaaatatgctactgcatgacactttcacttgcttctttcattcatggattcatctggtacgtctcgagtgtctcctctattccaagcactatgccgggtgctacagaagccatgacaaaagggtctcctgtcctcatgggtcttgttctggcaggggagaacaattttaatcagttatatggttatttaagttcacttggagaaaaataatacaaaaattaagtatggggtgcgaaaagagtgagtgtgttaggggattctgacctaatctggggatttgaaggcttcctcaaaaacagtgacatttaagcagggaaatgaaggataatagaaattgacaggtcaggggaaagggagggaagaatgttccaggagg

SEQ ID NO: 70935 - DNA, 1010 bp, Homo sapiens
acacacattcttttccttttccatctctccttcttctccttttcccttcttcctccacattcttccttcctttctttttgccaagtacttggccaaggaaaacagagtatcccactgtcctgctcagacctgccgagattcagaactgaaagacttccgggtataggagtctcccagttaaaatctttcacagtggctgctgtttctgtctcctccagctctgcctccactgcttatctctgagaatccagcgtcaggacgcttgtgaacctagaatctgccctggtttctttttttttttttttttttttttttttgagatggagttttgcttttgctgcccaggctggagtgcaacggcacaatctcaggtcactgcaacctccgcttcctgggctcaagggattctcatgcctcaacctcccaagtagctgggattacaggcacccgtcaccacacctggctaatttttgtatttttagtagagacagggtttcaccatgttggccaggctggtctcgaactcttgagctcagttgatccgcccgcctcrgcctcccaaagtgctgggattacaggagtgagccaccacgcctagccgccccagtttcttaaaaccaagaaaggtccatcccaaatatgctactgcatgacactttcacttgcttctttcattcatggattcatctggtacgtctcgagtgtctcctctattccaagcactatgccgggtgctacagaagccatgacaaaagggtctcctgtcctcatgggtcttgttctggcaggggagaacaattttaatcagttatatggttatttaagttcacttggagaaaaataatacaaaaattaagtatggggtgcgaaaagagtgagtgtgttaggggattctgacctaatctggggatttgaaggcttcctcaaaaacagtgacatttaagcagggaaatgaaggataatagaaattgacaggtcaggggaaagggagggaagaatgttccaggagg

SEQ ID NO: 70936 - DNA, 572 bp, Homo sapiens
agttgaccttccaaaggcagagcaaagccttccgactcaacttcatccccggccccacctggtgagtacagtgtcttgttgactatctatttttctaatacttaactgaagccccaaaatatagtgtgactgccctggtgaacagagatatgctctactgaccttgactttggagggctctgtgaaactgttgagtagcattagaaggtcactttgggcaggccagtgaaatgacagaggacctggtctagggctagaatgccttaacatggactcctcaagcaagttcctggyggcaataaaatttcagtgtgtcccttgatgcctttattttggtgtgctgttgtgggatcaaaataaaggaaaagcagaaaccttccttccaagtaacatggccacaggcatcacgttgctgtcaaaattacattctgaaggaagcctgcacaggaacgtgcaactggggctccatttaaaaacagaaaagaaatgagatgttatttttgaagcagtcaactcgtggaaatgattacaagtcatttggcaaacccaaagtccccttgaaattcttattt

SEQ ID NO: 70937 - DNA, 795 bp, Homo sapiens
aagaaaccctttaaaaacaaacttcctgagaagagaaaagggttacaatttaggagctttttaagaattacctttgggtttttccaagctctcctcttgagtagaaaacaggacatgtcacagatatatattttcttaattgtaaaaagtaaatactctaaaatgtatttttttcattgtgattatgttacagtggtttctatgtaccatagattagatttttattaagggttttattaaataactggtgtttcaccaacatctaattaaatcttctatctaaattgaacagaaaattatggggggaaaagaaagcatttgtagcagactttattacagataagactattatttgttcatcttaagaatttgagatcaaatttacaagcagcatcctcatcgaatttcttttctgggctgctgagccctggccccttgaaagcagcccattatctcctcacctccccccattttattatagtgtcctggttgttggcaacacgcccgctgtttaaggttactttcattaattaaccgaaagttaatttctttgcaagcaaaatctctgatctcattatgttgtctttaaagccgaaagcttcaggttttctggtctcctttgatgacacaataaaaagcatgctctttatcttaagggaaactgtctccagggtttcatttaatagtccttgaaatagttacagcacagccaggcagactacaataatatgccagttttagaaaaccttggctttgtcatggttagagagcccagtgactgatgtragctacggt

SEQ ID NO: 70938 - DNA, 584 bp, Homo sapiens
ccttactttgccctagctttagttattctcctactaaagttaacctctcacactcccccttttttctagttgagagatgggccataaacacaagccactttgcaaagtgttcattagtccctgtaactctcttcctaccgtcttccatttccttaaaacattctttggaaagatcttttaaaaaataagaggtgtatgtatttatttatgtacaactctgttactggttttaaaaatccaagtgacttctaatcctgatttttttgctgcccawtaaactccacaagtatctttctgtggtgacggggagaatgatatttactgaactacaagattagctaatatcccatcaataactgagtgccacagacttcctcagttcatcccattcctgtctctaggtagcaacagtgagaaaagcacttattaaagaatattttttcttctactaaattagtccatgacttcatttgtgctggtctctgtttgtcaactgctgccaaaaatttttaactcatgcagtaaagtaagcttcgtaaatctatataattcaactcaacacttgcatgagaaaatatttcagg

SEQ ID NO: 70939 - DNA, 433 bp, Homo sapiens
cacactctctttctctctctctcacacacacactctcccacaaggtgtggataaatacttgtgcagataaatagatccacacaagtatgcattgttagttcatcttgcaatggatatactgtttttggagcagctctttggaacttcatttcagaggaaagcagttgctaagagttttggaggcatggtcaggaggggctgtcacaaycccttcaagaaccagccttgctcagtggccactgcgaaaagctgtgtggagatttgcagctctggccttgctctcctgcactcaccctggcaagctggctctccctggcatcagcacctctagttccaggttagttattttcaccctggagtcttgggggtgagggtcttagcagagctggggggcattagcttgtgggcaagaccaggaactgcccctacacaa

SEQ ID NO: 70940 - DNA, 494 bp, Homo sapiens
aactgtaatttttgcagtgccctcctacagaacttcctacaatgatggaaattctctgtatctgttttatccaatactaagaaaacaaattataaattttctttcattttaaataacttaaacagccgtaggtagttctatcagacagtgtagcccaccgtctgtcttcaatcatccaggcccaagacaagcttggggctggtccctgggtctccaggagagcccagcaagctgaacaatggcaaccactggtaggtgtgaaatgccagccagttcagtgagacacagggcacagcaagaaccaaaccccgagactgccatggaatcaggacacatctttgttttgagtgcagagcccrctgtcagcagctgggggctgaccccgggggccctaagagtcctgtattagggaggagaacaggtttttctaaaagatgtctttagaacacttccattaggattctgaattttcccaaggataacctaaaatgtgc

SEQ ID NO: 70941 - DNA, 546 bp, Homo sapiens
acattcacaaatcaagacattcacaaccaccatccttaactctatcttctttagaaaacatcacaccctttaccatttgtttgaaaaacccacagacggtgttgcggagacatcagaaaatcaatggaattaaacacagacatcaaagaaagcacgctcttagaatctgcatttgttgttggtattgccccatcattcaatcgatgtctggaccatgtcagtggtgtgtttctgaagtcttcttagcccatattttctgtaataatgttacacattacaaaaaaagtgagagtcccacaagacatttgtacttcaaatggagaaatccttttggctccttggaagaccgggttaaaggtacaagcacaggaggttcctaaatggaatcaagcattctggcaaagtccacctatgtcccctgctctcactgttggtcatgtaaatgcgctcctgtgttttattgcaagacstactgaggctccacgtgctccttgtctaatcacttctcccatcctgcctttaacccacaaccttcatccagcatca

SEQ ID NO: 70942 - DNA, 1065 bp, Homo sapiens
ccctcccatgtcttatatttttcttttttaaatgcctatttatagctttcatcctttttggactgcttatgtttttcttattgatctgtagtagcttgttatatgttaactgttggaatttcatatgtgttagagatattgtccccagcttgtcatttgcctcctggttatgtttgctgatccagtgcagaaccccatggggtgcagagtaggaggacatgagagagccaaggctggagagttaggcacaggctaggtcacctaagggctagctgctcatgcaaaggagcaaggaggtgctattgacgagggtaggactttaaaatatctagggagtgaagtcttcaggttttgctgactggataagggatgtgggatccaagaaggtgatgcaggcaacaccaactctggcgttggccttgaggtggacagtagtgtactgaattattaataaatggtcatcaggtagaagcatgttttggaaggaaaatgataagcattagagttacggtctttgctcctgcaacaaccagtatttagctgtcagagcctcatagcttagtacagctcctggcacagtggattgcttagtaaaattgaaatgaatccattgtcggcttccatcgagaaagatgatgatcttctctttggtgcctttttgatctctgtgcctagtactggcagcctcacaattaatttaatttaatttaatttaatttaatttaatttaattttttgagatggagtctcactctgtcacccaggccagagtgcagtggcrcgatctcggctcactgcaacctccgcctcccgaattcaagcgattctcctgcctcagcctccctgagtagatgggacaacaggcacccaccaccatgcccagctcatttctgtatttttagtagagacggggtttcgccacattggcctggctggtcttgaactcctgacctcaggtgatccatctgccttggcctcccaaagtgccgggattatagacgtgagccaccacacccggcccacaattaattttaataatctcacttctgcttcctaggaaccgga

SEQ ID NO: 70943 - DNA, 1012 bp, Homo sapiens
tgcatgactaagtaaatatttagtgcattacattatggaatattagttcattacaatatggaatattgtgcattcattaacatcaatctgatgtatctaaattctaccattagattgtaagctcaatgaagccaaagctattgctcacaattttatcctcagggcataggactgacccatagacagggattccagtgattattaattaaaagaaataatagacttttatgaattaacagaaatatatctattatatattaagtgaaaaaaaagtgttacagaattttcctctcccttctacacttgccttttcttatycttgagggtttagcttctctagagcactttctgagccctttagctagtgtgtgggccccacacaatattctgtttcagccttgtgtttatttccttccttgggcagatcacaattcttaattgttttatttgtatgttaatctgaaattatttttctctatttcctttcttcactaaattatgaggtgcctaaaggcaggaatcgtgtctgttctgtccactattataaacccagaaccacatacatagtaggtactccacaaacatttgctgagtgaaagactatgaaattgatatggatatgggaggattcacaatagactattaacttgattccttttaatgaaggcagaaactacagaagctgggtaaaggaagctgttattttttttactctgttcttctgaattgttaattttttaaaacagtaaatctgaatcacatttatcactaaactatctcactaagccaaaacattcagacttgactaggaagtaatgaatattcattaatttattttcagaatgatcttttccctcagtggagtctccgtgggggacagaaactatgagaaattttctcaccattaccctccaattatgtaggaaggaactttcaggtttgtgagaaagggggaaagtttcgctagtggacccactctttatttagcatttctgtttcctttaagcatgtt

SEQ ID NO: 70944 - DNA, 591 bp, Homo sapiens
actttggtcayattctatgtaggcagaaatcttctgatctccaaattccccttggaatactgcattacagagtttgactctactctctccttagtgtcttcctatgggtattttatcactcattcacccagaagcttccagcaagcatttgttgaatgactgctgtgttccaactactgtgctaagcacttgaaataaaatgtaaaagaagagaggcacgattcttattctccagaatcttcactctggaggggagacatataaaatttacaagtaagatccaaatgctgagaaagacccagccacacccagagccagaagaggcacatcctaaacagaaaactaaagccagaggcagaaggagaagttagtattcctggaacccaccagtgaggcagggagtggagcaggaaaaaatagggtctttggatataattgagcacctatggctacacaagtcactcctcaaggagacatggattttctgttcttctatcactttccacagtatttttcaaacagtatatcaaggcatctatttacgaattgtgatcaacattgtgtaatgacagaattagctagaatagaaaa

SEQ ID NO: 70945 - DNA, 591 bp, Homo sapiens
actttggtcatattctatgtaggcagaaatcttctgatctccaaattccccttggaatactgcattacagagttygactctactctctccttagtgtcttcctatgggtattttatcactcattcacccagaagcttccagcaagcatttgttgaatgactgctgtgttccaactactgtgctaagcacttgaaataaaatgtaaaagaagagaggcacgattcttattctccagaatcttcactctggaggggagacatataaaatttacaagtaagatccaaatgctgagaaagacccagccacacccagagccagaagaggcacatcctaaacagaaaactaaagccagaggcagaaggagaagttagtattcctggaacccaccagtgaggcagggagtggagcaggaaaaaatagggtctttggatataattgagcacctatggctacacaagtcactcctcaaggagacatggattttctgttcttctatcactttccacagtatttttcaaacagtatatcaaggcatctatttacgaattgtgatcaacattgtgtaatgacagaattagctagaatagaaaa

SEQ ID NO: 70946 - DNA, 815 bp, Homo sapiens
ccagctaaatccctgaacatgctgagcttcccttctctttgtcccactgccttgacaaaagtaccattaagcagacttcattgtgtttctctcgctcatttgcctgtcagaggatgggaagcctttcaaatgggtcatattagtagctgttgtgggtctacctttctccacctgggcccaccagataatgaaaatgaagccacggtgtatttgcatagacgtttcaggacatttgcacccgttactcccttagcagcttataacaaacccaggaggaaggaaaagaaagcaaaggaaaagcacgcattcacacacacaactttaaatgattaactactacaagctagggccccttaggggcttctaaatacgggatctcatttaatgctcacaaagttgctagactgatccacgctcagaaggatgasgaatttgggacttatccaactggcgcatggtggagtcaggtttattcgctcatccatttgacagggctcaacgcaggctatgctaagacacggcaccttggcatactgagtattttaagatgaaggaatttgagagaactgcagaagcaggaaggtctctctggcttactctctcctttctcttctgaaacaggttgtaaaatctcaaaagaatttctggtcttctacgcacagcaggtcataaaacctcatgggagaaatgccctccctatacccagaggaaaggaatgtctgcctcaccgggaacagaaagaagcagcagaacaaacaggccttgctaagttctcccaattttattaccattaaatcatacttattttttctcca

SEQ ID NO: 70947 - DNA, 671 bp, Homo sapiens
cctttgtggtaagagtgcagaaattataccatttagagcaaaagattgctcacggatacacacagctcacattaccagcaatgaacagagggraaaaaaaaagctgggatcaccctcattagtttccagagaacttagccatacatgccatgaagaaaataacgaaatctgtaccatggttatcaatgattctgtcagaaatccctgttttgaattttctgcctccggtgccagggaaagcctcctttatgaaagaacaactttctaaggccctgtttaataagtctcagagaagaaaagcctgccagtaatgactcaaactcagagtagaaacgcaaaaccgattgcctgacctgctctgctgggccacacggccctgccacccccacgcacctggaaagccatcctgggttgcatttccctcccacccaagggctacatgttgtctaataacctttcctggtaggacacacacagccctcttggtgccttccactttccagtgtttatgcctttctcttctagcctagggaaagcaaacgactgagatagttgccttagtattatgaggaaggaaatcttcctcaagctgggaagagaggtgagcagaatgttccacgttaaccactttggaagcccagagaagccgtgctcctgtacgtcctcccact

SEQ ID NO: 70948 - DNA, 872 bp, Homo sapiens
gccctccctgtgaggcccaggggaaagagcctgacatccttagccatcggcagcagacatctgttcctatggccagtcgtgggtctggacagcacatggcacacagacaggtgtctggagacagtgctccgtgggtccagataggtactctggagtctgtggatgctgtttcacgctggtgagctgagctatggggcttattgtgaaggggaagtgaggtgggggatgscagagaaggatgaggaagggggcagaataactttcctactgttctctcttcttgttctccctgggaagggagaacgcccagaaatgtaaacctaggtgtgtgatcagcaggattgtggcctcccggtaatgtctgcgcctcaatccccggacccagaggctatgtcatgttacgtggcgagggggatttagagttagtagtcagctgactttaagagataatcctcagtcacctgcgagagcccagtgcaattacaagggactgtgattgtgagtgaaagaggggggaagagagtcagagtcagatgacacaatgtgaagaagcctagactgctacttcgggctttgaagatggaggcagaggccaccagccaaggaacgtgggcagctggaactgcgatggaaacaggtcctccccgcagaaaggaacgcagctctgccctcacatcggtttcaacccagtgagacccatgtcagacttctggcctacagaaaaggaagagaaggaatgtgtactgtttcaagctgctaaatgcgtggcaatttgttgccctaataggaagtgaatacaaggggcctgggacagggtctcaggggtgaaagagaaaggtcctgaaatgattgtccatgttgctgttggatcc

SEQ ID NO: 70949 - DNA, 872 bp, Homo sapiens
gccctccctgtgaggcccaggggaaagagcctgacatccttagccatcggcagcagacatctgttcctatggccagtcgtgggtctggacagcacatggcacacagacaggtgtctggagacagtgctccgtgggtccagataggtactctggagtctgtggatgctgtttcacgctggtgagctgagctatggggcttattgtgaaggggaagtgaggtgggggatggcagagaaggatgaggaagggggcagaataactttcctactgttctctcttcttgttctccctgggaagggagaacgcccagaaatgtaaacctaggtgtgtgatcagcaggattrtggcctcccggtaatgtctgcgcctcaatccccggacccagaggctatgtcatgttacgtggcgagggggatttagagttagtagtcagctgactttaagagataatcctcagtcacctgcgagagcccagtgcaattacaagggactgtgattgtgagtgaaagaggggggaagagagtcagagtcagatgacacaatgtgaagaagcctagactgctacttcgggctttgaagatggaggcagaggccaccagccaaggaacgtgggcagctggaactgcgatggaaacaggtcctccccgcagaaaggaacgcagctctgccctcacatcggtttcaacccagtgagacccatgtcagacttctggcctacagaaaaggaagagaaggaatgtgtactgtttcaagctgctaaatgcgtggcaatttgttgccctaataggaagtgaatacaaggggcctgggacagggtctcaggggtgaaagagaaaggtcctgaaatgattgtccatgttgctgttggatcc

SEQ ID NO: 70950 - DNA, 544 bp, Homo sapiens
ggaaagtaaagtgaaatttgagtcagatgtggtggtgcacacctgtagtcctgactacttgggaggctgaggtaggaggattgcttgagcccaggagtttgagtctgtagtgtgtgatgatcacaacctgtgaatagtcactgcatgccagcctaggccacatagtgagaccccgtctcaaaaamcagaacaaaaaaaaaaaaaaaaaaaggaaagaaatttggagggtcttatactggcaatcaaatgaatgcttggcccagaagtgacagagatcacgtccactcacaattcattagccagaactaaccacgtggccatatccacccatcagagagccaagaagtgcgaccccattatggatgcctggaagacagaaatattaggagaatagcactagtggctaagtaagcatcactaaaataactagtgcctcaaactgaacaaaaataaattatgttttttaaagtctggtgttggtctatacggaagaaacaaccaaaacacgggatgaaaaaatatgcacaaattccaggaatgttta

SEQ ID NO: 70951 - DNA, 715 bp, Homo sapiens
gcatatgaactagttgggaattccaaatctaaaaattggccaaactgctctggggcttgcatggtccccgggggcagcctcctgcagctaatatgtttcctaagatgggtttggggaggcctgttcacctggaatcctkcaatctctggactcccagaacatggactgatagagtcatcgggcttatgttttcaaggcctgatgtcttggaaaagtcaggcatggttgattgtagacccaggtcagatgctgggaaaccagagagaatgggactaagaagccactgacatgctgaagaccaggatatcctgcacagcaaggcctctccaggctccatctcatccctcctcctggcccacctgagctcttgggggtggcccacctgctatcttccctgcttggctacctcccctctttgcattttgacttttctgctcctacaccccttttgttttgtttcttatgctttatttattcattttcttttattcctcatgccccactcccttttctcaattccttaggcaactattctcatgtcctgagagtagatcttttggtttgtgtgtggtcttgcaaaatgtgtattgctgtcttggtcatcaattcattcaacaagtatttgttgagtacctgctttgtgccaggcattcggggatacattagtgaagaaaactgacaaggatccctggaatgtgtattctaacaggggatg

SEQ ID NO: 70952 - DNA, 715 bp, Homo sapiens
gcatatgaactagttgggaattccaaatctaaaaattggccaaactgctctggggcttgcatggtccccgggggcagcctcctgcagctaatatgtttcctaagatgggtttggggaggcctgttcacctggaatccttcaatctctggactcccagaacatggactgatagagtcatcgggcttatgttttcaaggcctgatgtcttggaaaagtcaggcatggttgattgtagacccaggtcagatgctgggaaaccagagagaatgggactaagaagccactgacatgctgaagaccaggatatcctgcacagcaaggcctctccaggctccatctcatccctcctcctggcccacctgagctcttgggggtggcccacctgctatcttccctgcttggctacctcccctctttgcattttgacttttctgctcctacaccccttttgttttgtttcttatgctttatttattcattttcttttattcctcatgccccactcccttttctcaattccttaggcaactattctcatgtcctgagagtagatcttttggtttgtgtgtggtcttgcaaaatgtgtattgctstcttggtcatcaattcattcaacaagtatttgttgagtacctgctttgtgccaggcattcggggatacattagtgaagaaaactgacaaggatccctggaatgtgtattctaacaggggatg

SEQ ID NO: 70953 - DNA, 510 bp, Homo sapiens
aaatgttatctggggcccaccttgaacctttgaagaaaaaggatggttcttgatgtaatttgcccatagggcctggtgcctgtggtgtgctctgaaagagagcatctatatccaaaaagatgtgcctgctgagaagggctgctggcagctgtggtgagcatacatgaggctgtaccacgaaagcaggagagacaccaacgaggcatttgctgagcactgccgkgacagaaaagacatgtacagggaaacatacatagtagacagtgagatgatccaagaacagagtgcatagattaaagacagtaatgtttaaagaagttttggaagttcctgggataggatgttaaaagaaccaacccagaaagagagttttaaaaagctttgtcttccccactttcatttagatgtattctaatcagagactctctgaggccttttacattaagcacagcagcctttgtggagaaataaaaatatgtattaattgtacagccctcatagcaattaaat

SEQ ID NO: 70954 - DNA, 510 bp, Homo sapiens
aaatgttatctggggcccaccttgaacctttgaagaaaaaggatggttcttgatgtaatttgcccatagggcctggtgcctgtggtgtgctctgaaagagagcatctatatccaaaaagatgtgcctgctgagaagggctgctggcagctgtggtgagcatacatgaggctgtaccacgaaagcaggagagacaccaacgaggcatttgctgagcactgccgtgacagaaaagacakgtacagggaaacatacatagtagacagtgagatgatccaagaacagagtgcatagattaaagacagtaatgtttaaagaagttttggaagttcctgggataggatgttaaaagaaccaacccagaaagagagttttaaaaagctttgtcttccccactttcatttagatgtattctaatcagagactctctgaggccttttacattaagcacagcagcctttgtggagaaataaaaatatgtattaattgtacagccctcatagcaattaaat

SEQ ID NO: 70955 - DNA, 510 bp, Homo sapiens
aaatgttatctggggcccaccttgaacctttgaagaaaaaggatggttcttgatgtaatttgcccatagggcctggtgcctgtggtgtgctctgaaagagagcatctatatccaaaaagatgtgcctgctgagaagggctgctggcagctgtggtgagcatacatgaggctgtaccacgaaagcaggagagacaccaacgaggcatttgctgagcactgccgtgacagaaaagacatgtacagggaaacatacatagtagacagtgagatgatccaagracagagtgcatagattaaagacagtaatgtttaaagaagttttggaagttcctgggataggatgttaaaagaaccaacccagaaagagagttttaaaaagctttgtcttccccactttcatttagatgtattctaatcagagactctctgaggccttttacattaagcacagcagcctttgtggagaaataaaaatatgtattaattgtacagccctcatagcaattaaat

SEQ ID NO: 70956 - DNA, 555 bp, Homo sapiens
aaacaagttgaattcttatatatgtgtgaaatgacttaygtactaggttgtttactataataacatttttaatagcagaacattaggagaaacctaaatagacaaagaaagtatgtgaaaatctcataaggaaaactgcatagctatttaaaaacaaaatttaaaaaaaggtctatataaattgtcacaagatatctttcttttgcttttttatgcaaaaaacatatctctagaatactatatgagaaaccaataaatctggatatttctggagaaatattctgggtagcagagggacagaagtggagggaaaagttttcactgcttatcattttgggccattaacaacttacctattcaaacaacctagaaaaacaaaacaaaacaaactttggtttgacttttacttagtgcaactttgggctagtttactaaatttgcagagactaattttcttatttgtaaaatgacaattataattcctgcctcacatagttttatcaggtttaagtaagataatatatggaaagattctataacataacctgacacata

SEQ ID NO: 70957 - DNA, 636 bp, Homo sapiens
cccatctgtggagtgctcagcgttctcagcctaccccagacccccctctccagaaagagaatctcagctgtcagccactctctgggttacccttagcactggaattgcacgtgaatagtggtaccaaggagacctctctctgcttctcatcctgcaaccgggtgacactactcaaactcatctagaaggtcaacatctattttgctgaagactgaaaaagattaactggggaggagttggagtgaattcagtggaaaaacacagtaagaatccctctctacaartgaatccccacgaagcggcggagtggagggtgtggaggcgtgcaggagggcgggtgtgtgtgcatcgcacccaagatgaggtgtgagatcacatctcacaaaccactgacactcagccacaggcagcgctgacttcgtgggcgtgagacctgcgcagtcacacagggctccatgctccagaagagcctcagtcagaaaggcccaggcttggcatagtgctctgctgctgccgtcttgaaattcttcatcatttttgaacaagctgccctgcacattatgtagtcagtccaggctagaggttactgttttcttttttctttctttcttttttaacacggagtctcactctgtc

SEQ ID NO: 70958 - DNA, 713 bp, Homo sapiens
tttcaatatggaaactcatgtccttcaactctataatattttcatggattctttctttgatgattttcttctctccatttgtatttgtctctgaactcctattattcagataggagttgtattgttcttctaatgtttttctttcctgttttccatattttgactttttgtcttatttttggaatatgtgctcaattttttattccagcccttctattaaggttttgttttgttttgtttaggtatgaaacgaatatctatttaggctaagaaattcccacaaattacaaattttaaaaaggtgacaaatattataaacattattttttgctatgctttttgataattgttggtaatttgaaataacaaagtagatttataatgatcataaaggcaagttaagtatattattctgctattggcattacttgtcaaatccagcagtcaatttattatctcctcttactcggttgttctgcagcatttgacagcggtgaccactgcatacctcttttgacacactttcttcttcagcctcaatgacaccacagtcttctggttgtttcttctrctttactggttggtcatgctcagtgtcttttgctggcttctcttcctctgctgaacttctggataacggggaatttaataatgtgccaagaatttaatcctagacctccttctcttttcttattaaccctgtaggtgatttt

SEQ ID NO: 70959 - DNA, 733 bp, Homo sapiens
gggatccattaaaaagcctgtcttagcagtaagagtgactaaaagaaaattagctcaacagggaattttgaggaggttcccactgtcaacggcaggcgctggccttcactctgccatttgagtcctgctactgaaaacaaagctggctttgggctgcgcactactgtatgtggtatttgattctatatgccttggttttccacataccttgccaaattggtttcctgaccatgaccttgtagttcagcatttcctcttccctccacccgtttcctgcctttacgtttgatcgtcagaatctttttttcacatgaatcccatggtagtaatgtagtagtcatatctaaagtcaggagaccccacccttggtctcctgaaattcttttggaaaagtacactttacatgtctgtactccataactgtaatatgaaaccaccacacaatataaaaatgtattttctgtcttttttttttattttaatttttgagacagaatatcgctgtgtgwcccaggccagaatgcagtggcgtgatgttggcccactgcaagctccatctaccaggttcaagcgagtctcctgcctcagcctcctgggtagctgggattacaggctcccgccaccatgcctggctaagttttatatttttagcagagaaggggttttgccatgttggccaggctggtctcaaactcctaaccttaggtgatcctcctgcctcaacttctcaaag

SEQ ID NO: 70960 - DNA, 689 bp, Homo sapiens
caaaaggaaaaccacccaccttgcgcctgcatgtgctctgcacaactcctttcattacaagcattacagaacaaataaaaaaagatgattgaaaaaatgcagggatggccgggcgcagtggctcacacctgtaatcccagcaatttgggaggccgaggcaggcggatcacttaagatcaggagttcaagagaccagcctggcctcttgaacatggcaaaaccctgtctctactaaaaatacaaaaattagccaggcatggtggcacgtgcctgtaatcccagctactcgggagattgagacaggagaattgcttgaacctgggaggtggagtttccagtgagccaagatcaggccactgcactccagcctggacaacagagaaagactccatcaaaaaaaaagaaagaaagaaagaaagaaagaaaaagtgcaaggagtcattatatttttagtgaaaccaatgatgatgatgatgatgatgataataataataggctgggtgtggtggcttatgcctgtaatcccagaaatttggaaagcygagacaggaggatcggttgagcccagtagttcaaaattagcctgggcaacatagggagaccccgtctctacaaaaattagctaggtgggccatgcacagtggctcacgcctgtaatcccagcatttgggagactgaggtgggcagat

SEQ ID NO: 70961 - DNA, 593 bp, Homo sapiens
gattccttgccttctttagcttccagcgtttccaagctcatggctctccctcactcgcatctcagcttccattttcatgtctccttctccaacttggaccctcctgcctccctcttagaaggagcctgtgacggcatttagggccaacctgggtcatccaggggcatctcccatctcaagatccttaacctcatctcatctgcaaagtcctcctgaccgtgcaagatcagctgttcccaggttccagggattcagatgtggacatctttggggaatcattattctacctatcacagtagcctatatgctttttyccccaaaactctctgaagtaaccactgttatctcatcaggcaaaaattctgagacccagccaagtgaattactgtggataatatcacgtcaactagaaagtggccccaggtagtcagaccatatgctttttctttttccttcaacttttattttaagtccgggggtatcagtgcaggctgtgcaggttgtttcagaggcaaacgtgggccatgctgctttgttgtttttcactttttaataatcgccattccgactggcatgagatagcaactcattat

SEQ ID NO: 70962 - DNA, 1181 bp, Homo sapiens
catgaaggctgatgctataaaagcagttaaaaggttattagaaaatatgttttgctctttgggcattcctggagaaatctccagcaatggaagtacttgcttcactgtacaagttgtaaaacagttaaataaggaattacaaatggaatagtattaggtaaagctaactgaattaattggatttccttggtcaaaggcactgccggtggatggaaataagattcatttccaataaaaatataagttgaccgtgtatagtcactgtatggcctatgttcctaataatagaatgccatgtatctcctgctctcctgaaatctaatatgactaaatgcttcaaggttttattgcattataccaaagcatattttctttaggtaagaaaagcattctgtgatctactgatcaaggataatcaaacctcttatgatctaaaacctggagattaggtcttctataaattacattaaagaaaacctgcccttgtaccccattgaaagggaccatacaaagtttttctcaccacacaaactgaaaaaacaaaacccctgggggcctcaaatcttgggtctgcatctcacaagttaaaagggtttctcatattcttggaactgtacatccatgggagaccttaatgtaaaactaagcaggcaagtttctcccccaaagcagacagcattgtagaccgacagcttttccaagaccacagatcaagacttctctgccatcatgaaactcttgcccatctaaattttttccttgcttatgcccatctctttggctgggcaggataatgctgtaattagaattttgcaatcactagcatctgtgggtaaattgatgaagagttgaatctttcacgccaaacctagatctgtgcatgatctaaagaatcatttagttcagccagtaactttggcaacatctctaatgtaactgttgttcaaattgtactagtgaggtaagattcctagacctatttgttctcataaccttttttaatttaacctagtcattctatacaagaamctagaccaataagtatatcacaagacagatttgcaccaacatcccaaatggagtgtcttcgaaaactgacttatgtgccaggatagtatagttctcttttaatctgtaagaactctgccttagattcttggatagaaactgtaaatttcact

SEQ ID NO: 70963 - DNA, 920 bp, Homo sapiens
catttataaaataatcaaaagtgctgaggccatatggtaaaaggtccaaggttcgctaactcctttccccagtctctccttttgacttccatttctatcccacgtcttggggtatttatttatcttaagtttagatgaggccctgcaatccctgaaggagacatggaaagattcagttctgaagagggacttgggagaaaaccatatttcatgcccattggcatttgggaggctgtcgaactgtctgttgggaagtttcttgcagagtaaaaacagagagtttgagggtggccaagcatttgacttcccatctgacttgggtgcgttgttgaagctctcagcacctccagctcaccatctgcaggatagatcatcagaatgtaacagaccatttattctgatgaccttgttttattgatgtagaaattgaggccctgaaagtaaagcaatgttcccaaggtcacagcatgagttagaatttccaatcagagaccacattctcagccatccctttccctcttttaagtcaagcatgagttggtgacaagaaagaattctgataattgtgggtaacagtgcacaattcaattactttgtggatttttagccacacaatgaatttagtttgctgcagtggcaagattatgggcataggtttcaagcagaccttagctgagtccttattttttattcaacagctgtgtatttctttagcctatgggcaaccttctgtttccttctttgtaaaacaaggatagtaatatctgcttcctggaatttttactacattraactgtaatttgatagcatatcctaaggagtggagcatagtgctagacacagtgaggactctaaaaaatccttgtctcctcctacaacctctttgaggctgtgataatcacatttagagttcaatcgtt

SEQ ID NO: 70964 - DNA, 2009 bp, Homo sapiens
atgcatgctcaaaaaaattcttatcgatagaggaattctgtgactgtaaaagygtgtctggagacatcccaagtgtggggctcttgatgtacgtaactccctggatcctcaattttctctactgtaaaatggtaataattccacctactttgtaaggttgttctaacgactagagacaaagcatctaaagtgcccatcacagagcctggtactggatgtagctgtcatcatcatcacagccatcgtcatcatcattctcatcatcattacaccatcctcatcaccatcatcatcaccaccaccactgatatagtttggaatatgtatctgtgtctcttcccaaatctcatgttgaattgtaacccctcgtattgcaggtggggcctggtgggaggtgactggactttggaggtgaatttctcatgaatggtttagcgccattcctctggtgctgtctgccaggtagtgagtgagttctcctgagatctggctgtttaaaagtgtgtggtgtctcattctctcactctcttgctctgtctctcactcctgctttcaccatgtgacttccaccatatttgaaagcttccggaggcccccccagaagtggatgccagcactatgcttcctgtatagcctgcagaaccgtgagccaattaaacctcttttcttataaataatccagtctcagggatttctttatagcaatgcaaggacagccttcaccatcatcaccaccatcatcaccattaacatctttattaccacacccacaagcaatcttctgtgatccctttcaacagtgtacagcaatcagtgaatcactgaagttgttttttaattacaagtccccttaagaaaatctgtaagagcttcttgcatggcacagagctctcttggatgcactttctcctttttcatccctcctacacttcatgcatgctgtagagcaaggcctcaccaactccaacagacagatgatgcatttgaatgaagcgagtcacagggaccgggaagagcttcagaatgacagcctgtttaaagggccagcctgagaaacagagggagaccatgtctcaaaaaactaaaataaaaataaaaaatgaaaaacaaaccaaaaaaattaagagtggctgcttcccagcaccatgcaatagttgccatataggaagatgggcacagtgaggccatagcatcctatctccgagaaaatccagaaatgggccaggcgcggtggctcacgcctgtaatcacagcactttgggaggccgaggttggggggatcacctgaggtcaggagttcaagaccagcctggccaacatggtgaaaccccatcaccactaaaaatacaaaaaaaaaagaaaaaaaaaaaaagaaaaagaaaataaccaggcatagtggcgggcgcctgtaatcccaattacttaggaggctcaggcaggagaatggcttaaagccaggaggcggaggttgcagtgagccaagattgcaccattgcactctagcctgggcgactaaagtgagactatgtcccaaaaaaagaaagaaagaaaaagaaaaaccagaaatggagatacttttcagtgaaatctttctttttttttttttctgcatcaatctgttacagtgcctaaaatagcactttggagttgtgtttcttgagttttacaagcttttccgccttagggggtcccctgttgaaaagaaaatgtccatgagggaggagtacattaggtctcaactgacatctaaaaagaaatttacatgtcagtcttttgagagtgagatacaagacaagaaaggtgggggtggggagcagggctagagtagggggcaggaagggaccaaaagacaaactgaggggaattccaagggtctgtttaacattacctacacccccgctttgctaagactggcttttactctggaaaacgggattatttgcttttgaatatctacaccttctccttttcctctgtacactctccccactcatcccctccaatctcct

SEQ ID NO: 70965 - DNA, 2009 bp, Homo sapiens
atgcatgctcaaaaaaattcttatcgatagaggaattctgtgactgtaaaagtgtgtctggagacrtcccaagtgtggggctcttgatgtacgtaactccctggatcctcaattttctctactgtaaaatggtaataattccacctactttgtaaggttgttctaacgactagagacaaagcatctaaagtgcccatcacagagcctggtactggatgtagctgtcatcatcatcacagccatcgtcatcatcattctcatcatcattacaccatcctcatcaccatcatcatcaccaccaccactgatatagtttggaatatgtatctgtgtctcttcccaaatctcatgttgaattgtaacccctcgtattgcaggtggggcctggtgggaggtgactggactttggaggtgaatttctcatgaatggtttagcgccattcctctggtgctgtctgccaggtagtgagtgagttctcctgagatctggctgtttaaaagtgtgtggtgtctcattctctcactctcttgctctgtctctcactcctgctttcaccatgtgacttccaccatatttgaaagcttccggaggcccccccagaagtggatgccagcactatgcttcctgtatagcctgcagaaccgtgagccaattaaacctcttttcttataaataatccagtctcagggatttctttatagcaatgcaaggacagccttcaccatcatcaccaccatcatcaccattaacatctttattaccacacccacaagcaatcttctgtgatccctttcaacagtgtacagcaatcagtgaatcactgaagttgttttttaattacaagtccccttaagaaaatctgtaagagcttcttgcatggcacagagctctcttggatgcactttctcctttttcatccctcctacacttcatgcatgctgtagagcaaggcctcaccaactccaacagacagatgatgcatttgaatgaagcgagtcacagggaccgggaagagcttcagaatgacagcctgtttaaagggccagcctgagaaacagagggagaccatgtctcaaaaaactaaaataaaaataaaaaatgaaaaacaaaccaaaaaaattaagagtggctgcttcccagcaccatgcaatagttgccatataggaagatgggcacagtgaggccatagcatcctatctccgagaaaatccagaaatgggccaggcgcggtggctcacgcctgtaatcacagcactttgggaggccgaggttggggggatcacctgaggtcaggagttcaagaccagcctggccaacatggtgaaaccccatcaccactaaaaatacaaaaaaaaaagaaaaaaaaaaaaagaaaaagaaaataaccaggcatagtggcgggcgcctgtaatcccaattacttaggaggctcaggcaggagaatggcttaaagccaggaggcggaggttgcagtgagccaagattgcaccattgcactctagcctgggcgactaaagtgagactatgtcccaaaaaaagaaagaaagaaaaagaaaaaccagaaatggagatacttttcagtgaaatctttctttttttttttttctgcatcaatctgttacagtgcctaaaatagcactttggagttgtgtttcttgagttttacaagcttttccgccttagggggtcccctgttgaaaagaaaatgtccatgagggaggagtacattaggtctcaactgacatctaaaaagaaatttacatgtcagtcttttgagagtgagatacaagacaagaaaggtgggggtggggagcagggctagagtagggggcaggaagggaccaaaagacaaactgaggggaattccaagggtctgtttaacattacctacacccccgctttgctaagactggcttttactctggaaaacgggattatttgcttttgaatatctacaccttctccttttcctctgtacactctccccactcatcccctccaatctcct

SEQ ID NO: 70966 - DNA, 2009 bp, Homo sapiens
atgcatgctcaaaaaaattcttatcgatagaggaattctgtgactgtaaaagtgtgtctggagacatcccaagtgtggggctcttgatgtacgtaactccctggatcctcaattttctctactgtaaaatggtaataattccacctactttgtaaggttgttctaacgactagagacaaagcatctaaagtgcccatcacagagcctggtactggatgtagctgtcatcatcatcacagccatcgtcatcatcattctcatcatcattacaccatcctcatcaccatcatcaycaccaccaccactgatatagtttggaatatgtatctgtgtctcttcccaaatctcatgttgaattgtaacccctcgtattgcaggtggggcctggtgggaggtgactggactttggaggtgaatttctcatgaatggtttagcgccattcctctggtgctgtctgccaggtagtgagtgagttctcctgagatctggctgtttaaaagtgtgtggtgtctcattctctcactctcttgctctgtctctcactcctgctttcaccatgtgacttccaccatatttgaaagcttccggaggcccccccagaagtggatgccagcactatgcttcctgtatagcctgcagaaccgtgagccaattaaacctcttttcttataaataatccagtctcagggatttctttatagcaatgcaaggacagccttcaccatcatcaccaccatcatcaccattaacatctttattaccacacccacaagcaatcttctgtgatccctttcaacagtgtacagcaatcagtgaatcactgaagttgttttttaattacaagtccccttaagaaaatctgtaagagcttcttgcatggcacagagctctcttggatgcactttctcctttttcatccctcctacacttcatgcatgctgtagagcaaggcctcaccaactccaacagacagatgatgcatttgaatgaagcgagtcacagggaccgggaagagcttcagaatgacagcctgtttaaagggccagcctgagaaacagagggagaccatgtctcaaaaaactaaaataaaaataaaaaatgaaaaacaaaccaaaaaaattaagagtggctgcttcccagcaccatgcaatagttgccatataggaagatgggcacagtgaggccatagcatcctatctccgagaaaatccagaaatgggccaggcgcggtggctcacgcctgtaatcacagcactttgggaggccgaggttggggggatcacctgaggtcaggagttcaagaccagcctggccaacatggtgaaaccccatcaccactaaaaatacaaaaaaaaaagaaaaaaaaaaaaagaaaaagaaaataaccaggcatagtggcgggcgcctgtaatcccaattacttaggaggctcaggcaggagaatggcttaaagccaggaggcggaggttgcagtgagccaagattgcaccattgcactctagcctgggcgactaaagtgagactatgtcccaaaaaaagaaagaaagaaaaagaaaaaccagaaatggagatacttttcagtgaaatctttctttttttttttttctgcatcaatctgttacagtgcctaaaatagcactttggagttgtgtttcttgagttttacaagcttttccgccttagggggtcccctgttgaaaagaaaatgtccatgagggaggagtacattaggtctcaactgacatctaaaaagaaatttacatgtcagtcttttgagagtgagatacaagacaagaaaggtgggggtggggagcagggctagagtagggggcaggaagggaccaaaagacaaactgaggggaattccaagggtctgtttaacattacctacacccccgctttgctaagactggcttttactctggaaaacgggattatttgcttttgaatatctacaccttctccttttcctctgtacactctccccactcatcccctccaatctcct

SEQ ID NO: 70967 - DNA, 2009 bp, Homo sapiens
atgcatgctcaaaaaaattcttatcgatagaggaattctgtgactgtaaaagtgtgtctggagacatcccaagtgtggggctcttgatgtacgtaactccctggatcctcaattttctctactgtaaaatggtaataattccacctactttgtaaggttgttctaacgactagagacaaagcatctaaagtgcccatcacagagcctggtactggatgtagctgtcatcatcatcacagccatcgtcatcatcattctcatcatcattacaccatcctcatcaccatcatcatcaccaccaccactgatatagtttggaatatgtatctgtgtctcttcccaaatctcatgttgaattgtaacccctcgtattgcaggtggggcctggtgggaggtgactggactttggrggtgaatttctcatgaatggtttagcgccattcctctggtgctgtctgccaggtagtgagtgagttctcctgagatctggctgtttaaaagtgtgtggtgtctcattctctcactctcttgctctgtctctcactcctgctttcaccatgtgacttccaccatatttgaaagcttccggaggcccccccagaagtggatgccagcactatgcttcctgtatagcctgcagaaccgtgagccaattaaacctcttttcttataaataatccagtctcagggatttctttatagcaatgcaaggacagccttcaccatcatcaccaccatcatcaccattaacatctttattaccacacccacaagcaatcttctgtgatccctttcaacagtgtacagcaatcagtgaatcactgaagttgttttttaattacaagtccccttaagaaaatctgtaagagcttcttgcatggcacagagctctcttggatgcactttctcctttttcatccctcctacacttcatgcatgctgtagagcaaggcctcaccaactccaacagacagatgatgcatttgaatgaagcgagtcacagggaccgggaagagcttcagaatgacagcctgtttaaagggccagcctgagaaacagagggagaccatgtctcaaaaaactaaaataaaaataaaaaatgaaaaacaaaccaaaaaaattaagagtggctgcttcccagcaccatgcaatagttgccatataggaagatgggcacagtgaggccatagcatcctatctccgagaaaatccagaaatgggccaggcgcggtggctcacgcctgtaatcacagcactttgggaggccgaggttggggggatcacctgaggtcaggagttcaagaccagcctggccaacatggtgaaaccccatcaccactaaaaatacaaaaaaaaaagaaaaaaaaaaaaagaaaaagaaaataaccaggcatagtggcgggcgcctgtaatcccaattacttaggaggctcaggcaggagaatggcttaaagccaggaggcggaggttgcagtgagccaagattgcaccattgcactctagcctgggcgactaaagtgagactatgtcccaaaaaaagaaagaaagaaaaagaaaaaccagaaatggagatacttttcagtgaaatctttctttttttttttttctgcatcaatctgttacagtgcctaaaatagcactttggagttgtgtttcttgagttttacaagcttttccgccttagggggtcccctgttgaaaagaaaatgtccatgagggaggagtacattaggtctcaactgacatctaaaaagaaatttacatgtcagtcttttgagagtgagatacaagacaagaaaggtgggggtggggagcagggctagagtagggggcaggaagggaccaaaagacaaactgaggggaattccaagggtctgtttaacattacctacacccccgctttgctaagactggcttttactctggaaaacgggattatttgcttttgaatatctacaccttctccttttcctctgtacactctccccactcatcccctccaatctcct

SEQ ID NO: 70968 - DNA, 712 bp, Homo sapiens
taccataattatatcatacttgtaggaagtacagcaagatataatagtgctctaggtaagcataggggataaatttgtgtcagaagacaggaggtatttttcataaaaatacagacttgagccaccagagggaagtttgcaggactcagtggtgaggacattgtgaaacattctctccaaattgaaagacagcttcctataccttttctccctgtccccatcaaatcccagatttaaaggcatgttgttggcaagtctctgggttttttaaaaatttattattatactttaagttctagggtacatgggcacaacrtgcaggtttgtcacataggtatacatgtgccttgttggtttgctgcacccatgaactcatcatttacattaagtatttctcctaatgctatccctcccccagtcccccaccccctaactggcccaggtgtgtgatgttccccgccctgtgtccatgtgttctcattattcaactcccaactatgagtgagaacatgcagtgtttggttttctgtccttgtgatagtttgcttagaatgatggtttccagcttcatccatgtccctgcaaaggacatgaactcattcttttttatggctgcatagtattccatggtgtatatgtgccacattttcttaatccagtctatcattgatgaacatttggattggttccaagtctttgttattgtgaatag

SEQ ID NO: 70969 - DNA, 577 bp, Homo sapiens
gaaaatgtcttccgtgagctgggggtggaaagttgttgtggaagtaaccctgaaggaaaaaagagttctctggctggcttggcccagagatacaggctggaaattagtaagaagagcagattttgaggccagcatttctctagctaacttctagcccagcgccccttttccatcctactatttcatacatgacccccaagggaagccatatcaggttcctagagttgggagaagagagactcagggggaacctgtactgaagtgactgtggcagaggcagggtgaggctgaagagcaccagaacatgagacatttccccgctgtcacttagtaacaagggccctgtgatgattaattttatctgtcaacttgagggaggctgaggcacaagaattgcttgagcctgggaggtrgaagttgcagtgagccaagatcgtgccactgcactccagcctgggcaacaaagtgagactccatctcaaaaaataaaataaaaatacaatacaatacaataaaattggccgggcacagtggcttacacctgtaatcccagtactttgggaggccgaggtggggg

SEQ ID NO: 70970 - DNA, 658 bp, Homo sapiens
gactgaagataatttcagtcctgttattcttttacccatgtgagaaaaagaaggaaaactaatagtaaaagaataaagagattcctgcatttagatgagcatctgtcacattcttcagtaaccccgggagtttctcaaaggaggcctgtcagctgcctcaaagtataatatcagaaccatctgggggattggtttagaatgccaatgcctgcactctgcccagatctcctgattctgtcccaggaaattttttttttttttttttttttttttttgagacagagtcttgctctgtcacacaggctggagagcagtggygccatcttggctcaccacaacctctgcctccggattcaagcaattctcctgcctcagcctcccgagtagccgggattacaggcacccgccaccacacccagctaatttttgtatttttagtagaaacagcgtttcaccatgttggtcaggctggtctcaaactcctgacctcgtgatccacctgcctcagcctcccaaagtgctgggattacaggcacgagccactgagcccggccaactctagaatattttagttaaccaggaggctcttatgtggtgcaatttgagaaccaccaacctctagacactttcactaatttcagtgtattattaaatctaa

SEQ ID NO: 70971 - DNA, 765 bp, Homo sapiens
ctctctctctctctctctcattcacttccatctaatacctgctggtcatcagaggccatggtcagctcctcgctgtccccgagtgcagatggttactgcttggcactgagtctggacttggcatttcccagggcactgcctcctgtgagacctccccagtaggccctctttcccaactacattttagccctcaagtgggaaccttagagaccccagttaaagtaattataggcaggagatttggggctgactctgaaaccagatatctccatgcctggaatgtgggagggaggaaggtgagggccgtgggatgttgaaccctcttaacctgatcaccttagtcctcggaagatattccttctggaagctctgaccagctgtgcacatcctcccgggactaatactgcattttaccgactttcatatcaaaagtgaggaaacatgaaatgtttacatccaatgagtggtatcagaaacctgataaattctacaaataaatgcagtctttctctcggtacaaaatatttcaagatcactagtcatgtttgctgttgttttttttcttagtcaaaaaacctatactcacttcagatgcctctatctctgtctgctctgccacaccttagacttaacagctctaagaagggggctgaggctccacctcggagcgggtaatgctgcctggcagagactgcctctggaccrccagtctcagagggggatgtccacgtgtctgcacatcagcacaggttatctagccagaga

SEQ ID NO: 70972 - DNA, 496 bp, Homo sapiens
agctttgcctgaagtcaagatatggttatggacttcttttaaataagtcaacaaaatttcctttatgaatcaggtcagtttgatttaggtctctgttctttggaatataagagctattgcctaaaccagaattgttcatcaatgtacttagtttttatcagatgcttttaaggagsagacaaggaaaatacatagaaatctccactctggtattggaccattgatggcacttgtcctcttttctcctggtgtttatgaaaaaccttctgatggcttttatacttctttggctattgcacattccatcttaaatcctttccttaagatggttagcatgatctcagcattgtgttttctctttcctccaagtgtggaattcaccagatttgtctcttgtcatccagatcagcggccaagtacgtttcttcaagttggcttctagaccatcttcacaacagaatgaacaaatctttcagatgtttacatttattcaccc

SEQ ID NO: 70973 - DNA, 602 bp, Homo sapiens
tatgccttagcctgtaaggctgaaagtgcctcctgtgcgaatgagtagctagaacacaaagagcacctacggcccgttccacccctgtgccccatggggaatattccgggtgtctttccccagccccaagttgagacctgcagctatgacggtagggacccaagggggacagtagctccccgctgctcttgagggccaggaactaataataaaccatgtggccatttcataggaaccacttcaaatttttttctcaaaaaccgaaaaagttcctgagaaatcgtggacagcagaggrgttcttcattgtaccttttttcttggggcatgtaacctggacccggggaggtgagggtctggccagggtcacagctaaggacatgtgtcctggctcagagagcagagcagtgctcgcccactagccagctcaggtgggctctagaatttagtctggtggagaagtgcccagcccacacaggtgacagctcttactacactccaggtgctgtcggcttatcagatgttatttaattctcgcagcagcctatggggtagttgagtagtgtggctggaatgtcaggggtgtgtagggacgccttagga

SEQ ID NO: 70974 - DNA, 1237 bp, Homo sapiens
tctcaaccttataaagatagctattccttaaaactatttagacttaaaacattagcttctggcctcccttactcatctcatggcccaccagtgggcctcactgcactgcttgggaaactaggttttaggggaactcaaagaaggctcagagcctggcagctgcatacataggcccactacacatatgtgagatgtgctttgacatctgcgtgttttccccattgtgaggatgtgggctcccattcaagcttggtgctgagcctggcacatcctgattgggccacatactctttttaaaagaatagcaaagctcacgactcatggccaggcagtatatgatcagtgccatacatgcagaggccctagtgcctgagraactcagaggaggacacaggcttgttcttaggacactctctctggtcatgactgttccaatcagcctgtatcaaccagtgggggtcccatctgagttgtccaccctccctctgaaatgtccaacacccccatcagaatcatccagacctctgctgtttcctatttctagggggaagtgactctgctttggactggtggcatcaggcaaaaagagtgctctccgcaggtttggtgccacaagtgggactaagcagggttttgagggtcttaatcacccttctcaggacacagcaagagttatgaattaagagtctggagggaagtggggaccttaacttgggaataaccctagctcctggccctgtagccacttttcctgtccacatggggtttcaggctgacaagtcccctgacatggcccaagggggacttaagaggttcctaagagtgctgagggtgtcaccatgggtggggtgttaaaggaacttcctctggagtgatgtccttctcttgaactaggagtatctaatttggtccaggtgagcttttcagtttagggtagtgaagggcggtccctggatcagaagcgtcagcatcacctgggagcttgtttggaatgcaaattattcaggccagacctcccactgaattgaaaattctgagactatggccaagcaatcaagcctccccaggtgactgtgaggtaggctcaagtttgagaaactttagaaatcgactccttaaaaaatcccagccagaaacggcgggtcatacctgtaatcccagcactttgggagactgacatgggaggatcccttgagcccaggagtttgagaccagcctgggcaacatagggagactc

SEQ ID NO: 70975 - DNA, 1237 bp, Homo sapiens
tctcaaccttataaagatagctattccttaaaactatttagacttaaaacattagcttctggcctcccttactcatctcatggcccaccagtgggcctcactgcactgcttgggaaactaggttttaggggaactcaaagaaggctcagagcctggcagctgcatacataggcccactacacatatgtgagatgtgctttgacatctgcgtgttttccccattgtgaggatgtgggctcccattcaagcttggtgctgagcctggcacatcctgattgggccacatactctttttaaaagaatagcaaagctcacgactcatggccaggcagtatatgatcagtgccatacatgcagaggccctagtgcctgaggaactcagaggaggacacaggcttgttcttaggacactctctctggtcatgastgttccaatcagcctgtatcaaccagtgggggtcccatctgagttgtccaccctccctctgaaatgtccaacacccccatcagaatcatccagacctctgctgtttcctatttctagggggaagtgactctgctttggactggtggcatcaggcaaaaagagtgctctccgcaggtttggtgccacaagtgggactaagcagggttttgagggtcttaatcacccttctcaggacacagcaagagttatgaattaagagtctggagggaagtggggaccttaacttgggaataaccctagctcctggccctgtagccacttttcctgtccacatggggtttcaggctgacaagtcccctgacatggcccaagggggacttaagaggttcctaagagtgctgagggtgtcaccatgggtggggtgttaaaggaacttcctctggagtgatgtccttctcttgaactaggagtatctaatttggtccaggtgagcttttcagtttagggtagtgaagggcggtccctggatcagaagcgtcagcatcacctgggagcttgtttggaatgcaaattattcaggccagacctcccactgaattgaaaattctgagactatggccaagcaatcaagcctccccaggtgactgtgaggtaggctcaagtttgagaaactttagaaatcgactccttaaaaaatcccagccagaaacggcgggtcatacctgtaatcccagcactttgggagactgacatgggaggatcccttgagcccaggagtttgagaccagcctgggcaacatagggagactc

SEQ ID NO: 70976 - DNA, 656 bp, Homo sapiens
taaatagacatgtatatttagccactggaacccaaacgcacatatactacatatacactaatataatttataaatatttgtatatttataaatatgtagatatgtttattaaagagtaaacactctttttattccaaagatgttccacgagaattaaccattttatttcttttaacagaagtaaacttgtaaaatgaatttctattttctcatggcaaaaacttttttttcggaaaataaggggaaatttaaagaagaaaatagagaagcctgtgtcaaatagcttagatcaaaccactgttagcatttgctatgtagccttccagatgtttatatataagaatatttacatatttaaagtacaaaaatgggaacatattatatccaaagtttggatacctcctttctttaaaacttagcatgccatgaatgagaacacatggmcacaggaaggggaacatcacactctggggactgttgtggggtgcggggaagggggagggatagcactgggagatatacctaatgctaaatgacgaattaatgggtgcagcacaccagcatggcacatgtatacatatgtaactaaccaacacattgtgcacatgtaccctaaaacttaaagtataataataaaaaaaaaccttagcatgcca

SEQ ID NO: 70977 - DNA, 721 bp, Homo sapiens
atggtttatgcctgttgcccagtgtaattgttaacagtgcctcttcactctcaaacgtgtcccagtttagatgacaaattatctgctcatcatatttataatagagattggcagaaaactagaatttgctttaaatagatacatttattcagtaatgtgtaagggatgttttgttagattcaattttattgacttcttgtgaatatggaaaaattggaatttaaatgaaaaatggttcatctattaaactaaagagagacacttctgttctttgaagacattattatacctattttagctttttcattagtagaggaagttttgctatattatcctagatcatgctattgcttctacattgtgctaataatcattttaaatctatattctaaaccactattttttttagctccataaggttatacaaactcaaatttggcaaattgtctgttacatgtaagtaaatattttatrtttacttaaatataaatataaaccctgtctcattctgttgcctaggccggaatgccatggtgtgatcatgattcactgcagcctccacctcctggatttaagcaatcctcccacttcagcttccctagtagctgggactacaggtgtgcacaaccagacccagctaatttttacattttttgtagagacagggttttaccatgttgcccatggtgatcttatactccaggctcaaatgatcctcctg

SEQ ID NO: 70978 - DNA, 646 bp, Homo sapiens
gatccatcacatcacatgtgtttcataagttgcccttttgtatagcaatgtacttaaatatctctgactacatcttgtcaatgtgcttttttctcaaaataattttaaaaatagttttatctagctcattttttaaatcttaaaagcaatgcatatttactgcaaaataattcagaaaacrtacattaaaaagatatcgtctttcgtactactgccaaaagttgctgaagcttgttttacagggcacttgaaagaaggtatttataagccaggcgcggtggtgcgtgcctgtaatctgagcattttggaaagcagaggtgggcagatcacctaaggtcaggagttcaagaccagcctggccaacatggtgaaaccctgtctctactaaaaataaaaaaattagctgtgtgtggtggcgggagcctgtaatcccagcaacttgggaggctggggcaggagaatcacttgtgcccgggaggtggaggttgcagtgagaagagatcgagccactgcactccagcctaggtgacagagcgaggctccatctgaaaaaaaaaaaaaaaaaaaaaaaaaaaaaaagaaggtatttatgctaaaataggtttaggaaattgggggttaaatgcacataaacaggttttctttt

SEQ ID NO: 70979 - DNA, 647 bp, Homo sapiens
tgaaacaaaaacaaaaatatcttgtccattggtgattgctattgaattttaaaattagctagaagttttttcctccagctatatatatatataattactatttctttttttgagatagaatctcgctctgtcacccaggctggagtgcagtggkacgacctcggctcactgcaagctccgcctcccgggttcacgccattctcctgcctcagcctcccgagtagctgggactacaggtgcccaccaccacgctggctaatttctttttgtatttttagtagagatggggtttcaccgtgttagccaggatgatctcggtctcctgttctcgtgatctgcctgcctcggcctccttatatttatagtttttagagactgcctcactctgtcaaccagtctggagtgacatgataatagttcactgcagccttgatctcttgggcttaagcaatcctcctacctcagcttctagagtagctgggactacaggtgtaccacactgcactggccaggatcacttcttattatagaaagtagaatgtagactggtggtgttgtaaggactgcttacctgttccggtccacagggccttccacatacacacacatgtcctggtagctacacatactttctataaagtttaggg

SEQ ID NO: 70980 - DNA, 647 bp, Homo sapiens
tgaaacaaaaacaaaaatatcttgtccattggtgattgctattgaattttaaaattagctagaagttttttcctccagctatatatatatataattactatttctttttttgagatagaatctcgctctgtcacccaggctggagtgcagtggtacgacctcggctcactgcaagctccgcctcccgggttcacgccattctcctgcctcagcctcccgagtagctgggactacaggtgcccaccaccacgctggctaatttctttttgtatttttagtagagatggggtttcaccgtgttagccaggatgatctcggtctcctgttctcgtgatctgcctgcctcggcctccttatatttatagtttttagagactgcctcactctgtcaaccagtctggagtgacatgataatagttcactgcagccttgmtctcttgggcttaagcaatcctcctacctcagcttctagagtagctgggactacaggtgtaccacactgcactggccaggatcacttcttattatagaaagtagaatgtagactggtggtgttgtaaggactgcttacctgttccggtccacagggccttccacatacacacacatgtcctggtagctacacatactttctataaagtttaggg

SEQ ID NO: 70981 - DNA, 773 bp, Homo sapiens
ttttaacgtgaaaatgaatctaggagatatctactgagaaactctgtttttacctcaactttatttatcaaatatttaccaaasatttttgtagcacttagcaggagaggtgccttcattattcttttcagctcttaaacctttcttactctccttcacctcgtcctgcatgtctataagcgcgaactctattgaagtcattttaaaaatacactatttttcaaatgacaatactgcattttttttctttttctttctttctttctttttttttttttgagacggaatcttgctctgttgccaggctggagtacagtggcgccatctcggctcactgcaagctccgcttcccaggttcaagtgattctcctgcctcagcctctcgagcaactgggactacaggcgcacaacaccacaccaagctaatttttgtatttttagtagatacggggtttcactatgttggccaggatggtctcaatctcttgacctcgtgatccacctgccttggcctcccaaagtgctaggattacaggtatgagccactacacccagccgacaatactccatttttaacgaagtttagttatggagtctgtaggcagggttttcattatgtttagtaggaattaagcctgtatgtgagcataaagctatagtcaataattttaccccctttatgactgtaaaatttgggccagtcaccctacctggttaattctctgcagtatttaaggtatctatctcaagttgattctaaggttaggcacttt

SEQ ID NO: 70982 - DNA, 773 bp, Homo sapiens
ttttaacgtgaaaatgaatctaggagatatctactgagaaactctgtttttacctcaactttatttatcaaatatttaccaaacatttttgtagcacttascaggagaggtgccttcattattcttttcagctcttaaacctttcttactctccttcacctcgtcctgcatgtctataagcgcgaactctattgaagtcattttaaaaatacactatttttcaaatgacaatactgcattttttttctttttctttctttctttctttttttttttttgagacggaatcttgctctgttgccaggctggagtacagtggcgccatctcggctcactgcaagctccgcttcccaggttcaagtgattctcctgcctcagcctctcgagcaactgggactacaggcgcacaacaccacaccaagctaatttttgtatttttagtagatacggggtttcactatgttggccaggatggtctcaatctcttgacctcgtgatccacctgccttggcctcccaaagtgctaggattacaggtatgagccactacacccagccgacaatactccatttttaacgaagtttagttatggagtctgtaggcagggttttcattatgtttagtaggaattaagcctgtatgtgagcataaagctatagtcaataattttaccccctttatgactgtaaaatttgggccagtcaccctacctggttaattctctgcagtatttaaggtatctatctcaagttgattctaaggttaggcacttt

SEQ ID NO: 70983 - DNA, 773 bp, Homo sapiens
ttttaacgtgaaaatgaatctaggagatatctactgagaaactctgtttttacctcaactttatttatcaaatatttaccaaacatttttgtagcacttagcaggagaggtgccttcattattcttttcagctcttaaacctttcttactctccttcacctcgtcctgcatgtctataagcrcgaactctattgaagtcattttaaaaatacactatttttcaaatgacaatactgcattttttttctttttctttctttctttctttttttttttttgagacggaatcttgctctgttgccaggctggagtacagtggcgccatctcggctcactgcaagctccgcttcccaggttcaagtgattctcctgcctcagcctctcgagcaactgggactacaggcgcacaacaccacaccaagctaatttttgtatttttagtagatacggggtttcactatgttggccaggatggtctcaatctcttgacctcgtgatccacctgccttggcctcccaaagtgctaggattacaggtatgagccactacacccagccgacaatactccatttttaacgaagtttagttatggagtctgtaggcagggttttcattatgtttagtaggaattaagcctgtatgtgagcataaagctatagtcaataattttaccccctttatgactgtaaaatttgggccagtcaccctacctggttaattctctgcagtatttaaggtatctatctcaagttgattctaaggttaggcacttt

SEQ ID NO: 70984 - DNA, 1180 bp, Homo sapiens
gctccttgtttacttgcttatcgggctatacttattaaggagrggaaagtaggagtcaatttaataaggagtatggctaagtttgagttttaatgttattgtggttgccttatttcagagttttagaaccttggtgtcactgacatttttgtctggagaattctttctttgttggtgatggtggtggcagtggtcatggtagtcctgtgtactatagaaggttctgcagtatccctggcctctatccactcaatgccggtagcactttcccattcccaggtgtgccaattaaaaggatctccaaatattgtcaaaatttccctgtgagtcaaattgccctcatttgaaaaccaaaagcttcaaatcctctaaaaatgccctgtttttgtaatagtatgtttagagggattttcctcaatgttcatgccccacccaaggctgtcagctggtctggtgtatgtgagtcacaatcttgtctctcctccaacactacttgacatttctagtgttaggggcagaggcacttgctctgttttcttggtcttagttagactctgtgaactcaggcaccaggaatgagtccttcccaggaaccctctttttctcttcatggctcctaaattctgccttatgtctatggagggtttttgtgggaaatcatttcctgaccctgctccagcagtctcagaattctgaaggtatttgtataagatcctgggttataaaatgtttccttcttgtcctatcccccactcttaaggtggaggagagtttttcttttatctttcctcccctcccactcccccaaaaaggaaacaacacaaaaatgagttctacatgtgctttggaagtgggagtatgacaagatttactatacttcccccaatggctgaaggaaaggtgctaattaagagagaagttttataatgtgatacatatacaccatggaatactatgtggccataaaaaggaacgagattatgtccctcatagggacgtggatggatctggaagccattaaccttggcaaactaacacaggaacagaaaaccaagaaccacatgttctcacttataagtgggagctgaacaatgagaacacatggacacagggagggaaacaacacacactggggcctgttgcggggagcgagggtagggagagcatcaggataaatagc

SEQ ID NO: 70985 - DNA, 750 bp, Homo sapiens
ttagggtttataactgagagtggattgctaattatcataggatatgcacatatgttcagtgttagtagctattgctggacacttttccacagtgtttgtaccaagttctactcccactagctttgtatgagaaattcatttgctccacatcttttacatttagaattgtcagtcttttcattttagctattgtggtggttgtgtatttcatagtggttttaattgcatttccctgaagaccaatgtggttgagcagcttttcatatgtttattggtccttcaggtcactccttttgtgaagagcctctmtttaagtcttttgcctgttcgtgtctgagagtcatctgtctttgtctaccaggagttctttatatattctgaataggagtcttttgccagatatatgtacagcaaatatattcttccactgtgttacttacattttcgctctcttaacagtgcttttgatgaacagaagtttttttttaaaaatgtaatatagtctagttcatgaatctttttccattatgatttctacttaaaaaaatctcatcatagaatcttttaaaatggcatttgtagagcgagatttttcctatatagcagtaaggcttttattagatatgcttttattagatagccaatggtagattggagtggaagtagggttttgtaaatgaagctgtcaataagttttgtttttctttaaggaaaaaattaaagatgaatgaataggaacatttttgtatt

SEQ ID NO: 70986 - DNA, 767 bp, Homo sapiens
gatccctccctcataattaaaagtgagaattattgaactgagttgtaatccttacattcagtacttggggccaatttaaggaattttccttagccgttgtactaatttttgaaccaacccctaccatcattcacatcaccaccactataatcaagatgtgtgattctgggcatctcacccaattaacttctccttggcttcctaatctacacaatgaaaaacaggactaagtgatggctaagatccccttcarcaattaaatagtatgattctagaaagagaggatttacgttttgctttcctagagattctaatggaagaaatgagcaagtcatgctagatttcagcataaaaagaacggcagtgtcaaatttttctaagctaactctcaaatatccttaaaactcccattgtagaaggtaaacttacacgttttggaagagagattagaaatcagaagctggtttgtcaatttgcagcctcaggtttcaggcctgaggcctgagcctgggtcttgtttgctgtggaagtacttagaacatgagtcttgtttgctgtggaagtacttagaacacggagtcctgatgttctataaatcacagataggctaagggaggagctactctttaagaagctatcctgtagctctgacaagggctagggttgtggtaatggtactggctcatccctggctacttctaggcttattttgacatggcaattttaaccacacactacactggccacatcagaggaaaacattctgg

SEQ ID NO: 70987 - DNA, 1121 bp, Homo sapiens
gtaacataggcatttactaaacttagttcaccatgaaacctgccattgctagtgagtttgtttgtttgttgtttgtttaaagacttgtgctctaaacaaatgtgatataatcaatggtatgatttacatttgaattatgaaaatttctcatctctcaacagtaccaaaccatgttctatatgtcatagggcacatgagaattattccccaaaagttaggaaaacagcaattcacatattccaccggatgccagaatggggggctttacccttacatcacaccaatatgtcctcatcattttggttaccattatctattaatattactgcatacatatttgaccaaattctgtaaaagttgaatactgagcaatgtaagaaataattgggtcaaagggaaaggtttacaaagcaggtgatcatctaacttgaaacattttactctctaccagaggaaatgcaagagttcaccattatcaaaaaaattaatatcagtaaactaaaagcatcgttaacaaaaaataaacagaagttaaaattagctactctggtgaggataaattattgtggcctctgacctcaaaagtcacactgtatacaaccaaaatagtacaagaaatttatttaatataaaacctgtttaaaaagccaaagacaaaatatctgaagtctccagctcagttggagctactacatactgaataaggaattacccccaaagaaagaattaaaacacattggaatgtaactaagccactcttaagcatttgtatattaagtgttaaaaattaatgacagcctaaaatactaaagagagttcctgtcgtaggtagttgggataatctcgccctcgccctcgcccctaaagcttctaagtcctcttccccttttttagaatatasataaggtctaagttaagaagatatttaaaatccattatgtatattagttatactaatcttagaatatattaagtattatattaaacttagtttaagatatgttaacttaatgaatatatttttggagcctaaccttatcagatcagggagatggatatattcttgcctcaactggaattctttacatccatggtaaatgtccctttataaagtgaatcaa

SEQ ID NO: 70988 - DNA, 652 bp, Homo sapiens
ccgggcgcggtggctcaggcctgtaatcccagcactttgggaggctgaggcgggtggatcacgaggtcaggagatcgagaccatcctggctaacacggtgaaaccccgcctctattaaaaatacaaaaaattagccgggcctggtggcaggcgccctgtagtcccagctactcgggaggctgaggcaggagaatggcgtgaatccaggaggcggcagtgcagtgagccaagattgtgccactgcactccagcctgggcgacagagcgagactccgtctcaaaaaaaaaaaaaaaaaaaaaaaaaaattggaaaaggaggctctggtggattgaagaagcagccctggcgtatttttcttacttaaaacttggtctgggactaactgcctctggtcagaactgatttagtytttaggaatcatttgtaagacagacactgtgggaaggccatcctttaaagccattgattcctgtaataattatttgctgaacactggctctgtgctgggcacttatcaggggctgaggatatggtggtgaacaaaaccaacagcagtcctggagctcaggctcaacaactctattccttgcacacattctagccgtggagaatgtgggttgtgtgcttctcacagccttgaaggcaagggct

SEQ ID NO: 70989 - DNA, 602 bp, Homo sapiens
ctgcccctggctagaaaagaaaaaaacagaggggaagaaagagaggtagaggaagtgaagaatgcaaaatttcccctagaaggcatgtcagctactcagaaaatctggaagattggagctgggaaatgaggagcaggccaaaatgtttaaccaaasttcttttatgatgtgccccacagaaaaaaacatcagggcatctcaccaagatcatggtcgcttctcggcctgtgatatcttgaaacatgagccatggtattttattccaaatatttctcctttggcaaggataatccctttgctttaggagccaggacacacaagtgaacccaatacaacttctgtcccaaccatgctttacatgacctcttataaaggcatgcacaagcccttcctggacaacagagggctgttttcaaagcagaggtctaccttcagtgggactaatcatttaagtagcccccaaactccgattagagaatgtctgcagaactcttgccagaggagatctgagaaactgaaatatggtacctgccaagaacaagccttttggcactgtagccacttcaagacacttggcaaatttcatcaggtgtcagcaatag

SEQ ID NO: 70990 - DNA, 729 bp, Homo sapiens
ccccatttccccctcccccagccctagtaacctctattttcctttttttttttttttttgagacagggtttcagtcccttgtcactcaggctagagtaaagtagaacaatcttggctcattgcagtcttgatctcccaagcttaagcaatcctcttatctcaggctgtcaggtagctgagactacaggtgtgtgccaccaygcctggctaattttttgtaatttttttgtagagatggggtttcaccatgttacccaggctggtctcgaaactcctgggctcaagcgatcctcctgcctcagcctcccaaagtgttgggattacaggcatgagccaccacaccggcttatattttacttgttatgactatgaattttctcatataagtggcatcatacactctatgtcctgtactgttgtgcctggcttgttttatttgacatatgtttttaaggcatcatagtcttttgaacaatctactggatgtacaagagatttgggagagatggaggacagggagtcatgattatttccttctcattgccctagaagagggccccacagagaatcagaaatggagcctcatgaaggcccatcaaactgaggtgtagcagccaggtaaaagagacacacaattatcctcactcagcaaggggccagataacaagctatgtgccccagagactccctttgcctctctggacctgtaagagatgcaggcagaagcag

SEQ ID NO: 70991 - DNA, 485 bp, Homo sapiens
ggagtactatgataaggttagacacagactaatagcattctgaaagacatatactgatacataagacacgtatagcatatatcagattcatgccccagataccgagcagtattattttcaaatacgttttttatatgcttcccctacacttacttgttcctgtttggatggcttagcagaagctccaagatgcccctttcatatacagtaataaaagatagccacagggtggcagcaaaggttaaaaaagttgagtgctgctacttcattaaaaatctcgtaaaaaataaaaataaaaataaacttaggcaatgggaacagagaagagaggagtaaaataaccatagaaacctgaaatgagaagataaaataaggtactagcacaaatcatccttatctatgggcagaattgcattcacaaccmtggaaatagctgatttttgctttaagttttattttcttagaaacaatgtattctacaagaa

SEQ ID NO: 70992 - DNA, 686 bp, Homo sapiens
atgacctagtcaattagttcaatcatggaggacaccatcttggctttatttctagcattttagctgcatccatrtttcttgtagagcatagcagcatgttttcttggagtgtcagggacacatcttagctcaaatactttttctcatcatttgctgtacctgacagcaacatgtgatagctaccattcatggaacacctactaattttcaggtactgtacttggtgttttatataatatattgcttttaaagcttgcaataagccttcaaggtaggtattattaatcctacttctacctgagaaaagtgaaaatcagagaggcaaagttacttacccaaagttacaccacttaaaagtgacagagtctgaattctaagtctgttcaactccaaagccatcataccatgttgtcaatgtcacagattggtgaggattttataaagggaaggatggctgtgtgtggaatatggaaagacaagctacaatttatcaagggaagagcactccaacatcacgtgttcccctctgtagtctcagagcttgaataccctaccctgtgcccagtagatgcttaattaaaagttcagacctctgaaggattacttctgttttggaaaatgccatgcctcttgagtcattttcattcagctcaagttgctcttttttttttttttttttttttttt

SEQ ID NO: 70993 - DNA, 436 bp, Homo sapiens
ggggttgcaataacaatcaatgtgaattggccaaaatgtgagcaaaccctgggtactgaaagcagaaaaagttaaaatagttaaaagtcagtattctgactctgctgtataggttttgtttttagattaccagttgctaatcataaagtcaaaggaaaataagaaaggaatcctaactttcctggcattttaagtcatttgtttttccatgactttaaagcttgactgttgacatgagaaggaatttgagctggggatgctttctcggtgagattgagaagcttttcttgttctgccttcatcccctgttcacccctcaattccatggtgcatgaaatcccaaatcygttcacttttttactaaattagatggagcaaaacagatttgggaattcatcttgttcatgggcttagtggatatctttgtctggggata

SEQ ID NO: 70994 - DNA, 477 bp, Homo sapiens
taattagttctcctaatattacaaactatggcttcaattacaacattcggtttgtataaaatgtaaagtgccttatacaattgtgagcccttcaaaaatcctggttgaattttatcgaawtgagttacattattaagcatattgagatacccaagccatggctggcttgcggtcctttggccagctaccgattttttcagctgatattcccccaccccaccccaccccaccccaccccaccccatcctttttccctgctacaccaggcagacacgatttcaggttgcctggtttaaaagcaattatacctctagagaatcttgttgcctctgatttctaagtgctggttgtttatagaatttctgctcagatccctttagttcaaaatgaacatgccaatgaaactgaaatgagaatctgcacttctaaattggattatctgcttccctggtgtaccagtttgcaccattcttccct

SEQ ID NO: 70995 - DNA, 1169 bp, Homo sapiens
agttctctcaaattccttcatcttaaaatactcagtatgccaaggtgccgtgtcttagcatagcctgcgttgagccctgtcaaatggatgagcgaataaacctgactccaccatgcgccagttggataagtcccaaattcctcatccttctgagcgtggatcagtctagcaactttgtgagcattaaatgagatcccgtatttagaagcccctaaggggccctagcttgtagtagttaatcatttaaagttgtgtgtgtgaatgcgtgcttttcctttgctttcttttccttcctcctgggtttgttataagctgctaagggagtaacgggtgcaaatgtcctgaaacgtctatgcaaatacaccgtggcttcattttcattatctggtgggcccaggtggagaaaggtagacccacaacagctactaatatgacccatttgaaaggcttcccatcctctgacaggcaaatgagcgagagaaacacaatgaagtctgcttaatggtacttttgtcaaggcagtgggacaaagagaagggaagctcagcatgttcagggatttagctggggatccttagatactgtgctacctgcattgcttatgatttttccttttttaaaaaatattgattggccacaatgaacactcaggacagaagaggtgtgacctgcatcctctgtagaaattcatagtctgtgagtgataaaccagcaagcaaatagagaacaagcaagtttgaacagagttgcatttttttaamgctcttcagaagactattcgttttcatccactttctgttggcatgatcatagaatatttaaagtagagaagtatttgtatgcatgtgtttgtatgtgtttatggggagtaaacaggaaaataaggaaaacacttcattcattccagcgggggaagaaggagaaaacctgatcacagactggacaggcaagaaagagcagagggaagctgagagtgtgcacagagactgagaaaaatgaaaaagctccagcttttaggaaagaagtcaagatgaggacttatcaaaagagaaagcgacggtggacacatgaacagcaggagaggagagagaaaggcatggtggatgcacatagcaggggacacgtcatagcctcctgggggagagcaggagtctgtaaccaagaaccga

SEQ ID NO: 70996 - DNA, 1169 bp, Homo sapiens
agttctctcaaattccttcatcttaaaatactcagtatgccaaggtgccgtgtcttagcatagcctgcgttgagccctgtcaaatggatgagcgaataaacctgactccaccatgcgccagttggataagtcccaaattcctcatccttctgagcgtggatcagtctagcaactttgtgagcattaaatgagatcccgtatttagaagcccctaaggggccctagcttgtagtagttaatcatttaaagttgtgtgtgtgaatgcgtgcttttcctttgctttcttttccttcctcctgggtttgttataagctgctaagggagtaacgggtgcaaatgtcctgaaacgtctatgcaaatacaccgtggcttcattttcattatctggtgggcccaggtggagaaaggtagacccacaacagctactaatatgacccatttgaaaggcttcccatcctctgacaggcaaatgagcgagagaaacacaatgaagtctgcttaatggtacttttgtcaaggcagtgggacaaagagaagggaagctcagcatgttcagggatttagctggggatccttagatactgtgctacctgcattgcttatgatttttccttttttaaaaaatattgattggccacaatgaacactcaggacagaagaggtgtgacctgcatcctctgtagaaattcatagtctgtgagtgataaaccagcaagcaaatagagaacaagcaagtttgaacagagttgcatttttttaaagctcttcagaagactattcgttttcatccactttctgttggcatgatcatagaatatttaaagtagagaagtatttgtatgcatgtgtttgtatgtgtttatggggagtaaacaggaaaataaggaaaacacttcattcattccagsgggggaagaaggagaaaacctgatcacagactggacaggcaagaaagagcagagggaagctgagagtgtgcacagagactgagaaaaatgaaaaagctccagcttttaggaaagaagtcaagatgaggacttatcaaaagagaaagcgacggtggacacatgaacagcaggagaggagagagaaaggcatggtggatgcacatagcaggggacacgtcatagcctcctgggggagagcaggagtctgtaaccaagaaccga

SEQ ID NO: 70997 - DNA, 1169 bp, Homo sapiens
agttctctcaaattccttcatcttaaaatactcagtatgccaaggtgccgtgtcttagcatagcctgcgttgagccctgtcaaatggatgagcgaataaacctgactccaccatgcgccagttggataagtcccaaattcctcatccttctgagcgtggatcagtctagcaactttgtgagcattaaatgagatcccgtatttagaagcccctaaggggccctagcttgtagtagttaatcatttaaagttgtgtgtgtgaatgcgtgcttttcctttgctttcttttccttcctcctgggtttgttataagctgctaagggagtaacgggtgcaaatgtcctgaaacgtctatgcaaatacaccgtggcttcattttcattatctggtgggcccaggtggagaaaggtagacccacaacagctactaatatgacccatttgaaaggcttcccatcctctgacaggcaaatgagcgagagaaacacaatgaagtctgcttaatggtacttttgtcaaggcagtgggacaaagagaagggaagctcagcatgttcagggatttagctggggatccttagatactgtgctacctgcattgcttatgatttttccttttttaaaaaatattgattggccacaatgaacactcaggacagaagaggtgtgacctgcatcctctgtagaaattcatagtctgtgagtgataaaccagcaagcaaatagagaacaagcaagtttgaacagagttgcatttttttaaagctcttcagaagactattcgttttcatccactttctgttggcatgatcatagaatatttaaagtagagaagtatttgtatgcatgtgtttgtatgtgtttatggggagtaaacaggaaaataaggaaaacacttcattcattccagcrggggaagaaggagaaaacctgatcacagactggacaggcaagaaagagcagagggaagctgagagtgtgcacagagactgagaaaaatgaaaaagctccagcttttaggaaagaagtcaagatgaggacttatcaaaagagaaagcgacggtggacacatgaacagcaggagaggagagagaaaggcatggtggatgcacatagcaggggacacgtcatagcctcctgggggagagcaggagtctgtaaccaagaaccga

SEQ ID NO: 70998 - DNA, 549 bp, Homo sapiens
tccactttctgcagctgacttctgtctctaacactgatgcattttatattcctcccacctaaaacactatatgttttcataaagcaatataatgacaaaatatattttacatgtgtatgtgctctggcttctagtcactggtagattcaaacatagtatttttgtggtgcaaaatacttggtttctatgtcattattattactttcttcatcacttcatccttatcacgtaagcttattgacagcttaatgtgcaggygctatgtcaatgcgcatgatgatatttgacagagcagctcagtgaggtagatacttttatgattccccactttacacatcgggaaaccaaagcttaaagggttaaagtatccaaggctatgcaattaatgaaagtgacttgagattgcaacccagatctcttacatttcagaatttatgcttttaatcactaagtttgttgttgtctcaagatttcagaatttgtattttttataaaataatcatgtattgttggtccataaatggttttcagtgtcatcactctgaagca

SEQ ID NO: 70999 - DNA, 549 bp, Homo sapiens
tccactttctgcagctgacttctgtctctaacactgatgcattttatattcctcccacctaaaacactatatgttttcataaagcaatataatgacaaaatatattttacatgtgtatgtgctctggcttctagtcactggtagattcaaacatagtatttttgtggtgcaaaatacttggtttctatgtcattattattactttcttcatcacttcatccttatcacgtaagcttattgacagcttaatgtgcaggcgctatgtcaatgcgcatgatgatatttgacagagcagctcagtgaggtagatacttttatgattccccactttacacatcgggaaaccaaagcttaaagggttaaagtatccaaggctatgcaattaatgaaagtgacttgagattgcaacccagatctcttacatttcagaatttatgcttttaatcactaagtttgttgttgtctcaaratttcagaatttgtattttttataaaataatcatgtattgttggtccataaatggttttcagtgtcatcactctgaagca

SEQ ID NO: 71000 - DNA, 702 bp, Homo sapiens
tgttgtatacttacatctaaaactgaatacctattacaaactgggaaaatacagttactgacttacttctggtggctaaaaattaattctattgtagccttctattttacttctctttgtagttgaaagtaatggttaaaaataaatgaagacaatattacatcaaaaccattccagagctcaaagaggtttggaggctgttaccatggtgcccactgtggcggctcaccagccgggtttggcatagctgcctcaacaaaatgggcctaacttttgttttctacagaaacagtgagactccaaaggcctgtgttgacaggtaatgagatttaattcataagaggggggaaaaaaaggagagaaaatatccatattcattgcttaatcaaataaaattctttcagaggattctgggaattctccccagttgcttccaaagcctccctttgatagctgtaaacaaattaccttamgaataacttcttaatcagggaagagaagcgctgttcaatacttgatctctccctttgggtggtcccagccagagagcagccgtcttcctcctgatagtttggcttctgaaaagccatatagcattatgctgacagctgtagacccctttttttgttaggataacaaacaccctgtgttgaggacagcatcaagccagcttgcagtatgcccaattagagaagctaaaat

SEQ ID NO: 71001 - DNA, 702 bp, Homo sapiens
tgttgtatacttacatctaaaactgaatacctattacaaactgggaaaatacagttactgacttacttctggtggctaaaaattaattctattgtagccttctattttacttctctttgtagttgaaagtaatggttaaaaataaatgaagacaatattacatcaaaaccattccagagctcaaagaggtttggaggctgttaccatggtgcccactgtggcggctcaccagccgggtttggcatagctgcctcaacaaaatgggcctaacttttgttttctacagaaacagtgagactccaaaggcctgtgttgacaggtaatgagatttaattcataagaggggggaaaaaaaggagagaaaatatccatattcattgcttaatcaaataaaattctttcagaggattctgggaattctccccagttgcttccaaagcctccctttgatagctgtaaacaaattaccttaagaataacttcttaatcagggaagagaagcgctgttcaatacttgatctctccctttgggtggtcccagccagagagcagccgtcttcctcctgatagyttggcttctgaaaagccatatagcattatgctgacagctgtagacccctttttttgttaggataacaaacaccctgtgttgaggacagcatcaagccagcttgcagtatgcccaattagagaagctaaaat

SEQ ID NO: 71002 - DNA, 1482 bp, Homo sapiens
gaactgtgtgctcatccattaataagtggggatgacttctcagcttctgatttgttattcgctcctagatatagatcccttttcctgtgtgtatatttattttaattctctcaggatacatgtgaattgtactctttatagtttgccttctaaaattcttttggtatycatgtttgtgtgaactagatttttttttctgtttcctttccatgggaaaatcacattttcaccagagtgtttgtggtagtgccatgagccttgatcaaaattttgttttattttgactactaataagattgacattacttttaaagcaaacaaaagagctgaaaggaacacaaatgtaaaacattgactgttggatactttatgttctgaatataggagctagaaaaaactcaagatgacctgatgaaacatcaaaccaacattagcgagctgaaaagaaccttcttagaaacctcaacagacactgccgtaacgaatgaatgggagaagaggctttccacctcccccgtgcgactggccgccaggcaggaggatgcccccatgatcgaaccacttgtccctgaagaggtcagtagtcaggtttgtggtcagactcgtattctgtttacccgccttccttctctacagggtgtggaattgcatttgacagtcttctgggtagaaaatctctcttcctacctatgtttaacctgagctgagatgctcagtgctccaacagaaaactgcaaaataaaatggttaaagtggctgaggagtgagtaatagcatcagatggttcttagggcgggaagccacagggagactatcgtgaaaaatcagctgattctgaccataaacctagatttatagctgagagaaatcagggtattctcttcatgcattgacactttttccgcatatgctttctacttttgcttgaggcccattgagattgtttgactaaatggtaacctgaagttgatagcatttcaggacaattttactctgagatattacaccaggcttttattgatataacaagagttttatttgatttttatttataactgattatcttaattgatttatattacgttttttgttttttgtttttaagacagtgtcttgctgtgtcacccaggctggagtgcagtggggtgatcttgtctcactgtagcctccgcctcccaggttcaagtgattctcctgccttggcctcccaagtagctgggactatagatgcccttcaccacaccgggctaatttttgtatttttaatagagacggggttttgccatgttggccgggcttaagaccacttaagttttcccacttaagaccaaactccaggtcttaagtgatccacccaccttggcctcccaaagtgttgggattacaggcgtgagccatcgcacctggccaaatttataatcggttcctagtagatgttttatggggaaagtagtggccagaaatttttttttttaagtaagg

SEQ ID NO: 71003 - DNA, 974 bp, Homo sapiens
gcatcatacaccttccttcagcctatacttacattctctgccctgtgaatgtctaacttccaaataccctttcctctggtgagcttctgagcaaaggccagcactattgtcagagcattgctattaacatagaggctgtgcatgtggctacactagaattatggtctaacaagggcaaggagaccaaccgtgtactggataagccctgtccaatggaacctttgcatgatggaaatcttttatatctgtgctgtcaggtagagcagccatgagtcacaagtggctattgtgtacttgaaatgtggctactgcagctgaggaactgcattttaaattttatttagttttaattcatttaaatttaaatagctctatgtgggtaccatattggacaacaaagtcatagactctacttgaaatagctcctttaatttgaggatcaagtgaagtcattgttaatgatgtcactgtgtagacattggtactgctcttcagcacaggagtcttttccattttctgggcacacagaggaggacacttcccagctctcttgcagggaggcagggtcatgtgactatgaccatgtgatgcagctcacttccgggcaaacatttaactgcagtacatgacgctccttttttcattctgccatggtaatgagaatgttccagaccatggagtctctgtgatcctgggtccagaaggactgtagaacagagccccccactccattmcaacccacactggacatgaatgtgagtaagaaataaactacgtggcgagccacaggaaattcaggattcctctattactgcagcataacctagacttcctggctgataagagtccacacagaatcacctgagcagattgttaaatctacatatctagagtccatcccaggttgggaactcggcatcagtatttttggttcaaaacaaaataaaacaaaaaatctctccaggtgctttgaa

SEQ ID NO: 71004 - DNA, 1216 bp, Homo sapiens
taggtatttgtcctaatgctctccctccctttgctccccacccccaacaggccctggtatgtgttgttcccctccctgtgtccatgtattctcattcttcagctcctacttatgagtgaaaacatgtggtgtttggttttctgtttctatgttagtttgctgagagtgatggcttccagcttcatccatgtccctgcaaaagacacgatctcattctttttatggctgtatagtattccatggtrtatatctaccacattttctttatccagtctatcatcgatgggcatttgggttggttccacgtctttgctattgtaaatagtgctgcagtagacatatgtgtgcatgtgtcaggaaacaatagatgttggcaaggctgtgaagaaataggaatgcttttacactgtcagtgggagtgtaaattagttcaaccattgtggaagacagtgtggtaattcctcaaggatctagaaccagaaatgccatttgacccagcaatcccattactgggtatatacccaaaagattatagatcattctactataaaaactatatgtttttaaaactagtgaaatgtttcccaatgtgtgctattgtttgaacttagaaaacagaggcattcatcagtacaagcctttgccaaacaattttaaaagggctttaaaataaacaatgtatgtatcacatcacatacacatcacatcaggaaggcttccacatcgcttccacgatgtctcttggttctgtgtacttcaccctgtctccacctccaccatcctatgttactcactgggaagtttttcaacagcctcccagctggtcaccttgtgtcctcttttggtcttcaccagtcattgcatacaaggcgatctttagaaggtcaaatctgatcaagacaactgccatactcctgcttcttctcccttctcctttctcacaaaaatgtgtgtgtggagtctgataaggtggtatggactgaagagggaaagcatttaagttccatctttttcctcctcaaatgctgcctaaacatcactgggtttatagggacgttaatttcatcctcatcattctatgaacaaatgtttgccttagcactgtatgaacatttatacgaatgccctttaggattctttttagtccaagatttccatgaaaaaagagacatattacagtaggtcctatgaaaaatattctatgatacataccatg

SEQ ID NO: 71005 - DNA, 1216 bp, Homo sapiens
taggtatttgtcctaatgctctccctccctttgctccccacccccaacaggccctggtatgtgttgttcccctccctgtgtccatgtattctcattcttcagctcctacttatgagtgaaaacatgtggtgtttggttttctgtttctatgttagtttgctgagagtgatggcttccagcttcatccatgtccctgcaaaagacacgatctcattctttttatggctgtatagtattccatggtatatatctaccacattttctttatccagtctatcatcgatgggcatttgggttggttccacgtctttgctattgtaaatagtgctgcagtagacatatgtgtgcatgtgtcaggaaacaatagatgttggcaaggctgtgaagaaataggaatgcttttacactgtcagtgggagtgtaaattagttcaaccattgtggaagacagtgtggtaattcctcaaggatctagaaccagaaatgccatttgacccagcaatcccattactgggtatatacccaaaagattatagatcattctactataaaaactatatgtttttaaaactagtgaaatgtttcccaatgtgtgctattgtttgaacttagaaaacagaggcattcatcagtacaagcctttgccaaacaattttaaaagggctttaaaataaacaatgtatgtatcacatcacatacacatcacatcaggaaggcttccacatcgcttccacgatgtctcttggttctgtgtacttcaccctgtctccacctccaccatcctatgttactcactgggaagtttttcaacagcctcccagctggtcaccttgtgtcctcttttggtcttcaccagtcattgcatacaaggcgatctttagaaggtcaaatctgatcaagacaactgccatactcctgcttcttctcccttctcctttctcacaaaaatgtgtgtgtggagtctgataaggtggtatggactgaagagggaaagcatttaagttccatctttttcctcctcaaatgctgcctaaacatcactgggtttatagggacsttaatttcatcctcatcattctatgaacaaatgtttgccttagcactgtatgaacatttatacgaatgccctttaggattctttttagtccaagatttccatgaaaaaagagacatattacagtaggtcctatgaaaaatattctatgatacataccatg

SEQ ID NO: 71006 - DNA, 710 bp, Homo sapiens
caaggtgacagggaccaagtggtgcccttaattagcagaggcggagatatatggaagtcattttaagtatatattttcattgtttatttttatcatatgctttgactactaaaaagaaaaattaaaactaataacaatggaagatattctgaaattgtgaagattaaaaccaaactcaagttcaagtcgtatttgaatatgataatctgaattttgccaccattaaaaagtactatgtcaacacaaaaagaaaggaatcctgttattaataaagatcaaatcgtagcagatttcaacattagcgatttaaaacattatccaagatgtgaataacatttaactgaactgtattcttatttatttttcttttctgaaacacctatttttgttatactttatagatggtattttttcaaatagttaaggaaaggtagaaaataaaaagcaaacctgtgcagctcctcactccaccaatatccacttcattgataaatacttttaattattgctcattttagttcttagaggttaacaatattaaatccaatagtacatttatacttctatttcttgatgtatcaatttttataaacagggtctactgagttcccatgttgaaagktgaaggaatggctcaattttcactggcttctaacttttctcctcttccaaattttattcgtgctgttattttggttgttgcatttctg

SEQ ID NO: 71007 - DNA, 564 bp, Homo sapiens
acctggtgggtcacacactaatgactgcaaccgaggaaaatttaacaaggggattttattatttgcaacaagtaagaagggcaccagggatagttctcaaagcagtgcctcccagaaaaatggtgaaaacagagcttgtattgggctggttagctgagtcattgcatgtagaggcagagtaaaggtagaccaggcatagacctgatcatgcttctacatatgtcacatgtatagaacatggctagtaagctcctccctgagcagggatttagtatggtaatgagtggagttccccaaagttcatctccaactcaggtacctctggatccaaccagtttctgtttttcctgagttgagcttctccctggaactttttgaaacaatgagaactcaaggcgcagcagttttaagttggtactttttcacagtgtgcacccaaaaacctggggaccctgggctacagacaggcaaaaatttacaaaactggaatatatatatatatgtgtgtgtatatatatatatactatatrtatatgtgtgtgtatatatatatacactatatat

SEQ ID NO: 71008 - DNA, 2785 bp, Homo sapiens
tacttcaccctgcctccccatcacagtcgtatttcccactctgtgccgtcacataacctttgctcccatcagactctgtttctacgctttccctgactatgtccgtctctggactatcctcctctttcctatctgtctgtccgaactyagccgattgtccaagactcaagcatcacattcattaagtgccagacactgtgtgtggccctaccttcatacataccaggcagtcagtaaattcatattgaatttaagaagtctacctctaaagtttaggcactctgacaaataatcagagctctgaaataaggttgttgttttaaagttcacctaggctaaggtttgcttcgttgactggtgatcgatgaaatgttaaaggtgtatcttgggaatggagtcttgggtacaaagaatttgggttgagactgtaggagggttacagtcgtgaggatacacagagcagctttgactctgtgtcatgcttttcctggaatcttcgtacttttcagtagtggtagaatgaagataggactactagtctttttaaacagcccagaataaaagtcttgtggaaatacaaggaagcttttatgaaaacttttattagcaaaacatgtaaaatgtgttaggatcctaggtttggattctgatgcattagcagtgttaaaaaggtcaatgttaaggtcagaggttgtttcttctgactgggtccaacaggatgacattgttcctgtttagggatgtgtgtttgacttttatggacagagttagtcaccgatttcatggtctgagactcacagaatgtgcagttacaggtttccaggccaacgagtgtcttaaacagtcaggtttagggcctggaaatgaagagaatttcagctggctccattcgagcaaacacctcagcacccctgcggacccattgcagggagctctgtgatctgtaggttctgttgatactggaagttgggctgcactttggttagcttttggagagcagactaatccacagggatttggggagaatagtggcccttgaatctgtgcaggtttgattggttttgccgcggatcactctgcacgtcatgcaggatgagctctccaaggcctgagcactagcaaaatctctgtgacttggcggaggttcacaccagggatgtgctgttatgttgaatgccaagctctttgacatttgtgtataattacaacagcaggtgtagctctgtttacttgccagttcattattacactttttcacctattttgcactcagataacaaagatgttttctattatatgttaggtacaaggtagagtgagaatttcaaaatgaaaataagaacagacattaagatttttaaatttctcttagtgtttccccctaagaggctaaaagataaggaaacaagaaggaaatgaagggagcctgagaatttgagtgaatctgaagctatttttgagttacatcacacactttgattctcttactgcccagaaataaataaataaataagtaaataaaagattaggatatgcatttcaggaagtgcacctcaggatgtatcagtgtttctatcagtaaatataaaatcacttaacattgctatagctacagaattaaaatagatggctgccttttcatttaataatgtgatttcaaattatgccaattaaaaagaaagaattaagcaagcgcaactgtagcattataggaatttttctgaatattaagtataacagataattcagttatagactccattttcccatgcagccaaactccatcatttgaagaagcaaatttactgaaacaaattggaactaatctccggttatgagcgagatgcctcgcttctgttgacggtgtgaaagaccctgagctttacaatccatttaaaaattctgatctggaatcctgtatgaagaataaatacccatattacacaaaggtcctatgttttggaaaacccaaatgctttgttttttctttgtacatctgtctctgcttgtttgtcacttaatgtgcatcttgataggctttgtcagagtcatttattttatgtaagattctgaaatgtagatataagtccatataggatataccacagagcaggatggcaaagttcaaacactgatgttgaattaaagaaatcgtatgcccctttattttcatgatgacagagactatttgggtacaccccagtgctccttgctaaagggagtgcacatgtatttattgatagtggaatgcacatgtccttaagaaatcctgttgtcataacttttaaaaccaaagatttctcaggcccagcaaggtggctcacacctgtaatcctagcactctgagacagggggattgcttgagcccaggtgttcgagacctgatagaataaatgtagcagaacccgatctctaccaaaaaaaaaaaaaatgtcgagtgtggtggcacgtgcctgtggttccagctactcaggaggctgagggaggagggttgcttgagcccctggaggtggagggtgcagtgagccaagatggcaccactgcgctccatcctgggcaacagagggagaccctgcctcaaaaaaaaaaagaaaaaaaaaaagatttctcaaactaacctcaatactgtgggctgtggcagaaaatttgagatgaaaagtatcatttttttttgccgtgcgattaatgaaatggagacttgcatccaatttaaaactgcactcgtttgtgccgttttcatttttcattaacctctatttcaacaaatgtgtaatggcttcatgca

SEQ ID NO: 71009 - DNA, 2785 bp, Homo sapiens
tacttcaccctgcctccccatcacagtcgtatttcccactctgtgccgtcacataacctttgctcccatcagactctgtttctacgctttccctgactatgtccgtctctggactatcctcctctttcctatctgtctgtccgaactcagccgattgtccaagactcaagcatcacattcrttaagtgccagacactgtgtgtggccctaccttcatacataccaggcagtcagtaaattcatattgaatttaagaagtctacctctaaagtttaggcactctgacaaataatcagagctctgaaataaggttgttgttttaaagttcacctaggctaaggtttgcttcgttgactggtgatcgatgaaatgttaaaggtgtatcttgggaatggagtcttgggtacaaagaatttgggttgagactgtaggagggttacagtcgtgaggatacacagagcagctttgactctgtgtcatgcttttcctggaatcttcgtacttttcagtagtggtagaatgaagataggactactagtctttttaaacagcccagaataaaagtcttgtggaaatacaaggaagcttttatgaaaacttttattagcaaaacatgtaaaatgtgttaggatcctaggtttggattctgatgcattagcagtgttaaaaaggtcaatgttaaggtcagaggttgtttcttctgactgggtccaacaggatgacattgttcctgtttagggatgtgtgtttgacttttatggacagagttagtcaccgatttcatggtctgagactcacagaatgtgcagttacaggtttccaggccaacgagtgtcttaaacagtcaggtttagggcctggaaatgaagagaatttcagctggctccattcgagcaaacacctcagcacccctgcggacccattgcagggagctctgtgatctgtaggttctgttgatactggaagttgggctgcactttggttagcttttggagagcagactaatccacagggatttggggagaatagtggcccttgaatctgtgcaggtttgattggttttgccgcggatcactctgcacgtcatgcaggatgagctctccaaggcctgagcactagcaaaatctctgtgacttggcggaggttcacaccagggatgtgctgttatgttgaatgccaagctctttgacatttgtgtataattacaacagcaggtgtagctctgtttacttgccagttcattattacactttttcacctattttgcactcagataacaaagatgttttctattatatgttaggtacaaggtagagtgagaatttcaaaatgaaaataagaacagacattaagatttttaaatttctcttagtgtttccccctaagaggctaaaagataaggaaacaagaaggaaatgaagggagcctgagaatttgagtgaatctgaagctatttttgagttacatcacacactttgattctcttactgcccagaaataaataaataaataagtaaataaaagattaggatatgcatttcaggaagtgcacctcaggatgtatcagtgtttctatcagtaaatataaaatcacttaacattgctatagctacagaattaaaatagatggctgccttttcatttaataatgtgatttcaaattatgccaattaaaaagaaagaattaagcaagcgcaactgtagcattataggaatttttctgaatattaagtataacagataattcagttatagactccattttcccatgcagccaaactccatcatttgaagaagcaaatttactgaaacaaattggaactaatctccggttatgagcgagatgcctcgcttctgttgacggtgtgaaagaccctgagctttacaatccatttaaaaattctgatctggaatcctgtatgaagaataaatacccatattacacaaaggtcctatgttttggaaaacccaaatgctttgttttttctttgtacatctgtctctgcttgtttgtcacttaatgtgcatcttgataggctttgtcagagtcatttattttatgtaagattctgaaatgtagatataagtccatataggatataccacagagcaggatggcaaagttcaaacactgatgttgaattaaagaaatcgtatgcccctttattttcatgatgacagagactatttgggtacaccccagtgctccttgctaaagggagtgcacatgtatttattgatagtggaatgcacatgtccttaagaaatcctgttgtcataacttttaaaaccaaagatttctcaggcccagcaaggtggctcacacctgtaatcctagcactctgagacagggggattgcttgagcccaggtgttcgagacctgatagaataaatgtagcagaacccgatctctaccaaaaaaaaaaaaaatgtcgagtgtggtggcacgtgcctgtggttccagctactcaggaggctgagggaggagggttgcttgagcccctggaggtggagggtgcagtgagccaagatggcaccactgcgctccatcctgggcaacagagggagaccctgcctcaaaaaaaaaaagaaaaaaaaaaagatttctcaaactaacctcaatactgtgggctgtggcagaaaatttgagatgaaaagtatcatttttttttgccgtgcgattaatgaaatggagacttgcatccaatttaaaactgcactcgtttgtgccgttttcatttttcattaacctctatttcaacaaatgtgtaatggcttcatgca

SEQ ID NO: 71010 - DNA, 664 bp, Homo sapiens
ggatcctggaccagaagagaaacattggtggaaaaattgatgaaatgcacataaaagtctgggttagtctgtcttagttaatgggtggtgcaccaatgttaatctcttcattttgataaatgtatcacggttctgtaggatgttaatattagggaaagctgagcaaagggtatatggaaactctttattctatcgttgtaagtcgtcataatttaaagaatttaaaaataaaaagttaaaaaatacccaaaaacattggtttaaattattgcttcctagtttacagtaataacctctctattggtctgtgtatcttcatttttccttacaatccattctccactttaccaccagaaagatatttctaaaatgaaaaaatgaccatcttttaaacaacgttcagttgctcctcatagctttcaaaataaaggtcaaatttattagtttatccttttctgtaggataactccctttctttaaaatatcactatcrttcccaagcacacactttgctattgtctttaagaattgccagaagttccccaaatatgtcaggatgctccatagcttcgtattaccacacatgctgtttcttttaaggagaatgtccatctccttttattcgttcattgcttgttcttagaaactctgcacaaacttaact

SEQ ID NO: 71011 - DNA, 1117 bp, Homo sapiens
ccatttaggacctgagagaaataaagatcaggcaacgaatcctgagtaagctatccccaaatcaaataaacatgttcttcatttggagattatgccatgatataaatgtcacacacactttcaatcccagttaatttatggttctttccttttcttttcttttccttttttttttttttttttttttttgagatggagtctcagtctgtcacccaggctggagtgcagtggcgcaatcttggctcactgcaacctccgccttccaggttcaagcaattctcctgcctcagcctcccgagtagctgggactacaggtgcctagctaattttttgtattttagtagagatggggtttcaccgtgttgtgctggttatttctaatgtcattttttagataaatgagataagctcagagtatctttcaaaattcattgtcccaactatcaaccccttacctgttcctctagactttcagtgatatgttttgcactagcagagggcagaacccatccatcactccccatgatcaacagttacagtatgtgcctcttttattttcctggaaaatgctagatcatgccagaagtatggctttaaaagtgtattaaactgtattgataaaaccgtaaactagttgcaagaagaaggcactcaartgaaaatgtcaagttcaaatgatagtctacaagcaggacagctttcaaatcccattatgactctccacatccctattccaaaagagggactggaattggtcattattctgattgggaaatagatatcagagaataggagggcttctctaccacagggctgcagttggctcttgtgtaagcttccacccctggccgcctctcactccctcctcacccacccactgggatccccttcacacactccttcttcccccattaatagacacactcatacccctttacactctgtctttagagatttgctatatcctaaggtataaaatcaagaataactcaaattccactgatagaaatgtagcatctgcattttagttgcaatgctgcaagaagcaggggtttctctcccttaaagatttgtatggtttgaaatgaataaaagataaggctatgaacatagcaca

SEQ ID NO: 71012 - DNA, 734 bp, Homo sapiens
acagggtttcactgtgttagccaggatggtctcgatctcctgaccttgtgatccacccgcctcggcctcccaaagtgctgagattacaggcgtgagccaccacacctggcctcaagttcacttttaaacaaatttacctgtttcaccatgttaaaccttaattaaaagtataaatgagtcatgcttgagggtcagaatatttgttgctttattattgatacctggcgagtcagagccaataaactaacggtaaggtgatcaccgatcactggatagcaggccttgaagaactcttatcctgggatgggtgagtgtcaacatccaataaacatctattaaatcatatctttcattaccatctctataagcasaaagtatgattttttctttttttttgcatgaaggtgtgaacttaaattttcttttttgttcatttcagctgaggttcactaaaagactatatgccatttgggatgggtgaatgggcgcacacatttaagtggaggtgttttgaactgttcaggctttctgcagaaggaaagaaagaaatgcaggctttacaagaaacatccacagaggagctcctgagaggcgtgaaaagatgagccctataccacttggacagtccaatagacagctcctttgccaataaggggggctgacaactggaaccccagtgaggctgagggagtcagtagtgagaatgctcaacagaaggtaacaaatatggatcc

SEQ ID NO: 71013 - DNA, 2421 bp, Homo sapiens
aaaatcagtctttcaatattcccttcatactggaggaccatcaaaagatagtaattaactaatgaattaattttctgatggctgtatttttctccttctttcctgcaacctggaggtaggaaacacacattaacagaagccagtgctgaggagagactaagaaatagcatgagacaggtgaaatgcaaactctttaaaatcaaacttcagggtgcaggtattaaaaaaaggagagagaatgcagtttgctcagatgacttggccaggatgttcctagggttgggattggtatatctgaaaaagaacggatccctttgcaaagtttggcttagaagttccaagcctgcaggaatgtacttaggagctcactatgtaacagaagctcagctcctcttccgtgcagcaggaatgggaattgtggctcctagaagtagagtggtaagaggtagggtgcagttataaccaccactgtgtaccctcactccaaagaggaagtttggtgttctaatcagaattttccacactcttacatagccttaaacaattaactccatctctctggactcagtttcttcatctgtaaaatagggagggtgggcatgtctcttctagcttcaggattctgtgccattgatgtgtgtcttctggagcaggcccactgatgcatcctggccatgcctttgaccatgtcttcatagcacaatcagacctgtaagaaggcttacactctgtgattctccaggctcctccagtggcataccaaagatcaagcaacatttgcatgtgctgtctgtatgcctttaagatgattaccaacccccatatgggtgtatctttagagttgatattaacaaccttgacccatttagtgtagaaggagaggccgccatgttgattttctgtaaatgatctggattatatggtggtttcaaaatagccaacttttaaagctccttatgaaattaaatgtgctgattatccaaatgatgtgacatttttataaatagaaagtaaacctctgagcatgtggttggaactacatcagacacagggataaaaacaacactgggaggtcctactgaaggacattctaacaaccattttctggagatagaagcatgcaccttcatcccttctaggtaggaaggaaaaagaaaccttttccttgtcctctaccttgatggactaggactcgtatgctgccctgattgaagggaaaattaacagttttgatacggtcatctagctcaactcagggaaaaacaaaaaaggcatttcccctttctagtggaagtaaatgatttgcttgttgatgggtgatgttttcagccaggctgctgtttccgatagaagctgtgaccagagctgaaccatctcattgtttctctaatcacgtctaggcaaagaggtggctcctctggaaagactagactcctttgatgatgccactgctactcactagggtaagaaaaccaaataggtctggcaaaacacttgcttctccaatttcatggctcaatggaaaacatactggaaaaaacatccgaagactgtgggtctctggccatgcaccgctggaggctgtaacggtgagcccagtgacagaagggctggctaacgtgctgtcctgcaatcagttatgtcgtctacatttctatttatgaacyccttcgaagtccatgacagaaagccccaaccttttagtgaggagactattcatttgcaagaagcagagaatagaagaatattgggggatctactattaactaaacttgtgttgaatagaagttactaaaacctggtcagattcacatctgtgattccaggttaagggcctcaggcaaggaagcgaagccccacgtggatcctgaaatactggccttagactcgattccacagcaaaggttgcagccacccagcatctgagctgctgggcaccagggcaagtgatggccagtgacaggaaggagctatgcacgcatatagcctctgttgtgtgcactctttaaaagaagagataaggagaaaaaaatatttaaatgatatcatttaagtttcacaataaaccattgactgaaataagacatatgaattctcttttcttccaatcggtccaaattttcacatgttccttagcttctttctgcattgatgtgatgctaagatgtaaagacttttagttgttgttgcttctctgacactgctcctcgatataagcgcaaaacttcaccttttgatcatggggtctttaaaaaaaggcccagcaatctcccctaaagctggagacaaaactgggtttcctggacttactgagatgtgatgtgtcagtttacaacataaggcctttctaatgaattttaaagaaaaattttgctcatgtgaaattttcactttatgtgctgaccttagagcttgaacatt

SEQ ID NO: 71014 - DNA, 720 bp, Homo sapiens
caggtcctttagactcccacgcacccaatttctgcatctccccctcacacccgcttgcttcccttgcttccaccacagcagtgctcatctgctcttccccgctcactcaggtctcctgctcaggactcccttgccgagggcgcgggagattcttgctgaaggggggttccgggggcagcgcagcaacccgggggacctttcttctccttgttggccttgaccccaagtgttcccgggtgctgatggggcgactgggttgtgtgagccctgcctccagggtctggctsgggttgcgccaggagctgttcgtggttctgaaacgatgccagctcgggcgcgggcagtggccgggcggatgagcgctgtccgtggtcctgaagatgttcctgggccccggcggtggcggcggcagcggtgcctaggagggccggcagcggggacggctacgaggtaaggaatccgggcggaggctgcgcttgcggcagctgcggatgctcccacaggctgcgattctaggcgctcagctcgttcagccgccgctccagctcgtcgatgctctggcgctgggtgcggacgagcctctgttggttcagcacgatggccctgagctccttgaggtagagcccggcgcaccggattctccagaagtctctccaagccgcccgccagcctcttgagcccttcctgcgcctgggcggcggtggggagcgcgagggcgcg

SEQ ID NO: 71015 - DNA, 540 bp, Homo sapiens
tgtttagagtcatacttctaaaaattawttttttttgttttataacataacactttaaaagtaactaaatgtattcctgaaacagttggtactctcctcttcccctaaaagttgatgttagggggaaaaatactagttatttaaaaatgtgggtcaggtggtctctattatttggggtgttatgatattaagtcatgaatccaataaactaagatgctgctttcttgataaaataggatatgagtatattttcacatgcagaaatctattttttgaagatgtgttcactgcagtgtggtgtcaggaaatgaaaaaaaacaacagagctttcctcaggtcatcttagggtctttcagtaaactgaaagtaactaagttagaaaggaatctccaggagaggccaggggagtaccaccagcccaccactacagagaatttcaaagctaagctactcacagaaaacaatgctcaaccacagggcggatgtgctgtttttcacaccccaagtcatttatctgaaaagcaatagcagtaaattctt

SEQ ID NO: 71016 - DNA, 540 bp, Homo sapiens
tgtttagagtcatacttctaaaaattaattttttttgttttataacataacactttaaaagtaactaaatgtattcctgaaacagttggtactctcctcttcccctaaaagttgatgttagggggaaaaatactagttatttaaaaatgtgggtcaggtggtctctattatttggggtgttatgatattaagtcatgaatccaataaactaagatgctgctttcttgataaaataggatatgagtatattttcacrtgcagaaatctattttttgaagatgtgttcactgcagtgtggtgtcaggaaatgaaaaaaaacaacagagctttcctcaggtcatcttagggtctttcagtaaactgaaagtaactaagttagaaaggaatctccaggagaggccaggggagtaccaccagcccaccactacagagaatttcaaagctaagctactcacagaaaacaatgctcaaccacagggcggatgtgctgtttttcacaccccaagtcatttatctgaaaagcaatagcagtaaattctt

SEQ ID NO: 71017 - DNA, 664 bp, Homo sapiens
tgctttatttaatgatttctacaagatctttttatagtaataaaattattctttggttattttgatggcaaatgctttcccagtaagttgtttgccaattaatttatttactttaaagtattttctaatagaatcttttgaagttgtctcataaaaattcagaaagtattattttatactttcctatatcaaactgaygtatttaaaaaacacatcactcttatttattatcttttggctaaaattatacatttcttaaaaggtacacagaaatttaagttttgtcagaattccagctctttgaggaaggaggtctgactatttactccccactgtgtcccaaaaccaaacctacagctgttcctagcacacagtaggtatactatttagttcaggtatactattttactaataagttcagtattattttggaatttgtatgaaagtagcaaatcagactcccaaatactttccaggaataaaagacaattactgctgacatgcaagctctccagtgagattgcctggtttcctggtcaaggtatatttcattgttctaatttaagagcttgtaagctgggggctcttgttttctttgtatttctaatttttttacagcatagataaatcaaaattccatgtgtttcccatggtctacctgata

SEQ ID NO: 71018 - DNA, 2391 bp, Homo sapiens
atctacattgtgaaaagaccttctccacctttcctatttactttcactatgctcaaccacactggctgcatttcagatccccaaataagcctcctattctgcccaggaccaccccacagtctgctgcctctgttcagacagctctgcacacctcctgcctggccagctccctgtcatctggccacttcctatgtgtcaccttcccctataatatgctccttccccaggctaccttaggtgcctatcttagtctttccagcaccctatggtccaccatacttttagagcatttttcacagtttgtaattgtatatttagttgtataattctttgctttacctttcccctaaaggactgtaagttcatgggggcaggaatgggtctgttttgcccatcacatatctccaacacctagcaaaggcctggtacatattttgcactcaaaaaatgcaagctgagaaaatgagtgcatgagaacagctcaaggccatcctctcccaggaagccttcctcacttatgcccaggccactgggttacttcccttttcaaatactcagtaacattcttgtttgcaataagacagaataagcaccacttattttgttccagatgatgtattgcactgtaagcaaaaatgcttctggtttttatttttaaagtcttccttatttttccccctacagtgctcattgagggcaggatttggcccccagctccttctggaacccaatttccttccatgttccctatcacaaccctacagacactggcctccttgctgttctcaaatactcttgacacatccttgctcagagactttgctgttcccacatttggaattctctgccctgagatgtttgaatgtctgccttcctgctcatgcagctgctgcccaaaggtcacctcttcagatagcctttgcctccaccttctctcccacttatctcaatcctgctcaattgttcttcccagctgttgtcactatttaccattacaccacacattaacacatgttgtttatcatctggctcccttgccagaacacaggccctgtgaggatatgggaacttttctgtttgattcccaccatgtgcctggcatgaagtatttccttttaaatacttatcaaatgacggaatttcaactccaaggagaacctagaggcctagtgtagataaaaatgaacatagtagattttagctggtttaagaaactaatccaaccttcacttgaggatcgtaactcagagaaggaagacaggcattctttaatcgatagattgcttcagatgcaaagaggcaagtaaaggaaagaagttggttaaaaaataaaataaagtagagaatagtggagaagagaaactaaagtggatgaaagacaaaaatatgaaaattgcaaggatcagaaatcctttcagtagctatgtgaccaccagaaagtcaaagtcctgacttgctcctcctcctgacaaaggtggctctgaatgaagggcaacctctccatgccggcaaatccgctcaatgttcatgcattcgatgaagtatgccacacaagatagtaatcagaggaaactcccaaaaatcaaaataaaaagaattaaaacagtgaagaaagaattatggataataataaaaaagaaattagatgataatggggaaacatataacagtctcacaatgaaaagaatatttcctktattaaacataactggtattacatcattacatcaaacgggttgacctgttcagagttcccaaaaagaaaagggtataagatgttgtcacgttgaaaaccaccccaaatctataacttgagatttgcatatatatatgaaaacataaacaagttgggtgtgttaaggccttgttgtaacagagcagtaagaactgtaataaattggggtgggtgggaggtttgctgctgattgtctgactcagaaaacaagcccttaatcagttcttgaccagccctgtgttttgattgcccaacataagattagaattatgttggcagtttaatattcaattgttgaggagaaaatagctatgtctataatatcacatccggtctcagaatctgcaaccctctgaaacagtctggcttctaccattagccattactttgaccttagctgatcaaacttcttgtatctcaaaaattaacttctatcagaaatgagttcttaaaattcttattgacttccttgataaactaataattcagactacacgaatctgacaataaaattgagaaaagtccaggcacagtggctcatgcctataatgccagcactttggaaggcagaggaaggaggattgccggaggtcaggagtttgagaccagcctggtcaacacagcaagactctgtctctacaaaaaaaaaaaaaaaa

SEQ ID NO: 71019 - DNA, 2391 bp, Homo sapiens
atctacattgtgaaaagaccttctccacctttcctatttactttcactatgctcaaccacactggctgcatttcagatccccaaataagcctcctattctgcccaggaccaccccacagtctgctgcctctgttcagacagctctgcacacctcctgcctggccagctccctgtcatctggccacttcctatgtgtcaccttcccctataatatgctccttccccaggctaccttaggtgcctatcttagtctttccagcaccctatggtccaccatacttttagagcatttttcacagtttgtaattgtatatttagttgtataattctttgctttacctttcccctaaaggactgtaagttcatgggggcaggaatgggtctgttttgcccatcacatatctccaacacctagcaaaggcctggtacatattttgcactcaaaaaatgcaagctgagaaaatgagtgcatgagaacagctcaaggccatcctctcccaggaagccttcctcacttatgcccaggccactgggttacttcccttttcaaatactcagtaacattcttgtttgcaataagacagaataagcaccacttattttgttccagatgatgtattgcactgtaagcaaaaatgcttctggtttttatttttaaagtcttccttatttttccccctacagtgctcattgagggcaggatttggcccccagctccttctggaacccaatttccttccatgttccctatcacaaccctacagacactggcctccttgctgttctcaaatactcttgacacatccttgctcagagactttgctgttcccacatttggaattctctgccctgagatgtttgaatgtctgccttcctgctcatgcagctgctgcccaaaggtcacctcttcagatagcctttgcctccaccttctctcccacttatctcaatcctgctcaattgttcttcccagctgttgtcactatttaccattacaccacacattaacacatgttgtttatcatctggctcccttgccagaacacaggccctgtgaggatatgggaacttttctgtttgattcccaccatgtgcctggcatgaagtatttccttttaaatacttatcaaatgacggaatttcaactccaaggagaacctagaggcctagtgtagataaaaatgaacatagtagattttagctggtttaagaaactaatccaaccttcacttgaggatcgtaactcagagaaggaagacaggcattctttaatcgatagattgcttcagatgcaaagaggcaagtaaaggaaagaagttggttaaaaaataaaataaagtagagaatagtggagaagagaaactaaagtggatgaaagacaaaaatatgaaaattgcaaggatcagaaatcctttcagtagctatgtgaccaccagaaagtcaaagtcctgacttgctcctcctcctgacaaaggtggctctgaatgaagggcaacctctccatgccggcaaatccgctcaatgttcatgcattcgatgaagtatgccacacaagatagtaatcagaggaaactcccaaaaatcaaaataaaaagaattaaaacagtgaagaaagaattatggataataataaaaaagaaattagatgataatggggaaacatataacagtctcacaatgaaaagaatatttcctttattaaacataactggtattacatcattacatcaaacgggttgacctgttcagagttcccaaaaagaaaagggtataagatgttgtcacrttgaaaaccaccccaaatctataacttgagatttgcatatatatatgaaaacataaacaagttgggtgtgttaaggccttgttgtaacagagcagtaagaactgtaataaattggggtgggtgggaggtttgctgctgattgtctgactcagaaaacaagcccttaatcagttcttgaccagccctgtgttttgattgcccaacataagattagaattatgttggcagtttaatattcaattgttgaggagaaaatagctatgtctataatatcacatccggtctcagaatctgcaaccctctgaaacagtctggcttctaccattagccattactttgaccttagctgatcaaacttcttgtatctcaaaaattaacttctatcagaaatgagttcttaaaattcttattgacttccttgataaactaataattcagactacacgaatctgacaataaaattgagaaaagtccaggcacagtggctcatgcctataatgccagcactttggaaggcagaggaaggaggattgccggaggtcaggagtttgagaccagcctggtcaacacagcaagactctgtctctacaaaaaaaaaaaaaaaa

SEQ ID NO: 71020 - DNA, 2391 bp, Homo sapiens
atctacattgtgaaaagaccttctccacctttcctatttactttcactatgctcaaccacactggctgcatttcagatccccaaataagcctcctattctgcccaggaccaccccacagtctgctgcctctgttcagacagctctgcacacctcctgcctggccagctccctgtcatctggccacttcctatgtgtcaccttcccctataatatgctccttccccaggctaccttaggtgcctatcttagtctttccagcaccctatggtccaccatacttttagagcatttttcacagtttgtaattgtatatttagttgtataattctttgctttacctttcccctaaaggactgtaagttcatgggggcaggaatgggtctgttttgcccatcacatatctccaacacctagcaaaggcctggtacatattttgcactcaaaaaatgcaagctgagaaaatgagtgcatgagaacagctcaaggccatcctctcccaggaagccttcctcacttatgcccaggccactgggttacttcccttttcaaatactcagtaacattcttgtttgcaataagacagaataagcaccacttattttgttccagatgatgtattgcactgtaagcaaaaatgcttctggtttttatttttaaagtcttccttatttttccccctacagtgctcattgagggcaggatttggcccccagctccttctggaacccaatttccttccatgttccctatcacaaccctacagacactggcctccttgctgttctcaaatactcttgacacatccttgctcagagactttgctgttcccacatttggaattctctgccctgagatgtttgaatgtctgccttcctgctcatgcagctgctgcccaaaggtcacctcttcagatagcctttgcctccaccttctctcccacttatctcaatcctgctcaattgttcttcccagctgttgtcactatttaccattacaccacacattaacacatgttgtttatcatctggctcccttgccagaacacaggccctgtgaggatatgggaacttttctgtttgattcccaccatgtgcctggcatgaagtatttccttttaaatacttatcaaatgacggaatttcaactccaaggagaacctagaggcctagtgtagataaaaatgaacatagtagattttagctggtttaagaaactaatccaaccttcacttgaggatcgtaactcagagaaggaagacaggcattctttaatcgatagattgcttcagatgcaaagaggcaagtaaaggaaagaagttggttaaaaaataaaataaagtagagaatagtggagaagagaaactaaagtggatgaaagacaaaaatatgaaaattgcaaggatcagaaatcctttcagtagctatgtgaccaccagaaagtcaaagtcctgacttgctcctcctcctgacaaaggtggctctgaatgaagggcaacctctccatgccggcaaatccgctcaatgttcatgcattcgatgaagtatgccacacaagatagtaatcagaggaaactcccaaaaatcaaaataaaaagaattaaaacagtgaagaaagaattatggataataataaaaaagaaattagatgataatggggaaacatataacagtctcacaatgaaaagaatatttcctttattaaacataactggtattacatcattacatcaaacgggttgacctgttcagagttcccaaaaagaaaagggtataagatgttgtcacgttgaaaaccaccccaaatctataacttgagatttgcatatatatatgaaaacataaacaagttgggtgtgttaaggccttgttgtaacagagcagtaagaactgtaataaattggggtgggtgggaggtttgctgctgattgtctgactcagaaaacaagcccttaatcagttcttgaccagccctgtgttttgattgcccaacataagattagaattatgttggcagtttaatattcaattgttgaggagaaaatagctatgtctataatatcacatccrgtctcagaatctgcaaccctctgaaacagtctggcttctaccattagccattactttgaccttagctgatcaaacttcttgtatctcaaaaattaacttctatcagaaatgagttcttaaaattcttattgacttccttgataaactaataattcagactacacgaatctgacaataaaattgagaaaagtccaggcacagtggctcatgcctataatgccagcactttggaaggcagaggaaggaggattgccggaggtcaggagtttgagaccagcctggtcaacacagcaagactctgtctctacaaaaaaaaaaaaaaaa

SEQ ID NO: 71021 - DNA, 2391 bp, Homo sapiens
atctacattgtgaaaagaccttctccacctttcctatttactttcactatgctcaaccacactggctgcatttcagatccccaaataagcctcctattctgcccaggaccaccccacagtctgctgcctctgttcagacagctctgcacacctcctgcctggccagctccctgtcatctggccacttcctatgtgtcaccttcccctataatatgctccttccccaggctaccttaggtgcctatcttagtctttccagcaccctatggtccaccatacttttagagcatttttcacagtttgtaattgtatatttagttgtataattctttgctttacctttcccctaaaggactgtaagttcatgggggcaggaatgggtctgttttgcccatcacatatctccaacacctagcaaaggcctggtacatattttgcactcaaaaaatgcaagctgagaaaatgagtgcatgagaacagctcaaggccatcctctcccaggaagccttcctcacttatgcccaggccactgggttacttcccttttcaaatactcagtaacattcttgtttgcaataagacagaataagcaccacttattttgttccagatgatgtattgcactgtaagcaaaaatgcttctggtttttatttttaaagtcttccttatttttccccctacagtgctcattgagggcaggatttggcccccagctccttctggaacccaatttccttccatgttccctatcacaaccctacagacactggcctccttgctgttctcaaatactcttgacacatccttgctcagagactttgctgttcccacatttggaattctctgccctgagatgtttgaatgtctgccttcctgctcatgcagctgctgcccaaaggtcacctcttcagatagcctttgcctccaccttctctcccacttatctcaatcctgctcaattgttcttcccagctgttgtcactatttaccattacaccacacattaacacatgttgtttatcatctggctcccttgccagaacacaggccctgtgaggatatgggaacttttctgtttgattcccaccatgtgcctggcatgaagtatttccttttaaatacttatcaaatgacggaatttcaactccaaggagaacctagaggcctagtgtagataaaaatgaacatagtagattttagctggtttaagaaactaatccaaccttcacttgaggatcgtaactcagagaaggaagacaggcattctttaatcgatagattgcttcagatgcaaagaggcaagtaaaggaaagaagttggttaaaaaataaaataaagtagagaatagtggagaagagaaactaaagtggatgaaagacaaaaatatgaaaattgcaaggatcagaaatcctttcagtagctatgtgaccaccagaaagtcaaagtcctgacttgctcctcctcctgacaaaggtggctctgaatgaagggcaacctctccatgccggcaaatccgctcaatgttcatgcattcgatgaagtatgccacacaagatagtaatcagaggaaactcccaaaaatcaaaataaaaagaattaaaacagtgaagaaagaattatggataataataaaaaagaaattagatgataatggggaaacatataacagtctcacaatgaaaagaatatttcctttattaaacataactggtattacatcattacatcaaacgggttgacctgttcagagttcccaaaaagaaaagggtataagatgttgtcacgttgaaaaccaccccaaatctataacttgagatttgcatatatatatgaaaacataaacaagttgggtgtgttaaggccttgttgtaacagagcagtaagaactgtaataaattggggtgggtgggaggtttgctgctgattgtctgactcagaaaacaagcccttaatcagttcttgaccagccctgtgttttgattgcccaacataagattagaattatgttggcagtttaatattcaattgttgaggagaaaatagctatgtctataatatcacatccggtctcagaatctgcaaccctctgaaacagtctggcttctaccattagccattactttgaccttagctgatcaaacttcttgtatctcaaaaattaacttctatcagaaatgagttcttaaaattcttattgacttccttgataaactaataattcagactacacgaatctgacaataaaattgagaaaagtccaggcacagtggctcatgcctataatgccagcactttggaaggcagaggaaggaggattgccrgaggtcaggagtttgagaccagcctggtcaacacagcaagactctgtctctacaaaaaaaaaaaaaaaa

SEQ ID NO: 71022 - DNA, 2391 bp, Homo sapiens
atctacattgtgaaaagaccttctccacctttcctatttactttcactatgctcaaccacactggctgcatttcagatccccaaataagcctcctattctgcccaggaccaccccacagtctgctgcctctgttcagacagctctgcacacctcctgcctggccagctccctgtcatctggccacttcctatgtgtcaccttcccctataatatgctccttccccaggctaccttaggtgcctatcttagtctttccagcaccctatggtccaccatacttttagagcatttttcacagtttgtaattgtatatttagttgtataattctttgctttacctttcccctaaaggactgtaagttcatgggggcaggaatgggtctgttttgcccatcacatatctccaacacctagcaaaggcctggtacatattttgcactcaaaaaatgcaagctgagaaaatgagtgcatgagaacagctcaaggccatcctctcccaggaagccttcctcacttatgcccaggccactgggttacttcccttttcaaatactcagtaacattcttgtttgcaataagacagaataagcaccacttattttgttccagatgatgtattgcactgtaagcaaaaatgcttctggtttttatttttaaagtcttccttatttttccccctacagtgctcattgagggcaggatttggcccccagctccttctggaacccaatttccttccatgttccctatcacaaccctacagacactggcctccttgctgttctcaaatactcttgacacatccttgctcagagactttgctgttcccacatttggaattctctgccctgagatgtttgaatgtctgccttcctgctcatgcagctgctgcccaaaggtcacctcttcagatagcctttgcctccaccttctctcccacttatctcaatcctgctcaattgttcttcccagctgttgtcactatttaccattacaccacacattaacacatgttgtttatcatctggctcccttgccagaacacaggccctgtgaggatatgggaacttttctgtttgattcccaccatgtgcctggcatgaagtatttccttttaaatacttatcaaatgacggaatttcaactccaaggagaacctagaggcctagtgtagataaaaatgaacatagtagattttagctggtttaagaaactaatccaaccttcacttgaggatcgtaactcagagaaggaagacaggcattctttaatcgatagattgcttcagatgcaaagaggcaagtaaaggaaagaagttggttaaaaaataaaataaagtagagaatagtggagaagagaaactaaagtggatgaaagacaaaaatatgaaaattgcaaggatcagaaatcctttcagtagctatgtgaccaccagaaagtcaaagtcctgacttgctcctcctcctgacaaaggtggctctgaatgaagggcaacctctccatgccggcaaatccgctcaatgttcatgcattcgatgaagtatgccacacaagatagtaatcagaggaaactcccaaaaatcaaaataaaaagaattaaaacagtgaagaaagaattatggataataataaaaaagaaattagatgataatggggaaacatataacagtctcacaatgaaaagaatatttcctttattaaacataactggtattacatcattacatcaaacgggttgacctgttcagagttcccaaaaagaaaagggtataagatgttgtcacgttgaaaaccaccccaaatctataacttgagatttgcatatatatatgaaaacataaacaagttgggtgtgttaaggccttgttgtaacagagcagtaagaactgtaataaattggggtgggtgggaggtttgctgctgattgtctgactcagaaaacaagcccttaatcagttcttgaccagccctgtgttttgattgcccaacataagattagaattatgttggcagtttaatattcaattgttgaggagaaaatagctatgtctataatatcacatccggtctcagaatctgcaaccctctgaaacagtctggcttctaccattagccattactttgaccttagctgatcaaacttcttgtatctcaaaaattaacttctatcagaaatgagttcttaaaattcttattgacttccttgataaactaataattcagactacacgaatctgacaataaaattgagaaaagtccaggcacagtggctcatgcctataatgccagcactttggaaggcagaggaaggaggattgccggaggtcaggagtttgagaccagcctggtcaacacagcaagactctgtctctacaaaaaaaaraaaaaaa

SEQ ID NO: 71023 - DNA, 826 bp, Homo sapiens
cctttctcccatttctgatttatatatactttacctccttcttgcaattgtaatcctgtcctacacactagtctgtttggctgggcttcaagcttctgtctggttcctgccgactccttacccctggggaaatgcagtctgtttccaactggacaggccatgtggaagcatattgctaccactctgccaggtgtacttagaagtttttgctctcctctttcaccttcaagaactaactaatttctttgagcayttatagaattccagatcaaggctaaatttcccattcctcttaggtgtgtagaccatctctcttctcaaagcactgaccctggggctgatcagacaatcagttttgagctcatccgtcccagaatccttccttcttcatggcattggcaaatgccaccaacttctcagcctgctcagggtcaagccagctcatgaaaggacaccctctggtgtgctttctggctgtttcaggaccacaagaagaagcagcagctcgcaagaaacatgttgctaaatagacctggcttctatgggaatcccggagttaagcattcccacccctttgggccacctttcacatttgattgattttttttcgattggttgtttgcctgacctgatcagagagtttggacaggagtttctgttgacactttatttcactttgggtaaagtttaaacatgacttatcacaaccctgacacatctggaaggccatattttgcccccctcctgttgtctacctctttcaatgatgagaatatagggcataaaggccttttttgtacacgaggagaaagttcattgccttggg

SEQ ID NO: 71024 - DNA, 826 bp, Homo sapiens
cctttctcccatttctgatttatatatactttacctccttcttgcaattgtaatcctgtcctacacactagtctgtttggctgggcttcaagcttctgtctggttcctgccgactccttacccctggggaaatgcagtctgtttccaactggacaggccatgtggaagcatattgctaccactctgccaggtgtacttagaagtttttgctctcctctttcaccttcaagaactaactaatttctttgagcacttatagaattccagatcaaggctaaatttcccattcctcttaggtgtgtagaccatctctcttctcaaagcactgaccctggggctgatcagacaatcagttttgagctcatccgtcccagaatccttccttcttcatggcattggcaaatgccaccaacttctcagcctgctcagggtcaagccagctcatgaaaggacaccctctggtgtgctttctggctgtttcaggaccacaagaagmagcagcagctcgcaagaaacatgttgctaaatagacctggcttctatgggaatcccggagttaagcattcccacccctttgggccacctttcacatttgattgattttttttcgattggttgtttgcctgacctgatcagagagtttggacaggagtttctgttgacactttatttcactttgggtaaagtttaaacatgacttatcacaaccctgacacatctggaaggccatattttgcccccctcctgttgtctacctctttcaatgatgagaatatagggcataaaggccttttttgtacacgaggagaaagttcattgccttggg

SEQ ID NO: 71025 - DNA, 854 bp, Homo sapiens
tttttcccgtaaagtggctgaaatctgaagctgaatctgcaagtgtcatggagtcattgaatctcacagtctcaactgataaaagttattaaaggtcgtctggttcagccttctacttgatgtggaaatcctttctacagtaactctgtgtgggaatcacagttcacttaggggcttagtctcatagtcaaaatgtcttcttcctaagtgggaaattacttccagcttctattcattcagtagttgtttaatactatctctctctctctctatatatatatgtattatatatatatatatatataaaatatataatgtgtatatatatctatatatggatatgtatacgtatatatacatatatagagagagagaaagagagagagagagtatatctccatctaaaagcagaagcataaaacattatacctttaacaccaagatccagttaggtgtgagccccacaggcatgctgctgggcccatgggaccttaagtttagtaaattccagaatttgcctttaataagttcagagtcttaatatctaaatatatattttaaaagatgtctaaaacaagtttcctactaaaaagtgacttatagtctagaaggcaaggaatgacagtcactcatactttctttcatgtggtaatcataatggtaataagaatgataccttacatgcattgaatgctttctctgtgcaggtacagttttaagtgcttgacgtgaattaactcatttagtcatcataataacactgcaaggtaggtaagcacgttcattaacttacccrtttcacagaggagaaaaccgaggcacagctgctcaagattatacaactaagaataaga

SEQ ID NO: 71026 - DNA, 2307 bp, Homo sapiens
tggttgtgttctaagaagcattttgcccaaacaatgctaggtgaagcagttgctagtgttgtctggaccggacacctgctttttacagacttatgggggcatggggacctagggctcagacacatgcattattcactgtttctttctccgcttattagccttgtgggtaagggcagcattaaccaccgacccagcagcctttgagaacaccatggccaaattcaagaaaacacacagtcttgtgtttggggctttaagagactctaaggtgacttggtgctcaggaggatttgagaacatattggcttatagccattactgttggctaataattgcactaatctttttgaggtgggggttagtattcccccctccctcaatctccaagacagagaacaatgggagaattgtatttctgcactattccatgagatagggtcgggactgcaactgggtggatataaggtcttcaggggatgacccaccaggtgttagccccaaaccattgttaagaaacccaggacctgagcattacagctttggcctaatgatagggaagcatttccctagctgagccatttcaacagcagctgttttggggttctcaaaagtatcctttgggtgctcagaagcaagtgcagtgcttgctggaagagaaaggggagtgaaagggtgtgtgtgtttgacctgcacatgtctgyacttgtgtgtgctgccttctatccttttttctcttgcttataattcacttagtaaaaccattttgtcttctttagcatggatgacattaaattgaaatttggaattgcaatgccacgtggagatacctctgtagaatgaattgtgagtgtgtgtgtgtgtgtgtgtgtgtgtgtgtgtgtggttgttggtggtgggggccatatttgtctttaatattaaagtcaagttatcaattctactaccaggagttaaaataatctacaagattaatctatgcagagggtgtatcctctgatgtagaaagtatcatttaaatgtaaagttgtgataagcgtgcatcctctaatttagaaagtacgtgcacagtagaaactcatgcctagaaggttccactaagaagttcaagggttcttagatccaaggggcaggtaaacctcagaatatatttgtcacagttcgtcctaatctccttcacttttcccaaaacggggcccatgatcattttaaacatcttaagcctacccgttccttttagggaatttccacgggctagttgttcaaatgtggggcactgagaaagccagatccttgccacataccgactgggataggtgcagagcattttatttctcctctgcctctccacccaaggtttccctcgtgcttgagagttccagccctttctccatctgccgcctgttaagcagctgctgggttcagcaacaaggaggctggtgtggctggtggacggagaacactgttagtgtaacttggcaggaggttgcacgctggcacagaggggcggtgaaaacgagaggaggtgagaatgtctccacggggtggggggcggaggacagagaagggggacgaccactaggagacccactgcccccggtggctggagctcatagggagcggctggtccaaattggatggggatccagcaaaggcacagtgtctcccctcccagaccccaggagttctccagcctgcattttccagctccccacgaacatttccaaattaaaaaataaaataaaaatacgtgtggaaaaatacagtaaaagtgacagcgccttcccggtttccgactgttctgttttgacttcacaatcagccaaactggagcccctgagtagccagcttaatttgtcaccttgagttattaaccgtttccctgcctctctcggtgggtgtcctcctggctcctcgccctggctggctcagtgacctgttaatcttgtgccctttctctcgggcttatggctctgcctggagagccctgtttccctcttggagtcaaatttgaattcatttcacagtcaccacttagctggtttttgccaagtggtggctgaaacagaagggtgatgggaaaatgcaggaaagaatggctccagaggcagctctcgcggggtcccccgtgtcctttagaagttcaacagttcagtctatttctcttggttaagggccaagaggcagagggaggctcactttagaactgggatgatatagaatgtagtctattgggaagcagaggagagctaatcctgatacattttttatgtcagcaaagttagtatgcatggtattctatctctcttt

SEQ ID NO: 71027 - DNA, 664 bp, Homo sapiens
tcttttatagattttcttcatattactgcaattttaggaattagagaaaagatgaaaagatatgtttggtgacatagaaattccctctattccttagaagacaaaagaataatttccctagctctatcatgtatttatgatatgatttgcggaaattcctacaaactttctgtagctctatttcttcatttgcataaggcagtaataatactgaatgatactaacaagaaaagttgtgaatatttcatgagaaaattcatgatgaaggggctttgccaaatgtaaaatagctcctaaacgtctattgttttcgtcatcgtarctgtcatcattatcagcttctaactctaatgaaagctaagggacactctgaaactacatgctgaattattgatctctgttcatattcatttttaatgtcatcaaattgttgataatataacatttaacccttctaaacttcacttgaacaaagggtaacagggaggtgtgagttcagaaaagagtgggcacccaacatagactgacttacaatgaaatccacattccaatatttatgaggcatgaacattttccaaagagtgacatgggaaaatttgttttcttgattttatatgttcagcgctccaaaatctaacatggcaacagggtaagtgtgggggca

SEQ ID NO: 71028 - DNA, 705 bp, Homo sapiens
tcccctcacaaacatgagctcaacatacacaagattcatgaaacagatgacacacaattatcaagggtgctaaaagaaggatctcacataaaaattattctcaaggtggtataataaaaacattcttaatgtcaggtgccaaattttctcttaaaattgtggcctcattaaaaaaatgccacatatttttttttttttaaaaagatgttatagcgcttttaaagattccatctgtttccaaatgaaggattagcttgacatggtcctatatagagtagagggaaatttcagggtcatgtcttctgcacagatcaatcctccgatacatcccctactaccctccattcccaaaaatacagcgttatkaaaagaatgaacacacacacacacacacacacacacacacacacatacacaaacacactccaagactaaagagttaagctgtgccaggcaaaatgcccatgtgtcctgtaggcataaaaagggtggcaagaggcccatgagagagctaccacctagttggagaggtgccactatgaaactgattcttaagatgctgagaaaccgctgccccagccttccaggtattatagaaagcctcacttcaacatgctatgaaacagaaggtccttcctggaggatagtttggatgtggacctcagtttctctgactcagtcttggattcctgcccttgccttaca

SEQ ID NO: 71029 - DNA, 1244 bp, Homo sapiens
gacactgtggtttcctatattatcaagtgactctgaaggtccttgcctggtagcaatctgatattttgctaaggcttgaatttaaaacactttgcagaaagcacacctggaacaaagcctagcttctgaaatccttaagagtatgatttttttcttctctgcttgtttttggatatatagaaattctcctcaagtgattatttaaggtacacttcaggtaagctcatggtaacagagtaatgtaataaatggtaaagttccttttagtggcagaatgtattattttttgtggcatggcagtctctgttggttggtcatcccacccccatttccagacacctttttccttttttgcctctggaggagaggcgagaaaatccggtatgttcttacttcctagcctttgaggccaggattggcaatgagccaattctggacaatgagctatgtgtggaaatgtgttaaagccgtctgggggaagaccttagcttttactggtaagataaataaggctggcacgctcttttccctccctttatcccttcctgttttgcctagatctactgcaagatggtcaagtggaagaatcccagagaatcagagatacaaccaatctgatatccactgaaatctccctcctcttccctgctagcagccgcccatttctatactacttactaggtgagaaacaggaactttacttctttatgtcaccaatagtagggtgttctttctttctttctttctttttgttttttttttgagatggagtctcactctgtcacacaggctggagtgtggtggcatgatcttggctcactgcaacctccgcctcccgggttcaagcratattcctgcctcagcctcctgagtagctgggattacagacacgtgacatgatacttggctaatttttgtatttttagtagagacagggtttcaccatgttggtcaggttggtctctatctcctgaccttgtgatccgcctgcctcggcctcccaaagtgctgggattacaggtgtgagccaccatgcccagccaccaatagtagggctttctgttatctgcagcctagagcattcctaaccaacacaaattgtattatgaattaatttagtcctgtatttagatattattattactgacaggatattctttacttttaaaatttttttaaaatttttaactttgagtacatagtaggtatacatatttgtggggtacatgagatgttttcataca

SEQ ID NO: 71030 - DNA, 597 bp, Homo sapiens
gaaagacaaaaatgtagtcacaaagaacctaaaaatacttttaaaaaataacacttgttaggttacattagaaaaggttaggttagattacctttttttttttttttacaagaaataaaaagtagacaagaaataaagatgttccactaaggaaagagccaaccccacaagtattccttaagatactgacaatatggctaatragcaaagtgaacatggtcttaatcctgcacctaggcctacatttgcaacttggttcttaaaagtggccatttttcttcacccagctaaggcatttagggtccttgcacacatgttcatctcttcttaatggttactgtgcactgtaacataattacctgcttttgtttaccttttccattagaaaataaactccttaagagcaaggaatagggctcattaactaacatttctcaggaaataataggcacttagcaaatgtttgggccatgaacaaatgaatgtgtcccaaattcaccagactgtggaagccagaaagaagatctgaccatctcttgcagaagaaataaagaatggtaactgtgcaacaagttattaccttaagtggtatttaaa

SEQ ID NO: 71031 - DNA, 1024 bp, Homo sapiens
gaggaaaagaaaggtatctgggtttcttcttctcattccacgtcttcagggtacatggaaaatattctaagactagaattgtcaagcattttggctgtagattctttccctcaaagaagtttatatcagaaacctgatttgataaacaaacaaaagaggaatttctctgatggaattggctgtgtccctatatcctcctctctgagtgccacactaggaagaagcccagggtggttaggaatcaagtataaacatttatgttctataatgtgagtcacacatgtaacttttaattttctattaggcacattaaaaaggtaaaaggaaacaagtaaaattaattttaatattttaaggcaatatatctaatatattataatttcaatatataagcaatagaaaatttgtttagatattttacattctttttttatactaaaatgtgtcttttactcttttagctcccctcaattcagacctgtcacattcaagagctcaaaagccacatgtggttagtggctaccctattagacaatgtacgtatagagtatttcccccagagcttttctcattcccctctcacctacccaacagattcagtccctctccttttttctttgtctggggtagtatgtactttcataaaacccctctactaagtaaaactgttctgttttgttttactttacaaacttaaaccacattcaygagttaactattattcatttctattaatctgtttactactcattaaattaaatcttttaaataaaaataaaatagaaaaactgctctgctatataacagctaaggaatgaatcactaacctcactaattcaagcctcagtttcctcatatataaaatgtggataataataccctccttgtatatggctgtggggaggattagagacaaacatagtatcaattccctaactaggtactttgcacactgtgggttttcagtgaaaagtggacactactatttagtgtaggtagggaagggagagctctctgcaccctc

SEQ ID NO: 71032 - DNA, 593 bp, Homo sapiens
gttaggtcctgtcatgcctttgaaacccagactctttcctcctttagcagactgcagcccttccctcactgggttatgttgaggctcaattccagttatagtagtttcccttatcccgtggtttcactttctaaggtttcagatacctgacgtcccaaaatattaaatagaaaaatccaaaaataaataatttacaagttttaactaagttgcacaccattctgagtagcgtaatgaaatcttactttatttctttctgttccattcaggactggaatgattcgtttgtctggcatagtcccacttcatatgctgccctcctggtggtcacttagtagccttcttggttacaagatcaactgtggtagtatcctggtgcttgtgttcaaataaccattattttacttaataatggccccaaagaatagtggagtagtgatgctagtatattattataattgttctattttattattaattattgtttttaatctctcwctgtgcctaatttataaattaaactttatcataggtatatgtttaggaaaaaacttagcatatatgaggtttggtactatctgtggtttcaggga

SEQ ID NO: 71033 - DNA, 828 bp, Homo sapiens
tcatttagtcttcatcagaaaccgaggaaatgaatacttatattgttctcattttacatatgaraaatatgaagaatagaatctggattataaagaagactgcctgcctccagtgaatgagctgggggtacctcaccttgctggaaacataaggagcagccatcatctccctgtgcagagaacaagatgctatcacagcaagttgatcctgttcaagggaacaaagttttgcagaatacctgtctcaaaggcagaaacctggggtagaaagtttactaaccttaaagtcaaaactcctgctcttacttgctgttgtcaaatattagctgttgtctaaaagccttagacatgtgtaaaatggggataatgttttctgtttttacacataaagtattgatcccatatataagaaagcttaaaaacaaatgaactatacagaattctcatacagggccatacttggtcagccaagggctccaggatagagaccatgagtaactcatcccatagtgaccaggatatttggaagcaatgcaaaaacttgacaaccaccaagatagagagtagttcctcttatatgataatagcccttctttccaattcaaacacaatgattccccatgtagagggtaaaccctaagtcttggcagccctcatgaattgcaaaagaaaacatggtattgccacatacccaagtccaacactgaaaaatattccattgcttttccaaatcaatactgattgagacccaatgtatacaccaaatgaggtttagagtaaaaatatgacttaaattcctccactagactgtgagttcctggagaatat

SEQ ID NO: 71034 - DNA, 828 bp, Homo sapiens
tcatttagtcttcatcagaaaccgaggaaatgaatacttatattgttctcattttacatatgagaaatatgaagaatagaatctggattataaagaagactgcctgcctccagtgaatgagctggggktacctcaccttgctggaaacataaggagcagccatcatctccctgtgcagagaacaagatgctatcacagcaagttgatcctgttcaagggaacaaagttttgcagaatacctgtctcaaaggcagaaacctggggtagaaagtttactaaccttaaagtcaaaactcctgctcttacttgctgttgtcaaatattagctgttgtctaaaagccttagacatgtgtaaaatggggataatgttttctgtttttacacataaagtattgatcccatatataagaaagcttaaaaacaaatgaactatacagaattctcatacagggccatacttggtcagccaagggctccaggatagagaccatgagtaactcatcccatagtgaccaggatatttggaagcaatgcaaaaacttgacaaccaccaagatagagagtagttcctcttatatgataatagcccttctttccaattcaaacacaatgattccccatgtagagggtaaaccctaagtcttggcagccctcatgaattgcaaaagaaaacatggtattgccacatacccaagtccaacactgaaaaatattccattgcttttccaaatcaatactgattgagacccaatgtatacaccaaatgaggtttagagtaaaaatatgacttaaattcctccactagactgtgagttcctggagaatat

SEQ ID NO: 71035 - DNA, 630 bp, Homo sapiens
aaaaggctccttcaggcacccggagagcttagttaattcccaggggcaggatcggctcctgtttgatttaaatkagtgtttcttaatcctgccacatactagaatcacccatggagcttcttaaaatattaatgtctgggccctacactgaaaaagtctaatttaattggtctagtgtgaaacccattattaacagagttttggaaactcctccaggtgactccagtgcgtggtcaggtttgggaaccacaggtctggaaaaaatgattaaatttaatctttctgtgtttttttttttttttttttttttgaagctcctgcctctcaattaatataaatgggcattgcggatgtacctgcagtacaaagagaacttgccaaaaacctctggagaggagttaaccatgcaacaaagaaggaaacacattcagatagaaaaattatctcgaaaatgtgtatagcactaaacagactcccaacttagaagcagaggaatggtattttttttaaacttcctaatgaacattgcacttagctagctgtcaaatatacaaacagactaatttttccttctaattattttgggatgttttccttggataacatgattatgtggctagaattcctaat

SEQ ID NO: 71036 - DNA, 1051 bp, Homo sapiens
aaatacaaaaattagtcgggcatggttgtgggcgcctgtaatcccagctactcgggaggctgaggcaggggaatcgcttgaacccaggaggtggtgtttgcagtgagctgagatcgcgccactgcactccagcccgggtgacaggccaacccccctacccccactgaaaaaagaagatgcctcggtgcagcaccatggcttgactccttcttgctttcagccttgtctctcaccacatagtcccacatatactcacctcttcctgagtccttccagtcccccatttccttccacacaaaactgtacccatgctgttgcctcttcctgaaaagctcttwtcccacccttttcaacatccacacattccttctacacagccaagtaccacctacttagggattctgacctccttgaatagctcaaatctcccctttcagggctctcctagtaccttgaccactctcttctctagttcttttttgcaaatttatttatttgtaaaactatttgattgcatcataagaacagaggctgagcctgttttgctcacaattgtaccctcccctaccaatgtctgcaaatatcaatagtaagtgcagttaacgtttattgatacatgtgccaggtattgttctaagtgctttgcacagatttttcttatttacacctcacaacaaccctgtaagggaattattctcccttttttagagagaagtaacttgatgatccttcagctagtaagagacagagctggatttcaaccccaagcaggctaactatagagtttatgtactgactgccacagtctactcaatactgaatacatttgttgaatgaatgaattaattaagagtaaatgaacatctctcctggatatttaggtagcatcttatatagaagtggagatgaggttttagtgctccctaaagtgctctccagctccagggttcctgactaggcatgagaagggaaagggacaaagctggtcctaaccctctgtctgaatttccacacttgccagagcacaagcagccatgaaggtccagcctca

SEQ ID NO: 71037 - DNA, 2059 bp, Homo sapiens
cttctcaccggcccgcttagcacaggacatgaaacacctagggatgaaatgttctctgttgattttttcttttcaatgtgaaatgtacagtttttgaagtcacaacgttggcacaattaagaagtttatctgacaataacagaacccaaggaaattggttagtattgtgtttctagaatactgtatcttcctgttagtttaacaaactttcaaccaatcaatcatcaacatctttttttttttttttttttagacagagtcttgctatatcacccaggctgcagtgagtggtgccatcatagctcactgcagcctcgacatctcaggctcaagtaatcctcccacctcagcctcctaagtatcgggaccacaggagggcatcaccacacccaaccctttttttattttttgtagagacagggtttcccaatgttgcccaggctagtcttgaactcccggcctcaagccatcctccctccttggcattacaggcatgagtcaccgcacccggcccatcttcatcttccaaagacactaaagacaaatcagaccaaagccctgtcccaaggaggctcaacacattactttactgtaatgcaacgtatgcggagacaaccacagaatggaaaagggaagcacaggggcacctaccaaagctttattagcggggaggggctgcagaatcagggaaagcttctcagaacacatggtgctcaatcttagttgactttgcttggtggtcctttcaagcagacagacttcttccaaggcctgggcctttgggaccaatctacataactacatagaataatttatgttttgcctaacaagaatccaatttcaaacttttgctttgctagcagatgtttggccttctctgcttcagagaaaggggaacttcagtcaaaggcaaaaatagaagatcatcctaggcttttgagtttccaagggcccagccctggtatgatggacattttaaggaattaaattcagagtgattttaacttctatgcatgatttttgccttctatgctaattttttaaccttgcaactgaatcagaatgattccactgtacagtgttttaaaagaaaaaaatgttacctctagaattttacacccaggcaattcaacattcatgtattaaaaagagacattctcagatatgcaaggattcatgtatccttgaaaaaattatttgaagatgtactacaacagagcgataaatgaagcaaataaagggcattaagaatggagctgtcagtcaggcgtggtggctcatgcctataatcccagcactttgggaggccaaggcaggttgatcgtgaggtcaggagttcgagaccagcctggcctacatgatgaaaccccatctctactaaaaatacaaaaaattagccgggtatggtggcgtgcacctgtagtcccagctactcaggaggctgaggcaggagaatcgcttgaccccrggaggcgggagctgcagtgagctgatatcacgccactgcactccagcctgggtgacagagtgagactctgtctcaaaaagaaagaaagaaaaagaacggagcttggtaatcccagctacttgggaggctgagatagaagaatcacttaaatctgggaggtggaggttgcagtgagcaaagataacaccactgcactccagcttgggccacagagcaagaccctgtctcaaaaagaatggagctgtcatgtataaaagggtaaatgctgagtaattaaccaatttaaaatagaaatgtgccttaaaaatacattgtaattttgattataaagccgaatgatattaccaaaaattattttccaaagaacaatgatattctgaatccaaaattctaatgttaataaaaactaaggatgggtgattaaaaaataaaagtgtgtcaaacttcttatcttataaaaatacaagatactgtttcattcctgactctgataagagaggaaatataggttaaagtatattgtaaaacataaggcaacagaaaacttggtagtttgaaaggcagaatgaaatatagggtataggctgggtg

SEQ ID NO: 71038 - DNA, 2059 bp, Homo sapiens
cttctcaccggcccgcttagcacaggacatgaaacacctagggatgaaatgttctctgttgattttttcttttcaatgtgaaatgtacagtttttgaagtcacaacgttggcacaattaagaagtttatctgacaataacagaacccaaggaaattggttagtattgtgtttctagaatactgtatcttcctgttagtttaacaaactttcaaccaatcaatcatcaacatctttttttttttttttttttagacagagtcttgctatatcacccaggctgcagtgagtggtgccatcatagctcactgcagcctcgacatctcaggctcaagtaatcctcccacctcagcctcctaagtatcgggaccacaggagggcatcaccacacccaaccctttttttattttttgtagagacagggtttcccaatgttgcccaggctagtcttgaactcccggcctcaagccatcctccctccttggcattacaggcatgagtcaccgcacccggcccatcttcatcttccaaagacactaaagacaaatcagaccaaagccctgtcccaaggaggctcaacacattactttactgtaatgcaacgtatgcggagacaaccacagaatggaaaagggaagcacaggggcacctaccaaagctttattagcggggaggggctgcagaatcagggaaagcttctcagaacacatggtgctcaatcttagttgactttgcttggtggtcctttcaagcagacagacttcttccaaggcctgggcctttgggaccaatctacataactacatagaataatttatgttttgcctaacaagaatccaatttcaaacttttgctttgctagcagatgtttggccttctctgcttcagagaaaggggaacttcagtcaaaggcaaaaatagaagatcatcctaggcttttgagtttccaagggcccagccctggtatgatggacattttaaggaattaaattcagagtgattttaacttctatgcatgatttttgccttctatgctaattttttaaccttgcaactgaatcagaatgattccactgtacagtgttttaaaagaaaaaaatgttacctctagaattttacacccaggcaattcaacattcatgtattaaaaagagacattctcagatatgcaaggattcatgtatccttgaaaaaattatttgaagatgtactacaacagagcgataaatgaagcaaataaagggcattaagaatggagctgtcagtcaggcgtggtggctcatgcctataatcccagcactttgggaggccaaggcaggttgatcgtgaggtcaggagttcgagaccagcctggcctacatgatgaaaccccatctctactaaaaatacaaaaaattagccgggtatggtggcgtgcacctgtagtcccagctactcaggaggctgaggcaggagaatcgcttgaccccgggaggcgggagctgcagtgagctgatatcacgccactgcactccagcctgggtgacagagtgagactctgtctcaaaaagaaaraaagaaaaagaacggagcttggtaatcccagctacttgggaggctgagatagaagaatcacttaaatctgggaggtggaggttgcagtgagcaaagataacaccactgcactccagcttgggccacagagcaagaccctgtctcaaaaagaatggagctgtcatgtataaaagggtaaatgctgagtaattaaccaatttaaaatagaaatgtgccttaaaaatacattgtaattttgattataaagccgaatgatattaccaaaaattattttccaaagaacaatgatattctgaatccaaaattctaatgttaataaaaactaaggatgggtgattaaaaaataaaagtgtgtcaaacttcttatcttataaaaatacaagatactgtttcattcctgactctgataagagaggaaatataggttaaagtatattgtaaaacataaggcaacagaaaacttggtagtttgaaaggcagaatgaaatatagggtataggctgggtg

SEQ ID NO: 71039 - DNA, 2059 bp, Homo sapiens
cttctcaccggcccgcttagcacaggacatgaaacacctagggatgaaatgttctctgttgattttttcttttcaatgtgaaatgtacagtttttgaagtcacaacgttggcacaattaagaagtttatctgacaataacagaacccaaggaaattggttagtattgtgtttctagaatactgtatcttcctgttagtttaacaaactttcaaccaatcaatcatcaacatctttttttttttttttttttagacagagtcttgctatatcacccaggctgcagtgagtggtgccatcatagctcactgcagcctcgacatctcaggctcaagtaatcctcccacctcagcctcctaagtatcgggaccacaggagggcatcaccacacccaaccctttttttattttttgtagagacagggtttcccaatgttgcccaggctagtcttgaactcccggcctcaagccatcctccctccttggcattacaggcatgagtcaccgcacccggcccatcttcatcttccaaagacactaaagacaaatcagaccaaagccctgtcccaaggaggctcaacacattactttactgtaatgcaacgtatgcggagacaaccacagaatggaaaagggaagcacaggggcacctaccaaagctttattagcggggaggggctgcagaatcagggaaagcttctcagaacacatggtgctcaatcttagttgactttgcttggtggtcctttcaagcagacagacttcttccaaggcctgggcctttgggaccaatctacataactacatagaataatttatgttttgcctaacaagaatccaatttcaaacttttgctttgctagcagatgtttggccttctctgcttcagagaaaggggaacttcagtcaaaggcaaaaatagaagatcatcctaggcttttgagtttccaagggcccagccctggtatgatggacattttaaggaattaaattcagagtgattttaacttctatgcatgatttttgccttctatgctaattttttaaccttgcaactgaatcagaatgattccactgtacagtgttttaaaagaaaaaaatgttacctctagaattttacacccaggcaattcaacattcatgtattaaaaagagacattctcagatatgcaaggattcatgtatccttgaaaaaattatttgaagatgtactacaacagagcgataaatgaagcaaataaagggcattaagaatggagctgtcagtcaggcgtggtggctcatgcctataatcccagcactttgggaggccaaggcaggttgatcgtgaggtcaggagttcgagaccagcctggcctacatgatgaaaccccatctctactaaaaatacaaaaaattagccgggtatggtggcgtgcacctgtagtcccagctactcaggaggctgaggcaggagaatcgcttgaccccgggaggcgggagctgcagtgagctgatatcacgccactgcactccagcctgggtgacagagtgagactctgtctcaaaaagaaagaaagaaaaagaacggagcttggtaatcccagctacttgggaggctgagatagaagaatcacttaaatctgggaggtggaggttgcagtgagcaaagataacaccactgcactccagcttgggccacagagcaagaccctgtctcaaaaagaatggagctgtcatgtataaaagggtaaatgctgagtaattaaccaatttaaaatagaaatgtgccttaaaaatacattgtaattttgattataaagccgaatgatattaccaaaaattattttccaaagaacaatgatattctgaatccaaaattctaatgttaataaaaactaaggatgggtgattaaaaaataaaagtgtgtcaaacttcttatctyataaaaatacaagatactgtttcattcctgactctgataagagaggaaatataggttaaagtatattgtaaaacataaggcaacagaaaacttggtagtttgaaaggcagaatgaaatatagggtataggctgggtg

SEQ ID NO: 71040 - DNA, 550 bp, Homo sapiens
aagactctgcagctattttgccagcaatgggaagaatggagccaacatagtaggggtagctgcaagatgaaaagacaaaaaccacatcctgatgacatcaactgacccttgatcgaactattcctgaagctgttcttacttaagctagttcaggttgaacgttttgccccttgcaactaaaataatcccaacatatttagatgagaggctgagttaacctatggaaatatataaaattgttttctatccattttctaagtcttctatcattcatcaacttgaaaatcaaggtacaatgctaccgatcttaaatactctttttaccactgcccgctaaagaaacgtggagccaccacagcttcaggctggattgtctggctttgctaaggtgatcatgttccatatatagacatggagctattataatcttcacctgttaccgcaaagaatttttttgtgtgtttatccatattgaactttcatgaggcaaacaaaagcaacttgtgaagatttaacgatggtgraaatggctcaaataagtaacctgaga

SEQ ID NO: 71041 - DNA, 996 bp, Homo sapiens
tgcatgttaaagaaagcacccattctgctagtctgacactgaaaattgtgagattttttgcgaaggaaataactacattttgagattagaatttctatactataaatatggagaaagacataactttgctctaattcagggaggtcatcaggcccataaatgtattctttcctgaagttctggctatcagcaatgtctccagcagggactaataagagagaaagtagaacacccatcaggcacaatgaagggcagcaagtcagacttgagctcagcatcaaaagtggttactactcccctgaaaggcagaattgcttcccctgtggttctggagattatgacaatgtttcacaaagtgtggagcagctcacaagatattaaataacttataaaggcattgaaaagatattatatgttgccatgggagacgacattatttctccttttgctcaaaactcttcaatgggtccccatttcctgcagagtaaaaaggaaaggccttgtccttacaagggcctccaaggacctatacaatctgctgctccccagtctcatggaactacctctatgacctcttctcctacaagtagcagccttactccctycactcaaacatactgttcctggactgttccacggactccaggcattcccccaccacacagcctttgcagtggctgctccttatgcccaaaatgcaattccccagatatccacatggctgtttctcatgtccttcaattctctgctcaaaggacatcttttcaacagggaggctctctagttctctcaatttctatcatcttgctctgtttttttttttttttcctgtagcacttatcaacttctaacatactgtataatttaccagtgtgttaagtgtattacttaccatcatctccctgtactagaatgtctattttatttaccaatatattctaaagcgcccagaagagtgtctggcacgtgctcagtaattaattatagaaaggatgc

SEQ ID NO: 71042 - DNA, 655 bp, Homo sapiens
gtctcatccattattcagttctgtgaaatccattttgtaagccagggagtgggagtcacattaccaggggagacttgagaactgcccccatgacatttttcctacactcttgtgaatggccccttctgttctcttcttatgggcccacaagaagtcacaagactccactcacaagcctagaaaatgcagacattcctaaaaatcttggcaccaaggtatctcttggcttctttctctcaggtctaatattagttkgacaaaataatagaaaaatccataaatctaacatattggctgataaaaagtgaaaggcaaattttctaggtgcgaaaaatgaattgtatattagtattattattcagaagctctcgcaaaaattagtaaattctgaaatccatggtggtaatagagaagaattggtgaccgaatcaatgctttgattcatcgtagtccagaatccctctccagcacagttctgattgcaagatacccaatatcttcaaacatttctaatttgagcttcatggctcagataacgattttgttttctttaatccagcgtttcctctgtggggaagcaggggattcttctttgaattaaattaaattaaatgaaacttttataaaattggcaaacatgtaggagaataaaact

SEQ ID NO: 71043 - DNA, 1167 bp, Homo sapiens
tgcattgtggagagttctcagtgtcctcacagagatctagcccccactttttagctgctgcatggaactccacagcatggacacactccacgtatcccattggataaaatgtccatcatttctaaatttttgctctacagacaaacttcattagttgtgcctctttgggtacctgggcaaggatcttctgaggagagttatctagaaacagcagtgctaggtcacaggctacatgctcttcaaaattgtagtaattctaccaccctttcctccagaaaaaatgtcccaaattgttttgttatcacttttattatcagtactaatttttcaccacatatccctttataattagaaaatgattaagcctttccaatgtactctttgttttcttttttagcttgggcaccaatagccaagataggcatcattgggccaagattcaatgggaatagagttcctcatgtccctccttcatcatccttatctgcaagtaaggagaataattatagtggtccttggaataacaataatgtctggtactcatgttggtatttgtggtttgcaagatgcttctgatgagcaaaccaaccagtgagcctcgcggtccttgagcaaagtggtaaccaggtgaccaggctgaggtccaaatgtaggacctgacttgatcacttactacccagctgggtggtcttgggctcattgctcarcttctctgtgcctcaatgttctcatctgtgttaaagcagggataacagcagtgcctctctcctggctgtggtgtggacaaactgagatgagatgcctgatgcttaatatccctcagtcaaaaccaaattgtgttgtgatgataccagcaatacatgaacaatcagctggttttactctagaaagttaactctgtttccttccttgtcttcctgctgcagtggaagaaaaggctacaccagactctcaccttgaggcagatcatgcccaatttgcactcaaggagacagcaatgcccatcttcacacatattgtaaaaaatttaattgctgatgtttctggatttcagtttgaagggctacctagttctggtgtgaaagaagcaggtgagagaagtgtctttagggtaacagggaggaaatgcagaggctcccatcccagcctcagcaaagagtgagggcc

SEQ ID NO: 71044 - DNA, 613 bp, Homo sapiens
ctgaagtggccactcactggcctatggcaagtctcttaactctgccgagcctcaatttccccatgcatccaatgagggtgttggcattgtcctgagtatcctcatagggaagaaatgtttggatgaatcctgtctgtatgaatgggtgataagaatgcagatgtacatggtggacaagcccaaatttgctggcacagcagaaatggattcactgaattatttttgagctcctactccatcaagcttgggatgcagaagtgaataaggcatgagcactacccccaaggagctcctctgagtggggagacaaataagagaataaaactaccaaattttccctgtggtggttatcagtgtggctctggggtcagactgcttgagtttacactcctgtctgtcacctaaaagctgtgtgaccttggggtggtaacctttgtgcctcagctccctaatctgtaaaatgggcatcttaatagtcactrtctcgctgggatgtggtgatgacagagaaaatgcaagcaaagtaagtaacatggagccatgacccacccagggcaaagactcaacaaatggcagctgctgttactaccaagtctgtgagagtagcagccca

SEQ ID NO: 71045 - DNA, 1438 bp, Homo sapiens
caagccatacccctctggtgacccccacccattccccctgccttgtcttaaatatccttctgttttgcttaaggttacctgtcattggatttcaggcccatcataaatctaggatgacatcatctcgagatcttcacttgattgcatctgcaaaagacccttttttcaaataaggaaatattcatagcttctagatgaacatatcttttgggagctaccattcaacccactgcaagtaacgatgtctcttacacttttctaactagttgttcaatgcttcacctttgtaattggtagaagagttactctctccctcttaaggtccccaccaatcatgaattgtccaggattcctggggacttaatgcagtccagaggaaacagagggtctatccagctctccacatggagaaaactctgggaaggatctgaggaccactgctgtgggccatccaacactgtgttgagctgratgctggtcagctgctgctactatctcttcctagtctagatcactgtagaggccgtcttgttcttgagggagagacagcaatatcactccttcagtgccaagcttggcccaggggtctctagagttttacatgcaggagtgcagatcacttttcttcttcctggtcccccaccaccttgagggatttaggcagctccagggatgcagggtcagccttggatccatttcttacctcctctctatactagggccaccaacccctacctcccagggaccctcctctagagaacaagcaggtttccttctttactctgaaagcaccaagggtctgactatataaccctctttccccagacactgtgccacagcccttcctctggaatgagggtcccaagtgagtcaagtagatgtggaacatctactctttggaggacggggaagatgactttcaacaactccagggtgattttctggctctgaattgaggaaggaaatcctacacatttaatttctggcagggcatacctccagtgattacctgctattatgtgaaaaatcagattgcaaatatagcacaaaaagtatgatcctatttcaaataaataggtgtagatcttagaatgatatccactgaattatttacacattcctctgttgatgatgggatggcagaccatttttattttcatcattctcttatctgcattttctaagttttctcctataagcatatatctcttttgtaataagatttttaaggttatataaaaaataatactagcaccttgcagtcacatagtgctttgctgcatctcacagctctaatctaatttcctatctgtgaggtcagaagggcaggtatttttatccctgttttatagatgaggactctgaggagcaggcagtgtgagatatgacgtgcccaaggtctgagagcaaagccaggaccaggacccaggcagggctg

SEQ ID NO: 71046 - DNA, 881 bp, Homo sapiens
ttctggggctgcagtaatgaagtgccacaagctaggcatcttaaacaagagcagtgggttgcttcacagttatggaggctgaaaacccagtgtcccggtgtcggtggggttgttccttttgagaagtgtctgttccaggcttctctcctcagcttgtggatggctgccttctctctgtgcttcttcatgtcatcttccctctacaaatatctgtctctgtgtccaaatttccccttttataaacacaccattcatattggatgaggggtctacattgctccaggatgacctcatcttaactcactgcatctgcaatgaccctatttccaaatgagatcacatatgaatcttgggaggggacacaagttaaacccataacagagctaaatacggctctgctgtcacacagtcctgaattccaaccatgtgggaccttacttagaagaacccttcaacattacgaggccycagtctcctcatctgtaaaatgtgaataggaagaggccatccctgagagggatattttaaggcaagctaaaataatgtctacaatacattaaacatgtgaattgggaaaatttaagtcctcaagggacagcagttgctattttgattattctgcccatgcagccacgtagggacctgtccacctgatccagagatcagactgtctttgtccatgtaactgggaaaggagagaccagacctagtccccagccatgtgggtgtctaacccagtctctcatagctcgaggcttgaggaaatgctatgttaaaatagaacaaagatttccaatgcaattaaaattcctttggtaaagaagtaaaagatttgtggcagcaaagagtatgaagcagaagtaataattaagataatatca

SEQ ID NO: 71047 - DNA, 688 bp, Homo sapiens
caaggcttgggtagcttgctggtcaatgcaatagtggtctttatgagtcagggttagggttcattcagcttaaagctgttgtaactactgatgctattgagcctagattgaacactaagaggctgaatattttggagcctgtaccctcaaccctctgtggccttttagcacttcatcctcctcatccttctttgactgggtgttcctggaaagctcaagaggaacataaagatccaacaggagactcctcccccaccgcattccacccaagactctgctcacrtcacacttcacttttcaaaaaccttcaccagcggctgggcatggtggctcacgcctgtaatcccagcactttgggaggccaaggagggtggatcatgaggtcaagagatcgagaccatcctgaccaacatggagaaaccctgtctctactaaaaatacaaaacttgctgggtgtggtggtgcatgcctgtaatcccagctactcaggaggctgaggcaggagaattgcttgaactcgggaggtggaggttgtagttagcagagatcgcaccattgcactccagcctgggcgacagagggagactctgtctcaaaaaaaaaaaaaaaaaaacacttcaccagcttccctttcagtacacaacacactggaccaaattttctaatttctgagttggtatttaagtcc

SEQ ID NO: 71048 - DNA, 688 bp, Homo sapiens
caaggcttgggtagcttgctggtcaatgcaatagtggtctttatgagtcagggttagggttcattcagcttaaagctgttgtaactactgatgctattgagcctagattgaacactaagaggctgaatattttggagcctgtaccctcaaccctctgtggccttttagcacttcatcctcctcatccttctttgactgggtgttcctggaaagctcaagaggaacataaagatccaacaggagactcctcccccaccgcattccacccaagactctgctcacatcacacttcacttttcaaaaaccttcaycagcggctgggcatggtggctcacgcctgtaatcccagcactttgggaggccaaggagggtggatcatgaggtcaagagatcgagaccatcctgaccaacatggagaaaccctgtctctactaaaaatacaaaacttgctgggtgtggtggtgcatgcctgtaatcccagctactcaggaggctgaggcaggagaattgcttgaactcgggaggtggaggttgtagttagcagagatcgcaccattgcactccagcctgggcgacagagggagactctgtctcaaaaaaaaaaaaaaaaaaacacttcaccagcttccctttcagtacacaacacactggaccaaattttctaatttctgagttggtatttaagtcc

SEQ ID NO: 71049 - DNA, 688 bp, Homo sapiens
caaggcttgggtagcttgctggtcaatgcaatagtggtctttatgagtcagggttagggttcattcagcttaaagctgttgtaactactgatgctattgagcctagattgaacactaagaggctgaatattttggagcctgtaccctcaaccctctgtggccttttagcacttcatcctcctcatccttctttgactgggtgttcctggaaagctcaagaggaacataaagatccaacaggagactcctcccccaccgcattccacccaagactctgctcacatcacacttcacttttcaaaaaccttcaccagcggctgggcatggtggctcacgcctgtaatcccagcactttgggaggccaaggagggtggatcatgaggtcaagagatcgagaccatcctgaccaacatggagaaaccctgtctctactaaaaatacaaaacttgctgggtgtggtggtgcatgcctgtaatcccagctactcaggaggctgaggcaggagaattgcttgaactcgggaggtggaggttgtagttagcagagatcgcaccattrcactccagcctgggcgacagagggagactctgtctcaaaaaaaaaaaaaaaaaaacacttcaccagcttccctttcagtacacaacacactggaccaaattttctaatttctgagttggtatttaagtcc

SEQ ID NO: 71050 - DNA, 688 bp, Homo sapiens
caaggcttgggtagcttgctggtcaatgcaatagtggtctttatgagtcagggttagggttcattcagcttaaagctgttgtaactactgatgctattgagcctagattgaacactaagaggctgaatattttggagcctgtaccctcaaccctctgtggccttttagcacttcatcctcctcatccttctttgactgggtgttcctggaaagctcaagaggaacataaagatccaacaggagactcctcccccaccgcattccacccaagactctgctcacatcacacttcacttttcaaaaaccttcaccagcggctgggcatggtggctcacgcctgtaatcccagcactttgggaggccaaggagggtggatcatgaggtcaagagatcgagaccatcctgaccaacatggagaaaccctgtctctactaaaaatacaaaacttgctgggtgtggtggtgcatgcctgtaatcccagctactcaggaggctgaggcaggagaattgcttgaactcgggaggtggaggttgtagttagcagagatcgcaccattgcactccagcctgggcgacagagggagactctgtctcaaaaaaaaaaaaaaaaaaamacttcaccagcttccctttcagtacacaacacactggaccaaattttctaatttctgagttggtatttaagtcc

SEQ ID NO: 71051 - DNA, 1273 bp, Homo sapiens
atgctatatttatgtgatatctatttttataggtaactgaagcatatgacataatgttagaatttttaagtcttttttaaactaatgaaatagtatacatatgcttgatgtttctttttcggcttttctctatcccattacctttttactccacagaggtaaccattattctgtcagtgtttttattgttatttcttttaaaatttcccagctagttcattttttattctgaagaaacaaaactttgtatttcccagttttatctgaaacataatcatgagtaatagcatagaaaagtagaaatttgccttctttagaaagtttttaatttgttctttgtagcacacagtataatataaaatgtttaaatcgggcaatgatctagattatttaatttaatatgtaattatttttcaaatcagaagtactagaacacatatttaaatattggcctaatcttgatatcacaaagcagaaaatacagcatgttaattatttttaggcatccacctttacaagctctttttgggagaggtagggaactggacaaaaacttgccaattgaaagagcaagtactagcttactcacaaagagaagataccataatatcaaaaaatgacccatagaataggtaaaatagtatgcacatttatattaaatattgtttaattgaacatgggacaataatcaaatgttccaatgttagtgctttgatgttgtatgatattggacactatgaataagaggtccaagatttaactgctttttttcttttctttttctttttttttttttttttaaattttgagacagagtctcaatttgtcacccaggccggagtacagtggcatgatctcagctcactgcagcctctgcctcccaggttcaagcaattctcttgcctcagcctccccagtagctgggattacaggggtgtgccaccatacccagctaatttttatatttttagtagagatggggttttgccatgttgcccaggctggccttgaactcctggcctcaagtgatccacccgccttgacctcccaaagtgctgggattacagccatgagcaatcrcacccagcctaacaacatttttttaatcaaaaatctttggagaggctgggagtggtggcctcttcctaggtccttcttcctagatctcccaaccttactgtagataatccaaattatttcctcccatggagctctgttctttgctgcagaacgaatagggtgatatttgttaagattctaataattatgcatt

SEQ ID NO: 71052 - DNA, 2327 bp, Homo sapiens
tgcatttttagtagacattaagccaggctttaaatgtaatattttaaaatattcttagaccaaaaaaaagttatataaaacccaagatatacttgtttaccacaacaattttatttttctggacaatacgtaaatataccaacatattcctcgtggtacagtgtctactgaggtcaggtcctcatgtgttatatgggaacaactaatttgagttggaatgctcaggggaaacatggtgaagaggagagtttaaatggcttacccagtgtgtggatatatagagaccaaagggagtagaggattatagttagaaatttgagtaagtcttgtttagaaaagagtaaagtgtttgacctttatgaaagccaaggatctacactgggaaacagcaaagatacaatcagactaaaagagcaggttgcattgtggaggatcttcaaaaggacattttactagaaaaaaaataggcagattcattgaaggtttttgagtaggtaagcgcaatggtaaaatctgtgttttaagaaaataaacatagagcaatgtttattcatgtatgttctcaggattattaattaatggggttactccaaaagtgtctccatggtcaaatacatgtggaaaattgtcggtttctttactgcaaattttctctaagatgctaatatgtttatagatattttgaccatcctgaagaaaaatacaggatttggcaagcgtgaccatgaaactctttctagaaaaaccttcatggatcaaggattaatggcaaaaactgtaattactttcacaccaacataatataaagagagaaatatttaatatgataaatattccaaccaattaccttgattagatttatgaatatatcaagttatcacctggtgatatagtttggatatttctccacttcaaatctcttgttgatacatgatcccaaatgttgtaagtgtggccaagtgggagggttttagttcattggggtggattcctcatgagtggtttggtgtccttcccaaggtgatgagcaagggcttgctctgttagttcacaggagagctggtggattaaagaggctggcatctcctcccatctctcttgcttgctctcttgccatgtgaccagcctgctccccctttaccttctcccatatctaagagcttcctgagtccctcaccagaagcagatgctgatctgtacaaccttaagccaaataatcctctttcctttataagttacctcacctctggtattgttttataacaacacgaaacagactaatatgcatgtacacaccaaaaatatgtgtatttattattattaataaaaaaagtaatacaacatggaagaaatcggaaaatagaagatctatcacttgggaagattttctcaaacacagatgcatgggattaggaaaaggaaagctcaaatgagatgagctgggatcttggaatgtcctcattcagtgagcccagtgaagacggagaagatgaccttctcagcagatgacctgtgagccaaccttatgaagaatgagcagatggagtcctgggtcctgcatcactgggtttggggcattccctggaatccaggacagccactgcctaagcatccgccaggacccctaacagccccattgactgtttctcatcaaaaccagctgaatttttcaaggtacctgaagcatcagtttcttcaagtcattgagttctttcttccccaagggggaagtgatgtcttcttaaaaaatgctgaggcagttttcaatgagaaattgtacagtagaaacctgtaacacaaaaggggaaaatagggtgctcttttcatttggcatagctataaatcacatttcatctgtgaatcttggagtgaaaaaaaacatraaattcagaattctaagaaaaattcagagttgatacataaagacatgagccagttttctctaagaaacagctatgatcctttcaagagcatttagggcatgtaagttaaaatacttataagcagtgggctaaagttataatttatagcctagcttaatagttaacattttatatcagtggtcatatctttaaaaacagggtaattttcaagtaacccctgtaggatatttggagtgaagataaatattcttcacttcttgtaaaatatgcacaactttaaagtacccaatagaattataaagcacccaatagataaaaacttgtgaaattcactcgttaagtatcttaaacttgggaagcagatactctgagggtctttcatgaaggaaggaggcagctggagagaaaatctctgctcttctaactgcagtccctctccatgca

SEQ ID NO: 71053 - DNA, 2327 bp, Homo sapiens
tgcatttttagtagacattaagccaggctttaaatgtaatattttaaaatattcttagaccaaaaaaaagttatataaaacccaagatatacttgtttaccacaacaattttatttttctggacaatacgtaaatataccaacatattcctcgtggtacagtgtctactgaggtcaggtcctcatgtgttatatgggaacaactaatttgagttggaatgctcaggggaaacatggtgaagaggagagtttaaatggcttacccagtgtgtggatatatagagaccaaagggagtagaggattatagttagaaatttgagtaagtcttgtttagaaaagagtaaagtgtttgacctttatgaaagccaaggatctacactgggaaacagcaaagatacaatcagactaaaagagcaggttgcattgtggaggatcttcaaaaggacattttactagaaaaaaaataggcagattcattgaaggtttttgagtaggtaagcgcaatggtaaaatctgtgttttaagaaaataaacatagagcaatgtttattcatgtatgttctcaggattattaattaatggggttactccaaaagtgtctccatggtcaaatacatgtggaaaattgtcggtttctttactgcaaattttctctaagatgctaatatgtttatagatattttgaccatcctgaagaaaaatacaggatttggcaagcgtgaccatgaaactctttctagaaaaaccttcatggatcaaggattaatggcaaaaactgtaattactttcacaccaacataatataaagagagaaatatttaatatgataaatattccaaccaattaccttgattagatttatgaatatatcaagttatcacctggtgatatagtttggatatttctccacttcaaatctcttgttgatacatgatcccaaatgttgtaagtgtggccaagtgggagggttttagttcattggggtggattcctcatgagtggtttggtgtccttcccaaggtgatgagcaagggcttgctctgttagttcacaggagagctggtggattaaagaggctggcatctcctcccatctctcttgcttgctctcttgccatgtgaccagcctgctccccctttaccttctcccatatctaagagcttcctgagtccctcaccagaagcagatgctgatctgtacaaccttaagccaaataatcctctttcctttataagttacctcacctctggtattgttttataacaacacgaaacagactaatatgcatgtacacaccaaaaatatgtgtatttattattattaataaaaaaagtaatacaacatggaagaaatcggaaaatagaagatctatcacttgggaagattttctcaaacacagatgcatgggattaggaaaaggaaagctcaaatgagatgagctgggatcttggaatgtcctcattcagtgagcccagtgaagacggagaagatgaccttctcagcagatgacctgtgagccaaccttatgaagaatgagcagatggagtcctgggtcctgcatcactgggtttggggcattccctggaatccaggacagccactgcctaagcatccgccaggacccctaacagccccattgactgtttctcatcaaaaccagctgaatttttcaaggtacctgaagcatcagtttcttcaagtcattgagttctttcttccccaagggggaagtgatgtcttcttaaaaaatgctgaggcagttttcaatgagaaattgtacagtagaaacctgtaacacaaaaggggaaaatagggtgctcttttcatttggcatagctataaatcacatttcatctgtgaatcttggagtgaaaaaaaacatgaaattcagaattctaagaaaaattcagagttgatacataaagacatgagccagttttctctaagaaacagctatgatcctttcaagagcatttagggcatgtaagttaaaatacttataakcagtgggctaaagttataatttatagcctagcttaatagttaacattttatatcagtggtcatatctttaaaaacagggtaattttcaagtaacccctgtaggatatttggagtgaagataaatattcttcacttcttgtaaaatatgcacaactttaaagtacccaatagaattataaagcacccaatagataaaaacttgtgaaattcactcgttaagtatcttaaacttgggaagcagatactctgagggtctttcatgaaggaaggaggcagctggagagaaaatctctgctcttctaactgcagtccctctccatgca

SEQ ID NO: 71054 - DNA, 2727 bp, Homo sapiens
tctggggaaaaaaagtttaaacaaagaatttgcatctcctcttctctggctctcttctttctgggatccccccaatccctacctgactttccagaaatggtattttccccaactctgtcctctggtttttaggcctgaaaacctgtgggttttgtgttagaccttcacctgacctgcctggctctgcctgccacttgcccaaagtataaaaactgttattaattagaagaagaaggggaagaagaggaggagaagaacgaggaagaggaatatgcagaggaggaagagagggagaaggagggtgttgggaagaggagagaagcaggaggagaaggaattaaaataagaaacacattcagtgccttttgtttctcccaagtgtcaacttccctctagaatctgttgatgttaattctcgagtgctttcagatactttactgtgttttgtccagagttcatagttgttatctgtggaaagacaaattagttaggagcttaccggtccttcctagaagcagtgacaaacagaaaatgtaaaaggcgcttgtaattagaacctattgataagaagagggcagcattgcttttaaagaaataactcttgggaaaacactttagtggtccttttgcttacgtaaaggttcaggtcagggctataagggataaaggagtattacagaaaaggaatgcaaaagttgttctgcataatcaaataacagaaatacagtttcttagggaagggagtgggagttgttctgacataagaagaggatrggaaagaagggtgacagtaaataagaaaccttagctggaaacagggtactaagaggtggaacagctgagacaaaaaataaaaagaccctccaatagagaagaaatttggggtcatgactgttatcatgtcatgaaagttgtatcattgtttttgttttaatactttatcccagacctattgtatacctccactgcagcagagaaagtggggagtgtattctgctactcacttgattactttcctctattgattacatactacttccttagcaggtatattatctgaaaaaaaaattatcactaaattaactttaggacagcagtgttctagaaagagtaatgatatataatttacatttatgaaagaagcaagcatccaataaattagaaaatgcataccatcatccaagtacattgttaaatatcccaagtgctcaccttattgagtatttgacaaatggatttcacatttatatcagtactatttttatgtcatctgctgtgtttgcttaaatgtatgtgttttcactaacgatgttaagtgtacttaactccatttatactgtctaggagggatactcaggaaggatgatcatttgaaaacattgaataggccctgatcatgtgttacttataccgttgctgctgattcttagatttcaatgatactttcattttgtctgtatatgatgctaagggttgaaatgttttcatacaaaagattcctttattattttctacacaccccatgactccatgtttggaaatatttggttccaggtaacaatttgccttctcattgaataggaaaaatagaaataattgacaagcagagttcctgcctggggaagaataacaactagattgaaagaattccatctaaacacaaaatatttgagttttagttagtctggtagcattgtcacagataaatatacaatttctgttgtatttattttttaaatttacttaggtttttattttgtttttttaaaaatatattttgaaatgtaaaagagaataaaaaaatcaaagcacgtttcattttatttctaatctgcacaaataagaagcaaaaatagtctgtcaggtagcctgtccctggggatcctcgttaatgtttccacaagtctctagaaataagtaccctggtttcataaacacactggctttctagtctatacggatcacactagtttgagagcaacaaattatcaaagaggaaaaatcttccctctagcatttcaacatgcttttgagggagttagagcgagatatctgatgtatctaaaaagaggcctttcctggttatagcaaaaccaattgtgtgtaaaggtcttggatttagagataaactaagcacctaagagagactcattgggaaaagttgttttattttaaaaataattttaaaaaattgcaaagtctgtactacattatttacttttatgtttccttccttcaaaggcagaaaaagactgatgttccaggtccagcaatcaggcaagaggagttccttcttacctgtgggacggtcagccctattgttctaatcaagccttcaattgattggatgagggccacccacattaggaggacaatctgttatgggaaagtggttctgatccagaccccaagaggggattcttagacctggaacatgaaagaagtcagggcgggtccatagagtaaagtaaaagcaagttgattaagaaagtaagggaataaaagaatggctactccataggcagagtagcagtatggactgctgagttgagtatatttatagttatttcttgatcacatgctaaacaaagggtggattattcatgagttttctaggaaaggagcagatatttcccagaactgagggtcctttccctttttagaccatataggttaacttctggacattgccatggcatttgtaaaccatcatgcactagtaggagt

SEQ ID NO: 71055 - DNA, 2727 bp, Homo sapiens
tctggggaaaaaaagtttaaacaaagaatttgcatctcctcttctctggctctcttctttctgggatccccccaatccctacctgactttccagaaatggtattttccccaactctgtcctctggtttttaggcctgaaaacctgtgggttttgtgttagaccttcacctgacctgcctggctctgcctgccacttgcccaaagtataaaaactgttattaattagaagaagaaggggaagaagaggaggagaagaacgaggaagaggaatatgcagaggaggaagagagggagaaggagggtgttgggaagaggagagaagcaggaggagaaggaattaaaataagaaacacattcagtgccttttgtttctcccaagtgtcaacttccctctagaatctgttgatgttaattctcgagtgctttcagatactttactgtgttttgtccagagttcatagttgttatctgtggaaagacaaattagttaggagcttaccggtccttcctagaagcagtgacaaacagaaaatgtaaaaggcgcttgtaattagaacctattgataagaagagggcagcattgcttttaaagaaataactcttgggaaaacactttagtggtccttttgcttacgtaaaggttcaggtcagggctataagggataaaggagtattacagaaaaggaatgcaaaagttgttctgcataatcaaataacagaaatacagtttcttagggaagggagtgggagttgttctgacataagaagaggatgggaaagaagggtgacagyaaataagaaaccttagctggaaacagggtactaagaggtggaacagctgagacaaaaaataaaaagaccctccaatagagaagaaatttggggtcatgactgttatcatgtcatgaaagttgtatcattgtttttgttttaatactttatcccagacctattgtatacctccactgcagcagagaaagtggggagtgtattctgctactcacttgattactttcctctattgattacatactacttccttagcaggtatattatctgaaaaaaaaattatcactaaattaactttaggacagcagtgttctagaaagagtaatgatatataatttacatttatgaaagaagcaagcatccaataaattagaaaatgcataccatcatccaagtacattgttaaatatcccaagtgctcaccttattgagtatttgacaaatggatttcacatttatatcagtactatttttatgtcatctgctgtgtttgcttaaatgtatgtgttttcactaacgatgttaagtgtacttaactccatttatactgtctaggagggatactcaggaaggatgatcatttgaaaacattgaataggccctgatcatgtgttacttataccgttgctgctgattcttagatttcaatgatactttcattttgtctgtatatgatgctaagggttgaaatgttttcatacaaaagattcctttattattttctacacaccccatgactccatgtttggaaatatttggttccaggtaacaatttgccttctcattgaataggaaaaatagaaataattgacaagcagagttcctgcctggggaagaataacaactagattgaaagaattccatctaaacacaaaatatttgagttttagttagtctggtagcattgtcacagataaatatacaatttctgttgtatttattttttaaatttacttaggtttttattttgtttttttaaaaatatattttgaaatgtaaaagagaataaaaaaatcaaagcacgtttcattttatttctaatctgcacaaataagaagcaaaaatagtctgtcaggtagcctgtccctggggatcctcgttaatgtttccacaagtctctagaaataagtaccctggtttcataaacacactggctttctagtctatacggatcacactagtttgagagcaacaaattatcaaagaggaaaaatcttccctctagcatttcaacatgcttttgagggagttagagcgagatatctgatgtatctaaaaagaggcctttcctggttatagcaaaaccaattgtgtgtaaaggtcttggatttagagataaactaagcacctaagagagactcattgggaaaagttgttttattttaaaaataattttaaaaaattgcaaagtctgtactacattatttacttttatgtttccttccttcaaaggcagaaaaagactgatgttccaggtccagcaatcaggcaagaggagttccttcttacctgtgggacggtcagccctattgttctaatcaagccttcaattgattggatgagggccacccacattaggaggacaatctgttatgggaaagtggttctgatccagaccccaagaggggattcttagacctggaacatgaaagaagtcagggcgggtccatagagtaaagtaaaagcaagttgattaagaaagtaagggaataaaagaatggctactccataggcagagtagcagtatggactgctgagttgagtatatttatagttatttcttgatcacatgctaaacaaagggtggattattcatgagttttctaggaaaggagcagatatttcccagaactgagggtcctttccctttttagaccatataggttaacttctggacattgccatggcatttgtaaaccatcatgcactagtaggagt

SEQ ID NO: 71056 - DNA, 567 bp, Homo sapiens
atgtgggggataaagaggggttgaggaatgagtttgagaatatggttggatggaaggaatcgatctagtgtttggcagcacaataaggtgactatagttaataataatttattgtatatttcaaaataactagaagaatgcaattggagtgttcctaacacaaagaaatgataaatacttgaggtgatgaataccccaattaacttgattagattataatatgattgtatcaagatattatatgtatcccgtgtgataactgttatgtatccgtatccataagaataaaaataaataaaaatttttaaraagaaaaataaaataaagtatttactctggccttttacaaagtttgtcaactcctgatctatacaattgaataaaaagcatataaatggatactgaaatttctctcattatttttcactgactaactggtgccagaatttaatcaaagtgactaagaacaccactttatttcaacattggtcctcttatatttgccccaaattatccatttttgtttcaaattattacaattattacattctatatggcttggtatat

SEQ ID NO: 71057 - DNA, 1777 bp, Homo sapiens
atgtggataaaacagtcatcatgctcctgctggctgaaatacacgcccagttactcagtatctatttagtgaggaattagtatgtatgcctcacrccaccatgcatgcttttaggcatgttattcatgtaaatggatatgtcaaggaaagaacaaatcttaggaaccattgctctaagactcattctttgccttttgctcacttcctaataattcattttcatcaccatagctcaatctataagacatcataatgattttcatgggccctaggcacttttgtcttcctgggccccttctttcatgaaacaaaatattaagttatgttttacagttgcattggtatgaagacgaatatattaatattatatagcaaaacttttttgacttaaagttcatatttttccttttaattaaaaagaaattaacatgtgtttatgggccaataaaagtattgtgagccctaggcactatgcttactatgcctaaagcataagttggacctggatctctatggattcaatgctactgaatcccaaatctatggttcttaccttgacctcttgcttaaaccccaaattgagaactgccattagaaacatactacttacttatattaccattactttagattatgaaaaccaaattcataattatccctaaactagctctacttccaacttgtgtatttccatcaatggtctcattttttccccattcttccaaacatagaagcacaggagtaatcctgactctctgcttttttcctcatattttatgttgagagttcaatttgaatgaactatcttttcttccctctgcatatcttccccacctccaccctttccaacagattcaatatttcccatatgaactgagatcaatgtttccacagagttttctaaaccctctcctcttacagtttttctgcatactaatgccagattaattttcctaaggtgtttatcatgggatcagttttctgtgcaagaatttctagtgtaaataatataaaagctaaatgtttctaatttatgccctctaataacctgactttatcaatttagtcctctcaactccccacatgaattcttcagtggactgtggtacactcctcaccatccctcacaaaagttgcatttagctccaccttttttccttaacttgagctatttcctccccctattcatcatcagaaatttctccacagttccagatccagatttagtcctatactctccagaatatcttctctgattacttcaggcaatatgattccatccttcttttatgccagcacattttcaatttatactattactactgacattaacctctttttatttcattctgtgtttctgtaacagaacaacacaaactaggtaatttgcaatgaacagaaatttatttggatcacaattccggaggcttgaaagtccaagactgaggaaccacatctggtgagggccctcttgctgcaccataacatggcagaaggcatcacgtgggcaagagaaaccaagagagggcaagagaaggccagactagcttttataacaaactcactcccatgataataaacccaaactcatgataacaacattaattcattcatgagggcagagctctcatgacctaaacacctcccattaggccctggctcttaatactattgcagtggggattaaatttcaaacacatgaacatagggggacacatataaaccacagcattgcacccctggcctccaaaactcatgtacttctcacagtcaaaat

SEQ ID NO: 71058 - DNA, 720 bp, Homo sapiens
ggttcaatttggctctaagcaaaccccaggtctgactcctatcttctaggtagaccctaggttaccacattccacacaaagacaggctggtggcaccatatttcctctgtcagtacctagggtaggaaagattcccaaaagggcttaaacagaattaaggtcaaattaacttcccattcttggcgtgactgaaaggtttcaggaagctcaatcctgagaaatctcccagcggcctcctctgatgctgaaacaatcgtctcagtcatctgagtcttttcttctttaggacctgggcgctgactcactccctgccccatctccaccctcagaartcagcctggcaaacacacgtggaaaaatctccactaactctactttttgaagcatgtgatatctggtcacagagaggtagtgctggatatgtgtcttacaaatttgcatgcttttctagaaaagatgatgggatccactagaaactcagtggtgagatgattcccttagcaagattgctgaagttaggtttagacgtgggagggtgggtatgtgagcaatggtgccaatagcggctctttatttgccttgtcctcattactgccatcaggaaggtgctactggcctcgagccaggtgttcataatctggccttgggttaaccagacaaatagaacttcttttcctagactgttggctttgtggaggttggcagcctctatcacaggat

SEQ ID NO: 71059 - DNA, 720 bp, Homo sapiens
ggttcaatttggctctaagcaaaccccaggtctgactcctatcttctaggtagaccctaggttaccacattccacacaaagacaggctggtggcaccatatttcctctgtcagtacctagggtaggaaagattcccaaaagggcttaaacagaattaaggtcaaattaacttcccattcttggcgtgactgaaaggtttcaggaagctcaatcctgagaaatctcccagcggcctcctctgatgctgaaacaatcgtctcagtcatctgagtcttttcttctttaggacctgggcgctgactcactccctgccccatctccaccctcagaagtcagcctggcaaacacacgtggaaaaatctccactaactctactttttgaagcatgtgatatctggtcacagagaggtagtgctggatatgtgtcttacaaatttgcatgcttttctagaaaagatgatgggatccactaraaactcagtggtgagatgattcccttagcaagattgctgaagttaggtttagacgtgggagggtgggtatgtgagcaatggtgccaatagcggctctttatttgccttgtcctcattactgccatcaggaaggtgctactggcctcgagccaggtgttcataatctggccttgggttaaccagacaaatagaacttcttttcctagactgttggctttgtggaggttggcagcctctatcacaggat

SEQ ID NO: 71060 - DNA, 1751 bp, Homo sapiens
aaactgatttaagacaacttccacagattccatggaccaattggctgagaatgggcttcaaaatgttagcatagttctgcctagaatggaaatccagctatatatttctagagagagttaccagaaaatgaggccagagataaacttcttgaaattcacaacctcatcacagagagccctggacagctagttatgtgaatgtgtgaatgctcacccgagaaactaggcatgtgtggctcaggcagtagaatccaggatctaattcttcaagttgaaagacctcaatctatcatgcattttctcttrtcagatagggcacaattataaggcttaaattatgccagctttttatttaatcttattcttttgagacagggtctcattctgtcactcagactagagtgcagtggtgctgtcatagctcactgcaacctcaaaatcctgggctcaacctgtccttccagctcagcctcccaagtagctgggactataggtgtgtatcaccatgcctggccaactttcaaatttttggtagaaatgaggtctcactatgttgcccaggctggtcttgaactcctggcctcaagtgatccttctgcctcagcctcccaaagcactggaattacaggtgtgtgccactgcgcttggcctgcctgatgttcttgattaaagttgccctccctccactgagttatcatttgttcagaaatggttgttccctgggcttctgcttttcactacaatcaagctgctttcactgctgctgtagagatgtcataatttaagaaatgttctgggttcttcatgtataacaggcacttctgtctgtctctagaagaggaactattaataactgaggcttcataggtagctcataagatgtacagagggggcagctttctttgcagtaggctcacaattactgtctcaagcaggaggaggcatctcacaacagccttttcttaaagagacaccactcaccatcaggtcatattgactcctcttcttgagtccagaatctgaggcctgcatcccctacccctttctagaactagaccctacttcctagggtttggatcccttccctcaccaattctatttttattctagctcttgaatttattctttactttatatatgatccagggactatgtgacaattttttaaatgggcctccttgtccctggtacctgcctttactccttcagattagtccaaaatatggctgccagaatgagcttcctgaagcacaattctgactgtgatgttccttctctgcccaaagccaacttgagccttctatggtttatggactggggctagacttgatctgttcttgcattcaaggctctggtctgccttccaagcctttattctcctcctcatgatttcctgtctcacaattaagctaccctgggcttcttcttgttctgagaatgtgcctttgtaggtcccgtcccctgtacatgtcatgatgtgtcttcctagaatgaattatccaattatataatcataaccatcctttgaaacccaattaaaatgttgcagcttcctcccctcatctttgactgagataaaatctcacactcccttgtcccctatagattttgtccatacgtctgtggtagcacccatcacatctgcctcttgttagagttgtccatatgcaagcttccaaagggcagaggctgtgtctttagctcaattgtgtcctcacagcaacctgtaagggcgtatttcatagagcagt

SEQ ID NO: 71061 - DNA, 1751 bp, Homo sapiens
aaactgatttaagacaacttccacagattccatggaccaattggctgagaatgggcttcaaaatgttagcatagttctgcctagaatggaaatccagctatatatttctagagagagttaccagaaaatgaggccagagataaacttcttgaaattcacaacctcatcacagagagccctggacagctagttatgtgaatgtgtgaatgctcacccgagaaactaggcatgtgtggctcaggcagtagaatccaggatctaattcttcaagttgaaagacctcaatctatcatgcattttctcttgtcagatagggcacaattataaggcttaaattatgccagctttttatttaatcttattcttttgagacagggtctcattctgtcactcagactagagtgcagtggtgctgtcatagctcactgcaacctcaaaatcctgggctcaacctgtccttccagctcagcctcccaagtagctgggactataggtgtgtatcaccatgcctggccaactttcaaatttttggtagaaatgaggtctcactatgttgcccaggctggtcttgaactcctggcctcaagtgatccttctgcctcagcctcccaaagcactggaattasaggtgtgtgccactgcgcttggcctgcctgatgttcttgattaaagttgccctccctccactgagttatcatttgttcagaaatggttgttccctgggcttctgcttttcactacaatcaagctgctttcactgctgctgtagagatgtcataatttaagaaatgttctgggttcttcatgtataacaggcacttctgtctgtctctagaagaggaactattaataactgaggcttcataggtagctcataagatgtacagagggggcagctttctttgcagtaggctcacaattactgtctcaagcaggaggaggcatctcacaacagccttttcttaaagagacaccactcaccatcaggtcatattgactcctcttcttgagtccagaatctgaggcctgcatcccctacccctttctagaactagaccctacttcctagggtttggatcccttccctcaccaattctatttttattctagctcttgaatttattctttactttatatatgatccagggactatgtgacaattttttaaatgggcctccttgtccctggtacctgcctttactccttcagattagtccaaaatatggctgccagaatgagcttcctgaagcacaattctgactgtgatgttccttctctgcccaaagccaacttgagccttctatggtttatggactggggctagacttgatctgttcttgcattcaaggctctggtctgccttccaagcctttattctcctcctcatgatttcctgtctcacaattaagctaccctgggcttcttcttgttctgagaatgtgcctttgtaggtcccgtcccctgtacatgtcatgatgtgtcttcctagaatgaattatccaattatataatcataaccatcctttgaaacccaattaaaatgttgcagcttcctcccctcatctttgactgagataaaatctcacactcccttgtcccctatagattttgtccatacgtctgtggtagcacccatcacatctgcctcttgttagagttgtccatatgcaagcttccaaagggcagaggctgtgtctttagctcaattgtgtcctcacagcaacctgtaagggcgtatttcatagagcagt

SEQ ID NO: 71062 - DNA, 1043 bp, Homo sapiens
cctcaagtaatccacctgcctcagcctcccaaagtgctgggattacaggcatgagccaccacgtgtggcctgtttgttttttgagacagttctgtcacccaggctggagtgcagtggtttgatcactgcagccttgaactcctgggctcaagtgatcctcccacctcagcctccagagtatgggactacaggcatgcagtaccatacctggctaatttttttgattttttttttctttttttgtagagatggggcctcactatgttacccaggctagtctcaaacacctggcctcatgcaatctgcttcccaaaagcacasccaaaaggtgtgagctaccatatcccacctacttaactcttttgtatctcagtttcttcatatgtaaaatgggcataactgtcgtgcctactacacagctgagttaataattggcatggactcagtaaaataagaactattattgttaggcctctttggagccatggccacaacagcatgcctatctttactctaaaaattttgcccaactaggctcagaattctctctcaaccatctccaattttacagtaaaatgaacattctgtctccaaggttcccattgcttctatgagaccaaccagtgcctctttgtcagccaaatgcaaggatagaacaatgtttatcaccgtggcttcctttgacttaagagatggtattagcagcaagtgtgaaatgacctatgtttatcaggagtcttccatggaagtcatggtagtcagatctcctatcacgattacctcctgccttggtgcagggcgtgatctctgtactaagaacgtctttctccatctcatctctggccaggccagttatagcaacacagcactatcacttcaatccttctattattttgtcttcactcaaaccacagataagaggatcttcctacaggtataggggagaagaaaatttatttttcctctaccctcctaggttttttggctggggccctgcaaattagactgacgaaagatagattaacaaaagaaaaacagacaga

SEQ ID NO: 71063 - DNA, 1043 bp, Homo sapiens
cctcaagtaatccacctgcctcagcctcccaaagtgctgggattacaggcatgagccaccacgtgtggcctgtttgttttttgagacagttctgtcacccaggctggagtgcagtggtttgatcactgcagccttgaactcctgggctcaagtgatcctcccacctcagcctccagagtatgggactacaggcatgcagtaccatacctggctaatttttttgattttttttttctttttttgtagagatggggcctcactatgttacccaggctagtctcaaacacctggcctcatgcaatctgcttcccaaaagcacacmcaaaaggtgtgagctaccatatcccacctacttaactcttttgtatctcagtttcttcatatgtaaaatgggcataactgtcgtgcctactacacagctgagttaataattggcatggactcagtaaaataagaactattattgttaggcctctttggagccatggccacaacagcatgcctatctttactctaaaaattttgcccaactaggctcagaattctctctcaaccatctccaattttacagtaaaatgaacattctgtctccaaggttcccattgcttctatgagaccaaccagtgcctctttgtcagccaaatgcaaggatagaacaatgtttatcaccgtggcttcctttgacttaagagatggtattagcagcaagtgtgaaatgacctatgtttatcaggagtcttccatggaagtcatggtagtcagatctcctatcacgattacctcctgccttggtgcagggcgtgatctctgtactaagaacgtctttctccatctcatctctggccaggccagttatagcaacacagcactatcacttcaatccttctattattttgtcttcactcaaaccacagataagaggatcttcctacaggtataggggagaagaaaatttatttttcctctaccctcctaggttttttggctggggccctgcaaattagactgacgaaagatagattaacaaaagaaaaacagacaga

SEQ ID NO: 71064 - DNA, 1043 bp, Homo sapiens
cctcaagtaatccacctgcctcagcctcccaaagtgctgggattacaggcatgagccaccacgtgtggcctgtttgttttttgagacagttctgtcacccaggctggagtgcagtggtttgatcactgcagccttgaactcctgggctcaagtgatcctcccacctcagcctccagagtatgggactacaggcatgcagtaccatacctggctaatttttttgattttttttttctttttttgtagagatggggcctcactatgttacccaggctagtctcaaacacctggcctcatgcaatctgcttcccaaaagcacaccyaaaaggtgtgagctaccatatcccacctacttaactcttttgtatctcagtttcttcatatgtaaaatgggcataactgtcgtgcctactacacagctgagttaataattggcatggactcagtaaaataagaactattattgttaggcctctttggagccatggccacaacagcatgcctatctttactctaaaaattttgcccaactaggctcagaattctctctcaaccatctccaattttacagtaaaatgaacattctgtctccaaggttcccattgcttctatgagaccaaccagtgcctctttgtcagccaaatgcaaggatagaacaatgtttatcaccgtggcttcctttgacttaagagatggtattagcagcaagtgtgaaatgacctatgtttatcaggagtcttccatggaagtcatggtagtcagatctcctatcacgattacctcctgccttggtgcagggcgtgatctctgtactaagaacgtctttctccatctcatctctggccaggccagttatagcaacacagcactatcacttcaatccttctattattttgtcttcactcaaaccacagataagaggatcttcctacaggtataggggagaagaaaatttatttttcctctaccctcctaggttttttggctggggccctgcaaattagactgacgaaagatagattaacaaaagaaaaacagacaga

SEQ ID NO: 71065 - DNA, 1043 bp, Homo sapiens
cctcaagtaatccacctgcctcagcctcccaaagtgctgggattacaggcatgagccaccacgtgtggcctgtttgttttttgagacagttctgtcacccaggctggagtgcagtggtttgatcactgcagccttgaactcctgggctcaagtgatcctcccacctcagcctccagagtatgggactacaggcatgcagtaccatacctggctaatttttttgattttttttttctttttttgtagagatggggcctcactatgttacccaggctagtctcaaacacctggcctcatgcaatctgcttcccaaaagcacacccwaaaggtgtgagctaccatatcccacctacttaactcttttgtatctcagtttcttcatatgtaaaatgggcataactgtcgtgcctactacacagctgagttaataattggcatggactcagtaaaataagaactattattgttaggcctctttggagccatggccacaacagcatgcctatctttactctaaaaattttgcccaactaggctcagaattctctctcaaccatctccaattttacagtaaaatgaacattctgtctccaaggttcccattgcttctatgagaccaaccagtgcctctttgtcagccaaatgcaaggatagaacaatgtttatcaccgtggcttcctttgacttaagagatggtattagcagcaagtgtgaaatgacctatgtttatcaggagtcttccatggaagtcatggtagtcagatctcctatcacgattacctcctgccttggtgcagggcgtgatctctgtactaagaacgtctttctccatctcatctctggccaggccagttatagcaacacagcactatcacttcaatccttctattattttgtcttcactcaaaccacagataagaggatcttcctacaggtataggggagaagaaaatttatttttcctctaccctcctaggttttttggctggggccctgcaaattagactgacgaaagatagattaacaaaagaaaaacagacaga

SEQ ID NO: 71066 - DNA, 1043 bp, Homo sapiens
cctcaagtaatccacctgcctcagcctcccaaagtgctgggattacaggcatgagccaccacgtgtggcctgtttgttttttgagacagttctgtcacccaggctggagtgcagtggtttgatcactgcagccttgaactcctgggctcaagtgatcctcccacctcagcctccagagtatgggactacaggcatgcagtaccatacctggctaatttttttgattttttttttctttttttgtagagatggggcctcactatgttacccaggctagtctcaaacacctggcctcatgcaatctgcttcccaaaagcacacccamaaggtgtgagctaccatatcccacctacttaactcttttgtatctcagtttcttcatatgtaaaatgggcataactgtcgtgcctactacacagctgagttaataattggcatggactcagtaaaataagaactattattgttaggcctctttggagccatggccacaacagcatgcctatctttactctaaaaattttgcccaactaggctcagaattctctctcaaccatctccaattttacagtaaaatgaacattctgtctccaaggttcccattgcttctatgagaccaaccagtgcctctttgtcagccaaatgcaaggatagaacaatgtttatcaccgtggcttcctttgacttaagagatggtattagcagcaagtgtgaaatgacctatgtttatcaggagtcttccatggaagtcatggtagtcagatctcctatcacgattacctcctgccttggtgcagggcgtgatctctgtactaagaacgtctttctccatctcatctctggccaggccagttatagcaacacagcactatcacttcaatccttctattattttgtcttcactcaaaccacagataagaggatcttcctacaggtataggggagaagaaaatttatttttcctctaccctcctaggttttttggctggggccctgcaaattagactgacgaaagatagattaacaaaagaaaaacagacaga

SEQ ID NO: 71067 - DNA, 1043 bp, Homo sapiens
cctcaagtaatccacctgcctcagcctcccaaagtgctgggattacaggcatgagccaccacgtgtggcctgtttgttttttgagacagttctgtcacccaggctggagtgcagtggtttgatcactgcagccttgaactcctgggctcaagtgatcctcccacctcagcctccagagtatgggactacaggcatgcagtaccatacctggctaatttttttgattttttttttctttttttgtagagatggggcctcactatgttacccaggctagtctcaaacacctggcctcatgcaatctgcttcccaaaagcacacccaamaggtgtgagctaccatatcccacctacttaactcttttgtatctcagtttcttcatatgtaaaatgggcataactgtcgtgcctactacacagctgagttaataattggcatggactcagtaaaataagaactattattgttaggcctctttggagccatggccacaacagcatgcctatctttactctaaaaattttgcccaactaggctcagaattctctctcaaccatctccaattttacagtaaaatgaacattctgtctccaaggttcccattgcttctatgagaccaaccagtgcctctttgtcagccaaatgcaaggatagaacaatgtttatcaccgtggcttcctttgacttaagagatggtattagcagcaagtgtgaaatgacctatgtttatcaggagtcttccatggaagtcatggtagtcagatctcctatcacgattacctcctgccttggtgcagggcgtgatctctgtactaagaacgtctttctccatctcatctctggccaggccagttatagcaacacagcactatcacttcaatccttctattattttgtcttcactcaaaccacagataagaggatcttcctacaggtataggggagaagaaaatttatttttcctctaccctcctaggttttttggctggggccctgcaaattagactgacgaaagatagattaacaaaagaaaaacagacaga

SEQ ID NO: 71068 - DNA, 543 bp, Homo sapiens
tgacgcacgctctatccatagttggcattgctcattcctagggcttccgccgctctttccacgatgattctcagatctccatcagtcccagatygttccagggctctaggcacagatatgcagttgcctactggacatctctacttagttgtctcgtgggtttccccacttagacatggcaagaacaactcctcctcctcctcctcctcatcctcatcaaaactgcctcttacgttgtattctctatcgtagccatcggcaccaccaaccacacacatgccctaagaccatgagaatcatcgctgattcctcattgtccttcccttctgtgtacgatccaccatccactttttaattctacctcttatgcatgtctcaaatatatctacttcccttcatgtccgttgctatcaccccagactctgctaccataatctctcgcctgaaccactgcataatatggtgtacaaggtctttgatgccatgagcctacactacctttcaagacttacctttcatcattttcttttttttttttttttt

SEQ ID NO: 71069 - DNA, 543 bp, Homo sapiens
tgacgcacgctctatccatagttggcattgctcattcctagggcttccgccgctctttccacgatgattctcagatctccatcagtcccagatcgttccagggctctaggcacagatatgcagttgcctactggacatctctacttagttgtctcgtgggtttccccacttagacatggcaagaacaactcctcctcctcctcctcctyatcctcatcaaaactgcctcttacgttgtattctctatcgtagccatcggcaccaccaaccacacacatgccctaagaccatgagaatcatcgctgattcctcattgtccttcccttctgtgtacgatccaccatccactttttaattctacctcttatgcatgtctcaaatatatctacttcccttcatgtccgttgctatcaccccagactctgctaccataatctctcgcctgaaccactgcataatatggtgtacaaggtctttgatgccatgagcctacactacctttcaagacttacctttcatcattttcttttttttttttttttt

SEQ ID NO: 71070 - DNA, 1925 bp, Homo sapiens
ctggaagttcaccagtctgtcctccaggaagtggatcagtagatcttgccaactcaagtctccctagctttgatgtgggacgggagaaagagcagggactgagtctcctttaaacacaaagaaatgaagaaaactcggagccaaatgtgccttactgatctgtcccagcattgcattgctttgcatgcagtaaactcttaatacctaagctgtgacttcaagcctgtcccttcctgttatgacttcccaggctttttgaatcaggcccgatccattgtgtaaacccccaggtgactccatgcagactgaaaaggaattccacatattgtccttatttcttaagtagttttttgtgaatttggatcagtgaatttgcaggaacgaccttaactaccaaccatatagcaaattttcttatgcgtcttctacttgttcttcacgtggagcccagtgatgaatggtgcaaagcctccatgggtctgctggtgacagtcagttacctctgcccagcactctacagcactgttaatgctggcattttgttctcaccacgtgaggctgtcaaggattgtttccatgtccatcttccccacagcatattctgagcccttggaaggatgccacagtaatctgctcatcttcgtatttagcaatgcacatggtctccagtatatagaatgtgctcagtaaatgcttgctgaatgaatgcatgagtgagtggatggtgagtgatggacgttgagaactctcttatgtttctgtcaaggcttcaccatttttctaagcaatggaggcccatgctgaggatctaaaatagctcgtgccttttcttctcactgtcttttcctakttatgtgtacaatcgacacttgcaattctttttatgccagacgttgtcagcccaaagcatagttggcttcccttgctcttgggaaaaggggatccctgggcacagtcgtaaaatatgggctgatgaaataaatagttatgaccttcccctgctgtgctcttacataagtatgtactaatgggctgtttctagcggaatctttcacttactgcctcctgagtgagaagacaagctcataccagtgtgtccttccatgattcccttgcactgctcattaatggctcataagaaggaggattctttttttaagcatttcagttatttttaattaaagaaaaacagccttctccaagggccacaaagtgaactgaatgtcagaaggaagctgggtgtgagtttctcacaagctcttgctccaaaacctgttagtgaggagaaagggccctccgggagctctggggaaggttggtgcacacaggagtccctttggcggggtaggcagagccgccagccctcacatggtcactggattggttcgagtgggctctaaggcaactgccgtgtgccagtctgttgacatgatcaacattaatattcttgcggcgggggggggggtgttcattaaattaaggaatgacacagggagccaagagaatggcttatttgtttggattctgaatcacaatcgggaaatagtctttatctggtgcaaccataattccattttacttggagcaaattcgaaggaaggtgagatcattctgggggtcactttcatgcatggtgctccgtgccttcaggatgaagctgtgcaggaagctggcacactctgtggtggtgaggttgaccatggtgctcttgatgggaatgccatctttgttcaccatgatgatattctgcactcccctctggctctgaagtcacttcagtgtctcctccacctctgatatttacaaccgatctggtagtcctgctttgccaacactcaaaaaggagaattcttaagcccccaatattcaacttctttaagcagactgtgttgcttttattaaacaatagaaagcatttttttttt

SEQ ID NO: 71071 - DNA, 1634 bp, Homo sapiens
tgcatgcccacatggtttttaacaaagctaggtcaagaggtcatgcacatttccctcttgaggtctcctgccctagattcatccaaattccctagagcgtacttcattcagagcaggttttcacagactcccctaaagaaatagcagaagagtcttcagtcctctttggcaaatgctccatgtggcacatgtggggacacttgccctctccacattgctgctcttgatgaacaggtttcttttctttctttctttctttcctttcctttccttccctttccttaccctttctttctttctttcttttctttcttccttctttcttttcyttctttctttctctttcttttctttctttctttctttctttctttctttcttttcttttctttctttcttctttctctctctctctctctccctccctccctctctctctctctctttcttttttttttggttacatggataagttctttagtggtgatttctgagattctggtgcacctgtcacccaagcagtgtacactgcacccagtgtgtagtcttttatcccttaccctgccacccttccccctgagtccccaaagtccatcgtatcattctgatgcctttgcgtgctcatagcttagctcctacttaagagtgagaacacacaatgtttggttttccattcctgagttacttcacttagaataatgatctccaattccatccaagttgctatgaatgccattatttcattccttttaatggctgagtagtattccatggtgtatatataccacattttctttttccacttgttagttgatgggcatttaggctggttccgtatttttgcaattgtgaattgtgctgtaaacatgcgtgtacaagtatctttttcatataatgacttcttttcctctgtgtggatacccaggagtgggagtgctggatcatatgttagatctacttttagttctttaaggaatcttcatactgttttccatagtggttgtactagtttacattcccaccagcggtgtaaaagcattccctttccaccacatcaatgccaacatctattattttttgatttttcaattatggccattcttgcaggagtaaggtggtatctcattgtggttttaatttgtattttcctggtaattaatgatgttgaacatttttttcatatgtttcttgacatttgtatgcctttgagaatggtctgttcatgtactttgcccactttttgatgggattattatttttttcttgctgctttgtttgagtccttgtagattctggatattcaccttttgtcagatgcatagattgtgaatattatctcccactctgtgggttgtctgtttactctgctgattatttctttggctgtgcagaagctttttagtttaattaggtcccatcttgatgaatagatttctaatcacaatgaagtcatgagccacactcgggctccaaggttgtccctatcgtgccacaaagatgagatcctggagggtcttggcctcaccacataccatgccaaattcagctcttccccaggaactcccagctctttgtattaagccaagttcactagcctaaactcctcttccatgtggagacatcccctctatggt

SEQ ID NO: 71072 - DNA, 664 bp, Homo sapiens
tgcttttctcttctgcatctcctgtgcctacacctaataaatactcacacacattattggatgaattatacattaatgagcactctgtcattaattaaagctaatcattagtaccagccatccctctcctaaagctacagctcagaataaataagggtatttggagagccagagctacccaaaggtggaaygagctgtttcacagcgccggtgtgctctcacttttgggaatttgtgcattatgttgggaaatctgggctccattaaccgtatgcaacatacatggtatgttgcaatcccatacatggcctgggactcaccgtatgcaacatatttcaccatggcctgggattcaccatatgcaacatacttcaccatggcctgtgtgttctcatctgcaagatggggtactatcactcatgccacagggttgtggcaaccatgtacacaaagtgcttgtcacaatgcccagtacatattaggtgcaaaataagtactgattcctcgcccacatcttctctcatccctgcaggcgtttggtggccctcagatggacatatggcttcaaggactcaagagtaggtgggggacatagagttaggcaagggctggagatgggggtagtggtagggattggtgccattgctcctgctgggatggatcc

SEQ ID NO: 71073 - DNA, 569 bp, Homo sapiens
tacctatttattagtttattgtctatgttttcccactagaagatccactctgtgagggtagtgctttctgtttcctttttccactggaacctagaactgagactggcacaaggaggagcttaagacacattttatgaatgactgaatgggtaaataaactaggtggaggtcataggcagcgtactatgtcgatgatgaagttgctagtgtgtgcgcgtgcctgtatttttatacttgagctactatcgtrtgccatgctggggatcagcagaggttacttgtgccttgtgcattgctacttgcccctcttcccttttctggaaagttcttccttcttattctttcctctaagtctttcccataggaaactgtcccaaaacttttttctgtggagttttctctgactaatccccctgctctctgctaagagcataccagaagctcgtgaacggaggcctgtgactccatccagctgctactaggatcatctttgttgtatgtgtgcaatgattttctcaactttgcttcagaatgcaagttccggagggtggcgaagaggtcttctctct

SEQ ID NO: 71074 - DNA, 1897 bp, Homo sapiens
ccagcttttaattagaaaagcctggatttgaacctaggcagtcaggatcacagagcctgctctcttaacctctctttttgataaatgggtcacacctacagtactcagagtgaatgagtctgtatggaggagggacctgattcgtgagacactgtggggagaggatctattaatccgtcgctaaaggaagtggggaggcagacaggaggcctccaggcagcctccgggtcctctcccagttccttccttccccatgaggatttggcttcaaagaacagtcacactgcctctccctgggcaatcaagccccttgcccacctgagaggcccacttctggctgagtaggtgcttctggttatcccgggccctggggcagccaggatgaaagaagatgaagataactcccacgagaggtggtggcatcctccaagactgccttcatgaggacaccacccatcactgcagaggcccttaccctctggaatttgcagacccacttatctgacataggccagttttatcctaaacagaaccagccctataaaaacccatttcaaggacccccacacgggtctaagatatcccctcagggtgcaaggttcccaccgggaccactctggcaagttttaggaagtgagtcctttctacccccatcatcctccccatcctggacacttgccccaccctggaggcagtacccacccaccacaaggcaaggcaaggcagttcttacctttccacctggaggttgactttggaaggctccacgttggggttttcccattccatttgtgggcagtgcatgaaatagcaaagggtgtacagggcctcgggctcccagtacagtgccccctgcttgtggtgcaggggggtgccattgcygtggtgcttggcattgaggggctgcaggtgatgcattgcacgggacaccaggtcacctgtggacagaaggaagatttcagatcctccaggaagccaacattggcagagaaactgtacctgaagatctctgtggagaccctggtccttgcagtcccttatttaaataaagtggttcaatgggaccttgaagtcactcaccaagcagagaggaatggattcattcattcagcataggagggcttactgaatctggggtgcgtttcaagcacagagggcggctaagatcattttaatcctgcccttctggaacccaatgtttctaacaaggctcaggaagccctttgcgtcccgttcctgcatactgcctccctcgccctgtgacacaccctctatgttgtggccaacactgctttaactgtagtcacaagaatgggctatgctctctattgcccctgagccttgtacatatgctattccctctgtccagaacattctctccctcttcttctccaggctaactcctactgatcatccaggtatctgcttataaattaattcctctaggaaaccccctctagaaccaccctgcccttacttgggttatcacactgtacttttcgtgttttttttccttttttttttttttttttttgagatggagtcttgctctgttgcccaggctggagtgcagtggcatgatctccactcactgcaacttctgccttccgggttcaatcgattctcctgcctcctcagcctcttgagtagctgggactacaggtgcctgccaccacaaccggttaattttcgtaattttagtagagatgagttttcaccatgttggccaggctgctcttggactcctaacctcaggtgatctgcctgcctctgcctcccaaagtgctgggattacaggcataagccaccacgctctgccctataaaagtaaatttgatgacaacaaaacagtgtacagttcacccttgaacaatgcaggctggaactacttggatcc

SEQ ID NO: 71075 - DNA, 793 bp, Homo sapiens
ctttacaccttatacaaaaattaattccagatggattaaagacttaaatattagacctaaaaccataaaaaccctagaagaaaacctaggcaatacctgcccagctttttggagatgcaaaagaagaggacatattcaagtcatttaaaactgaagagatgacactggcatggacaaaataatctggaaataaaatagtgtcaatagacaagtgttaaataatttaaaccaactagcaggtsaggggagacagaatgccaagaccagaagttaaagtccactcctcaccctgcctgaaccacaaggcctcagcaaaggctcctcctttgaagatgggcacctttgtaaggtgggcctttcacactcctgctctcgtccccactgcctgattggtggctccagacacactgagctactcactttctcctaaatatttcaccttcacatctaacagagggtgagacaacggggtagggaaccctagtagatgactttttggataaataaataatgaataatgaataacagggccgggtgtggtgtctcacgcctgtaatcccagcactttgggaggccgaggtgggcggatcacctgaggtcaggagttcaagaccagcctagttaacatggtgaaaccccgtctctactaaaaatacaaaaaattagctggctgtggtggtgggtgcctgtaatcccagctactcaggaagctgaggcaggaaaatcacttgaactcgggaggcggaggttgcagtgagctgagatcatgtcactgcactccagcctgggtgac

SEQ ID NO: 71076 - DNA, 793 bp, Homo sapiens
ctttacaccttatacaaaaattaattccagatggattaaagacttaaatattagacctaaaaccataaaaaccctagaagaaaacctaggcaatacctgcccagctttttggagatgcaaaagaagaggacatattcaagtcatttaaaactgaagagatgacactggcatggacaaaataatctggaaataaaatagtgtcaatagacaagtgttaaataatttaaaccaactagcaggtgaggggagacagaatgccaagaccagaagttaaagtcyactcctcaccctgcctgaaccacaaggcctcagcaaaggctcctcctttgaagatgggcacctttgtaaggtgggcctttcacactcctgctctcgtccccactgcctgattggtggctccagacacactgagctactcactttctcctaaatatttcaccttcacatctaacagagggtgagacaacggggtagggaaccctagtagatgactttttggataaataaataatgaataatgaataacagggccgggtgtggtgtctcacgcctgtaatcccagcactttgggaggccgaggtgggcggatcacctgaggtcaggagttcaagaccagcctagttaacatggtgaaaccccgtctctactaaaaatacaaaaaattagctggctgtggtggtgggtgcctgtaatcccagctactcaggaagctgaggcaggaaaatcacttgaactcgggaggcggaggttgcagtgagctgagatcatgtcactgcactccagcctgggtgac

SEQ ID NO: 71077 - DNA, 793 bp, Homo sapiens
ctttacaccttatacaaaaattaattccagatggattaaagacttaaatattagacctaaaaccataaaaaccctagaagaaaacctaggcaatacctgcccagctttttggagatgcaaaagaagaggacatattcaagtcatttaaaactgaagagatgacactggcatggacaaaataatctggaaataaaatagtgtcaatagacaagtgttaaataatttaaaccaactagcaggtgaggggagacagaatgccaagaccagaagttaaagtccactcctcaccctgcctgaaccacamggcctcagcaaaggctcctcctttgaagatgggcacctttgtaaggtgggcctttcacactcctgctctcgtccccactgcctgattggtggctccagacacactgagctactcactttctcctaaatatttcaccttcacatctaacagagggtgagacaacggggtagggaaccctagtagatgactttttggataaataaataatgaataatgaataacagggccgggtgtggtgtctcacgcctgtaatcccagcactttgggaggccgaggtgggcggatcacctgaggtcaggagttcaagaccagcctagttaacatggtgaaaccccgtctctactaaaaatacaaaaaattagctggctgtggtggtgggtgcctgtaatcccagctactcaggaagctgaggcaggaaaatcacttgaactcgggaggcggaggttgcagtgagctgagatcatgtcactgcactccagcctgggtgac

SEQ ID NO: 71078 - DNA, 793 bp, Homo sapiens
ctttacaccttatacaaaaattaattccagatggattaaagacttaaatattagacctaaaaccataaaaaccctagaagaaaacctaggcaatacctgcccagctttttggagatgcaaaagaagaggacatattcaagtcatttaaaactgaagagatgacactggcatggacaaaataatctggaaataaaatagtgtcaatagacaagtgttaaataatttaaaccaactagcaggtgaggggagacagaatgccaagaccagaagttaaagtccactcctcaccctgcctgaaccacaaggcctcagcaaaggctcctcctttgaagatgggcacctttgtaaggtgggcctttcacactcctgctctcgtccccactgcctgattggtggctccagacacactgagctactcactttctcctaaatatttyaccttcacatctaacagagggtgagacaacggggtagggaaccctagtagatgactttttggataaataaataatgaataatgaataacagggccgggtgtggtgtctcacgcctgtaatcccagcactttgggaggccgaggtgggcggatcacctgaggtcaggagttcaagaccagcctagttaacatggtgaaaccccgtctctactaaaaatacaaaaaattagctggctgtggtggtgggtgcctgtaatcccagctactcaggaagctgaggcaggaaaatcacttgaactcgggaggcggaggttgcagtgagctgagatcatgtcactgcactccagcctgggtgac

SEQ ID NO: 71079 - DNA, 793 bp, Homo sapiens
ctttacaccttatacaaaaattaattccagatggattaaagacttaaatattagacctaaaaccataaaaaccctagaagaaaacctaggcaatacctgcccagctttttggagatgcaaaagaagaggacatattcaagtcatttaaaactgaagagatgacactggcatggacaaaataatctggaaataaaatagtgtcaatagacaagtgttaaataatttaaaccaactagcaggtgaggggagacagaatgccaagaccagaagttaaagtccactcctcaccctgcctgaaccacaaggcctcagcaaaggctcctcctttgaagatgggcacctttgtaaggtgggcctttcacactcctgctctcgtccccactgcctgattggtggctccagacacactgagctactcactttctcctaaatatttcaccttcacatctaacagagggtgagacaayggggtagggaaccctagtagatgactttttggataaataaataatgaataatgaataacagggccgggtgtggtgtctcacgcctgtaatcccagcactttgggaggccgaggtgggcggatcacctgaggtcaggagttcaagaccagcctagttaacatggtgaaaccccgtctctactaaaaatacaaaaaattagctggctgtggtggtgggtgcctgtaatcccagctactcaggaagctgaggcaggaaaatcacttgaactcgggaggcggaggttgcagtgagctgagatcatgtcactgcactccagcctgggtgac

SEQ ID NO: 71080 - DNA, 620 bp, Homo sapiens
tataatctggggtgatgaatgtgttaactagcttgattgtggtaatcatttcataacatatatgtatatcaagtcatcacattgtacaccttaaatatatacaatttttattatactgcaataaagttaggggaaaaaaattccactgtttttttaaaaaagccatgatgttctaagctctgttattaatcaaaatacttgtacagttgattctcttggattttctagttataaaactgtgtctctgtaaataatgaaaatggtttcctttaacaccagatcttgatcattaaaattgtcatagtataaaatattatatctttgcacatgtctgctctgaaacctgtttttgtcttttgttccaggagcagtacatttttatccatcagtgtgtgcaactgatgtggatgaagaagaagcagcagttctgcatcagtgatgtcatatacgagaatgttagcaagtcctagttcagaatccggagcagtaagtggagaagagctctccacgagtgytcagtcttagaactattagagggggatgtgatggatgggacaaaagacagcagtagccatttgtattgactctgacttcacatgagtatttcttcccagctcctg

SEQ ID NO: 71081 - DNA, 3368 bp, Homo sapiens
aacattcaaacaaagctatctagtaatttataagatatagcattctggggcccagaaaaagaagtttgagctaaagataagatttggggccattagctcattgataggatttactatgtgttgagaaaaaggggacctaagatgaaaccctgaaaaataccaaccagtatttatggataaggcagagtaagcagcttaagtaggaaaataaacatcagggagagtgatatgtaagccaataaagaagaaagttttaagtggaggaaataatcagtgtggctctgtaaaacacgcttctagtgaatttagtaactagaaggttgctgaaagcctcagcaggggaatttacaatagactgaggtgtgaaatgcattcattgctgaatccccacctagcataattattggccccttcctacatgttccgtaaatatctattggattattgcatgataaatctttttctaggtcacgtcacagaaaatgagcagaggaagtgctgttctttctcctcaatgtgattcttagtgattctcattctccgatctgtgaggttgcgtggaagactaacagtctactaattacaatcacactcactcagctataccctctgtgttccatgattctactcagttcgtcttgccagggtttttaaacaaagttcttttatttagcaaatagtatacactttaaaatactttaaaaatttttaattgtgttgaaaatcacaaacataaaatttaccatcttaaccatttgtacgtgcaccgctgattggcattaagtttattcctattattgtacaatagatatccagaacgttttcatcttgcaaaactcaaactctatacccattgagcagcarctcatttgacccttcacccagcccctggcaaccaccattctactttatgtttctatgagtttgatacctcatttaagtgggtttatacagtgtttgtctttttgtgactagcttatttcatttagcataatgtcctcaagattcatccatgttgtagcctataaaatgaacctacctgtttttaaaacatggtttcagtgtttttctcaaaaagttctaataatccaacaacacatataaatcatataatttccaggtaagtaggagttgtgagggcttacccatctattttgcaagtttccttaacatggcagaaatcattcttctcattagaaattattttgtggtaaggaacccactaactttgagagtggatagcccattttgcaataagacccatcatcagatgctaccacagctctactctctgaactgttctggggatgcattgattgagatcctagcatttgacagaaacaaagcaaatatataacgtctgtttagagcccttattttcctcaaaatcttctgatgttctccaggtcacctttgtctttctggcaactagctattttattccttgtatcatttaaccatggttacttattaatcatcccccatgagatgcctgaagtaacaatgttttgcaaataggttcagctctctggttttagggaatgaagagagggagaactgtaaaaggggagtgttagacttcatccccaaaggccaggaacaatgtcaaaaaactctggtatctctgcagttgatagttccctctcacttgactagattttaaaataattaagttctcaatttccaacttagtacaattgcaatctccaacagcatttcagaaataggaaacctgaagcatatctctgcacacttttatttgtagtttagtaaacagaaagtctgcaaatgagaaagaataatgcctaacttcttaaataagcagaagatgggaataatccagtcattgtgcttatacctgcacttctcagttctgccgcaagtattccagtaaaaactgggttgatctgagctgaagtgtttcttccttttggccaggtgcaaaagtctggagtctacttcagaggacgaatgtgtttagtcatttttataagagttgaaaaaaataagcactaaatctttctttcaaacttgaactgatcctcaaaacagttttaggaatttccaaaggatctttttgctttagtttccaaactggtattttcacttgtttccatcttgtttgctagataacctgagtcttaaatttaaaagaaaaatgctttgaggatgattttatcagctctccatatggaatatgagaaaaaaaatccataattattctgtatccagtttacctaaaatatttttctaagtttttggtaggcaggtattctcctttccaccgtagaactcaagcagtacagactataccatggcctattgctaagatttactgagatctccacttttggaaaccccacaagtgtaaattgagattaataaaaattccttggtatgaaaaatgctaacagttgaatttcactctcccatctactcagatattactttatactcctggatacccctcataactgctcctgatgcccaggcatccagggttaggtgaggaagcatgacctgggttttcaacaaactgcatgaggccactctggccacgagcagactctctatcctcaggcccccagtaattttgagttacttcctctcagccatctgacttatatgtgaggcacaactgcacaaaaatagcaattcttgacgcttttataaacacatctacagagaatgttcccattattgccttaatatagcaatctgagataatcaggtctggaaacatagccacgttttataggtaaggaaaccaagcataagtgatctaaaaactaacaggagagtgaaattgaaaccagaaccttggttttctgactgcccgttatggattccccctctggttttctaggaaagccctatagtgaaggccatattgctctcaatatttcttcttcttttcagttgcctttctttatgcccctcatccctgtctgtcttttcctcatccaatctccttgtgactctctgaaagtccctgccctgtgacagtcagttcagacctaccctttctagccattttctgatgctctctgagctgcagattttcctgagcttcagacacctctcgttctctcaatgccttgctagactgctgcaagttcaatttataaggagctgatgggagataatagtttactgcagtggttctcaatcagggcagtttttctccctgggggacatttggcagtgtctggagacattttatgctactggcacatattgggtggaagccagagatgctggctgccatcctgcaatgcacaggacagccccccaaatactaagtagaaatacttcgtgcctaatgtcgatagtgcctccaatgtcaaggttgagaaaccttggcttag

SEQ ID NO: 71082 - DNA, 3368 bp, Homo sapiens
aacattcaaacaaagctatctagtaatttataagatatagcattctggggcccagaaaaagaagtttgagctaaagataagatttggggccattagctcattgataggatttactatgtgttgagaaaaaggggacctaagatgaaaccctgaaaaataccaaccagtatttatggataaggcagagtaagcagcttaagtaggaaaataaacatcagggagagtgatatgtaagccaataaagaagaaagttttaagtggaggaaataatcagtgtggctctgtaaaacacgcttctagtgaatttagtaactagaaggttgctgaaagcctcagcaggggaatttacaatagactgaggtgtgaaatgcattcattgctgaatccccacctagcataattattggccccttcctacatgttccgtaaatatctattggattattgcatgataaatctttttctaggtcacgtcacagaaaatgagcagaggaagtgctgttctttctcctcaatgtgattcttagtgattctcattctccgatctgtgaggttgcgtggaagactaacagtctactaattacaatcacactcactcagctataccctctgtgttccatgattctactcagttcgtcttgccagggtttttaaacaaagttcttttatttagcaaatagtatacactttaaaatactttaaaaatttttaattgtgttgaaaatcacaaacataaaatttaccatcttaaccatttgtacgtgcaccgctgattggcattaagtttattcctattattgtacaatagatatccagaacgttttcatcttgcaaaactcaaactctatacccattgagcagcagctcatttgacccttcacccagcccctggcaaccaccattctactttatgtttctatgagtttgatacctcatttaagtggktttatacagtgtttgtctttttgtgactagcttatttcatttagcataatgtcctcaagattcatccatgttgtagcctataaaatgaacctacctgtttttaaaacatggtttcagtgtttttctcaaaaagttctaataatccaacaacacatataaatcatataatttccaggtaagtaggagttgtgagggcttacccatctattttgcaagtttccttaacatggcagaaatcattcttctcattagaaattattttgtggtaaggaacccactaactttgagagtggatagcccattttgcaataagacccatcatcagatgctaccacagctctactctctgaactgttctggggatgcattgattgagatcctagcatttgacagaaacaaagcaaatatataacgtctgtttagagcccttattttcctcaaaatcttctgatgttctccaggtcacctttgtctttctggcaactagctattttattccttgtatcatttaaccatggttacttattaatcatcccccatgagatgcctgaagtaacaatgttttgcaaataggttcagctctctggttttagggaatgaagagagggagaactgtaaaaggggagtgttagacttcatccccaaaggccaggaacaatgtcaaaaaactctggtatctctgcagttgatagttccctctcacttgactagattttaaaataattaagttctcaatttccaacttagtacaattgcaatctccaacagcatttcagaaataggaaacctgaagcatatctctgcacacttttatttgtagtttagtaaacagaaagtctgcaaatgagaaagaataatgcctaacttcttaaataagcagaagatgggaataatccagtcattgtgcttatacctgcacttctcagttctgccgcaagtattccagtaaaaactgggttgatctgagctgaagtgtttcttccttttggccaggtgcaaaagtctggagtctacttcagaggacgaatgtgtttagtcatttttataagagttgaaaaaaataagcactaaatctttctttcaaacttgaactgatcctcaaaacagttttaggaatttccaaaggatctttttgctttagtttccaaactggtattttcacttgtttccatcttgtttgctagataacctgagtcttaaatttaaaagaaaaatgctttgaggatgattttatcagctctccatatggaatatgagaaaaaaaatccataattattctgtatccagtttacctaaaatatttttctaagtttttggtaggcaggtattctcctttccaccgtagaactcaagcagtacagactataccatggcctattgctaagatttactgagatctccacttttggaaaccccacaagtgtaaattgagattaataaaaattccttggtatgaaaaatgctaacagttgaatttcactctcccatctactcagatattactttatactcctggatacccctcataactgctcctgatgcccaggcatccagggttaggtgaggaagcatgacctgggttttcaacaaactgcatgaggccactctggccacgagcagactctctatcctcaggcccccagtaattttgagttacttcctctcagccatctgacttatatgtgaggcacaactgcacaaaaatagcaattcttgacgcttttataaacacatctacagagaatgttcccattattgccttaatatagcaatctgagataatcaggtctggaaacatagccacgttttataggtaaggaaaccaagcataagtgatctaaaaactaacaggagagtgaaattgaaaccagaaccttggttttctgactgcccgttatggattccccctctggttttctaggaaagccctatagtgaaggccatattgctctcaatatttcttcttcttttcagttgcctttctttatgcccctcatccctgtctgtcttttcctcatccaatctccttgtgactctctgaaagtccctgccctgtgacagtcagttcagacctaccctttctagccattttctgatgctctctgagctgcagattttcctgagcttcagacacctctcgttctctcaatgccttgctagactgctgcaagttcaatttataaggagctgatgggagataatagtttactgcagtggttctcaatcagggcagtttttctccctgggggacatttggcagtgtctggagacattttatgctactggcacatattgggtggaagccagagatgctggctgccatcctgcaatgcacaggacagccccccaaatactaagtagaaatacttcgtgcctaatgtcgatagtgcctccaatgtcaaggttgagaaaccttggcttag

SEQ ID NO: 71083 - DNA, 3368 bp, Homo sapiens
aacattcaaacaaagctatctagtaatttataagatatagcattctggggcccagaaaaagaagtttgagctaaagataagatttggggccattagctcattgataggatttactatgtgttgagaaaaaggggacctaagatgaaaccctgaaaaataccaaccagtatttatggataaggcagagtaagcagcttaagtaggaaaataaacatcagggagagtgatatgtaagccaataaagaagaaagttttaagtggaggaaataatcagtgtggctctgtaaaacacgcttctagtgaatttagtaactagaaggttgctgaaagcctcagcaggggaatttacaatagactgaggtgtgaaatgcattcattgctgaatccccacctagcataattattggccccttcctacatgttccgtaaatatctattggattattgcatgataaatctttttctaggtcacgtcacagaaaatgagcagaggaagtgctgttctttctcctcaatgtgattcttagtgattctcattctccgatctgtgaggttgcgtggaagactaacagtctactaattacaatcacactcactcagctataccctctgtgttccatgattctactcagttcgtcttgccagggtttttaaacaaagttcttttatttagcaaatagtatacactttaaaatactttaaaaatttttaattgtgttgaaaatcacaaacataaaatttaccatcttaaccatttgtacgtgcaccgctgattggcattaagtttattcctattattgtacaatagatatccagaacgttttcatcttgcaaaactcaaactctatacccattgagcagcagctcatttgacccttcacccagcccctggcaaccaccattctactttatgtttctatgagtttgatacctcatttaagtgggtttatacagtgtttgtctttttgtgactagcttatttcatttagcataatgtcctcaagattcatccatgttgtagcctataaaaygaacctacctgtttttaaaacatggtttcagtgtttttctcaaaaagttctaataatccaacaacacatataaatcatataatttccaggtaagtaggagttgtgagggcttacccatctattttgcaagtttccttaacatggcagaaatcattcttctcattagaaattattttgtggtaaggaacccactaactttgagagtggatagcccattttgcaataagacccatcatcagatgctaccacagctctactctctgaactgttctggggatgcattgattgagatcctagcatttgacagaaacaaagcaaatatataacgtctgtttagagcccttattttcctcaaaatcttctgatgttctccaggtcacctttgtctttctggcaactagctattttattccttgtatcatttaaccatggttacttattaatcatcccccatgagatgcctgaagtaacaatgttttgcaaataggttcagctctctggttttagggaatgaagagagggagaactgtaaaaggggagtgttagacttcatccccaaaggccaggaacaatgtcaaaaaactctggtatctctgcagttgatagttccctctcacttgactagattttaaaataattaagttctcaatttccaacttagtacaattgcaatctccaacagcatttcagaaataggaaacctgaagcatatctctgcacacttttatttgtagtttagtaaacagaaagtctgcaaatgagaaagaataatgcctaacttcttaaataagcagaagatgggaataatccagtcattgtgcttatacctgcacttctcagttctgccgcaagtattccagtaaaaactgggttgatctgagctgaagtgtttcttccttttggccaggtgcaaaagtctggagtctacttcagaggacgaatgtgtttagtcatttttataagagttgaaaaaaataagcactaaatctttctttcaaacttgaactgatcctcaaaacagttttaggaatttccaaaggatctttttgctttagtttccaaactggtattttcacttgtttccatcttgtttgctagataacctgagtcttaaatttaaaagaaaaatgctttgaggatgattttatcagctctccatatggaatatgagaaaaaaaatccataattattctgtatccagtttacctaaaatatttttctaagtttttggtaggcaggtattctcctttccaccgtagaactcaagcagtacagactataccatggcctattgctaagatttactgagatctccacttttggaaaccccacaagtgtaaattgagattaataaaaattccttggtatgaaaaatgctaacagttgaatttcactctcccatctactcagatattactttatactcctggatacccctcataactgctcctgatgcccaggcatccagggttaggtgaggaagcatgacctgggttttcaacaaactgcatgaggccactctggccacgagcagactctctatcctcaggcccccagtaattttgagttacttcctctcagccatctgacttatatgtgaggcacaactgcacaaaaatagcaattcttgacgcttttataaacacatctacagagaatgttcccattattgccttaatatagcaatctgagataatcaggtctggaaacatagccacgttttataggtaaggaaaccaagcataagtgatctaaaaactaacaggagagtgaaattgaaaccagaaccttggttttctgactgcccgttatggattccccctctggttttctaggaaagccctatagtgaaggccatattgctctcaatatttcttcttcttttcagttgcctttctttatgcccctcatccctgtctgtcttttcctcatccaatctccttgtgactctctgaaagtccctgccctgtgacagtcagttcagacctaccctttctagccattttctgatgctctctgagctgcagattttcctgagcttcagacacctctcgttctctcaatgccttgctagactgctgcaagttcaatttataaggagctgatgggagataatagtttactgcagtggttctcaatcagggcagtttttctccctgggggacatttggcagtgtctggagacattttatgctactggcacatattgggtggaagccagagatgctggctgccatcctgcaatgcacaggacagccccccaaatactaagtagaaatacttcgtgcctaatgtcgatagtgcctccaatgtcaaggttgagaaaccttggcttag

SEQ ID NO: 71084 - DNA, 3368 bp, Homo sapiens
aacattcaaacaaagctatctagtaatttataagatatagcattctggggcccagaaaaagaagtttgagctaaagataagatttggggccattagctcattgataggatttactatgtgttgagaaaaaggggacctaagatgaaaccctgaaaaataccaaccagtatttatggataaggcagagtaagcagcttaagtaggaaaataaacatcagggagagtgatatgtaagccaataaagaagaaagttttaagtggaggaaataatcagtgtggctctgtaaaacacgcttctagtgaatttagtaactagaaggttgctgaaagcctcagcaggggaatttacaatagactgaggtgtgaaatgcattcattgctgaatccccacctagcataattattggccccttcctacatgttccgtaaatatctattggattattgcatgataaatctttttctaggtcacgtcacagaaaatgagcagaggaagtgctgttctttctcctcaatgtgattcttagtgattctcattctccgatctgtgaggttgcgtggaagactaacagtctactaattacaatcacactcactcagctataccctctgtgttccatgattctactcagttcgtcttgccagggtttttaaacaaagttcttttatttagcaaatagtatacactttaaaatactttaaaaatttttaattgtgttgaaaatcacaaacataaaatttaccatcttaaccatttgtacgtgcaccgctgattggcattaagtttattcctattattgtacaatagatatccagaacgttttcatcttgcaaaactcaaactctatacccattgagcagcagctcatttgacccttcacccagcccctggcaaccaccattctactttatgtttctatgagtttgatacctcatttaagtgggtttatacagtgtttgtctttttgtgactagcttatttcatttagcataatgtcctcaagattcatccatgttgtagcctataaaatgaacctacctgtttttaaaacatggtttcagtgtttttctcaaaaagttctaataatccaacaacacatataaatcatataatttccaggtaagtaggagttgtgagggcttacccatctattttgcaagtttccttaacatggcagaaatcattcttctcattagaaattattttgtggtaaggaacccactaactttgagagtggatagcccattttgcaataagmcccatcatcagatgctaccacagctctactctctgaactgttctggggatgcattgattgagatcctagcatttgacagaaacaaagcaaatatataacgtctgtttagagcccttattttcctcaaaatcttctgatgttctccaggtcacctttgtctttctggcaactagctattttattccttgtatcatttaaccatggttacttattaatcatcccccatgagatgcctgaagtaacaatgttttgcaaataggttcagctctctggttttagggaatgaagagagggagaactgtaaaaggggagtgttagacttcatccccaaaggccaggaacaatgtcaaaaaactctggtatctctgcagttgatagttccctctcacttgactagattttaaaataattaagttctcaatttccaacttagtacaattgcaatctccaacagcatttcagaaataggaaacctgaagcatatctctgcacacttttatttgtagtttagtaaacagaaagtctgcaaatgagaaagaataatgcctaacttcttaaataagcagaagatgggaataatccagtcattgtgcttatacctgcacttctcagttctgccgcaagtattccagtaaaaactgggttgatctgagctgaagtgtttcttccttttggccaggtgcaaaagtctggagtctacttcagaggacgaatgtgtttagtcatttttataagagttgaaaaaaataagcactaaatctttctttcaaacttgaactgatcctcaaaacagttttaggaatttccaaaggatctttttgctttagtttccaaactggtattttcacttgtttccatcttgtttgctagataacctgagtcttaaatttaaaagaaaaatgctttgaggatgattttatcagctctccatatggaatatgagaaaaaaaatccataattattctgtatccagtttacctaaaatatttttctaagtttttggtaggcaggtattctcctttccaccgtagaactcaagcagtacagactataccatggcctattgctaagatttactgagatctccacttttggaaaccccacaagtgtaaattgagattaataaaaattccttggtatgaaaaatgctaacagttgaatttcactctcccatctactcagatattactttatactcctggatacccctcataactgctcctgatgcccaggcatccagggttaggtgaggaagcatgacctgggttttcaacaaactgcatgaggccactctggccacgagcagactctctatcctcaggcccccagtaattttgagttacttcctctcagccatctgacttatatgtgaggcacaactgcacaaaaatagcaattcttgacgcttttataaacacatctacagagaatgttcccattattgccttaatatagcaatctgagataatcaggtctggaaacatagccacgttttataggtaaggaaaccaagcataagtgatctaaaaactaacaggagagtgaaattgaaaccagaaccttggttttctgactgcccgttatggattccccctctggttttctaggaaagccctatagtgaaggccatattgctctcaatatttcttcttcttttcagttgcctttctttatgcccctcatccctgtctgtcttttcctcatccaatctccttgtgactctctgaaagtccctgccctgtgacagtcagttcagacctaccctttctagccattttctgatgctctctgagctgcagattttcctgagcttcagacacctctcgttctctcaatgccttgctagactgctgcaagttcaatttataaggagctgatgggagataatagtttactgcagtggttctcaatcagggcagtttttctccctgggggacatttggcagtgtctggagacattttatgctactggcacatattgggtggaagccagagatgctggctgccatcctgcaatgcacaggacagccccccaaatactaagtagaaatacttcgtgcctaatgtcgatagtgcctccaatgtcaaggttgagaaaccttggcttag

SEQ ID NO: 71085 - DNA, 2147 bp, Homo sapiens
tgcatctgtcttcagaagggattgtatgaattaaaagacaatagagagatttagtttcatcctcagatagctgagaagtagccactcttatcagcacctctgctacacacatatacacacattgctactacccatttctcttccctacccccaaaacatacattctctcttgcgcttctccttcccttcccttctttctttaatttctatatttctgatgcctgaaatctttaactggggcatggggaaacaaccttgttctaggcagaacagctggagaaagtaataggttaggatttcaatacaaagtattgacaattaagaaacttttactttaaatgctcacttcctacaacagataaaagagttgatgtaatttttaacacagttgtaactccagaaaataaaataattttatattgacaggggtaatctcttcaggaaaacattttttcacatctctaacgagatggtcttttattgaatctccacatacattgaggaacttggaggttgttcctgtacaatgaatgtcttagaggttcgtaggagtcaaactctcctttcagtgcagtcatttaatttatgatttggtcctgccaacaggttttattatccgtattttacagatgaggaaattgagactcagtatattttagtatatgtaagtaactcgcataagttctcacagttagtaaagagataaacctgaaactcaaatctaggccactctgaacccaaagaatcttctctcaccaaataaaataagtctacaaaattaaggaagaaaaccaaatggatattgtcttggacttctccctagatagtgtactgattatttctgataccttttgcatagtgtagatcaagctcatttattagtgccaaggttccatattcatatttttaacagaggctcaaagacatatataataatgaatattgtagaaaaactcaatgctgccattttaagtgggggtgaagaggtcgcatgttttatttagaaggttgaaatgaataagaagaatatagttagccattttgtagagagcttagagctactcttgaagttattccattatagaatcaagttgttaatatacatttaaaatgagaggattgcaaagtacgcctccattatagcacatggctttctactttcttattcccctttagcaataaaactccaatctgttccatcagtcatccagggaagggtttcaatctatttgagaaagaagctaaaaagtagagatctagggattataaaatttaaatatgtaaatatatgcatccagctccccatttctgtgtgctcygtgcctctggttaacaccacaaatagaaaagtataatatccttgttataaatggcaacaattatctaataagtcatacagctaaaaaaaaaaaaaaaaaaaacaaacagagggagccagagagatatcaattttagtttttcatgttttctcttgcttctttgttcctcacattcttcttagactctgtcaaaacaatgttttggtctttgctctagatttttaggtggagcctaaatgtttgtaagatagaagtttgataacaagtgttcctttaaactgacagtttagttgtcttcagttttaaaatatactttgattatttctgctgcttttcatgctcaaatgtggagccactgaatttatcagaaagagattttgaggtattctattaagcaatggtatgaatttcagatgaacatcataaataagaaggctaaattatagtgggagaattgctctgtatgaattgtaaattttttttttctttgaggcagagtctcattctttcacccaggctggcgtgcaatggtgtgatcttggctcactgcaacctccacctcctgggttcgagtgattttcctgcctcaccctcccatgtagctgggattacaggcatgtaccaccacatccggtgaatttttgtatttttagtagagacagggttttgccatgttggccaggctggtctcgaactcttgacctcaggtgatctgacctcctcagcctcccagagtgctaggattacaggtgtgagccacagcgtccagccatgaattgtacaagttttaagaaactagaacttatcatgccaaaatatggtcttaaa

SEQ ID NO: 71086 - DNA, 797 bp, Homo sapiens
atgcaataacactaaagctctgatttttaaaattctattaaacaaattaaagcaacttagtaacagaaacttatacagatatgtttttataattccagttggaaagaaaacttttttaaaataaaaatattgttttaaacaatatataatccaatgcaatacaattagtaatcattgggactatattctatttaatctacagggtttctattctccaataaaatgaattacaaatataaatttagcaataaagtcatttttattttaataaagtaatagaaatattcacatactaataaatgttactgtcatccgttttcatgaggataatgaagaaagttcattagtagctggacaatctgaaatcacggaatacataatcaactctgtgcaatgaattgttcacagatggacccctaccatcttgctcaaagaggctcttggcatatatggaattggyaagataattagccagtttcacactttacacttaaagtttgccttccacagttaagctggggcacaaatgccttggctgtaatgaaatagctttgtaagtcaaaaggttgtctgtacgttccaaaaggggtatgcagtcaactgctaaagtggcgtttcccaggatttgcatctgaacatccctaggagggttatattctccaggtcctctctgtcccctcagtgccattacccaggagaacaaaccatgttgatcccaaatgaatgaagcacattcccttcaccacacacacacacacacacacacgtgcacatacacacgctaatgtcacatacaa

SEQ ID NO: 71087 - DNA, 617 bp, Homo sapiens
gggatccacccctgtgacccagacacctggtsgggggccaggactccagcactggggattaaaattcaacatgagatttgggtggggacaaatatccaaactataccatttcttatctctctgatgttatttttaagtgttctttcattaaaatagccacaattgtttcttcttgatttaggattcttgtctcaggtgttgttgatatcctgaatcaacgggaaacaaataggctgtgtactagctgggatttttatttgtcaatttgcatttccagctttgagaattcacgtgagtggctccaccatagccatcctgaagagaactgagtgccagttcctttatgaagtgagaggagaaacatacttaaaggtaaggagtccacagagacaatgcataggaaaagctctcagacacgcttgggccacctcctttgagacttggccaggaaagttgagcatgctaatcctcttctgtactcatcacgatgagcaccctccatcctctgcaagagaaatgaccaccaaaaaatgtgaactcaaaacttgcctttactccaaagagcccttttgagattttgaactctgccagcatttcctctgccatatccaggtttt

SEQ ID NO: 71088 - DNA, 617 bp, Homo sapiens
gggatccacccctgtgacccagacacctggtcgggggccaggactccagcactggggattaaaattcaacatgagatttgggtggggacaaatatccaaactataccatttcttatctctctgatgttatttttaagtgttctttcattaaaatagccacaattgtttcttcttgatttaggattcttgtctcaggtgttgttgatatcctgaatcaacgggaaacaaataggctgtgtactagctgggatttttatttgtcaatttgcatttccagctttgagaattcacgtgagtggctccaccatagccatcctgaagagaactgagtgccagttcctttatgaagtgagaggagaaacatacttaaaggtaaggagtccacagagacaatgcataggaaaagctctcagacacgcttgggccacctcctttgagacttggccaggaaagttgagcatgctaatcctyttctgtactcatcacgatgagcaccctccatcctctgcaagagaaatgaccaccaaaaaatgtgaactcaaaacttgcctttactccaaagagcccttttgagattttgaactctgccagcatttcctctgccatatccaggtttt

SEQ ID NO: 71089 - DNA, 1387 bp, Homo sapiens
cttttgagcaaagaagcaactaactcacaaatctgctatgtttggctgggtgcggtggctcatgcctgtaatcccagcactttgggaggccgaggcaggcggatcacgaggtcaggagttcgagaccagcctggccaatatagtgaaaccatgtctctactaaaaatacaaaaaaaattagccaggtgtggtggtgtgtgcctgtagtcccarctactcaggaggctgaggcaggagaattgcttgaacccaggaggcagaggttgcagtgagccaagcttataccactgcactccagcctgggcaatagagggagactctgtctcaaaaaaaaacaaaaacaaaaaaaaaaatgttacgtttttaagactaaatttcacatctgaaattttcaaggtgctcaggtgagaaatgggaactacaactgattactcaagttgagccctggtgatacaggataaggacctgggctttaaactactacataacaaaaaaaaaaaaataaagaaaaaaaaaaactagcgtaaccagcaacctgtcagaggtttcttcaacagcagcagtgatacgcaatcttgtttctgtaactatctcagcgatcttgggaagcattcaaaacaagcaaatgtacactgatgtgtgtctgtagggatgtgggcccatcccaggttccagctagggcctaaccatggttgttcttcagtctcattactgttcctttgaaaaaccaagatttagccaggcaagggggctcatgcctataatcccagcactttgggaggccaaggcaggcagatcacgaggtcaggagtttgagaccagcctggccaacatggtgaaaccccatctctactaaaaatacaaaaattagccggacatggtggcgggcacctgtaatcccagctactcagggggctgaggcaggagaatcgcttgaaccccagacgcggaggttgcagcgagccgagatcgcaccattgcactccagcctgggcgacagggactctgtcaaaaaaaagaaaacaaaacaaaagaaaaaccaagatttgaccatagttttatttaaatcagtaactttgtagtatctgtgacccccccaccccacacacaccctccacgcttaaaccggttattattttaaaaccgactatacagaaaaatcaggccaggtgcagtggctcacgcctgtaatcccagcactttgggaggccaaggcaagcagatcacctgaagtcgggagttcgagaccagcctgaccaacatggagaaaccctgtctctattgaaaatacaaaattagctgggcgtgatggtgcatgcctgtaatcccagctacttgggaggctgaggcaggagaatttcttgaacccgggaggcggaggttgcgg

SEQ ID NO: 71090 - DNA, 1387 bp, Homo sapiens
cttttgagcaaagaagcaactaactcacaaatctgctatgtttggctgggtgcggtggctcatgcctgtaatcccagcactttgggaggccgaggcaggcggatcacgaggtcaggagttcgagaccagcctggccaatatagtgaaaccatgtctctactaaaaatacaaaaaaaattagccaggtgtggtggtgtgtgcctgtagtcccaactactcaggaggctgaggcaggagaattgcttgaacccaggaggcagaggttgcagtgagccaagcttataccactgcactccagcctgggcaatagagggagactctgtctcaaaaaaaaacaaaaacaaaaaaaaaaatgttacgtttttaagactaaatttcacatctgaaattttcaaggtgctcaggtgagaaatgggaactacaactgattactcaagttgagccctggtgatacaggataaggacctgggctttaaactactacataacaaaaaaaaaaaaataaagaaaaaaaaaaactagcgtaaccagcaacctgtcagaggtttcttcaacagcagcagtgatacgcaatcttgtttctgtaactatctcagcgatcttgggaagcattcaaaacaagcaaatgtacactgatgtgtgtctgtagggatgtgggcccatcccaggttccagctagggcctaaccatggttgttcttcagtctcattactgttcctttgaaaaaccaagatttagccaggcaagggggctcatgcctataatcccagcactttgggaggccaaggcaggcagatcacgaggtcaggagtttgagaccagcctggccaacatggtgaaaccccatctctactaaaaatacaaaaattagccggacatggtggcgggcacctgtaatcccagctactcagggggctgaggcaggagaatcgcttgaaccccagacgcggaggttgcagcgagccgagatcgcaccattgcactccagcctgggcgacagggactctgtcaaaaaaaagaaaacaaaacaaaagaaaaaccaagatttgaccatagttttatttaaatcagtaactttgtagtatctgtgaccccccmaccccacacacaccctccacgcttaaaccggttattattttaaaaccgactatacagaaaaatcaggccaggtgcagtggctcacgcctgtaatcccagcactttgggaggccaaggcaagcagatcacctgaagtcgggagttcgagaccagcctgaccaacatggagaaaccctgtctctattgaaaatacaaaattagctgggcgtgatggtgcatgcctgtaatcccagctacttgggaggctgaggcaggagaatttcttgaacccgggaggcggaggttgcgg

SEQ ID NO: 71091 - DNA, 562 bp, Homo sapiens
tataattactacagctgtrtatcagatatctgcagtaccataactctaaacttaactaaagcacttcgaacaatacaaaagtgtatacgaacagaagtgaaaattatatgtagaatcaaaagtgaaagtgcccttcccagaagtgtatatccttccagatttcagatagaaagatgaatattatgaaaggaaagatagaaagatgatagacagatagtagttaagagcacagacttttaatctagactgtcaaggtttgcgtcccagctctaccattaatacttctacatgtatgacctcagttttctcatctataaaagtgagaatgacaacagcacacaggacatatccctaatccgaaactccaaaatcctaaatactccaaaatttgaaactttttgagcacccacgtgacaccacaagtgaaacgtttcatacctgatcttgtgatgtgtcacagtcaaaactttgtttcatgcacaaaattatttaaaatattgtaaaaagttaccttcagcctacgtgtataagtaaataaatttcatgtttcagacatgggccc

SEQ ID NO: 71092 - DNA, 562 bp, Homo sapiens
tataattactacagctgtgtatcagatatctgcagtaccataactctaaacttaactaaagcacttcgaacaatacaaaagtgtatacgaacagaagtgaaaatkatatgtagaatcaaaagtgaaagtgcccttcccagaagtgtatatccttccagatttcagatagaaagatgaatattatgaaaggaaagatagaaagatgatagacagatagtagttaagagcacagacttttaatctagactgtcaaggtttgcgtcccagctctaccattaatacttctacatgtatgacctcagttttctcatctataaaagtgagaatgacaacagcacacaggacatatccctaatccgaaactccaaaatcctaaatactccaaaatttgaaactttttgagcacccacgtgacaccacaagtgaaacgtttcatacctgatcttgtgatgtgtcacagtcaaaactttgtttcatgcacaaaattatttaaaatattgtaaaaagttaccttcagcctacgtgtataagtaaataaatttcatgtttcagacatgggccc

SEQ ID NO: 71093 - DNA, 763 bp, Homo sapiens
cctctgttgtcctttagtaattccacccyctccttaactcctggcaaccaccaatctgttctccatattggcagttttgtcatttcaagaatgttgcataaaaggaattttatagtatgtaacattttgagattggcctttttcattcagctaaattctgtggagagccattaaactatccttttgatgaacaaaaaaaaattaagaatattatcacattttattttggcaacagaattatcattagcccaaagtgctttgtgcggtatctagcacacagtaaatagtgaatgttcagtggcactcagcgaaagtgctcctcttctgcctactactacccttcctcctttttcctcttctctccttcctactacttttttcttgccctttgcttctctacatcatcttattaatattaactgacaaaggctaattgtttgagttagaaatactaaaaagagttaaatgaaataatttatgtgcaatttctttgtaagttatagattttactagagttgctataagaaattgccagttactattggctgccttataagaacagtttgcagctgctagtgatgtatactgatgtgaataaagaagtcagcatgagcaggatttctttccactggacccacaaggtctgtcctctggtttgctactgcagtgggagctgctaacaaagcctgtcatgctttgattctaggcaacgaagtcccaggaacaaaatgcagactttagttcatattctttataaagcctt

SEQ ID NO: 71094 - DNA, 1001 bp, Homo sapiens
atatatatatatatatatatatatatataatattttgtttatccattcatccagtgatggacacataggttgattaactgtatttctttttaggcctgaacaataactgtaaattttctgcggtttggggaaaatgcaattaagttaccttattaaaagaaatagtaatgaatccacttaattatatttcttctacagttcaggtcattataaagtataaactctagtaaaggaatttctcttcaaaaagtgcatyttgttctacagtgaaaaaaattttttcctggagatttaggatatgaatgtatcccctgtgaaattaattgctgtcaaaaatacttcagaaaattactctttttaactttacccattcttttgaatgttgcccaagagtagtaactcccatgtctgttggaatggttagttagatttaaaaatgtagccaaagtgctttttaaaataccctggagacattagacttgtaaaattcacaggttctgccatacttacatattagctttacattgcaattacctgatagataattgtcattaaagtaatcatgtaaaggcatatctctccaatggagcaggaaaaaaaaaaggttttaaagtcattctggtcgattgaacttggaggcttgagaatatttttaagaaaatctaactaaataaatgtgcaccctggagagcagaatggctttttgtttttaatccattaaaggtcctttaatttcttcacagttctccgtctgtcccctctcaaccatttccctgtagtgaactaacatttatacagtgtcagtgagagagtaaaaatctccttctgatttcaatgagccatcaaagcaggtggtttaaatagggtcccatgaattcccaaccacaggtcttaatcaggggccatgagcatctaggactcagtgtttttgccctgtcactacataggagatgggaagagggcccttagaaatgtttaaagaagaatatattctgtatctg

SEQ ID NO: 71095 - DNA, 707 bp, Homo sapiens
caagcgatccccccgccttggcctcccaaagtgctgacgttacaggcatgagccattgtgcccagccaacccttatgttttctcaaaaagttttacagttctatctcttacatgttggtttttgattcattttgaggtaatttttgtatgtaataagaggcaagggcctaagttgttttttgttgttgttgttgttgcatgtaaatatttagttgtcccaacaaaagccattgagttttgaggttgccacacagctttgttgtggcaatagataaytgacgcaaagcttaccttttctacttcacatctcatgtactctcactgctgatatataccatgttctgagatgctatgctgagtcagcattttggaggctcattttaaatgagtaagtaggatgtggttgtcttgagaaaacctcacattcctcctgattcatgttattaattggtcctggagaagagctgactcccaaccatttttcactgtgatcctcagctggatacggataaggtttgggaatgctaagaaaagtaagctgattaaaagtctcttcacaaaaaaacttctcaacaacaattcctagtattaatgataattattaggatacaaaacatctctgttaacttttatgctgagtttgcagcctgtctctggtcacttctcttcttctctgtacacagcccactcagggcccagaacagacg

SEQ ID NO: 71096 - DNA, 740 bp, Homo sapiens
aaggcattattaaaattaatgtattagtgataagttaataattattaagataagcataaatcagtggagatgtttgaaatggtgcagcaacatttggttagctgtgggggcagcagggacaccaatatacattcttaatggagtccacagttaaaataaaaccttttctttttctatttagaagaaagtaagtcccttttaatctacacttcagactagaaaaaatgtaagccctaaagcaatggaatacatcacaaaggaaaagacagattggctatataaaaattaaattacgtaagactttaatatggcagaaaacaaaggtcatcggaactgggaaatacgttttcttccaatatagtaagggctaagtatactttgatatgcttcatctcagctgcagctgctgcctctatttgaaacgtgacgtgtgaaatgttaagtcctaggcagctgatgtgcagatggcagctgtcctcatccctcctgtgggaaccgagtccaccagcaaatggcttattctcaacttcgaactttggggtgkggggtgggggggggtgtgttcgctaggcgacactggccgtggtgtgccggctgaaagttcccctgtggcgagtgtcaggagggctgggtgggagatgggaattactgcgcatcccaagatccttgaggataaggtgactgctgagttggttggattggctgaaatgtggaggggggtgagtttagagaggcagatg

SEQ ID NO: 71097 - DNA, 740 bp, Homo sapiens
aaggcattattaaaattaatgtattagtgataagttaataattattaagataagcataaatcagtggagatgtttgaaatggtgcagcaacatttggttagctgtgggggcagcagggacaccaatatacattcttaatggagtccacagttaaaataaaaccttttctttttctatttagaagaaagtaagtcccttttaatctacacttcagactagaaaaaatgtaagccctaaagcaatggaatacatcacaaaggaaaagacagattggctatataaaaattaaattacgtaagactttaatatggcagaaaacaaaggtcatcggaactgggaaatacgttttcttccaatatagtaagggctaagtatactttgatatgcttcatctcagctgcagctgctgcctctatttgaaacgtgacgtgtgaaatgttaagtcctaggcagctgatgtgcagatggcagctgtcctcatccctcctgtgggaaccgagtccaccagcaaatggcttattctcaacttcgaactttggggtgtggggtgggggggggtgtgttcgctaggcgacactggccgtggtgtgccggctgaaagttcccctgtggcgagtgtcaggagggctgggtgggagatgggaattactgcgcwtcccaagatccttgaggataaggtgactgctgagttggttggattggctgaaatgtggaggggggtgagtttagagaggcagatg

SEQ ID NO: 71098 - DNA, 703 bp, Homo sapiens
cctcccaaagtgctgggattacaggtgtgagccaacgcacccagccttgcatcactgatttcttagcaaagaacttgagcccggcccacgtatgactctcaccaattccaaatcagtagagtccaaataaatgttttacaatgctaaagctttagtaatctcaaaaatatccctatttaaaaaaattttccagcagcaaacctgtatattaatacatacaaataygattttcctatcattgctcctccttccaggtatactttgaagcaggtgacgagtactgctccactttactgagaaagggggagaggaagggaggaggtgagagggagggaaggagagagggagatacgagagaagagagtatgggaaacatccaacactcataaagtgcaagatcaagtatcacccctaaagagggagaaactggcactgctaggccttttgagttagtatgcagaactgagtatccttaccctgacctgaggctttatgctataaatgctaagaatctgtgaaacaagtttccacataggaggtttcccagcaggacaggactctccctccagcacagcctgctcccacctacctcctctgggcgctctacttagcagccagtgcctatgtggggagagtgagtgactacctactgtcacccccaagctgcaacacctggcaatgcgtgtcctctcagggggtggca

SEQ ID NO: 71099 - DNA, 1198 bp, Homo sapiens
gcattgttaggagtggaacagggcacagcgttgttaggagtggaaatgttggcccttctcccaaagtggggaggaaggtggtagcataaagtgaccgattcctactgaagccttctcacggccctgcgcactggcattttccacctgtaatgcgtggcaggagccgtggggacgccccttgcctgaggtcaccctgcttgtcagaaggcctcgacttcaccctctcatctgtctggcttctttttagagcttcacatttgctgttgggagatacttggactttgctccattcctgccttcctttttggtacctcctcctcctaggctccagtcctgtcttctacaaataccactcccagagacactgcatttcagtagaggagttctgaaaaccctcaggatctctggtggaggaatgtcagctcagtgacaagattagaaaggacattgagcagcagagtagggagtcttcctggcccccacccccaagaatgtttcacagtgcctggatttggtcagctttgggacctttttccatatccaataaaagctgattctgtctccccatgtttaccgagctgcctgagggtggggtctgtcttggtcattcactagccactaagtgcttgttgcaggaagttgtgggataggacttcctgtgttggtgctggtcagtgtctagggctcagccttgggagtcagaggtcacagtctgcgagggtgagacttgtgcgttcttagaaatggctctgttaatgtgacagtttgaaggaagctttgtggaaagaggaagtagatattttttacccagaaggctttcttctatccttggtatgtggccatttgggcctgttttacccaggtgtggtacacgaggcccctgttggatgtccttgtgtaagggatatttgagggtacttcagaagtgtacttttgggcctcaagagtcgggatgtctaacagagcctcagaccagggtcacctggggttatggttgtgtccagccagtagggcctggaggctgtgggggcttcctcagcccttagtgggcaggtaggcaggtgaggctgccaytctccaggcagtcccgctctccgctgggaggtagagggagccgagagacaccccagctctgctcagggcctcccacaagaggagggcccatgtaaccagcccctgcctcctccctctgcaggct

SEQ ID NO: 71100 - DNA, 722 bp, Homo sapiens
ctcctggctcctttgtagagatctctgacataatcatctccatttctgatttgttttcatagcagccacgctcatatgtgccaggaattgtgcgagacacaataaagtgtagagctctccccacccccattcccacctccaaccctctccaggtttctcgggtctccacctgcagagccagtcataggaaatcttttctaaggcaactcgaggagtagaaaaggaggcgacacattcagcataatgaagcccrggtgttgggaggtgcccacatctggcctcctgaaaggtctcactgttgttcagatgctttcccaggaaatgggatggaggcttcttttcttcacggtccgaggggtcccaactcccctccacatctatccgggtagccagatgccatgaaagcagtgaaaactggcctaaggctgagaacatatggtcacaggtaggtctggggagcagagcgggcagaggaaagactgctggatacactgaggtgggtcatccaggaccaagaagccaggccagagagagggagcctctgggtctagatctcaaggtgagtgaatgacagaggctggatttgaatccattcactgagagcgcagaaaaaggcagagaagggactctcgtcaccttcccttgtctgatttgcacagcacaactgggtcctctagaaaaaagtagctactttgcattctttgagacttgaaaacacattt

SEQ ID NO: 71101 - DNA, 722 bp, Homo sapiens
ctcctggctcctttgtagagatctctgacataatcatctccatttctgatttgttttcatagcagccacgctcatatgtgccaggaattgtgcgagacacaataaagtgtagagctctccccacccccattcccacctccaaccctctccaggtttctcgggtctccacctgcagagccagtcataggaaatcttttctaaggcaactcgaggagtagaaaaggaggcgacacattcagcataatgaagcccgggtgttgggaggtgcccacatctggcctcctgaaaggtctcactgttgttcagatgctttcccaggaaatgggatggaggcttcttttcttcacggtccgaggggtcccaactcccctccacatctatccgggtagccagatgccatgaaagcagtgaaaactggccyaaggctgagaacatatggtcacaggtaggtctggggagcagagcgggcagaggaaagactgctggatacactgaggtgggtcatccaggaccaagaagccaggccagagagagggagcctctgggtctagatctcaaggtgagtgaatgacagaggctggatttgaatccattcactgagagcgcagaaaaaggcagagaagggactctcgtcaccttcccttgtctgatttgcacagcacaactgggtcctctagaaaaaagtagctactttgcattctttgagacttgaaaacacattt

SEQ ID NO: 71102 - DNA, 722 bp, Homo sapiens
ctcctggctcctttgtagagatctctgacataatcatctccatttctgatttgttttcatagcagccacgctcatatgtgccaggaattgtgcgagacacaataaagtgtagagctctccccacccccattcccacctccaaccctctccaggtttctcgggtctccacctgcagagccagtcataggaaatcttttctaaggcaactcgaggagtagaaaaggaggcgacacattcagcataatgaagcccgggtgttgggaggtgcccacatctggcctcctgaaaggtctcactgttgttcagatgctttcccaggaaatgggatggaggcttcttttcttcacggtccgaggggtcccaactcccctccacatctatccgggtagccagatgccatgaaagcagtgaaaactggcctaaggckgagaacatatggtcacaggtaggtctggggagcagagcgggcagaggaaagactgctggatacactgaggtgggtcatccaggaccaagaagccaggccagagagagggagcctctgggtctagatctcaaggtgagtgaatgacagaggctggatttgaatccattcactgagagcgcagaaaaaggcagagaagggactctcgtcaccttcccttgtctgatttgcacagcacaactgggtcctctagaaaaaagtagctactttgcattctttgagacttgaaaacacattt

SEQ ID NO: 71103 - DNA, 722 bp, Homo sapiens
ctcctggctcctttgtagagatctctgacataatcatctccatttctgatttgttttcatagcagccacgctcatatgtgccaggaattgtgcgagacacaataaagtgtagagctctccccacccccattcccacctccaaccctctccaggtttctcgggtctccacctgcagagccagtcataggaaatcttttctaaggcaactcgaggagtagaaaaggaggcgacacattcagcataatgaagcccgggtgttgggaggtgcccacatctggcctcctgaaaggtctcactgttgttcagatgctttcccaggaaatgggatggaggcttcttttcttcacggtccgaggggtcccaactcccctccacatctatccgggtagccagatgccatgaaagcagtgaaaactggcctaaggctgagaasatatggtcacaggtaggtctggggagcagagcgggcagaggaaagactgctggatacactgaggtgggtcatccaggaccaagaagccaggccagagagagggagcctctgggtctagatctcaaggtgagtgaatgacagaggctggatttgaatccattcactgagagcgcagaaaaaggcagagaagggactctcgtcaccttcccttgtctgatttgcacagcacaactgggtcctctagaaaaaagtagctactttgcattctttgagacttgaaaacacattt

SEQ ID NO: 71104 - DNA, 630 bp, Homo sapiens
caggggatttggaagaagttacttgctagactgtcgaagtaacagttatgttaccaagtctgccccaccccgcctaattttgcattaattaaaaacaccaggggaaacagatacacaagggctgtggtaacaggaagcatggctatttactgagcctttcatattacagctctgattcctctctgccacctcatgaggggaggtattttcatctctgtttgcagatgggtaacctgaggcccaacaggtgcaataaccttcccaaggtcacacagccattgagtggcagaggaagctgcaaacctaggtctagacagcctgccagctgtatgtttttaaggagaaaaatgctgcctctttcttaaatgagtttccctaagaaaggagagagaagatgaaatactgttgatgacaatgtttgatgatggtgaggatatggatgataggtgatgatgctatggatggctgacgatgaaagggatggatggctgatgatggtgatggatagatgatgcctgtgatgggtggttgatgatggtgatggatgatggayggatgatgatggtgatggacggctggtgatggtgatggacggctggtgatggtgatggacggctggtgatggtgatg

SEQ ID NO: 71105 - DNA, 1050 bp, Homo sapiens
tgccaagcagatggtggtcagctcggggcagatatgctacaaaatgccaactaaggtccctctgggctcacagatggaacgtggctgccacttcccaatgggcctgaggtttctccacgtgcagtgcagagcccaaggtgaagctgttaaggctctccatccatctacagatgcacagtcttttttgcacagctgcaagactgtgcttatggtctttaatcttcctctttgaaaagcatccaatttaggaatttttgcagtaatcatttcagagtaatgaaaaacaaacagaacaatagaacatttcagatgtgataggcacactctctgcacctctctctaatrtatgtttaaagagatgtattagtcatcacgaggaaccctcttttgtctccccacgcaatcaaattgcacccgtatgcagaccacaaacatcgtaatacagttaatttacccaatgtactcatttctctctcataacaatgcccgtaagatagcattcaattttgttttaaaatttcctcacatacaagatggggctgggatgaacatttttccatcttgcaggcttgcaaagcaccacggcagaggctaacgtgtgccattttgcctggtccaagtctttttatgatgggtaaatgaggtgtgaacagggccttgcccaaagacccagagtgagtggtggagacgtgatttgaacctttgtcttttcccccacctaatctgtgttcttcctccagaccaccctgtcctgaagcagtagagaaagagctcaggctctagacaaggcattgaggtatagtgtgggccattcttgagacctgccgtatctctgcaaaacacagacagatgcctcccaatcactaagagtggggaggccccactccagagaacagaggttaaagtgcaggctgtgggaactgctgcctcaattaacccccgactccaccacctgccagctggacaaccctggccaacctaccttacctttctgagcatcagttttagcatctacagagcggggatagtattagcacccacctaagaggg

SEQ ID NO: 71106 - DNA, 1050 bp, Homo sapiens
tgccaagcagatggtggtcagctcggggcagatatgctacaaaatgccaactaaggtccctctgggctcacagatggaacgtggctgccacttcccaatgggcctgaggtttctccacgtgcagtgcagagcccaaggtgaagctgttaaggctctccatccatctacagatgcacagtcttttttgcacagctgcaagactgtgcttatggtctttaatcttcctctttgaaaagcatccaatttaggaatttttgcagtaatcatttcagagtaatgaaaaacaaacagaacaatagaacatttcagatgtgataggcacactctctgcacctctctctaatgtatgtttaaagagatgtattagtcatcacgaggaaccctcttttgtctccccacgcaatcaaattgcacccgtatgcagaccacaaacatcgtaatacagttaatttacccaatgtactcatttctctctcataacaatgcccgtaagatagcattcaattttgttttaaaatttcctcacatacaagatggggctgggatgaacatttttccatcttgcaggcttgcaaagcaccacggcagaggctaacgtgtgccattttgcctggtccaagtctttttatgatgggtaaatgaggtgtgaacagggccttgcccaaagacccagagtgagtggtggagacgtgatttgaacctttgtcttttcccccacctaatctgtgttcttcctccagaccaccctgtcctgaagcagtagagaaagagctcaggctctagacaaggcattgaggtatagtgtgggccattcttgagacctgccgtatctctgcaaaacacagrcagatgcctcccaatcactaagagtggggaggccccactccagagaacagaggttaaagtgcaggctgtgggaactgctgcctcaattaacccccgactccaccacctgccagctggacaaccctggccaacctaccttacctttctgagcatcagttttagcatctacagagcggggatagtattagcacccacctaagaggg

SEQ ID NO: 71107 - DNA, 960 bp, Homo sapiens
gcatgatgacagtaagatgtgtggtgatctatttatttytaaaaattcctttaatgtcactgcaaaatctttacaagtttaaaaagttcctctagattcaaagtacaaagaagtaaaagcaaagcaaaagaggctatgaagctatctatgtccaatagaggcacaaagacccagggaacatcactgctgaaaagaaaaagaaattctatttctctcaatctcctttattcctaagcagtatattcacttattccagttttcaaactgaaatttctttcctcaaagtgctttctttcagcccatatagaaattacagattcaaattttctatttttctttttttttttttgagtcagggtctcgctctgttgcccaggctggaatgcagtgatgcaatcttggctcactgcaacttccacctactaggttcaagtaatcctcccacctcagcctccccagtagctgggactacaggcacgcaccatcacactcggctaatttttgtacattttgtagagacgggatctcaccatgctgcctaggctgatctcgaactactgggctcaagcaatccacccacctcagcctcccaaagtgctgggattacaggtgtgcaccagcgcacctggccctcaaatttactatttttctgttattgttcattacactgtaagtatggctcttcaaatgccacatcagatacaaataccactggctatgaacacttgccccacacatatttcaatgatcagtagtatttataattgtgacttttaaacattatctgatcctcatagatctagttatagtcactggattaaactaatagaaaagtagaagactatactttataattttatgtttcattaaggtttgaaacaaaatggggtgggaataggagctttctgttctatctagagttaaccaaaaagaactagaattaaagagtcaaatatttaa

SEQ ID NO: 71108 - DNA, 650 bp, Homo sapiens
aaagagacacttaggtttcaggctgttgttagatacatggctgtggctggtgactttgctgaggttctgttttctcttctgcagaatgggactaattacctgtctttcacatgtttgctgtgaacattggctaaaataaagtaggtagagagtggtgtctgagtctgcgaggtggtcagctcagcactaaacccagggcccttggttccgttttcttgtactgcccttctccctgattcttctcgaacctcccatctcctcttccactgaaggaaggaagaggcaccgtgatttttgaatggggttgtgtagctcgtaggggagttgggtatgtgtgaggaagggccagtgagttggtgctgcattgttcctgggtagttaggtgacagctggcagctcagtatttagtgacctaaacagggaggctccagggacaggagcagatgcagcctgtctgagggcggctctgcccttggctcttgggtcccccacagcgttctggcccggactcccggtgagggtggagtcctgtcggcctccagaaggaagcccagttctgaccatgccctctacccttttgtattcagactcccaccagcatctgggaggacttgcaccagcctgctgtgcccttttgattcgkggagtgt

SEQ ID NO: 71109 - DNA, 577 bp, Homo sapiens
acatcacacctactgctcctccaccctatatgtgttgtctacaatggtgaaccccttgagaagctgaaccatgtcttgaattgacctttgtatccattatacatggccaggtgcctggcattttggtaaatgttcacagaatggatgggyacatgaatggatggatgattaaagccaggagctattgagagatggaatcatttttacattctgtccaaaaattcctgctttggaaggtagtgatttacctgagattggaagtgtgtgagaaggcttggctagttggcaggatactgtgaagctaattcaggcatcagaaagtggactggataaaatttaggatcgcttccaagcttgaaatcctggaacgctatgaaacacaagccctgggagctgagatatgtcctaacttacccagctgagctgtgaggtgtgagtggctctaacattttccagttgtttctgaggacctcagatcaaagcttccctttgcctaaaagcatctgcctgctggtgcgggcctttgggggccctcagagagcactaaggttagagtcctgcaagggtgacaccgtta

SEQ ID NO: 71110 - DNA, 577 bp, Homo sapiens
acatcacacctactgctcctccaccctatatgtgttgtctacaatggtgaaccccttgagaagctgaaccatgtcttgaattgacctttgtatccattatacatggccaggtgcctggcattttggtaaatgttcacagaatggatgggtacatgaatggatggatgattaaagccaggagctattgagagatggaatcatttttacattctgtccaaaaattcctgctttggaaggtagtgatttacctgagattggaagtgtgtgagaaggcttggctagttggcaggatactgtgaagctaattcaggcatcagaaagtggactggataaaatttaggatcgcttccaagcttgaaatcctggaacgctatgaaacacaagccctgggagctgmgatatgtcctaacttacccagctgagctgtgaggtgtgagtggctctaacattttccagttgtttctgaggacctcagatcaaagcttccctttgcctaaaagcatctgcctgctggtgcgggcctttgggggccctcagagagcactaaggttagagtcctgcaagggtgacaccgtta

SEQ ID NO: 71111 - DNA, 687 bp, Homo sapiens
cttgagcctaggagttcgagatcagcctgggcaccccatcaattttaagaaaaaaaaatttttaaagaaaaaaattatgcagcccaaagtaaaacagttgggtatttcgcatacactaaaatgtacagttgacccttgaacaattcagggttggggtaatgacctcagtcgcactattgaaaatcggcgtgtagcttttctttttgaggcacagtctcactctgctgcccatgctggaatgcagtggcatgatggcggctcactgcagtctcaacctcccgagctcaagtaatcttyctgcctctgcctcctgagtagctgggactacagacgcgtgctgtcaaacccacctaactttttctattttttttagagaaggggtctcagtatattgccctggttggtcttgaacatctgggttcaagcagtcctccccacttcagcctcccaaaatgttgggatcacagatgtgagccatcacacctggccagcatataacttttgattcctcaaaattttaactactagacaagtgtggtggctcatgcctgtaatcccagcactgtggaaggccaaggccggtggattgcttgaggccaggagttcaaggcttcagtgagctatgatcacacctctgcatttcagcctgggcaacagagagagatcctgtctctaaaaaaaaaaaaa

SEQ ID NO: 71112 - DNA, 739 bp, Homo sapiens
  misc_feature (1)...(739): n = A,T,C or G
gttttttttatacagaaaaaccggtttttccccgtttggccaggttgttttcaaattctgaccttaaaatgatccgcctgccctggcctcccaaagtgcggggttacaggcataaccnacgtccctgcaaagaatttctttttaagygatgagatctgtgtggcatttctagcgctctctaaattatgtctctggcatattttaatcactggaaactcaaagagtggaagagtggaagtgcgaaggaatctcaggtagctcttaactaattcgccagcagtgaagaaacttcaaccaatcatgttttccttgaattttgcaaagaaagaaaatccaaagcattgcttggatgttcttttaaggcattttatatcagttgaaccttaaactgaaatatgaagacaagctttataaactagttttttgatatgaagtatatcaattatgtttgccttttgtgaagaagtaaatgagttgaatttctatttcacttactagattatactaatgagctaatggggtcattgccatcctccctactcatgactttgatgagttattgctgtaacatcacttcttgatttaatttgatatggaatcagaattgggagaaggtatttttaaataaacaactttttaatggaaagttttgtgtcttacaaaatcttttttaagataccaaataaagggttattagtagaaaatgagatgatactattcgtggatatttgtttgctaa

SEQ ID NO: 71113 - DNA, 739 bp, Homo sapiens
  misc_feature (1)...(739): n = A,T,C or G
gttttttttatacagaaaaaccggtttttccccgtttggccaggttgttttcaaattctgaccttaaaatgatccgcctgccctggcctcccaaagtgcggggttacaggcataaccnacgtccctgcaaagaatttctttttaagtgatgagatctgtgtggcatttctagcgctctctaaattatgtctctggcatattttaatcactggaaactcaaagagtggaagagtggaagtgcgaaggaatctcaggtagctcttaactaattcgccagcagtgaagaaacttcaaccaatcatgttttccttgaattttgcaaagaaagaaaatccaaagcattgcttggatgttcttttaaggcattttatatcagttgaaccttaaactgaaatatgaagacaagctttataaactagttttttgatatgaagtatatcaattatgtttgccttttgtgaagaagtaaatgagttgaatttstatttcacttactagattatactaatgagctaatggggtcattgccatcctccctactcatgactttgatgagttattgctgtaacatcacttcttgatttaatttgatatggaatcagaattgggagaaggtatttttaaataaacaactttttaatggaaagttttgtgtcttacaaaatcttttttaagataccaaataaagggttattagtagaaaatgagatgatactattcgtggatatttgtttgctaa

SEQ ID NO: 71114 - DNA, 1097 bp, Homo sapiens
taagcaaagcactacctttcccagctgataaaaatacttacaactcatcatggttgctactatcgcatagtcttttattgaatctcttcccatttgttggaaattcagaaagcatccaacttcctgcttaggcagatcctgctaactggcatgaaccataggagcacaggaaaactcccttctgagaagaaaatttccaacacagaaaaatacctgtccactttcctaaccatttctctgtggacctgggtgggtgaaacacatckattctgcagggaagaactttgagaatagaagtcatatgttaggatggtggagaaaaaagttagaaggggtggctgcctgatggctttgtgaagtctggatcagttacctccaattaatttacatgacaaagaaacaaacttctatgttatcaaagaattcttaggtttccagttctgtgtgattaaatctaattctcactggtactatgggcttgtcttcttcctcccctcttcctcccatctttattgggaaggaaatagaatatgtgcagtaaccttacagctcacacagctaataggcagcaaaaaatctttaatccacatatttctgactctgagcttgagttctttccatggcaccaagacttgttctgaattccattttgataagcatagcatggtatgcctggtaggaatgtcagcataaagtaccaaaagcagggaaggcttctggggtcagtgagtagcttccctggagctatactttattacaaaaacagagggggctgtcttgaaccaaattctttcaaatataagtaagaaaatctcagctcaaactaaactaagcaaaatggaaattaattggttcaaagtgttcagagaaaggtggggatttgctagctttgtgcacagatggatctagggatttcccaatatttttatttttctattttattcttctatctctacccatttgctcttcttcactcaatggttgatttcattctctcccacagcagtcagtctttctccataaggcagagggaaatgatctttaattgacccagattcacattctcccagcttaacatgccaagccagagaacatgc

SEQ ID NO: 71115 - DNA, 1097 bp, Homo sapiens
taagcaaagcactacctttcccagctgataaaaatacttacaactcatcatggttgctactatcgcatagtcttttattgaatctcttcccatttgttggaaattcagaaagcatccaacttcctgcttaggcagatcctgctaactggcatgaaccataggagcacaggaaaactcccttctgagaagaaaatttccaacacagaaaaatacctgtccactttcctaaccatttctctgtggacctgggtgggtgaaacacatcgwttctgcagggaagaactttgagaatagaagtcatatgttaggatggtggagaaaaaagttagaaggggtggctgcctgatggctttgtgaagtctggatcagttacctccaattaatttacatgacaaagaaacaaacttctatgttatcaaagaattcttaggtttccagttctgtgtgattaaatctaattctcactggtactatgggcttgtcttcttcctcccctcttcctcccatctttattgggaaggaaatagaatatgtgcagtaaccttacagctcacacagctaataggcagcaaaaaatctttaatccacatatttctgactctgagcttgagttctttccatggcaccaagacttgttctgaattccattttgataagcatagcatggtatgcctggtaggaatgtcagcataaagtaccaaaagcagggaaggcttctggggtcagtgagtagcttccctggagctatactttattacaaaaacagagggggctgtcttgaaccaaattctttcaaatataagtaagaaaatctcagctcaaactaaactaagcaaaatggaaattaattggttcaaagtgttcagagaaaggtggggatttgctagctttgtgcacagatggatctagggatttcccaatatttttatttttctattttattcttctatctctacccatttgctcttcttcactcaatggttgatttcattctctcccacagcagtcagtctttctccataaggcagagggaaatgatctttaattgacccagattcacattctcccagcttaacatgccaagccagagaacatgc

SEQ ID NO: 71116 - DNA, 903 bp, Homo sapiens
gaagttggcctggctcctttgcccattatatcacagcaccaagcacagagttggtgcccaaaaaatgctgaattaatgattgaaaaaatgtgcagcyaacatacattccaagttcattatgtgatgtccttctcccatcagaacatgcttagtgctgacatgccctccaattgatgtcaaacaaaaacacaattccccaagctcaccattgttctcccatgatatgcccgaaattgtggctgacccctggtaacgtccacaacttcataacagtgcttcagcatccaatctcccaagcccaagtctcctccatccctgaaattgggtaccaatttatttggaggcatccatctgagtaggtataagcactggcttgggaattagatgtacatagcttcaaaccacagccctgccactagctgtgtggccttgggtaggtgacttcacctctgtgaacctcaatgtactcatcaaggttgttgtaagaattaaattatatatatttgacctaactatcccattactgggtatatacccaaatgaatgtaaatcattctattacaaagatacatgcacacatatattcattgcagcactattcataatagcaaagacatggaatcaacccaaatgcccatcaattatagactagataaagaaaatgtggtacatatacactatggaatactatgcagccatagaaaggaaggagatcatgtcctttccagggacatggatgaagctggaagccattatcctcagcaaactaacacaggaacaaaaaaccaaacaccacatgttctcatttataagtgggagctgaacaatgagaacacatggtcacggggaggggaataacacacactggggcctgttggggggtgaagtgaggggagggagagc

SEQ ID NO: 71117 - DNA, 587 bp, Homo sapiens
cccaagacgccttcattttaccacttgccttgagaatctggaaaagatgcagctatgtcttgccctgctcgggtgctggcattactggcacccccgtcagtcacctggaacttagcagtgaagcctaatccaccacaaacraaaaacagtgatgttcaattatttccaaaatcagtgcattgggggcatctgcaaaagtctccaaaacaatgtgaaatgcatgacctgcctgccaccaacagtactgctgagggaaatgccccagagagcaaacacattttttattggttgttccagtttgaagaatgcccatatagaaccctaacttgtgccttctactgcgatttcccactgcaggaggagggaatgagcggagggcataaggggaaggaatgaaaggtggaaatgagaattaagcagaatgccaggtctgcctgggtggctcatttttccagctccctaaaaagatttatgcagctgtccaaaaggagctatggctccattacccagcatacaaagccccttctgctatcaagtagcagatcaatcctagatgatagttcactgctagcttctgaaaaacctac

SEQ ID NO: 71118 - DNA, 587 bp, Homo sapiens
cccaagacgccttcattttaccacttgccttgagaatctggaaaagatgcagctatgtcttgccctgctcgggtgctggcattactggcacccccgtcagtcacctggaacttagcagtgaagcctaatccaccacaaacaaaaaacagtgatgttcaattatttccaaaatcagtgcattgggggcatctgcaaaagtctccaaaacaatgtgaaatgcatgacctgcctgccaccaacagtactgctgagggaaatgccccagagagcaaacacattttttattggttgttccagtttgaagaatgcccrtatagaaccctaacttgtgccttctactgcgatttcccactgcaggaggagggaatgagcggagggcataaggggaaggaatgaaaggtggaaatgagaattaagcagaatgccaggtctgcctgggtggctcatttttccagctccctaaaaagatttatgcagctgtccaaaaggagctatggctccattacccagcatacaaagccccttctgctatcaagtagcagatcaatcctagatgatagttcactgctagcttctgaaaaacctac

SEQ ID NO: 71119 - DNA, 525 bp, Homo sapiens
ccttgcctgataaacacactgggtagctctccggatgggttacttctgggcgcagaaggagtcaggaaagggagagagagccaggtagccctgagacacagcagaaacatgagtggctagaaagtgtcaccaattcctccactctgtttgctactgagagtatgatctagtgcaaaacacttcttttgattttctcatataaaaagtaaatataaaaattcagacagttcacctgccaagagggtgtgtccacctctacctatagactatttacaaagcccatgtctttagctttccaagtaaaaaattataattctgaatgtacctttcaaaacacacacaaaaacacatgcacacgtatgcacgcacacacasgtgagctctaagttttcttcaaagcctaacacgcgaagactttatgcatatgaggctgaaaaggtctccaccttaacagacttgtcacattcccagggacccatcaattccacactctcgtctttgcagcgctctctcccgtgtgaaaaa

SEQ ID NO: 71120 - DNA, 710 bp, Homo sapiens
tccccagcagtaagacctggggctgtctcacttggtggcagcatgtgcctcccctcccacccttcattctcccaggcktatagacagcagagtgccagtgtggcatttccacagacgaaccaactgctgtaagcctctgaaacaggaatgttacatatatggctctcatgccacctggccctattcacctgtccatggcagacgtggccaatcaatcacagactttctcatcgaactcagatgcattctcagaatcatcccccacatgaccaccatcttccccaggcaaccaccactgtacactagagtaggcaggtagctctagacttggcaggtttgccatccttgctggaaatccttactggcggtgtgaccctgggcacatcatataaccccaatttatttcctcttaaacaaaatgcagatgcctaatgcctactttgcagggttgttgtgaaaacgaagagaagtaaaaacaaacaaagtggctgtcatggagtccagctggagtaagggctcagtaattttttttttttttaagaaatggggtctcactgtgttgcccaggctggtcttgaactcctggtctcaagcagtccttgtgcctcagcctcccaaattgctgggattacaggcatgagccacctcgctggccctcagtaattgttccttttcttgctttttgcataaaagttacccttcaaagactg

SEQ ID NO: 71121 - DNA, 890 bp, Homo sapiens
tgcatatacatgcagcaagatatacgtccatatagacacatatgtacttacagcctgatgcacatacacccacaaaagataaatatgcacayatatgtgtgcactagtaaaatgtcacctggcacactgtcacactgtcacacactgtacagtcatgaactagaccacatgtgcagcaccttcaagaaacagagaacctaggaagcccccagccttggttctagctcaaagtccacactacacgggcccagcttcgtagccgtgctgatggcccagagcagagggaggaagcacgtgaaaggagacagtgctctgctgctggggagatccagctgtcagagacttaggcttggaagccctgagaccccagggaagtcaactctagcagccagtggctgtgttgcccagagggctggacaggaattttttcttaaggcttttggtccccaaaccagctttcctaccagctatgaaaaggaatttctgagcagcttctggttgactgaaggcagaaccagccaggaatgtggcaagctttatcccgatgggctttactgaagaagaaaatgaaaaccaggactctggacagagttcaccaggggtgagtgggtggggatgggtaggaggtgagaggcagaaggagaagcaggacctagtcaggaggtacttgtaggatgtgggaagacatgggagagaccaacctatggtcttctccaaacagaagcctcttcccagattaagcatcaagatttgcattttagataacaattctgtattgcaaatttctgcctattccgaaatcctgtacctttcacatcattttgtagattcgtcattaactcccagaacttgtcaggatgtcatggccattcagaccggccctttcatga

SEQ ID NO: 71122 - DNA, 849 bp, Homo sapiens
tttttattatttatttatttatttatttatttattttttgagatagggctttgctctgtcacccaggctagagtacactggcacaatctgggctcagtgcagcctctgcctcccaagctcaagcaatcctcccacctcagcctcccaagtagctggaactacaggctagggccacaaagcccggctaatttttgtaatttttgtagagacggggttttgccacgttgtccyggctgttctcaaactcctgagctcaaatgatctgcccacctgacccttccaaggtgctaggattccaaagtgtgtgagccacaaatataaatttatattcactgctttcaaagctatccagcttaatagtttattcttatttctcaccatccttgcagaataaaaataaaagtctatacatctattttaggggtgcttcctgacaagccttctataataactccttgcccaaggtgttgtcctataaacttccacaaacccattctccccactgcaaatatttcctctcgatacatctacctatgtatcctgcttagtgctgtatatgtttagaagccagagttaaaaaaagaaaactactatttttcccatcctcaactccaaattctggtttaactgctgtcaccttttttaaccaacatatttattaaatctgaaaaaggtatacagcaaaatgaatgtgtcatttaactgagtgtcaaaagtaacaaaaactatctgtaacacaattacttgtggaatgacctgctgatggctggttaaggtttaccaggattaaacaggattcttaactaggaattttattttattttctgatctgaagattaaataaaccag

SEQ ID NO: 71123 - DNA, 870 bp, Homo sapiens
taagatttttaactcttttcctattgatggacattcaggctgttcaggctgttccctttttcttcttcttctttatctatttatttattttttgagacagagtctcgctctgtcgcccaggctatctcagctcacttcaacctctgcctgccaggttgaagcaattctcctgcctcagcctcccaagtagctgggactacaggcatgtgccaccatgcccagctaatttttttgatttttagtagagatggggtttcatcatgctggtcaggcaggtcttgaactcctggcctcatgatcctcccacctcggcttcccaaagtgctgagattacaggcgtgagctactgtgcccagcctcgcctttttttttttttttttgagactgggtcttgctctgtcacccaggctggagtgcagtggcgtgatcttggctcagtacaacctccgcctccaggattcaagtgattmtcctgtctcagcctcccaagtagctgggattacaggcacctgctacaacgcctgactaattttttgtatttttagtagagacagggtttcgccacgttggctaggctggtctcgaactcctgacctcaagtgatccacccactttggcctcccaaagtgctgggattacaggcataagccaccttgcctggagtcttcgtttttttaaattgctacaaatgttgcaataaagattattgtacacataaataggtattgctacatttattttggtaggacaaaacggcacagatatctgaatcaaaggatgtgatgtgcactattaattttaacagtttgtttagctgggatgtggaggcacaagcctgtagtcctagctactcaggaggctgagatagga

SEQ ID NO: 71124 - DNA, 835 bp, Homo sapiens
ggagcacatggaaagcatgctttgttctttgtgttttctgcccccagcacctgcctcctcaccctgcagcayatcttgtgctgctacatacttgctgaggctcaggctgggcatgggctttggggttgggcaagcatcaagatcagtttagggccagatttgggaaagaaaaatcacctaaggtgaaagtcacttactttgggaaattttacttcttgaatgatctgttaattggttaatagacacaacttctggcccctcttagctagcactgcctaggaccttgtgacacatttgcttgcaaatatgctttctagtggtagtacattttaatttatagttttactcctcatagggcattataaaagtaggctttaccctcagttgtctagatgttgaaaatgaagttcagaaaaattacacttttcacacctgtaatcccagcactttgggaggcaggtggatcacttgaagtcaggagttccagaccagcctggccaacatggtgaaaccctgtctctactaaaaatacaaaaattagctgggcatggtggtgggagcctgtaaattccagctactcaggaggctgaggcaggagaatcacttgaacccagcaggcggaggttgcaatgagccaagattgtgacactgcactccagcctgggcaacaaagcaaggctctatctcaaaaaaaacaaaaaaaaaaaaccagtttgttgcatttcatattcactgattggctgcctgggagcactttttaaaaatgcctgtatttctcttccagggctctcttccatgttaatctacgtgaaacattatttagacgctgctgttg

SEQ ID NO: 71125 - DNA, 835 bp, Homo sapiens
ggagcacatggaaagcatgctttgttctttgtgttttctgcccccagcacctgcctcctcaccctgcagcacatcttgtgctgctacatacttgctgaggctcaggctgggcatgggctttggggttgggcaagcatcaagatcagtttagggccagatttgggaaagaaaaatcacctaaggtgaaagtcacttactttgggaaattttacttcttgaatgatctgttaattggttaatagacacaacttctggcccctcttagctagcactgcctaggaccttgtgacacatttgcttgcaaatatgctttctagtggtagtacattttaatttatagttttactcctcatagggcattataaaagtaggctttaccctcarttgtctagatgttgaaaatgaagttcagaaaaattacacttttcacacctgtaatcccagcactttgggaggcaggtggatcacttgaagtcaggagttccagaccagcctggccaacatggtgaaaccctgtctctactaaaaatacaaaaattagctgggcatggtggtgggagcctgtaaattccagctactcaggaggctgaggcaggagaatcacttgaacccagcaggcggaggttgcaatgagccaagattgtgacactgcactccagcctgggcaacaaagcaaggctctatctcaaaaaaaacaaaaaaaaaaaaccagtttgttgcatttcatattcactgattggctgcctgggagcactttttaaaaatgcctgtatttctcttccagggctctcttccatgttaatctacgtgaaacattatttagacgctgctgttg

SEQ ID NO: 71126 - DNA, 835 bp, Homo sapiens
ggagcacatggaaagcatgctttgttctttgtgttttctgcccccagcacctgcctcctcaccctgcagcacatcttgtgctgctacatacttgctgaggctcaggctgggcatgggctttggggttgggcaagcatcaagatcagtttagggccagatttgggaaagaaaaatcacctaaggtgaaagtcacttactttgggaaattttacttcttgaatgatctgttaattggttaatagacacaacttctggcccctcttagctagcactgcctaggaccttgtgacacatttgcttgcaaatatgctttctagtggtagtacattttaatttatagttttactcctcatagggcattataaaagtaggctttaccctcagttgtctagatgttgaaaatgaagttcagaaaaattacacttttcacacctgtaatcccagcactttgggaggcaggtggatcacttgaagtcaggagttccagaccagcctggccaacatggtgaaaccctgtctctactaaaaatacaaaaattagctgggcatggtggtgggagcctgtaaattccagctactcaggaggctgaggcaggagaatcacttgaacccagcaggcggaggttgcaatgagccaagattgtgacactgcactccagcctgggcaacaaagcaaggctctatctcaaaaaaaamaaaaaaaaaaaaccagtttgttgcatttcatattcactgattggctgcctgggagcactttttaaaaatgcctgtatttctcttccagggctctcttccatgttaatctacgtgaaacattatttagacgctgctgttg

SEQ ID NO: 71127 - DNA, 1536 bp, Homo sapiens
ccccctcgtgtccagccctggggatgagtcccagtcagacacaattactgaggtctttaatcatgtgctgcaaagagcctggcccactcccctactctccgggccgctacgcaaccccaaacccaatctccatccctgtctgctgtaggtgtgcttttctggtttatttgagtggacagtggccatctgactctcagcttctgggcccagagggaggagacccagcccagcatggctgtccacagggcagcagataaagccctggcttacagtcacgtttttccttcacttgacttggctgattgagagcagggcaggtaatgaagctgctgcccctctggatcagccaacagctcctgggttgggctgaaatgtctaaacccacccctgtcctcaggccttggggccaccaaaatgccctctcctgcctgtggacttctgccaactgccagctcggacagtggtttgtcatctttaaaatgagattaacaataatcatggctgccactgacatagcactgttcaagggctttcaatgcagtaaaagccctgccgcaacatcaaagatggagtacaaagtatttgattccacgcagaataaagtcacatgtgaggttaaccaggaattctggggaaccaattctaactgggttcagactcataccatcaggttttacttttggcccttgtaacaactgtctgaaatagttaccattacccatttcacagaccaaagtagaccgacgcccagggagctgcatacacttccccaaagacacacagcccttgaggtgtggggatgggatttgaatccaggagatagagctccggagtttccactttaaccaccaccccaggctgcctcccagagctggggtgaagatccagtgagctcatgctaaaaagtgcttagtgtggatcctgggagtagcaggatcagagatctcctccctcccttaccagggcacctatgtcaccaacccctcactgcttctggcatcagcaaaatctccttggttttcactgtggtcctcagtgactctgaaataatctgatgattctttcttttccccttactcttcgggtgggatgcaactgccttttgtgctttctggtcctgaatggcagggcactgtgcttcctggcctcgcgggccctcagctggtgacctcctccyggcagacgtagagaaaggaaaatctatccgtttaaagcacatccatggctttgaactttctaggtgaaaaacaaaggaaaacccaccaggcatatagataaacaaagacagctgcccccacagaccttgttcttccttctcaataatttattgagcacctactatgtgcctgtactgggctgaagggaaggaggaaatgcaaacagctttgaaacactctcaagagctggctgcatggggagctggctagtcaggctccactcctgaactcatgttgactctccccaaatttgctgatccctactctaaaaaaggcactgttctgggcactgaggtcaaagtaacgaacaagatggaca

SEQ ID NO: 71128 - DNA, 648 bp, Homo sapiens
cctttgtgtgtctgggtcctaatcgcctcttcttgtgaggacaccagtcatgttggattagggcttaccctcaatgacctcattttacctgaattacctgcataaaggtcctgtctccaagtacagtcacattcttaggtagtgggggctgggatttccatatatgaatttggtggtacacaattcggcccctaatagcaccccacccatgtcccagacccttaccacgtgggtgcatgtgagtccagcctctagctaccagcacccacatttctctgccccaggcatttctcccaagactgttttgccacttatacaccgagccggaagtattcaagaatgaatgtcccctggagcagtccccatggtgatgggagatgatctatcagctctccagcccccagccccttgaagtgtgtatcccacactgckgcccaggggacaacacccgggtggcccacagtgattgtccagctttatcacacagcctttctcagctgcccttcctcctgcctccctttccccgtctccgactggtgtgagcttcatctccaaaataaatgacttgctttccagtccctgtgtcaggctctgcttctggggatgcagcaggcaggcgcgggtgagaattgtccctccatgcccgca

SEQ ID NO: 71129 - DNA, 648 bp, Homo sapiens
cctttgtgtgtctgggtcctaatcgcctcttcttgtgaggacaccagtcatgttggattagggcttaccctcaatgacctcattttacctgaattacctgcataaaggtcctgtctccaagtacagtcacattcttaggtagtgggggctgggatttccatatatgaatttggtggtacacaattcggcccctaatagcaccccacccatgtcccagacccttaccacgtgggtgcatgtgagtccagcctctagctaccagcacccacatttctctgccccaggcatttctcccaagactgttttgccacttatacaccgagccggaagtattcaagaatgaatgtcccctggagcagtccccatggtgatgggagatgatctatcagctctccagcccccagccccttgaagtgtgtatcccacactgctgcccaggggacaacacccgggtggcccacagtgattgtccagctttatcacacagcctttctcagctgcccttcctcctgcctccctttccccgtctccgactggtgtgagcttcatctccaaaataaatsacttgctttccagtccctgtgtcaggctctgcttctggggatgcagcaggcaggcgcgggtgagaattgtccctccatgcccgca

SEQ ID NO: 71130 - DNA, 748 bp, Homo sapiens
tcctgctttggcctcccaaagtgctgggattataagtgtgagcaagcatgcccggcctccatctccattcttacattcacagtggtccaagtgcttctaggatgttttttccttcactccttgatcttgaagggcttccaagcatctcagtaggccaatacaggggaggagatgaatcctcagttcatcaccctctgagctgtccttcccctctaaaacagggagcctcgtaccatgccaggctgtgtggggattaaacgaggtaattccctcagaggggcccgggttccctcctgcctcctctctgggctcaacttcctttctcaggacgaaggcaagaaaggaggcaaagctggggccccagcagggaggaaaatgtggggaaatgttctacatagtgattgtgttgttgtttacatgactgtatgtgtttgtgaaaactcatcaaactatacacttaaaaccagtgaattttgttgtctgtaaattatacttcaaaagctaaaattataaaagaaaatatgcaaatagaaaacaattagtcacaggcaagcatagaagataaaaaagtaaaactctctctgaccttcattyctactccccagaagcaacaaggcattcattcattcattcattcattcatcagttggtcactcgactatttattgactgtttactatgtgtcatacaccatggtagctgcttttaacaattgtgtgtatgtgtgttaactctctgtcaatgtttt

SEQ ID NO: 71131 - DNA, 687 bp, Homo sapiens
atcccttgagcccaggaggccaaggctgcagtgacctgcttttgtgccactggactctagcctgggtgatagggcaagacctcatctcaaaaacaaccaaatgaacaacaacaacaaaaaatgaaactggcacatgtactcctgaacttwaaataaattaaaataataaaaataaaaataaataaaattttaatgtatatgccaataacagcgcagaggaggtaggtggaagaaaaatcatactgggctaagaaaatgtttccagacaataacttgtatccgcaacaagaaaaaaactcaaaaataagaagcttaacaaaagaaacctgttaatgtataattgctctgctttcttctttcagcttatttaaaacgagtaaaaccatataaacaaaaaactaaaatgagcagagaatattgacaattcagataccttttttatataaaaaaccaagtgtcaaatttcaatgatttgctatattcccagaaataccaacaaaagtaagtctattctacaatgtttgaatgaaaaagtttaacagaattgctatttttgaaatagggtctgcttttcagtagttaaatatcatagttaaatattataagataacattttattttgcaccctttccgttgtgttaatccataaattgaagtaagcatagggaaagatatgctattggagaa

SEQ ID NO: 71132 - DNA, 687 bp, Homo sapiens
atcccttgagcccaggaggccaaggctgcagtgacctgcttttgtgccactggactctagcctgggtgatagggcaagacctcatctcaaaaacaaccaaatgaacaacaacaacaaaaaatgaaactggcacatgtactcctgaactttaaataaattaaaataataaaaataaaaataaataaaattttaatgtatatgccaataacagcrcagaggaggtaggtggaagaaaaatcatactgggctaagaaaatgtttccagacaataacttgtatccgcaacaagaaaaaaactcaaaaataagaagcttaacaaaagaaacctgttaatgtataattgctctgctttcttctttcagcttatttaaaacgagtaaaaccatataaacaaaaaactaaaatgagcagagaatattgacaattcagataccttttttatataaaaaaccaagtgtcaaatttcaatgatttgctatattcccagaaataccaacaaaagtaagtctattctacaatgtttgaatgaaaaagtttaacagaattgctatttttgaaatagggtctgcttttcagtagttaaatatcatagttaaatattataagataacattttattttgcaccctttccgttgtgttaatccataaattgaagtaagcatagggaaagatatgctattggagaa

SEQ ID NO: 71133 - DNA, 1918 bp, Homo sapiens
tttatatccttctatagactctatatcaatatttataaattctgcttttgtcgattagaaaatttacctagctctctttacagagttcttctaagcctttgctatttccttaatattgcatttttctatacctagcttttttcactttccagttaaacacatctttaatttcttgatactgtagatctattccattacacacacttagctacagtaaatggccacttagcctgtcttctcaaagttttagagtgcttaatttaatttatatagtttatacagttcaatataacttatgaagtaggagtattttaaaaaataattctcctttcatttcatgttattaggaattttggggataacatggaaaaatatttcatgtccattttttctctggtctggcatatctccttcaccccatgcctattacccccagctatgaacagcaaagaataagccagtgtggatcattgccttagggaaagagacagccccaggacacactgctggactaagacaggttccacatacgaacactctgggaggtttgttatctgttttgaaaatcagcaattatattaattcacataaactttgtatgttcatatgtatttatattaaatgtgggaatacttgcttattataaaacttgattaatttatatatttttctcataactcactttatttttaacgtgttgtaatagttgtttgcaaaacaattgtttggttaagaattcagcctaaagcatggacaaactttaaaccttaatttgtgtgttgtatatggttctttctgatatgctgcaaattagccagctagtataaatgtarcatttgtcaattaatctagacctagcttacttattgaaaacatttttatttatttattgagacagagtctcactctgtcacccagtctggagtgcagtggcgtgatctcagctcactgcaacttccacctcccaggttcaagcgattcttgtacctcagcctcccaagtagctggaattacaggcatgcatcacacctggccaatttttgtatttttagtagagacaggtttcactatgttggccaggctggtctgcaacttctgacctcaagtgatccacccacctcagcctccaaaagtgctgggattttaggtgtgagccactctgcccaactaagaaaatattttaaaagaagattataaaataatgatttactgtaaagtattgctatataatctcttttacataacttactggaaaatccagtatatctacatgactcctattttctcagaaacaagtgcagtagtgcataatgaaaggtcagaaagttcttaatctggttcaaaatttccctcagcagtgaatcacttttattcctggcattggtatttctgccaatacaaccaaacaaatgaatattttatactatatgttataaaatcgtgttcatgtattcatcttcatggattagcataattgaaagggtgcagaataaaatatcacgtagtgaacataatacatattttttactaataatatgtgtatgtatcttataattattgtttttaatagagcaatgtattatattatttaccttgattatgagaaatatgaaagatcacttcttaaatagaaatcaggaaatgtgtttttttcatagataacaaatattgtaccatatagtcactactctagatgacagctttcagtacatttaaaccatgtatttatcgctcagtgcaatggctcagccctgtaatctcagcaccctgtgaaaccgaggtgggaggatcatttgagcccaggaattcaagaccaggctgaacaacaaaaggagactgtctctcaaaaaataaaacaattagctgggcctggtggtgcacacctatagtcccacctacttgggaggctgaggtgaga

SEQ ID NO: 71134 - DNA, 1918 bp, Homo sapiens
tttatatccttctatagactctatatcaatatttataaattctgcttttgtcgattagaaaatttacctagctctctttacagagttcttctaagcctttgctatttccttaatattgcatttttctatacctagcttttttcactttccagttaaacacatctttaatttcttgatactgtagatctattccattacacacacttagctacagtaaatggccacttagcctgtcttctcaaagttttagagtgcttaatttaatttatatagtttatacagttcaatataacttatgaagtaggagtattttaaaaaataattctcctttcatttcatgttattaggaattttggggataacatggaaaaatatttcatgtccattttttctctggtctggcatatctccttcaccccatgcctattacccccagctatgaacagcaaagaataagccagtgtggatcattgccttagggaaagagacagccccaggacacactgctggactaagacaggttccacatacgaacactctgggaggtttgttatctgttttgaaaatcagcaattatattaattcacataaactttgtatgttcatatgtatttatattaaatgtgggaatacttgcttattataaaacttgattaatttatatatttttctcataactcactttatttttaacgtgttgtaatagttgtttgcaaaacaattgtttggttaagaattcagcctaaagcatggacaaactttaaaccttaatttgtgtgttgtatatggttctttctgatatgctgcaaattagccagctagtataaatgtagcatttgtcaattaatctagacctagcttacttattgaaaacatttttatttatttattgagacagagtctcactctgtcacccagtctggagtgcagtggcgtgatctcagctcactgcaacttccacctcccaggttcaagcgattcttgtacctcagcctcccaagtagctggaattacaggcatgcatcacacctggccaatttttgtatttttagtagagacaggtttcactatgttggccaggctggtctgcaacttctgacctcaagtgatccacccacctcagcctccaaaagtgctgggattttaggtgtgagccactctgcccaactaagaaaatattttaaaagaagattataaaataatgatttactgtaaagtattgctatataatctcttttacataacttactggaaaatccagtatatctacatgactcctattttctcagaaacaagtgcagtagtgcataatgaaaggtcagaaagttcttaatctggttcaaaatttccctcagcagtgaatcacttttattcctggcattggtatttctgccaatacaaccaaacaaatgaatattttatactatatgttataaaatcgtgttcatgtattcatcttcatggattagcataattgaaagggtgcagaataaaatatcacgtagtgaacataatacatattttttactaataatatgtgtatgtatcttataattattgtttttaatagagcaatgtattatattatttacyttgattatgagaaatatgaaagatcacttcttaaatagaaatcaggaaatgtgtttttttcatagataacaaatattgtaccatatagtcactactctagatgacagctttcagtacatttaaaccatgtatttatcgctcagtgcaatggctcagccctgtaatctcagcaccctgtgaaaccgaggtgggaggatcatttgagcccaggaattcaagaccaggctgaacaacaaaaggagactgtctctcaaaaaataaaacaattagctgggcctggtggtgcacacctatagtcccacctacttgggaggctgaggtgaga

SEQ ID NO: 71135 - DNA, 1918 bp, Homo sapiens
tttatatccttctatagactctatatcaatatttataaattctgcttttgtcgattagaaaatttacctagctctctttacagagttcttctaagcctttgctatttccttaatattgcatttttctatacctagcttttttcactttccagttaaacacatctttaatttcttgatactgtagatctattccattacacacacttagctacagtaaatggccacttagcctgtcttctcaaagttttagagtgcttaatttaatttatatagtttatacagttcaatataacttatgaagtaggagtattttaaaaaataattctcctttcatttcatgttattaggaattttggggataacatggaaaaatatttcatgtccattttttctctggtctggcatatctccttcaccccatgcctattacccccagctatgaacagcaaagaataagccagtgtggatcattgccttagggaaagagacagccccaggacacactgctggactaagacaggttccacatacgaacactctgggaggtttgttatctgttttgaaaatcagcaattatattaattcacataaactttgtatgttcatatgtatttatattaaatgtgggaatacttgcttattataaaacttgattaatttatatatttttctcataactcactttatttttaacgtgttgtaatagttgtttgcaaaacaattgtttggttaagaattcagcctaaagcatggacaaactttaaaccttaatttgtgtgttgtatatggttctttctgatatgctgcaaattagccagctagtataaatgtagcatttgtcaattaatctagacctagcttacttattgaaaacatttttatttatttattgagacagagtctcactctgtcacccagtctggagtgcagtggcgtgatctcagctcactgcaacttccacctcccaggttcaagcgattcttgtacctcagcctcccaagtagctggaattacaggcatgcatcacacctggccaatttttgtatttttagtagagacaggtttcactatgttggccaggctggtctgcaacttctgacctcaagtgatccacccacctcagcctccaaaagtgctgggattttaggtgtgagccactctgcccaactaagaaaatattttaaaagaagattataaaataatgatttactgtaaagtattgctatataatctcttttacataacttactggaaaatccagtatatctacatgactcctattttctcagaaacaagtgcagtagtgcataatgaaaggtcagaaagttcttaatctggttcaaaatttccctcagcagtgaatcacttttattcctggcattggtatttctgccaatacaaccaaacaaatgaatattttatactatatgttataaaatcgtgttcatgtattcatcttcatggattagcataattgaaagggtgcagaataaaatatcacgtagtgaacataatacatattttttactaataatatgtgtatgtatcttataattattgtttttaatagagcaatgtattatattatttaccttgattatgagaaatatgaaagatcacttcttaaatagaaatcaggaaatgtgtttttttcatagataacaaatattgtaccatatagtcactactctagatgacagctttcagtacatttaaaccatgtatttatcgctcagtgcaatggctcagccctgtaatctcagcaccctgtgaaaccraggtgggaggatcatttgagcccaggaattcaagaccaggctgaacaacaaaaggagactgtctctcaaaaaataaaacaattagctgggcctggtggtgcacacctatagtcccacctacttgggaggctgaggtgaga

SEQ ID NO: 71136 - DNA, 615 bp, Homo sapiens
ggatcccatcatttatttactgttcttgagaaagtctcttagatcaactttcctttctgcttcccagaggcaaaaccgtgtactctaaaaaactcatagaatttggttacacacagatacgggttcatgtccctgaatttccaggtactagttytgcaaatttggaggagttgttcaagctctcttgattttattgtccttttttataaatgaagaaaaacacatgacatcttatttagtttttatgatgggtgttataaagtttaaataaaattattataagtttagaataaattatttgacagtttctactacagtagctgtcagagttggtgctgtgtaaataactgttaggttgttattgcagttaccagcctaaacccagcaaaccaatttaaagtggcataacccaatttagactagttaaaaaataaaaattaaaaacggcttttaaaaaaagtattgatatggaatgacttcaggctcagctgggtctcaacacccaaactatttcatcaaggttttttttctctctttattcttttcacctgtgggataatctcagggattaacctcattccctcccactacagttaagtttcttttttcgttttt

SEQ ID NO: 71137 - DNA, 615 bp, Homo sapiens
ggatcccatcatttatttactgttcttgagaaagtctcttagatcaactttcctttctgcttcccagaggcaaaaccgtgtactctaaaaaactcatagaatttggttacacacagatacgggttcatgtccctgaatttccaggtactagttctgcaaatttggaggagttgttcaagctctcttgattttattgtccttttttataaatgaagaaaaacacatgacatcttatttagtttttatgatgggtgttataaagtttaaataaaattattataagtttagaataaattatttgacagtttctactacagtagctgtcagagttggtgctgtgtaaataactgttaggttgttattgcagttaccagcctaaacccagcaaaycaatttaaagtggcataacccaatttagactagttaaaaaataaaaattaaaaacggcttttaaaaaaagtattgatatggaatgacttcaggctcagctgggtctcaacacccaaactatttcatcaaggttttttttctctctttattcttttcacctgtgggataatctcagggattaacctcattccctcccactacagttaagtttcttttttcgttttt

SEQ ID NO: 71138 - DNA, 672 bp, Homo sapiens
tatacttcagaacaaggttatacaagataaatgcaaacaattttatctgtcatttaaaaataaacaaatagaaagctaactgactagctgttagagaaaagtaataaaatygccaccctcaaagagaaaaaaagtaatttcagtaactctcacaattaaatatttatcagaaataaagataacatgtttctgagattataagaaaacctaaaagtacataatttatttgtgtattagggttctctagagggacagaataggacagatctctctctctacacacacgcacacacacacacacacacacacacacacgcacacacacacatatatatatatatatatctctttgtcctgtgctggatgttttctgccttcaaatatcggactccaagttcttcagttttgagacttgaacttttaaggtcgtgaaacaattctatataatattgtgattgtggacatagcacactaaacatttgtgaaaatccacagaccttttcagcacaaataatgatccttaaagaaattattttaggaagctggaggatcccaaaatgtaaccttactgtattacaaaataatgatctttaaataaattattttaggaagctgcaggatcccagaatgtaacctgactaaattacaaatgtatgaaacaaccttactcaa

SEQ ID NO: 71139 - DNA, 672 bp, Homo sapiens
tatacttcagaacaaggttatacaagataaatgcaaacaattttatctgtcatttaaaaataaacaaatagaaagctaactgactagctgttagagaaaagtaataaaattgccaccctcaaagagaaaaaaagtaatttcagtaactctcacaattaaatatttatcagaaataaagataacatgtttctgagattataagaaaacctaaaagtacataatttatttgtgtattagggttctctagagggacagaataggacagatctctctctctacacacacgcacacacacacacacacacacacacacacgcacacacacacatatatatatatatatatmtctttgtcctgtgctggatgttttctgccttcaaatatcggactccaagttcttcagttttgagacttgaacttttaaggtcgtgaaacaattctatataatattgtgattgtggacatagcacactaaacatttgtgaaaatccacagaccttttcagcacaaataatgatccttaaagaaattattttaggaagctggaggatcccaaaatgtaaccttactgtattacaaaataatgatctttaaataaattattttaggaagctgcaggatcccagaatgtaacctgactaaattacaaatgtatgaaacaaccttactcaa

SEQ ID NO: 71140 - DNA, 749 bp, Homo sapiens
acaaactggtaagaagagaaggcttcatgtggacgttgtcctgcacaggagcataggccttggatggtgaaaggaaggtcattttcgcagcacttagagcagcatcttgagtccgactaagtctgcaacgtcttactatgaagtatgcgtggtgatttgtgcatagatctgtattgtctgcttttctctgcttcaaagtgtgatgcgtgttcattatggatagtctgaatccgtagcaactctcagaggcaaagagaagtggccccggcttggtggaggttggtggtgtggctyccacgggcattggctcacattgtctgatttctctcaggctgatctgtgcatgggactgcagggcttccccatcttccacagctttgggggcggcaccgtctctgggttcatgtctctgctcatggagcggctctcggtggactacgggaagaagtccaagctggagtttgccatttgcccagccccccatgtctccatggctgtgatggagccctgcaactccatcctgaccacctacacgaccctggaacattctgactgtgccttcatggtcgacatgtcagtgcaacctggacatcgagtgtcccatgtacaccaacctcagtcgtctgattgggcagatcgtgtcctccatcacggcctccctgtgatttgatggggccctgaatgtgtacttgacagaattccaaaccaacctggtgccgtacccccacatccacctccccctggccacc

SEQ ID NO: 71141 - DNA, 1406 bp, Homo sapiens
cagaaggattgcttgaggccaggagttaaaaaccagcctggtcaacatagcaagactccatctctacaaaaaaaaaatattaaaaaatcagccaggcacagtggtgtgtgtctgtagtcccagctactgggaatactgaggtgagaggattgcttaagcccgggagggcgaggctgtagtgagccatgatcataccactgcactagagcctggacaacagagtgagaccgaatcactaaaaataaattttttgaaaaaggaggaaaggggtctccctttgtctttgaaatacagtactgtaccttcatctggccagggcattgctccgctccctcctctgaccacctccttttatttgcaccctccagctttcctgtgtggccccacactcagggtactctggcggcggggtggtgaggttgtttaaggtgggaagtgggcctgtccttcccaccttgaacctccctgcctttgagactgggctgtggaggggagacatcccctgtgccattggtgactgctctctctcccacctcagcacccgtccgtcccactggctaactgctgggtcgacgaggactgccccgaaggggagggaggcacacacagccacggtaactgtgggctctgtcttccagtgcccccagcagggtgggggccgggctgggatcctgggtggctcctgagtgcaggccctgctcgcctctgtccctgcatctctctttctgccaacaaccccctggctgaaggcctccccaggcctgcagagatttgaaggtctggagttcatcttttgttttctaggtgtaaaaacaggccagtgtgtggtgttcaatgggacccacaggacctgtgagatctggagttggtgcccmgtggagagtggcgttgtgccctcgtaagtgtccccacaatcccctaccccaactggcgcagggccccaggcctggcagaggctgtcacctcccttccacctgcaggaggcccctgctggcccaggcccagaacttcacactgttcatcaaaaacacagtcaccttcagcaagttcaacttctctaagtaagcagagtgggtctcatctgccccaagaccctccttgtcccctacctcatctgacctttcccactcctcccaggtccaatgccttggagacctgggaccccacctattttaagcactgccgctatgaaccacaattcagcccctactgtcccgtgttccgcattggggacctcgtggccaaggctggagggaccttcgaggacctggcgttgctggtgggtcccaagttgggggcagggttcctagagggctctgggagagggtcccgggcccacccaccggtggaaaagctatgtgctatgtgcagggtggctctgtaggcatcagagttcactgggattg

SEQ ID NO: 71142 - DNA, 575 bp, Homo sapiens
actgttcctaaaattcatataaaagagcaaagggcctttttttgtttgtttgtttgtttgtttgtttgtttttgagatgacgtttcacccttgttgcccaggctggagtgcaatggtgtgatctcggctcaccgcaacctccgcctctggggttcaagcaattctcctgcctcagcctcccaagtagctgggattacaggcatgcaccaccacgcctggctaattttgtatttttagtagacagggtttctccatgttggtcaggctggtctcgaactcccgacctctgatgatctgcctgcctccgcctcccaaagtgctaggattacagatgtgagccaccatgcccggccgagcaaagggcatgaaaactygcaaaaacaatacgatagggtcaatcattatgccacataatgagatcaaatctgcagtgattgagagagaatggtattggcatagagatagacaatgagaccagaaacagaccttgagagaaaacatgggtttttcagaaacagtgccaggcgtggtggtgtgtgcctgtagtcccagccactcaggagtctgatgtggga

SEQ ID NO: 71143 - DNA, 1391 bp, Homo sapiens
gtctctctgactctcagccgctggccccaccccctgccctatacaccttatttctcctttctctgcccctcttcctatgcttttcacatttattattattattattattattaggtagagacagggtctcaccgcattggccaggctggtctcaaactcctgagctcaagtgatcctccagccttggcctcccagagtgctgggattacaggggtgagccaccgctcctggccttttttgttttttgttttgttttgtttggagatatggggtctcgctctgtcacccaggctggagtgcagtagtacaatcacagctcactgaagcctcaacctcctgggcccaaatggtcctcccacctcagcttcctgattagctgggaccacaggcacatgccaccatgcctggctaattttttttatgtttcatagagacggggtctcactatattgcccaggctggtcttgaactcctgggcttaagtgatccttcagccccccgaagagctgggattacaggtgtgagctgctgcaccccacccctcttcctaatttttaaggccccctttgtgtctccagtctccggcctgtgctagcttcccctgctttccaygggctggagtaggtggagacaccatgctcagatgtcagcagcattaggacaggacacttgtcaacaagaagctctcaggatcctcagagccaccaagactgcagacagcagccagaaccctcctcccacggggcttcggggctgaccgacctgggttcgagtctgagttctagcatggacgcactgagtgatctgaggcaattcttaacctgccacacttctctccccatctggaaaatggagtgatcattttacagatggagtacggcatgggcttattgtaaggatttgttgacctcggtggatatgtccccagtgcagaggctaaccccaggcagctatcttgggacagaaacttcccccagaccagggcagctgccctgtctcctggacacaaaccctcagtgagtctctcagccccagacagagcgagagggtggacccacaggggccttgagctgggacaagatgaccagggaacacagagaggggacaacaggagcctgacttcagagccccttttcctccctaaaataaagactttcatttggcatctcccaagaaactcaaaatgtacatcctcttctcatatctgaggctgaatcataattttttgttgagtaaaagtctaaaaggatgaataaattcattaaccagaaggtcagtgttttccagctggcctctcggcaccaggagccttccctgctgggcaggggaaacgcagcctgccataaacttctgtccaagttccctgcagaccgactcccttgaaagtcacc

SEQ ID NO: 71144 - DNA, 686 bp, Homo sapiens
gggcagcacagacagtagttaagggtggggccctggagccaaacagacccacatttctatcttagctcaaccccttccagtcctgtgaccttgggcatgtcgtttgactctgagtgttagttcccacatgtgtgaaattggagatagtgacataacctgctccaccaagctgtggtgaaaatcaagcaagtccatcaggtaagttgcctggcatggagctagacccagagcaagtgctaaatataggtcagccctaatagcattgagctctcactaagccctgctagcatacctccctaacgcgcaagaattaccattcccatttcacaggttttgcctgcaccaacccccgccccactccaaggttcaggattgctgagatgcagcaggagagttataggggatgcacttgaggctgaggggccagctgggaggtggcacagacaagccatgagagaagccggtggcctggcccaggcagtgaccaaaggagtggagagagccgacgtgccaagtgtctctgagaggagagctgcacgggcccagtgacrtcctggctgggggtgaaggaggactcgtcaatgaggactgacccctcccagattccagcttggtaagccagtgttggggggctggctggcccctaagttcaggggcatagtggggagaagagccccaaaaaccca

SEQ ID NO: 71145 - DNA, 686 bp, Homo sapiens
gggcagcacagacagtagttaagggtggggccctggagccaaacagacccacatttctatcttagctcaaccccttccagtcctgtgaccttgggcatgtcgtttgactctgagtgttagttcccacatgtgtgaaattggagatagtgacataacctgctccaccaagctgtggtgaaaatcaagcaagtccatcaggtaagttgcctggcatggagctagacccagagcaagtgctaaatataggtcagccctaatagcattgagctctcactaagccctgctagcatacctccctaacgcgcaagaattaccattcccatttcacaggttttgcctgcaccaacccccgccccactccaaggttcaggattgctgagatgcagcaggagagttataggggatgcacttgaggctgaggggccagctgggaggtggcacagacaagccatgagagaagccggtggcctggcccaggcagtgaccaaaggagtggagagagccgacgtgccaagtgtctctgagaggagagctgcacgggcccagtgacatcctggctgggggtgaaggaggactygtcaatgaggactgacccctcccagattccagcttggtaagccagtgttggggggctggctggcccctaagttcaggggcatagtggggagaagagccccaaaaaccca

SEQ ID NO: 71146 - DNA, 742 bp, Homo sapiens
ccttcccttcacccacctttcctcactgggcacccctaccctcagctcccctactctgccctctgtgatccccaacgtgaggccccatcaccatataatttcaaattacttgtagctttagttaattaaatgtaaaatcattggaataaaattataccttcattagaaattaactcgcatttcgggcccaggataatgacggggctctctctccccwcttcttccaaaccacacacaaaatggtcagttaaactgaatgggaaaaaaagtgtaacgactgcatggcaatcaagcttattattatttaagcacaagctattaccatgtgcaatgaggtatcagccaataaattatctttgaaagagtcagtccttgtctgaacacacacaggccattaaaggctgccaccggggaggttgtgccaatcgctttcctggccaggtgagctgccccagcccggggagctgaggctgggccttcctggtcctgtccctctggctggccttgaacctgcccgtaagaccctggcctggtctcaggcccccaggtcaggatctcggggtcgcggtgaagggatcgtgggtgtctccactggccattccccctccatccctcaatccagcccatgctaaggggaggaaactcagccccaagacacagactggggacaaaaaggtgtccctgataattaggaagcagaacagagaaaggagaaacagggtgttcagggtagggagcgggc

SEQ ID NO: 71147 - DNA, 742 bp, Homo sapiens
ccttcccttcacccacctttcctcactgggcacccctaccctcagctcccctactctgccctctgtgatccccaacgtgaggccccatcaccatataatttcaaattacttgtagctttagttaattaaatgtaaaatcattggaataaaattataccttcattagaaattaactcgcatttcgggcccaggataatgacggggctctctctcccctmttcttccaaaccacacacaaaatggtcagttaaactgaatgggaaaaaaagtgtaacgactgcatggcaatcaagcttattattatttaagcacaagctattaccatgtgcaatgaggtatcagccaataaattatctttgaaagagtcagtccttgtctgaacacacacaggccattaaaggctgccaccggggaggttgtgccaatcgctttcctggccaggtgagctgccccagcccggggagctgaggctgggccttcctggtcctgtccctctggctggccttgaacctgcccgtaagaccctggcctggtctcaggcccccaggtcaggatctcggggtcgcggtgaagggatcgtgggtgtctccactggccattccccctccatccctcaatccagcccatgctaaggggaggaaactcagccccaagacacagactggggacaaaaaggtgtccctgataattaggaagcagaacagagaaaggagaaacagggtgttcagggtagggagcgggc

SEQ ID NO: 71148 - DNA, 742 bp, Homo sapiens
ccttcccttcacccacctttcctcactgggcacccctaccctcagctcccctactctgccctctgtgatccccaacgtgaggccccatcaccatataatttcaaattacttgtagctttagttaattaaatgtaaaatcattggaataaaattataccttcattagaaattaactcgcatttcgggcccaggataatgacggggctctctctcccctcttcttccaaaccacacacaaaatggtcagttaaactgaatgggaaaaaaagtgtaacgactgcatggcaatcaagcttattattatttaagcacaagctattaccatgtgcaatgaggtatcagccaataaattatctttgaaagagtcagtccttgtctgaacacacacaggccattaaaggctgccaccggggaggttgtgccaatcgctttcctggccaggtgagctgccccagcccggggagctgaggctgggccttcctggtcctgtccctctggctggccttgaacctrcccgtaagaccctggcctggtctcaggcccccaggtcaggatctcggggtcgcggtgaagggatcgtgggtgtctccactggccattccccctccatccctcaatccagcccatgctaaggggaggaaactcagccccaagacacagactggggacaaaaaggtgtccctgataattaggaagcagaacagagaaaggagaaacagggtgttcagggtagggagcgggc

SEQ ID NO: 71149 - DNA, 578 bp, Homo sapiens
ggcatgagccactgcacccagccactttctgtttcttaaagtttgtgcttcatgggctttctcctactcataattccgaatttacaaatttcatggcccacctttaagaaaatacaagtcttctttaaaaaaaaaaattaggttttttttggctgggtgtggtggctcacgcctgtaatcccagcactacaggaggctgaggcgggcggatcatctgagttcaagaccagcctgaccaacatggtaaaaccccatctctactaaaaatacaaaattagctgggcatggtgatgcatgcctgtaatcccagctactcaggaggctgaggcatgagaattgctgaacccaggaggtggaggttgcagtgagctgagatcrtgccattgcactccagcctgggccacagaatgaaactccatctaaaaaaaaaaaaaaagatgatcagataagtaaggagaaaatgcccctttccttactccccagcaggtacagaaaacaaggaagataccactcagcctcacatacattcaaagaactggatctaataaagtgctaggtcaagaatattaaggagagtg

SEQ ID NO: 71150 - DNA, 794 bp, Homo sapiens
taagagtctagatagcaatttcataactgtgcctacctaccccatactggatttcaggtactgctgccaacccagccaactctgtgggtgagctcccaacctttatctcccaacctcagtactgttgaaagcttgtgccaatgatttgtcagttgagtgcataaagtcatgaaacagggatccttcctgaaaagcaacaaaaactcaacagtataaataatcatggcattgatttgaattacattttcagataggtttacctagaaggaactgagcaagtaaagaattccagagacaggagaattgattgcttgattctaagagtccaaggctgtagtgtgccatattagtgcttgtgaatagccactgcactccagcctgagcaacggagtaagacccatctcaaaaacaaacaaacaaacaaatgaacaaaaacagtagaaagaaagtacatgtggactcagtaagaaatctgaactgaatatctttactagaatttctggatgggagctttcctacactcttgtcgamggctttgtttgttaattttaagaatgtcattttatgcttagctgggtagtagtagaaagagaggccaggtgcggtggctcacgcctgtaatcctagcactttgggaggccgaggcagcggattgcctgagctcaggagttggagacaagcctgggcaacacggtgaaaccctgtctctactaaaatacaaaaaaattagctgggcggggtggcaggtactgttagtcccagctactcaggaggctgaagcaggagaattgctt

SEQ ID NO: 71151 - DNA, 666 bp, Homo sapiens
acaagattaaaataagtccctcatgacaccatcaaagagaatatgcactgttgtaaagcctgmgtattttacttggcagctattttcattatttatcatattgcattttatgaaaagatttttatataaacatgaagatcttgatgaaattattggcatttcaggaagtgctgaaatgttattggaagtgatgaaattattggcatttcaggaagtgctgaaagtttcgctttcattacttggggataagcatgatcatgatttaaccaagtatttctcactgatttgataagtctgtttaaataattggttaactagttgttgtaatttcaagagaactttatgtattttgaggataagttgttaacctgtgctcaaatcctttttgaaggctacatggaaatggttggctattgagttagcataatcagtctgcctaccatacttaaagtaccttttgtatatgtgctaagtgagaattaaaaataccttttaaaaacaaatgaaaaatacagcacaatacagcacattcgttctttgttttttgaaacagagtcttgctctgtcacccaggcaggagtgcagtggcaccatctcagctccctgcattctacgcctgccaagttcaagctattttcctgcctcaccctctgcaccctctgagac

SEQ ID NO: 71152 - DNA, 1154 bp, Homo sapiens
gcatgcctgccagtttctttcacatcatgtcctgccctattttcaccttaaacttcacgggtcttttcccgatctgtgtgctggtcctatcctgacgcgggtggctgcactgtcacatcaggragtgcagcatgaagaagagagcctggggacctcagggcgaggtgtgtaggcttgtctctgccactctctatttttgcctccagtgccttgcagatgagccctattcattccctactttcacatccctcccctccctcctgtcctccatctttcgccagctcccagctggcatctcacgtgcacacatgcacgcaaggctgaaggctgtgctgagtctcacagtggcttttacaagaactgcactaatatttgaacgcatagggccagcagcttcttctcctgcgagatttccacaaccaggagagatgactattttataactctctcaggagtatttgcgtgttaatagggaacacttgattattgctatggtttaagtatttttgttttttttaaataacagctttattgtgatataattcacataccataaagttcactcttttaaagtacacaattcagtacatctttaaaaagtatattcaggccgggcgcggtggctcatgcctgtaattccagcactttgggaggccaaggtgggcagaccactgaggtcaggaattcaagaccagcccgatcaatgtggcaaaaccctgtttctactaaaaatataaaaaattagccaggcatggtggtgtgtgcctgtaattccagctacttgggaggctgaggcaggagaattgcttgaacctgggaggtagaggttgtagtgagctgagattgtgccactgtactccagcctgggtgacagagtgagactctgtctcaaaaaaaaaagtgtattcatagtttgcagctaccaccactaattttagaacattttcatcacccccaaaagaaactcattagcagtcactccccagtccctcttcccctcatgaggtccctggcaacacgagtctactttttgtctctatgggtttgcctattctggacatttaacataaatggaatcgtacaatatgtgacgactgtttggcttcttccacatagcatgatgttttcaagggtcatccatgttgtagcatgca

SEQ ID NO: 71153 - DNA, 1154 bp, Homo sapiens
gcatgcctgccagtttctttcacatcatgtcctgccctattttcaccttaaacttcacgggtcttttcccgatctgtgtgctggtcctatcctgacgcgggtggctgcactgtcacatcagggagtgcagcatgaagaagagagcctggggacctcagggcgaggtgtgtaggcttgtctctgccactctctatttttgcctccagtgccttgcagatgagccctattcattccctactttcacatccctcccctccctcctgtcctccatctttcgccagctcccagctggcatctcacgtgcacacatgcacgcaaggctgaaggctgwgctgagtctcacagtggcttttacaagaactgcactaatatttgaacgcatagggccagcagcttcttctcctgcgagatttccacaaccaggagagatgactattttataactctctcaggagtatttgcgtgttaatagggaacacttgattattgctatggtttaagtatttttgttttttttaaataacagctttattgtgatataattcacataccataaagttcactcttttaaagtacacaattcagtacatctttaaaaagtatattcaggccgggcgcggtggctcatgcctgtaattccagcactttgggaggccaaggtgggcagaccactgaggtcaggaattcaagaccagcccgatcaatgtggcaaaaccctgtttctactaaaaatataaaaaattagccaggcatggtggtgtgtgcctgtaattccagctacttgggaggctgaggcaggagaattgcttgaacctgggaggtagaggttgtagtgagctgagattgtgccactgtactccagcctgggtgacagagtgagactctgtctcaaaaaaaaaagtgtattcatagtttgcagctaccaccactaattttagaacattttcatcacccccaaaagaaactcattagcagtcactccccagtccctcttcccctcatgaggtccctggcaacacgagtctactttttgtctctatgggtttgcctattctggacatttaacataaatggaatcgtacaatatgtgacgactgtttggcttcttccacatagcatgatgttttcaagggtcatccatgttgtagcatgca

SEQ ID NO: 71154 - DNA, 707 bp, Homo sapiens
aggcagctatgggaagatgacgtgagcctgttttctaaagtaagagagtgtgcaggttgcttaatctccttggctctctggacctcagcttttctctgtaaaatgggaacgataacgctgctgtgaagatcaaatcagactcaatgtccttgaggtctctctctcttttcaacagggtcttacattctgccgcccaggctggagtgcagtggtgtgatcacggctcactgcagccttgacctcctgggctccagcgatcstcccacctcagcctcccaagtggcctaccaactagcaaatttttgtatttttggtagagatggggtttcatcatgttgcacaggctgatctcaaactcctgggctcaagcgatccgttcgcctcgggctcccaaagtgctaggattacaggcgtgagccaccgcgcccggccccctttgttttcatgccatcagtctctcctggtttttattctctttctcaggcttttaaaacgtctcctttgtggattttttttccctttctactttttcttaaacgtgggtgtttcctgggttttagccataccaatttattcttttgctgtggtgcttgttttaaataaccccgtgtgctttctctggagaacattgactaccaggtgtcagcttcccctgctggttcctagatcccggcccacttcccgcctctgtccagggctctggatcc

SEQ ID NO: 71155 - DNA, 648 bp, Homo sapiens
aaacatggcaaaactttccataaatcactgggaaccacaactctcttatagagaagaaagttttgtatattctacttctgtccctgaatgtgaaactgcatcatttattacctttatcttgggatacaacctaagtaagcaagtcattttggagtcaatcaactttcagcagactttgaaatgttgattgcatctggagattgcacaagtttagttattttttagcactttggcctgtcataaaaacattctctcaaatcccagtatttctcctccactggcataaaaacttggaaatgtattattgctgagagactccattctctctgccagcaagtccccagagggaagcactagcagaagaaagaagtttttacagtcacttcataagagaaagtcaytcatccactggacctaatcaagtcttccaagacgtggcccatagctgacacccagagctccactctttgtatttgtgctctttcctttaaaaagaaatggcaaaaacctatgctttttcctccatagcaaaacataatgggcaaaacaagggaccactattatgagagtgctaatagcaattctagcctgcaagtaaagaagacttaccaggaccagaggactaattaacaggtcagccagataatg

SEQ ID NO: 71156 - DNA, 1396 bp, Homo sapiens
ggatcctagacctcagggtactgtatttgaagatgggacaatcttggaaggtgtcagtgaactttaaataaatagcaccccatctagtagtttctctttcagtcatggataaatgcaactggagacaagtcttggctttacgccgagcaaggcagctcagagattcacagcaataattcttgtgtgactaagcaaaggcctccactgctttaaatccctgcatgctttaatctccagctgtctttctggtgtactctctcagggtagggagggatcttaaagataataacttttagctttgtaaaaagttcagatgattttaatggctaagtatttayataggttatcattttcaaagtccaaatgttggtcaatgaggatattatggaggggaaaagtcttgcctacgtggaatatctatgactttgataatgaagagtgagcaggttctgcaaggagatatgttggaaaatactgagctcccatgactaaaattaagacaggaaataaatcaatctcagaatttctcaaaagatgttaaatgggcagtttgctggttttgggaagtgagaagggaggtggtaattattttaatccgtatttttgtggcacaatgccacaaaggtgtacgtatcatgcttaaagtatattcgcttgaatgagattatcatctcatatctgcttccaggaatagctcagatagaaactggtgctggggttaaggtaagaaatgatgggtttaccttcccttgtcaaacaagctttatcatttagagtaagcacaaggccagtttaaaccagcttaacttttacatgtatgtatgtatttatattttcatagaactacatatttatttctcacatatttaattagtgtcaaagacagcagtgataatagaaaggagccctggaatgaaacccagaaatcttgagttgacatcccagatctgcatgtacctggcttctgcccttcaccaagtcaataccttcaggattctagagctacaagacgaaaagcttagacttccaccagggaaacctccatattacataaatgggggagataagtaggttagacttattcaaatgcagaaaactagaaaattggctgagctaggactcagtcaacagccactctaacctccttctatatcatcttctactattgtagaagatggaaagttaaaaaccatctttcaccaattccctttacattaggattcttcacatggcgtaggtttcatcaaactcgtgaggggggagtaatcattccacagcccacatgagtgggctcacacagtggtggaatccctctttgttattgtttgacgccataggtttcacgtaaggagaaatatgagtcaatgacaatttttacttttttttcaatggatcc

SEQ ID NO: 71157 - DNA, 1396 bp, Homo sapiens
ggatcctagacctcagggtactgtatttgaagatgggacaatcttggaaggtgtcagtgaactttaaataaatagcaccccatctagtagtttctctttcagtcatggataaatgcaactggagacaagtcttggctttacgccgagcaaggcagctcagagattcacagcaataattcttgtgtgactaagcaaaggcctccactgctttaaatccctgcatgctttaatctccagctgtctttctggtgtactctctcagggtagggagggatcttaaagataataacttttagctttgtaaaaagttcagatgattttaatggctaagtatttacataggttatcattttcaaagtccaaatgttggtcaatgaggatattatggaggggaaaagtcttgcctacgtggaatatctatgactttgataatgaagagtgagcaggttctgcaaggagatatgttggaaaatactgagctcccatgactaaaattaagacaggaaataaatcaatctcagaatttctcaaaagatgttaaatgggcagtttgctggttttgggaagtgagaagggaggtggtaattattttaatccgtatttttgtggcacaatgccacaaaggtgtacgtatcatgcttaaagtatattcgcttgaatgagattatcatctcatatctgcttccaggaatagctcagatagaaactggtgctggggttaaggtaagaaatgatgggtttaccttcccttgtcaaacaagctttatcatttagagtaagcacaaggccagtttaaaccagcttaacttttacatgtatgtatgtatttatattttcatagaactacatatttatttctcacatatttaattagtgtcaaagacagcagtgataatagaaaggagccctggaatgaaacccagaaatcttgagttgacatcccagatctgcatgtacctggcttctgcccttcaccaagtcaataccttcaggattctasagctacaagacgaaaagcttagacttccaccagggaaacctccatattacataaatgggggagataagtaggttagacttattcaaatgcagaaaactagaaaattggctgagctaggactcagtcaacagccactctaacctccttctatatcatcttctactattgtagaagatggaaagttaaaaaccatctttcaccaattccctttacattaggattcttcacatggcgtaggtttcatcaaactcgtgaggggggagtaatcattccacagcccacatgagtgggctcacacagtggtggaatccctctttgttattgtttgacgccataggtttcacgtaaggagaaatatgagtcaatgacaatttttacttttttttcaatggatcc

SEQ ID NO: 71158 - DNA, 1396 bp, Homo sapiens
ggatcctagacctcagggtactgtatttgaagatgggacaatcttggaaggtgtcagtgaactttaaataaatagcaccccatctagtagtttctctttcagtcatggataaatgcaactggagacaagtcttggctttacgccgagcaaggcagctcagagattcacagcaataattcttgtgtgactaagcaaaggcctccactgctttaaatccctgcatgctttaatctccagctgtctttctggtgtactctctcagggtagggagggatcttaaagataataacttttagctttgtaaaaagttcagatgattttaatggctaagtatttacataggttatcattttcaaagtccaaatgttggtcaatgaggatattatggaggggaaaagtcttgcctacgtggaatatctatgactttgataatgaagagtgagcaggttctgcaaggagatatgttggaaaatactgagctcccatgactaaaattaagacaggaaataaatcaatctcagaatttctcaaaagatgttaaatgggcagtttgctggttttgggaagtgagaagggaggtggtaattattttaatccgtatttttgtggcacaatgccacaaaggtgtacgtatcatgcttaaagtatattcgcttgaatgagattatcatctcatatctgcttccaggaatagctcagatagaaactggtgctggggttaaggtaagaaatgatgggtttaccttcccttgtcaaacaagctttatcatttagagtaagcacaaggccagtttaaaccagcttaacttttacatgtatgtatgtatttatattttcatagaactacatatttatttctcacatatttaattagtgtcaaagacagcagtgataatagaaaggagccctggaatgaaacccagaaatcttgagttgacatcccagatctgcatgtacctggcttctgcccttcaccaagtcaataccttcaggattctagagctacaagacgaaaagcttagacttccaccagggaaacctccatattacataaatgggggagataagtaggttagacktattcaaatgcagaaaactagaaaattggctgagctaggactcagtcaacagccactctaacctccttctatatcatcttctactattgtagaagatggaaagttaaaaaccatctttcaccaattccctttacattaggattcttcacatggcgtaggtttcatcaaactcgtgaggggggagtaatcattccacagcccacatgagtgggctcacacagtggtggaatccctctttgttattgtttgacgccataggtttcacgtaaggagaaatatgagtcaatgacaatttttacttttttttcaatggatcc

SEQ ID NO: 71159 - DNA, 1396 bp, Homo sapiens
ggatcctagacctcagggtactgtatttgaagatgggacaatcttggaaggtgtcagtgaactttaaataaatagcaccccatctagtagtttctctttcagtcatggataaatgcaactggagacaagtcttggctttacgccgagcaaggcagctcagagattcacagcaataattcttgtgtgactaagcaaaggcctccactgctttaaatccctgcatgctttaatctccagctgtctttctggtgtactctctcagggtagggagggatcttaaagataataacttttagctttgtaaaaagttcagatgattttaatggctaagtatttacataggttatcattttcaaagtccaaatgttggtcaatgaggatattatggaggggaaaagtcttgcctacgtggaatatctatgactttgataatgaagagtgagcaggttctgcaaggagatatgttggaaaatactgagctcccatgactaaaattaagacaggaaataaatcaatctcagaatttctcaaaagatgttaaatgggcagtttgctggttttgggaagtgagaagggaggtggtaattattttaatccgtatttttgtggcacaatgccacaaaggtgtacgtatcatgcttaaagtatattcgcttgaatgagattatcatctcatatctgcttccaggaatagctcagatagaaactggtgctggggttaaggtaagaaatgatgggtttaccttcccttgtcaaacaagctttatcatttagagtaagcacaaggccagtttaaaccagcttaacttttacatgtatgtatgtatttatattttcatagaactacatatttatttctcacatatttaattagtgtcaaagacagcagtgataatagaaaggagccctggaatgaaacccagaaatcttgagttgacatcccagatctgcatgtacctggcttctgcccttcaccaagtcaataccttcaggattctagagctacaagacgaaaagcttagacttccaccagggaaacctccatattacataaatgggggagataagtaggttagacttattcaaatgcagaaaactagaaaattggctgagctaggactcagtcaacagccactctaacctccttctatatcatcttctactattgtagaagatggaaagttaaaaaccatctttcaccaattccctttacattaggattcttcacatggcgtaggtttcatcaaactcgtgaggggggagtaatcattccacagcccacatgagtgggctcacacagtggtggaatccctctttgttaytgtttgacgccataggtttcacgtaaggagaaatatgagtcaatgacaatttttacttttttttcaatggatcc

SEQ ID NO: 71160 - DNA, 1396 bp, Homo sapiens
ggatcctagacctcagggtactgtatttgaagatgggacaatcttggaaggtgtcagtgaactttaaataaatagcaccccatctagtagtttctctttcagtcatggataaatgcaactggagacaagtcttggctttacgccgagcaaggcagctcagagattcacagcaataattcttgtgtgactaagcaaaggcctccactgctttaaatccctgcatgctttaatctccagctgtctttctggtgtactctctcagggtagggagggatcttaaagataataacttttagctttgtaaaaagttcagatgattttaatggctaagtatttacataggttatcattttcaaagtccaaatgttggtcaatgaggatattatggaggggaaaagtcttgcctacgtggaatatctatgactttgataatgaagagtgagcaggttctgcaaggagatatgttggaaaatactgagctcccatgactaaaattaagacaggaaataaatcaatctcagaatttctcaaaagatgttaaatgggcagtttgctggttttgggaagtgagaagggaggtggtaattattttaatccgtatttttgtggcacaatgccacaaaggtgtacgtatcatgcttaaagtatattcgcttgaatgagattatcatctcatatctgcttccaggaatagctcagatagaaactggtgctggggttaaggtaagaaatgatgggtttaccttcccttgtcaaacaagctttatcatttagagtaagcacaaggccagtttaaaccagcttaacttttacatgtatgtatgtatttatattttcatagaactacatatttatttctcacatatttaattagtgtcaaagacagcagtgataatagaaaggagccctggaatgaaacccagaaatcttgagttgacatcccagatctgcatgtacctggcttctgcccttcaccaagtcaataccttcaggattctagagctacaagacgaaaagcttagacttccaccagggaaacctccatattacataaatgggggagataagtaggttagacttattcaaatgcagaaaactagaaaattggctgagctaggactcagtcaacagccactctaacctccttctatatcatcttctactattgtagaagatggaaagttaaaaaccatctttcaccaattccctttacattaggattcttcacatggcgtaggtttcatcaaactcgtgaggggggagtaatcattccacagcccacatgagtgggctcacacagtggtggaatccctctttgttattgtttgacgccataggtttcacgtaaggagaaatrtgagtcaatgacaatttttacttttttttcaatggatcc

SEQ ID NO: 71161 - DNA, 937 bp, Homo sapiens
tttgttctatcagccatttttacgtttttttttcccttgaatataacacctgaacctgaaaataatctcaacccgaatgaactggaaatcttatttgccagacgtcaagaaaaagggcttgggaacaaataaaagtgtttatgctcttacccaggttctgccactaacctggtcatcacacataacctttcctggattctctaacaatacataaataaataaaacttgctaggctcaaacacaaagccaggatgaaattgagctcattcaataaaaatattctggaaattcataggtgcataagttgtttcaaggcactcttggctggaggttgggggagagataatatttttattatcttattatagtcttactttttagtagttcttattgtattttaaacatgaaggcagttaaatggtgttaaaattttaaaagtattatagtttggaccagagataaactgaatttgtttaatatttacttgtctgtttttttccctaaattttctcttaatgaagtgaacttatttattttaaaattagtttttatgaagaacatggcagacaatgtacatactggctacaggcagagctttgttgatatttcatctgaatagaaatcatctatccctagccattaatacatgatctgtattgggagartcatccattctcaattaattattcaatagtcacttgacacacatgaaatagggaaaataagcaaaatggagccaatccttctaggaagactgactctgcctttatcactccatctcccaattctgtgatactcaaaagaatccaatcttttgttttccttctacgtttcgtggtgatcttttgcactccattttcagttcaaattttcaaagtgactcaatgcttcagaagaatcctaatggatttgctattctgagttgaattatcctatg

SEQ ID NO: 71162 - DNA, 1010 bp, Homo sapiens
gtttattgaatgactttagttctctwaaaacagctcttcttgccattatttaggtcaaaatgtggactatgatgatataatacttttttttctaactactcttttgtcttgctttctttatacacaaaggaactagacaaagaactcccagtgcttaagccatattttatcactaaccctgaagaagctggagtgagggaagctggcttaagagtcacatggctgggacatgccacggtaatggtggaaatggatgagctcatatttctcacggatcccatctttagctctcgtgcttcaccatcgcagtacatgggtccaaagcgatttcgtcgttccccgtgcacaataagtgaactccctccaatagatgcggtccttatcagtcacaaccactatgaccatctggactacaattctgtcattgctttgaatgagcgatttggtaatgagttgagatggtttgtgcctttgggtctccttgactggatgcaaaaatgtggctgtgagaatgtgattgagttggactggtgggaggagaattgtgtccccggacatgataaggtcacttttgtctttacaccttcccagcactggtgtaaaaggactctaatggatgacaacaaggtgctatggggcagctggtctgtcttggggccttggaatcgattttttttcgcaggagatactggttattgccctgcttttgaagagataggaaaaagatttggaccttttgaccttgcagctattcccatcggagcttatgaaccgaggtatgtagacttccaaagaaaacattcctgctatgtgataaattaactgaatttaaaagtaaagcaattatgatttttgtgacactgtaatttatgattttaatggtggactttgttatacatgattgggggttggtaggtcagattcaattagattttatttttaaatattttaaattaaatattttttaaattgacaagtaaaaattgtgtatatggtgtgcaacatgatgt

SEQ ID NO: 71163 - DNA, 1010 bp, Homo sapiens
gtttattgaatgactttagttctcttaaaacagctcttcttgccattatttaggtcaaaatgtggactatgatgatayaatacttttttttctaactactcttttgtcttgctttctttatacacaaaggaactagacaaagaactcccagtgcttaagccatattttatcactaaccctgaagaagctggagtgagggaagctggcttaagagtcacatggctgggacatgccacggtaatggtggaaatggatgagctcatatttctcacggatcccatctttagctctcgtgcttcaccatcgcagtacatgggtccaaagcgatttcgtcgttccccgtgcacaataagtgaactccctccaatagatgcggtccttatcagtcacaaccactatgaccatctggactacaattctgtcattgctttgaatgagcgatttggtaatgagttgagatggtttgtgcctttgggtctccttgactggatgcaaaaatgtggctgtgagaatgtgattgagttggactggtgggaggagaattgtgtccccggacatgataaggtcacttttgtctttacaccttcccagcactggtgtaaaaggactctaatggatgacaacaaggtgctatggggcagctggtctgtcttggggccttggaatcgattttttttcgcaggagatactggttattgccctgcttttgaagagataggaaaaagatttggaccttttgaccttgcagctattcccatcggagcttatgaaccgaggtatgtagacttccaaagaaaacattcctgctatgtgataaattaactgaatttaaaagtaaagcaattatgatttttgtgacactgtaatttatgattttaatggtggactttgttatacatgattgggggttggtaggtcagattcaattagattttatttttaaatattttaaattaaatattttttaaattgacaagtaaaaattgtgtatatggtgtgcaacatgatgt

SEQ ID NO: 71164 - DNA, 743 bp, Homo sapiens
gccactatgcccagctaataaattttttttttttttttagaaatgggttctcacccaaactggtcaacacggtgagaccccatatctattaaaaatacaaaaaattrcaagcgtggtggtgggcacctgtaatcccagctactcaggatgctgaggcaggagaattgcttgaacaggaggcaggggttgcagtgagctgaggttgcaccactgcactccagcatgggcaacaagagtgagactccgtctcaaaacaaaaacaaacaaaaataaagaaatggggtctcactatgttgcccagactggtcttgaactcttggcctccagcaatctcctgtcgtggctcccaagtgttgggattacaggtgtgagccaccacgcctggccctaatttacatttgaaagtcaactggttctctttggttacaatttaattatacatccatcctttaaaaacatggcatttatttagctctttataaatcatatacttctgtaagatgctgatgtctttcaaggcatttcctaaaatgtgtggactgtttacatccttattatatctgaatctttttaccatttcaattataataacaagattaccaaatggaccagcttagttattcctgcagctgtgtccacctcatcttgttctgttctcttggaattctctccttccccaactctacctgtagggtaacattctcaagagccaggtcagactccacctcttacagaaacttttg

SEQ ID NO: 71165 - DNA, 861 bp, Homo sapiens
tgattgccagatttgaattttagctgtactagtttttaaggttttttttttaatcttggacatgtaatttaatttctttatgcctcaatttattcatttgtaagacgagaatagttaatgatatttaaattgtgaagtttaaataacaaagcatttaaatcttagtacataacctgtacatagtaagtacttcataaacgttaactactattgcagtagtatttgttcctgttcttcattgtcatgtaaatttagggctattttcatgatcgccgtttaggaaagcccttctgagtgtttctagggttttattttttgtttgtttgtttttattttaatagcttatctcaagtcatattctatcatatcatctaggtatttttgcttttcctcctgcctaggactaatcaatctaattttttttgtttttatttcccttaactggaatgtaagcttcrtgggatcaggggccttctttgtcttattccttgttatatctccagcttctagtgtaatagatggactacaatagaaggtcagtaaatattttgggggacgacattaattgctacagtgagctgttcagcgtatagctgaaaggagatggtggtgactgcagctaggtgtggcgcgatctcctgtagatccaatttggtggtctttttccagggccctgacccgcgctagctgttactgattttgcccctgaaagtatgttctctgacttaattattttggtcttatttggcaaatcattgcagtttaccaaagtgtgttttctggaacatttgatctttaaagtgatcttcctaatgactgtaatattccaattccacagaacacactttgggaaatgcagag

SEQ ID NO: 71166 - DNA, 861 bp, Homo sapiens
tgattgccagatttgaattttagctgtactagtttttaaggttttttttttaatcttggacatgtaatttaatttctttatgcctcaatttattcatttgtaagacgagaatagttaatgatatttaaattgtgaagtttaaataacaaagcatttaaatcttagtacataacctgtacatagtaagtacttcataaacgttaactactattgcagtagtatttgttcctgttcttcattgtcatgtaaatttagggctattttcatgatcgccgtttaggaaagcccttctgagtgtttctagggttttattttttgtttgtttgtttttattttaatagcttatctcaagtcatattctatcatatcatctaggtatttttgcttttcctcctgcctaggactaatcaatctaattttttttgtttttatttcccttaactggaatgtaagcttcgtgggatcaggggccttctttgtcttattccttgttatatctccagcttctagtgtaatagatggactacaatagaaggtcagtaaatattttgggggacgacattaattgctacagtgagctgttcagcgtatagctgaaaggagrtggtggtgactgcagctaggtgtggcgcgatctcctgtagatccaatttggtggtctttttccagggccctgacccgcgctagctgttactgattttgcccctgaaagtatgttctctgacttaattattttggtcttatttggcaaatcattgcagtttaccaaagtgtgttttctggaacatttgatctttaaagtgatcttcctaatgactgtaatattccaattccacagaacacactttgggaaatgcagag

SEQ ID NO: 71167 - DNA, 629 bp, Homo sapiens
cttgccaccatrtgcttattcagtgctgccttgtgtttatcgccatcatgaatagagtagttgttacatcattcatgataattattcttcaaaggttaatcatggatagcttagtcactcttaaatttattagaatcatactatgacttgaggctgactgagctggagagattgaatatttacacattgaaaggtaataatgctccaaaataaaaaagcaactgacaaaggactttttgttttgtttatctgcagtgtatttcttattctcagtcctctgtttatgaccagtgatttggcttcaaggatgtttatttagtacttaatttagttagaaggaagatacggagatatggttcctgccttccagtaacttgttatccaatgtgaaaactagaatgtttatgtaagtagcagcctaactacggagaacccattgagcagagtgtgtgtgcatatgtaggtggtggtgctggcagtaaggaacggtgatggctgtgactagaaagacttaattcatgggtcactgaagatccgcctttgactatttactccgaaatactctgggttgggaatatctaggtaggatgctgtgtgaaagaatacacatagtgcagagtggctgatgt

SEQ ID NO: 71168 - DNA, 724 bp, Homo sapiens
atccaccttgaagcactgactccttcagggttcacagaaaatgtaggagaacctgccattttaaccatttgcctgtatcttgatcccatatctttattttcttactcttgacctgatttggcctaacgttttccatccttttatcttcactgaagtttagcttagttttctgctctttaaatgtgttctttaagtgatgacagatcatcctcattctaggctccaaagatagtaataagatgtactctttctagacaggcggaatgaattttgatggctcagtgttttttttgtttkttttttttttttttttttttgagacagagtctcgctttgttgcccaggctggagtgcagtggcgcgatcttggctcactgcaagctccgcctcccaggttcacgccattttcctgcctcagcctcccgagtagctgggactacaggcgcccgccaccacgcccggctaatttttttgtatttttaggagagacggggtttcaccgtgttagccaggatggtctcaatctcctaacctcgtgatccgcctgcctcggcctcccaaagtgctgggattacaggcgtgagccaccgcacccggcctttgatggctcagtttttaaaaatttatatctttttgaggggtttggttagcctttcaaatttgaattagtcaatattttaaatggtttatttaaaaaaaatttaatattataatatgttaatat

SEQ ID NO: 71169 - DNA, 577 bp, Homo sapiens
atggctcctgatggtttgaaagtcaaagagggtccagtacccaagccttaacgtacgtttcaaaatgactttgaaagaaagtcagaaaaaaatgcagcatctatasggaccagatgtccacttaggagcccttggtgagagagaaagatgtatctcagctggcctcagtggctcactcttgtaattccagcatgttgggaggctgaggttggtggatcacttgagttcaggagttctagaccagcctgggcaacatcacaaaacctcctctctccaaaaaatacaaaatgagtctggcatagtggcatgtgcctgtagtcccagctacttggaaggctgaggcaggaggattgcttgagcccaggagtttgagaccagcctgggcaactcagtgagaccctatgtctacaaaaaataaaaataattagccaggaatggtggtgcgtgcctatagtaccagctactcaggaggttgaggtaggaggattgcttgaggctgggaggtcaaggctgcagtgagccgtgattacaccaccgcactccagcctgagtgagaccatgtctttaaaaaaaaaaa

SEQ ID NO: 71170 - DNA, 1211 bp, Homo sapiens
actaaatccatacgtggctctgcattccctgttgtttagggaatgaagggcaatgatggtaaacagcccaggtgtgcccactccatggtccattttatcctggaaatggtgaacacaggctctcccatgttcaacaactgtgtgactgcctgtgggcacacaattgtcctggggctgtgggcctttgctgtccaagagttcttatctgcgagtccctaagatggctgcagaatcaatcaggttgttcgtgcaaggtcaagatctagggaatgactggaggtgaccatgaaaaagtcatgggtcctgaaccattgagccaagtcagaggtccagaaagtgacacgtcaaggcctctgctagggtgtttcaggaccagggaagagtggggtaagacagtggaaggtgcctggtaggcgtggtcagggcaggcccagagggctggaaactgcagagaggttggccaatgcaggagaatgggaatgcagaccctgtgctccaagggcctctctgcctgctgagttgggggttgggggaaggggctccagtctgtgtattgactccctgtccttctttgacctctgcacgcctagccagcaaggtgctggatggctcaatcagagagaaatgtgatttgggccaagtttccttccacctgagcccagggaagagctggaggcctggccagtggggcagaggccaaaattacagtatcagrgagatttaccatcaaatccagaatggcctcattcctgagtcatgctgtcctgtaaacttagagcacctcccagcactcatgaactcggtgctggggcagtttcttatcttaaacctgtggataagtgaggcttgagattttcccacccctgctcagtgaattcgtgtttactcaacaaaacacaagccaaaatgtccaagctgaagcaattgcctctccattagccagttgtatgtttctggtactctccccctatctggttgtgagcatagccacaaggactttaacttatgactacattcccaatgctgaatcaattattattgaccaaatgacacaacaaagcaaggagcatccaggttttctgactgagaacttgattacttctctgcattgctcccccatagtccaggtgtctgctcagttgagggggcaggaagttcctgtttggcagggacagttccaggttttgatgaccaaattggtatctatacta

SEQ ID NO: 71171 - DNA, 540 bp, Homo sapiens
tcgggcagcccttggccaggcagggagacctgcccaacaggtgtgggtgaagggcagcaggcccagggactaacagcccagccatccttgccagctgcagaactggaagggggcccagattgaccctggctgctctggaggggaggagaggttgccctatggcaggggtggaagcagcagaaccttctgggctttgctgatgtctcctcccctatggggactgattggcccagggcttccctctctccctggggacatctctgggcagagtggcccaatgccctgctattgcaagccagycctctccttctcgggcaccagggagggggcaggcaaggccaggttccccggtaggcagattaagtgtgttctcaggccactggcagcaaaaggccatcaacaaagtgttttggtttggttttgcttttttaagagctaatatttcatacttcaaaaatagcaaggaagtagtcatcctggggaaaatcaaaactttgttggacttcctgacacttattttaaggcttaggattattttat

SEQ ID NO: 71172 - DNA, 626 bp, Homo sapiens
atacccttcttcaaaactcagggaacttgaatttctgatggcacaaggtgtgtggggagagagccacaggctacttctctcctatgccctgggattcagctagccttatttatcattttcttctcaatgttatttaaatagtcataggtatttaaaactgggctgtgagctacagatattcagatctatagaaatttttctctgggagctcgtattacagattacattgcagaaagaacaatggattcaaaatcaagaaacgtatattctgatttcaaaaccaccctctatytctaagttttctcatctataaaatgtggctactgagggtgatgagagtaatagttgtgatgaaggcagtgatgatgataccaaaacagcactattgatgcatcttctgagcattttacaattattatttcctcatttaatctacacagcaatcctaggaggaatgtactatcattgttcccattttaggaatagcaaaaaccaggcacagggaggtaaagaaacttgtcaaggtcacatggctattaagtcaaaccagatagcctgactcttcacctggttctcttaaccacaatgctaccctgcccctgtggtgcagagttgttgggggatcc

SEQ ID NO: 71173 - DNA, 3009 bp, Homo sapiens
ccccctttttcccaagtaggagaggattattgtgaaaaggaaaaataaggatcacagaatccttgggaagatttcaaagatgccctacctacatctgcatatcactaataaatagctgctgagttctggaagtttacacttgcccagttcttacctgcagtggaacctcaacctagcattcagtttaattcaacaaattaaatgtactgagtgtcttgtacaggccgggctttgtgccggatgctgaagactgtggtctctgccttgaataagccctaagtctggccgggggagaaaaacacgtcaaaaacactgtaatttgaagagactcacattagagtcaggtaggtacaagtacaataggagcaagtctgaagaggaagcatttgattctgccactctgcgggtagcacgggggccagggggaactccacaaaggaagtgacatttgagctggacccttaagggtgaataaggatttgctagggagaggaagaccagcgcagaagcaggagcttggaaaaaagcacagaggcctcaaagagtggtgcaaagtccaaaggctgtagggaagaggtcgatgaaccaagggcctcgaggcggaggagactggacacatcttgtagacagggcttcatcctgaatctgcttcccacacgacaaagcagtggaccttcctgttctcaggggatccttgtcaatactgggatcatcatgcttccccaccctgtttccaagaaagcagcaggctcctgtggctgggcctaggttggctggcagagcccctccaggaatatctgacaggagagttcatgtgctaattaagcatgcatctgatattgcagacacgacaatcaattagcatagctgattagacacctccacgaatgagctgtggtggctcctgaatgccctgaacccactctggcccactctcactcagagcaaccgcccccgactcactcattcatttgaagaaagagcagaggctttggtagagctgtggtctttagcctcagtttcttcacctacaacatggaaatattagcattaaccttgttgggttgttgtgagattaatatatggagagtacctaattttagtgcctaagttagtacttaataaatgatagctattagttctggggtgtaataccttggctttggagctagggatttgaaaatgaataagaaatagtttctggccataggaactcccaacgcacaaaatagtatgataaatgctgtcctcaaagtgccatgaaaactcagaaaatggctgaattggtaagcagatcctgtcctgggagcagtagcaagagttcaaattctcagttcctaagtataactgggcagacagggcccttctagcccctgccacaaagcccgggggtctcctagcacctcagatgagtgcttgaatagtagttttgtctttgccaacaacttttttttttttgagacagagtcttactctgtcaccctggctggagtgcagtggctcaatcacagctcactgcagcctcaacctcccagactcaagtgatccttccacctcagcctctcaagtagctggggctacaggtgggtgccaccatgcccagctaattttttaacttattgtagagacaaggtctcactatgttgcccaggctggtctcaaactcctgggctcaagcaacctacccacctcagcctcccaaagcactaggatcacatgcatgagccactgcccccagcccacactttctctttaattcatattaaaagacttttcaaattgactcagaagctaagtcctctccagcatgaggccatgttggccgggctcatctgagcctcaggagtataaccgggcccaagttgtaacccccattccggcctcctcctctcctgcaccaagaaaaaccagaacaaagcttagcatcctaccactttcatgctgagaaagcatagaagaacaagaaagtaggatttctagaggttaaaggtaactatactgagtccaaaacaccaactgcacaaataaagagatggatgcaacatggctccatctcctttctcacgatatgtgtaaaggagacacgggagcttctgacgatagtgcagtgggaatccgtggtgtgatgtggtcaccatgaaagctaatccaggccrgccatggtagctcacacctgtaatcccagcactttgggaagccgaggcgggtggatcacctgaggtcaggagtttgaaaccagcctggccaacatggtgaaaccccatctctactaaaaaatataaaaattagccaggcgtggtggtaggtgcctgtaatcccagctacacagggggctgagccaagataatggcttgaacctgggaggcagaggttgcagtgagctgagattgtgccattgcactccagcctgggcaacaagagtgagactccatctcaaaaaaaaaaaaaaaaaaaaaaaaaaaaaaaaaaaaagaaagctaatccaatcttaaatacactgattaaaatagaatatctatctaggccttttttcagacatctctctctccttcacaaggaactgctctcctctctgctttcttctgtctattaaacgttccactccttaacccactaaaaaaattaattaattagttaattaaatagaatatctagctgagtgtggtggctcatgcctgtaatcccaacattttggcaggctgaggtgagagggagcccaggagttcgagaccagcctgggcaacatagcgtgacccccatctctacaaaatatttaaaatttagccaggcatggtggtgcacacctatagtctcagctgctcaggaggctgaggcaagaaggatctcttgagcccaggagtttgaggttacactatacatataaacacacacatacacacacgcataatgtctacactgagggaagtgatacccattgtactctgatcagcacactttgaacattatggcccagctcactccaactggaatgagttcagagaagtcagt

SEQ ID NO: 71174 - DNA, 3009 bp, Homo sapiens
ccccctttttcccaagtaggagaggattattgtgaaaaggaaaaataaggatcacagaatccttgggaagatttcaaagatgccctacctacatctgcatatcactaataaatagctgctgagttctggaagtttacacttgcccagttcttacctgcagtggaacctcaacctagcattcagtttaattcaacaaattaaatgtactgagtgtcttgtacaggccgggctttgtgccggatgctgaagactgtggtctctgccttgaataagccctaagtctggccgggggagaaaaacacgtcaaaaacactgtaatttgaagagactcacattagagtcaggtaggtacaagtacaataggagcaagtctgaagaggaagcatttgattctgccactctgcgggtagcacgggggccagggggaactccacaaaggaagtgacatttgagctggacccttaagggtgaataaggatttgctagggagaggaagaccagcgcagaagcaggagcttggaaaaaagcacagaggcctcaaagagtggtgcaaagtccaaaggctgtagggaagaggtcgatgaaccaagggcctcgaggcggaggagactggacacatcttgtagacagggcttcatcctgaatctgcttcccacacgacaaagcagtggaccttcctgttctcaggggatccttgtcaatactgggatcatcatgcttccccaccctgtttccaagaaagcagcaggctcctgtggctgggcctaggttggctggcagagcccctccaggaatatctgacaggagagttcatgtgctaattaagcatgcatctgatattgcagacacgacaatcaattagcatagctgattagacacctccacgaatgagctgtggtggctcctgaatgccctgaacccactctggcccactctcactcagagcaaccgcccccgactcactcattcatttgaagaaagagcagaggctttggtagagctgtggtctttagcctcagtttcttcacctacaacatggaaatattagcattaaccttgttgggttgttgtgagattaatatatggagagtacctaattttagtgcctaagttagtacttaataaatgatagctattagttctggggtgtaataccttggctttggagctagggatttgaaaatgaataagaaatagtttctggccataggaactcccaacgcacaaaatagtatgataaatgctgtcctcaaagtgccatgaaaactcagaaaatggctgaattggtaagcagatcctgtcctgggagcagtagcaagagttcaaattctcagttcctaagtataactgggcagacagggcccttctagcccctgccacaaagcccgggggtctcctagcacctcagatgagtgcttgaatagtagttttgtctttgccaacaacttttttttttttgagacagagtcttactctgtcaccctggctggagtgcagtggctcaatcacagctcactgcagcctcaacctcccagactcaagtgatccttccacctcagcctctcaagtagctggggctacaggtgggtgccaccatgcccagctaattttttaacttattgtagagacaaggtctcactatgttgcccaggctggtctcaaactcctgggctcaagcaacctacccacctcagcctcccaaagcactaggatcacatgcatgagccactgcccccagcccacactttctctttaattcatattaaaagacttttcaaattgactcagaagctaagtcctctccagcatgaggccatgttggccgggctcatctgagcctcaggagtataaccgggcccaagttgtaacccccattccggcctcctcctctcctgcaccaagaaaaaccagaacaaagcttagcatcctaccactttcatgctgagaaagcatagaagaacaagaaagtaggatttctagaggttaaaggtaactatactgagtccaaaacaccaactgcacaaataaagagatggatgcaacatggctccatctcctttctcacgatatgtgtaaaggagacacgggagcttctgacgatagtgcagtgggaatccgtggtgtgatgtggtcaccatgaaagctaatccaggccagccatggtagctcacacctgtaatcccagcactttgggaagccgaggcgggtggatcacctgaggtcaggagtttgaaaccagcctggccaacatggtgaaaccccatctctactaaaaaatataaaaattagccrggcgtggtggtaggtgcctgtaatcccagctacacagggggctgagccaagataatggcttgaacctgggaggcagaggttgcagtgagctgagattgtgccattgcactccagcctgggcaacaagagtgagactccatctcaaaaaaaaaaaaaaaaaaaaaaaaaaaaaaaaaaaaagaaagctaatccaatcttaaatacactgattaaaatagaatatctatctaggccttttttcagacatctctctctccttcacaaggaactgctctcctctctgctttcttctgtctattaaacgttccactccttaacccactaaaaaaattaattaattagttaattaaatagaatatctagctgagtgtggtggctcatgcctgtaatcccaacattttggcaggctgaggtgagagggagcccaggagttcgagaccagcctgggcaacatagcgtgacccccatctctacaaaatatttaaaatttagccaggcatggtggtgcacacctatagtctcagctgctcaggaggctgaggcaagaaggatctcttgagcccaggagtttgaggttacactatacatataaacacacacatacacacacgcataatgtctacactgagggaagtgatacccattgtactctgatcagcacactttgaacattatggcccagctcactccaactggaatgagttcagagaagtcagt

SEQ ID NO: 71175 - DNA, 3009 bp, Homo sapiens
ccccctttttcccaagtaggagaggattattgtgaaaaggaaaaataaggatcacagaatccttgggaagatttcaaagatgccctacctacatctgcatatcactaataaatagctgctgagttctggaagtttacacttgcccagttcttacctgcagtggaacctcaacctagcattcagtttaattcaacaaattaaatgtactgagtgtcttgtacaggccgggctttgtgccggatgctgaagactgtggtctctgccttgaataagccctaagtctggccgggggagaaaaacacgtcaaaaacactgtaatttgaagagactcacattagagtcaggtaggtacaagtacaataggagcaagtctgaagaggaagcatttgattctgccactctgcgggtagcacgggggccagggggaactccacaaaggaagtgacatttgagctggacccttaagggtgaataaggatttgctagggagaggaagaccagcgcagaagcaggagcttggaaaaaagcacagaggcctcaaagagtggtgcaaagtccaaaggctgtagggaagaggtcgatgaaccaagggcctcgaggcggaggagactggacacatcttgtagacagggcttcatcctgaatctgcttcccacacgacaaagcagtggaccttcctgttctcaggggatccttgtcaatactgggatcatcatgcttccccaccctgtttccaagaaagcagcaggctcctgtggctgggcctaggttggctggcagagcccctccaggaatatctgacaggagagttcatgtgctaattaagcatgcatctgatattgcagacacgacaatcaattagcatagctgattagacacctccacgaatgagctgtggtggctcctgaatgccctgaacccactctggcccactctcactcagagcaaccgcccccgactcactcattcatttgaagaaagagcagaggctttggtagagctgtggtctttagcctcagtttcttcacctacaacatggaaatattagcattaaccttgttgggttgttgtgagattaatatatggagagtacctaattttagtgcctaagttagtacttaataaatgatagctattagttctggggtgtaataccttggctttggagctagggatttgaaaatgaataagaaatagtttctggccataggaactcccaacgcacaaaatagtatgataaatgctgtcctcaaagtgccatgaaaactcagaaaatggctgaattggtaagcagatcctgtcctgggagcagtagcaagagttcaaattctcagttcctaagtataactgggcagacagggcccttctagcccctgccacaaagcccgggggtctcctagcacctcagatgagtgcttgaatagtagttttgtctttgccaacaacttttttttttttgagacagagtcttactctgtcaccctggctggagtgcagtggctcaatcacagctcactgcagcctcaacctcccagactcaagtgatccttccacctcagcctctcaagtagctggggctacaggtgggtgccaccatgcccagctaattttttaacttattgtagagacaaggtctcactatgttgcccaggctggtctcaaactcctgggctcaagcaacctacccacctcagcctcccaaagcactaggatcacatgcatgagccactgcccccagcccacactttctctttaattcatattaaaagacttttcaaattgactcagaagctaagtcctctccagcatgaggccatgttggccgggctcatctgagcctcaggagtataaccgggcccaagttgtaacccccattccggcctcctcctctcctgcaccaagaaaaaccagaacaaagcttagcatcctaccactttcatgctgagaaagcatagaagaacaagaaagtaggatttctagaggttaaaggtaactatactgagtccaaaacaccaactgcacaaataaagagatggatgcaacatggctccatctcctttctcacgatatgtgtaaaggagacacgggagcttctgacgatagtgcagtgggaatccgtggtgtgatgtggtcaccatgaaagctaatccaggccagccatggtagctcacacctgtaatcccagcactttgggaagccgaggcgggtggatcacctgaggtcaggagtttgaaaccagcctggccaacatggtgaaaccccatctctactaaaaaatataaaaattagccaggcgtggtggtaggtgcctgtaatcccagctacacagggggctgagccaagataatggcttgaacctgggaggcagaggttgcagtgagctgagattgtgccattgcactccagcctgggcaacaagagtgagactccatctcaaaaaaaaaaaaaaaaaaaaaaaaaaaaaaaaaaaaagaaagctaatccaatcttaaatacactgattaaaatagaatatctatctaggccttttttcagacatctctctctccttcacaaggaactgctctcctctctgctttcttctgtctattaaacgttccactccttaacccactaaaaaaattaattaattagttaattaaatagaatatctagctgagtgtggtggctcatgcctgtaatcccaacattttggcaggctgaggtgagagggagcccaggagttcgagaccagcctgggcaacatagcgtgacccccatctctacaaaatatttaaaatttagccaggcatggtggtgcacacctatagtctcagctgctcaggaggctgaggcaagaaggatctcttgagcccaggagtttgaggttacactatacatataaacacacacatacamacacgcataatgtctacactgagggaagtgatacccattgtactctgatcagcacactttgaacattatggcccagctcactccaactggaatgagttcagagaagtcagt

SEQ ID NO: 71176 - DNA, 3009 bp, Homo sapiens
ccccctttttcccaagtaggagaggattattgtgaaaaggaaaaataaggatcacagaatccttgggaagatttcaaagatgccctacctacatctgcatatcactaataaatagctgctgagttctggaagtttacacttgcccagttcttacctgcagtggaacctcaacctagcattcagtttaattcaacaaattaaatgtactgagtgtcttgtacaggccgggctttgtgccggatgctgaagactgtggtctctgccttgaataagccctaagtctggccgggggagaaaaacacgtcaaaaacactgtaatttgaagagactcacattagagtcaggtaggtacaagtacaataggagcaagtctgaagaggaagcatttgattctgccactctgcgggtagcacgggggccagggggaactccacaaaggaagtgacatttgagctggacccttaagggtgaataaggatttgctagggagaggaagaccagcgcagaagcaggagcttggaaaaaagcacagaggcctcaaagagtggtgcaaagtccaaaggctgtagggaagaggtcgatgaaccaagggcctcgaggcggaggagactggacacatcttgtagacagggcttcatcctgaatctgcttcccacacgacaaagcagtggaccttcctgttctcaggggatccttgtcaatactgggatcatcatgcttccccaccctgtttccaagaaagcagcaggctcctgtggctgggcctaggttggctggcagagcccctccaggaatatctgacaggagagttcatgtgctaattaagcatgcatctgatattgcagacacgacaatcaattagcatagctgattagacacctccacgaatgagctgtggtggctcctgaatgccctgaacccactctggcccactctcactcagagcaaccgcccccgactcactcattcatttgaagaaagagcagaggctttggtagagctgtggtctttagcctcagtttcttcacctacaacatggaaatattagcattaaccttgttgggttgttgtgagattaatatatggagagtacctaattttagtgcctaagttagtacttaataaatgatagctattagttctggggtgtaataccttggctttggagctagggatttgaaaatgaataagaaatagtttctggccataggaactcccaacgcacaaaatagtatgataaatgctgtcctcaaagtgccatgaaaactcagaaaatggctgaattggtaagcagatcctgtcctgggagcagtagcaagagttcaaattctcagttcctaagtataactgggcagacagggcccttctagcccctgccacaaagcccgggggtctcctagcacctcagatgagtgcttgaatagtagttttgtctttgccaacaacttttttttttttgagacagagtcttactctgtcaccctggctggagtgcagtggctcaatcacagctcactgcagcctcaacctcccagactcaagtgatccttccacctcagcctctcaagtagctggggctacaggtgggtgccaccatgcccagctaattttttaacttattgtagagacaaggtctcactatgttgcccaggctggtctcaaactcctgggctcaagcaacctacccacctcagcctcccaaagcactaggatcacatgcatgagccactgcccccagcccacactttctctttaattcatattaaaagacttttcaaattgactcagaagctaagtcctctccagcatgaggccatgttggccgggctcatctgagcctcaggagtataaccgggcccaagttgtaacccccattccggcctcctcctctcctgcaccaagaaaaaccagaacaaagcttagcatcctaccactttcatgctgagaaagcatagaagaacaagaaagtaggatttctagaggttaaaggtaactatactgagtccaaaacaccaactgcacaaataaagagatggatgcaacatggctccatctcctttctcacgatatgtgtaaaggagacacgggagcttctgacgatagtgcagtgggaatccgtggtgtgatgtggtcaccatgaaagctaatccaggccagccatggtagctcacacctgtaatcccagcactttgggaagccgaggcgggtggatcacctgaggtcaggagtttgaaaccagcctggccaacatggtgaaaccccatctctactaaaaaatataaaaattagccaggcgtggtggtaggtgcctgtaatcccagctacacagggggctgagccaagataatggcttgaacctgggaggcagaggttgcagtgagctgagattgtgccattgcactccagcctgggcaacaagagtgagactccatctcaaaaaaaaaaaaaaaaaaaaaaaaaaaaaaaaaaaaagaaagctaatccaatcttaaatacactgattaaaatagaatatctatctaggccttttttcagacatctctctctccttcacaaggaactgctctcctctctgctttcttctgtctattaaacgttccactccttaacccactaaaaaaattaattaattagttaattaaatagaatatctagctgagtgtggtggctcatgcctgtaatcccaacattttggcaggctgaggtgagagggagcccaggagttcgagaccagcctgggcaacatagcgtgacccccatctctacaaaatatttaaaatttagccaggcatggtggtgcacacctatagtctcagctgctcaggaggctgaggcaagaaggatctcttgagcccaggagtttgaggttacactatacatataaacacacacatacacacacgcataatgtctacactgagggaagtgatacccattgtactctgatcagcacactttgaacattayggcccagctcactccaactggaatgagttcagagaagtcagt

SEQ ID NO: 71177 - DNA, 769 bp, Homo sapiens
aatttccctccctgagcagttattacattttgcatggtcgtcttcactgtttggaaggctctaggtactcacaggctagtcaacagaaagtattgttaggttttcgaattagaactactatctcattgtagttttatttcgttttatttatatagggtttacatatttaaatttatttattaaggcacagtttagttatctatcgtgaagtgcacaggtcttaagtgttaattttgttgccttttgataaatgtgtggggttgcctaggttatccacaccccaatcaagaaatagaacattttcatcactccagaaaattcttttattctcatttctactcggtttcacccttccttctcccagaggcaaccattaaactwttctaccaccattgcttagtctgtcctgttcttaaactttatatatacaatcttttctacccagtcttctattgatggacatttgggttgtttctatttttttggctgttatgaaggccactgagaacattcttattcaaatcatttaatgactatgtattcttcagttttgttgatgtaacttgatttattcaaccggtatcttatagatggcaatttaggatgtttatataattctattagtttatatatacaggataggtgtatgtttaactgtataagaaattgccaattttcttaagcagtggtccaattttataccatcaccagaagtatataagacttccagttattctacattcttgacatcatttagtctgctgcctta

SEQ ID NO: 71178 - DNA, 546 bp, Homo sapiens
tgaacatcctcagcagtcacttggaaaacatttctgtgttttgcaaaactgcaagcaaatacacaattaccctgtattctttcctctagagcccacgctctgaatccttccttctgctcactggtagcatgaagcttataactttagacaagctcgtttgctcccttttatttgcaaaggaaatgtataacctcactgagctttttttttttttttttttttgccttggctgccaggagcctcgtctagcaatgctgagttgcggttcatggttcarctcaagagtttgttgcattaatccctcaccttccccgaactgatttttctttttttttctttcttttttttttttttttttttgagacacagtctcactgtgtcacccaggctggagttcagtggtgctatctcagctcactgcaacctttgcctcccaggttcaagcaattcttatgcctcagcctcccgagtagctgggattacaggcatccaccaccacacccagctaatttttgtatttttacaagaaacagggtttcaccatgt

SEQ ID NO: 71179 - DNA, 546 bp, Homo sapiens
tgaacatcctcagcagtcacttggaaaacatttctgtgttttgcaaaactgcaagcaaatacacaattaccctgtattctttcctctagagcccacgctctgaatccttccttctgctcactggtagcatgaagcttataactttagacaagctcgtttgctcccttttatttgcaaaggaaatgtataacctcactgagctttttttttttttttttttttgccttggctgccaggagcctcgtctagcaatgctgagttgcggttcatggttcagctcaagagtttgttgcattaatccctcaccttccccgaactgatttttctttttttttctttcttttttttttttttttttttgagacacagtctcactgtgtcacccaggctggagttcagtggtgctatctcagctcactgcaacctttgcctcccaggttcaarcaattcttatgcctcagcctcccgagtagctgggattacaggcatccaccaccacacccagctaatttttgtatttttacaagaaacagggtttcaccatgt

SEQ ID NO: 71180 - DNA, 1834 bp, Homo sapiens
gggatcctggtgacactgttcgcatctgcatctggccatcccaagccacaaatcctggactttcccattgatgtaaaccaataaaatctccttgcctgagctacaggaggttctgtttctttcaaatgcagacaaaatattttgacaaattacctctccaggcaattgcttctggtgttttttttttccactctaaattcaactttctaggctacctaagtcctgctgccccatagcagatctcctaacgtctccattatctgacctgttaccaggacatctgggtctccttctgtaggacttgttccccagcctgagacttgatgcctgtctccccatgttaagcccagtgcccgtcatagcaggtgcacaaaagtggtttaaacttgtgcctcctaaacctgcaccccccacctcaacatctaaagcagcatatgaaggtcaataattgtgtactcatctttggaggaatgagaccccctccagccccagctggtctcaccttcacacctccacatgacctcagaaaaagatgctggcatctaagcatgttacacagggcacctggcttgacctctctttgtcaacagaatcagggtgcatctcagaagacctgtagaggaagactcccttcaaaagcccagagcatatgggctgaaggtcacttatcttccatctgtgatgccccacatttcccctggggctttgccatccattggcattgtcattctctctaattaggtaagtcgagagagttggggaagggggagaggaggaaagagaggagagagaactggagaatgcgcattcctaaagatccatgcacaacacatttggagttgccaattcatggcacattttgtaaatttccattacaaaggacagaattgtatcccattccaatagaatgcaaatgaattcctttgtgtgtatattcaatttaaagaaaaatatataaataactgtacaggtggtggaatgattatgatgaatagaggagcctggatcctgagatccacaaacaaccatcattatcttcttgagtgacctgaggtgagtaacttaacctctgtgaacctcggtttatttgtctgtaaagcaagaatgatgcacctgccccacccttctgaactaacagaatgaccgaggctctgagcagccaggggtgctgtgagatgatttatgagccttgaccttgggctgctactggaaaatcaaggctccaccactgcagtggggctcttactaacaaggcttggtagcctattttggagtctgtcccaaaagactgaaataaattaacttcatgagggattttttcccccaaaatagctataatctataccatcagtcatgacagagcacaaaaattcaactgcctacagggctcagtggtcccataagttatggaaaaaggcaaggtataaagcaatagggaagggtgaagactgtggcaaactgttgaatccatgcccttgccccatcttaggggccaccaagctctactagcaggctgtcgcatggggctaagactcaagattgacagaaattcccatttttttagtagaaaccagaagggttgatttttacatgaaatctcctctggttaatwtttttttaatttgacgactcaatgttaaaacttttgtaacactttgtgagagccaaaacaatgtatctaggagctagatttcacccacagcccaccaaactctgtttagcaatattgcaatcttcctgttttgattccatttttcaagtgtgtaggttatgttgactttatgtcaaaaataaaagcaagtaacccagcaaatgccctcaatttgaacagggg

SEQ ID NO: 71181 - DNA, 1053 bp, Homo sapiens
taactttattacataaaaatgacaaaaacaagcaaaagctaacactacttaagagttatttagcatatccagagtgatagtaaccaactgggccttttaatagattaaacacttgaccaaattaataatataaatttataaggaaaacaataaagactttacaaaaatgtaagtttatcaaaccaattcctttcaatcatgtttttaatgttgtgcttctttaactgggatatattcactctaggggcatttaattccaatgtaattactaacaaatgaaataaaaacaaactgcaatattaataataacaaatgcaaacaaaagggttatgatccatatgaaagccaaacaaattaagtattagggaataaaattaggttagcatctttccaatagagaaaagcaagtattttgattaattaacacaattattaaagtattcatagtagatatttgtgatagcatggaaagagaaatgtactggaggttgaagcctcatttaggtcctagccctgccattaagtgaatacgctttaattatactattctaggcttcagtcctctcatttataaaatraagaagataaattcaatgacactgaaaggccatcccactcacaacaaaaacctatgaatctataattcttcgttcctagagaacgcagactcggggactcaatgaactctcaaaatgtataacaatcattctcaggtctcaaaaaagtaaaatgattaactcaatatttaattatatctcataaatcagaacttctatccaaccaacatgagtaatttcttatatttagtaattacatttttttctttgtacattagccaaattcatgttccactacaaagccatttcttataagacttcttccatttagaacctaactactcctgtaaggactaataaaaataatatttgtaagtctgaatgttattttgaatgacaattccatgaagcctgggccaagaaaatccaccaggcctacttattccaccactacactcacggtaaatttgttctgctccacacacaattttctccc

SEQ ID NO: 71182 - DNA, 521 bp, Homo sapiens
atcccaaatagctragactacaggcacacgccaccatacacaactaatttttgttattttttatagagatggggtttcgccatgttgccaaggctggtcttaaactcctgagctcaaacaaggagcttgcctgcctcagcctcccaaagtgctgggattgcaggtgtgagccaccttgaccagcctacattggtatagatttaaactctagatagttaaaagataatcactgaaaaaaacaaagaaaaaaaactgaaaaaaaaaaataagaaatcgtattccccaaaatgatcttatgacaatactggagagaaagccaatactgtacgacaaaattaaaagttataaaagtgtattttagatcagtgatgcccttaaatttttctaagagtatgtaaacacgtagttataactgttaaaacacaagacattatgtctcaaatatttgtctctactcctgaaggaattacttcctgtcctgtctctatcttaaccatttactttttttttttttttttttt

SEQ ID NO: 71183 - DNA, 521 bp, Homo sapiens
atcccaaatagctaagactacaggcacacgccaccatacacaactaatttttgttattttttatagagatggggtttcgccatgttgccaaggctggtctyaaactcctgagctcaaacaaggagcttgcctgcctcagcctcccaaagtgctgggattgcaggtgtgagccaccttgaccagcctacattggtatagatttaaactctagatagttaaaagataatcactgaaaaaaacaaagaaaaaaaactgaaaaaaaaaaataagaaatcgtattccccaaaatgatcttatgacaatactggagagaaagccaatactgtacgacaaaattaaaagttataaaagtgtattttagatcagtgatgcccttaaatttttctaagagtatgtaaacacgtagttataactgttaaaacacaagacattatgtctcaaatatttgtctctactcctgaaggaattacttcctgtcctgtctctatcttaaccatttactttttttttttttttttttt

SEQ ID NO: 71184 - DNA, 882 bp, Homo sapiens
ttaattaaatatatatatgtgtgtgtatgtgtgtatatatatatatatatatatatataatgaatatgtagacctcaaatgtaaagagtagttacacttggtaggtggaattatgtgagaattctcttcctttttatatatatctktatattctaaattgttttttagaatagatatgatagtttagatatatatttaaaaaaataacagattataaatgtttacttaaagttttataattgagtaatatttattttctggctcaccatttgtaaaatataatatctattaccaagcaaatactttaataaagttttgtaagaaatattacaactactgctactattactaaaaacaattgccctcaaagagcttccagtttttaacaatcttatgtggatctaggcaatcacatttaggggataaaaaataaagttgaagtgtacaagaagttttttttaaaacatggtcttttattgtacctttgaaaaagatagagacacatagatcttaaaatataattccagggagggaattctgatacctgtaacaaatatattctaagatagagtttactgtagttgataaaagccaaggatcaacctcctctgggaggcagacggtgactgttttcaactacctggaggggctttgagacatgagggattcagtttttgcaactcagaaatttcaaatgtagtcaggaaaaataaaaaataccatacgtgtcacttgctctttcttctttttgtgactcttctgctgtgtctttttttcttttctgtgggtctctcttctttcatcctctgccttttttttttttttaatctcctggcctactagaaatgactgagttaatacctaccagagtgaagtactcat

SEQ ID NO: 71185 - DNA, 882 bp, Homo sapiens
ttaattaaatatatatatgtgtgtgtatgtgtgtatatatatatatatatatatatataatgaatatgtagacctcaaatgtaaagagtagttacacttggtaggtggaattatgtgagaattctcttcctttttatatatatctttatattctaaattgttttttagaatagatatgatagtttagatatatatttaaaaaaataacagattataaatgtttacttaaagttttataattgagtaatatttattttctggctcaccatttgtaaaatataatatctattaccaagcaaatactttaataaagttttgtaagaaatattacaactactgctactattactaaaaacaattgccctcaaagagcttccagtttttaacaatcttatgtggatctaggcaatcacatttaggggataaaaaataaagttgaagtgtacaagaagttttttttaaaacatggtcttttattgtacctttgaaaaagatagagacacatagatcttaaaatataattccagggagrgaattctgatacctgtaacaaatatattctaagatagagtttactgtagttgataaaagccaaggatcaacctcctctgggaggcagacggtgactgttttcaactacctggaggggctttgagacatgagggattcagtttttgcaactcagaaatttcaaatgtagtcaggaaaaataaaaaataccatacgtgtcacttgctctttcttctttttgtgactcttctgctgtgtctttttttcttttctgtgggtctctcttctttcatcctctgccttttttttttttttaatctcctggcctactagaaatgactgagttaatacctaccagagtgaagtactcat

SEQ ID NO: 71186 - DNA, 650 bp, Homo sapiens
actttgccctcttctccacagtatgctttcttcctaggctggttccccttctgggcccaaaatgatggccacaggtactataggcaggcagcaacattcagatgaaagaatagaaacttctctgtcttgtatcctttctcaagaaaacccaacagacctccctcaggtctaattggagagaattgcatcaccatcacttggtttagatccacaaggacttagatactttgagatacacccscttgggacggggaggtctcagccttctgtgaaggccaggccagctccaaggaggtctggtaagaaggaaagtagagaactgtggttgcctgggaggccaatggtgtctgctacaaatacgtaattcagagaaaataagaaaaatgataagaaagtttaatagaagaaaagagggccaggagacaatggaaaggccaggcctctgtgtgagaagtcttcgaaagacaggactgtcacatgccacaaatgtttatttaaagcaggcctagggaacctgcactgcctgcccctgtgtttaactttccagctattggagcagcaggctcctttgggtctccaactgaagagagcttataccaatttgttaggataaggaaggacttgctctaacagttcaaaggactccacag

SEQ ID NO: 71187 - DNA, 672 bp, Homo sapiens
tattagtctttttcttgagttaagatgaactcctccttctcttcatttcactttctttttaaggtacacactgaaatatccacagggagcaatttgcactggtctgtgtcacttctcttattaagtagaagaaagataacatgagtcacctttgtaaccctacgggtgtgcaaagtctcttgagcaaacattcacttgttaacctccagatgatcagtcagcctacatgggtgttacatttcatggggaaggagaccttagatctacagcagagagccgtatcgtgttcaggaggattcctattattaaacttattatttaatcaatttgcatttaaccattgaactgacagacataaggccttaagttaatcaccttaaagggaaatcagtagtcacatgaagagccacagctcctcttggcctaaaaatgtggaattctaagacaataaagtgacttaggaagtcacaaaagggtttttctaaggaaacaaattgttcccccattgrtctcctctttaatgacttacagctgagcgtagagatctaaaaagacttttgttccttctacctgagaaagatgaaacagaactagtcttttgagagattgtttaagggagagtggctgaaggaccacgggcctttgggagccagggtagctgtcattgttgga

SEQ ID NO: 71188 - DNA, 1253 bp, Homo sapiens
cctggaattccggctgtgatccatttgaggcatgatgggctctcagagaacattaggcagccgctgggaaagaaaattcagctggagaaaacagctgtatgtggagtgctgaggccaaactccagcaacgcccacacctgggggtggagaaggatggacccaggagaaggtggtacccccccaactcagctcacatggatatgagaactgatgaaggaggaccgagctgggcagtggtggtgtcttgatcgggcatgtggaggggcaggtcaggtccctcccagctgtgctttgtggcacgtcaggccggtgcgtgatctcctgttttggcttctggccaggccactagcacccatccgaaaaccatcctcatgattgcatcctgccgtcagcttccctactgacctggctgctgagtctgcttgtgagcagctctcggttcaaggctgcagccctcgcttctgttgggcaggtgcctgtaggtgcagaagcaggcctccagctccatgcaggccactggccctcccctgcctggtacccaggcaggtctgctcaggggcgcagtggtcatgtcccagagccatgtgctctttgctgctttgtcctacctgctgccccgttcctcgcccaaaacaggctcctcccctgctaccttgcacaagcaccgaggacaagccctagactccacctcatccaagcaggagtctagggcttgtcctaggtgctccccaacccaaccagccagacgctgttcataccccttttgttacttctgagctgccctgtcccctgccatcaccttaattctcatcacttggacagctgcagtaaccacccagcaggtctccctgccttttctcagtgccaccaacaagaccctgataccccttgttcttaaccactccctgggcccatcatgccatgtgcctgtgtgagtgcagactgcaggtgccactccccacgcccaacacacacgcccttccggattccccacctccaccactgctcagcacatgctgattctgcccttcccccgaggctgggaactccttaaagaggggtgcagcatcctcctctgtctgagtggacaggctgctggtgcgtagtgggtgctcagtaactgtgagcttgttactgagagaagatascggatttaccattgccacaaatacacgtccctcccacagctttgacgtctcctgctctccagctccctcatgtcccagtagtgggcacatgtggcactcctagaa

SEQ ID NO: 71189 - DNA, 1253 bp, Homo sapiens
cctggaattccggctgtgatccatttgaggcatgatgggctctcagagaacattaggcagccgctgggaaagaaaattcagctggagaaaacagctgtatgtggagtgctgaggccaaactccagcaacgcccacacctgggggtggagaaggatggacccaggagaaggtggtacccccccaactcagctcacatggatatgagaactgatgaaggaggaccgagctgggcagtggtggtgtcttgatcgggcatgtggaggggcaggtcaggtccctcccagctgtgctttgtggcacgtcaggccggtgcgtgatctcctgttttggcttctggccaggccactagcacccatccgaaaaccatcctcatgattgcatcctgccgtcagcttccctactgacctggctgctgagtctgcttgtgagcagctctcggttcaaggctgcagccctcgcttctgttgggcaggtgcctgtaggtgcagaagcaggcctccagctccatgcaggccactggccctcccctgcctggtacccaggcaggtctgctcaggggcgcagtggtcatgtcccagagccatgtgctctttgctgctttgtcctacctgctgccccgttcctcgcccaaaacaggctcctcccctgctaccttgcacaagcaccgaggacaagccctagactccacctcatccaagcaggagtctagggcttgtcctaggtgctccccaacccaaccagccagacgctgttcataccccttttgttacttctgagctgccctgtcccctgccatcaccttaattctcatcacttggacagctgcagtaaccacccagcaggtctccctgccttttctcagtgccaccaacaagaccctgataccccttgttcttaaccactccctgggcccatcatgccatgtgcctgtgtgagtgcagactgcaggtgccactccccacgcccaacacacacgcccttccggattccccacctccaccactgctcagcacatgctgattctgcccttcccccgaggctgggaactccttaaagaggggtgcagcatcctcctctgtctgagtggacaggctgctggtgcgtagtgggtgctcagtaactgtgagcttgttactgagagaagatacmggatttaccattgccacaaatacacgtccctcccacagctttgacgtctcctgctctccagctccctcatgtcccagtagtgggcacatgtggcactcctagaa

SEQ ID NO: 71190 - DNA, 1253 bp, Homo sapiens
cctggaattccggctgtgatccatttgaggcatgatgggctctcagagaacattaggcagccgctgggaaagaaaattcagctggagaaaacagctgtatgtggagtgctgaggccaaactccagcaacgcccacacctgggggtggagaaggatggacccaggagaaggtggtacccccccaactcagctcacatggatatgagaactgatgaaggaggaccgagctgggcagtggtggtgtcttgatcgggcatgtggaggggcaggtcaggtccctcccagctgtgctttgtggcacgtcaggccggtgcgtgatctcctgttttggcttctggccaggccactagcacccatccgaaaaccatcctcatgattgcatcctgccgtcagcttccctactgacctggctgctgagtctgcttgtgagcagctctcggttcaaggctgcagccctcgcttctgttgggcaggtgcctgtaggtgcagaagcaggcctccagctccatgcaggccactggccctcccctgcctggtacccaggcaggtctgctcaggggcgcagtggtcatgtcccagagccatgtgctctttgctgctttgtcctacctgctgccccgttcctcgcccaaaacaggctcctcccctgctaccttgcacaagcaccgaggacaagccctagactccacctcatccaagcaggagtctagggcttgtcctaggtgctccccaacccaaccagccagacgctgttcataccccttttgttacttctgagctgccctgtcccctgccatcaccttaattctcatcacttggacagctgcagtaaccacccagcaggtctccctgccttttctcagtgccaccaacaagaccctgataccccttgttcttaaccactccctgggcccatcatgccatgtgcctgtgtgagtgcagactgcaggtgccactccccacgcccaacacacacgcccttccggattccccacctccaccactgctcagcacatgctgattctgcccttcccccgaggctgggaactccttaaagaggggtgcagcatcctcctctgtctgagtggacaggctgctggtgcgtagtgggtgctcagtaactgtgagcttgttactgagagaagataccrgatttaccattgccacaaatacacgtccctcccacagctttgacgtctcctgctctccagctccctcatgtcccagtagtgggcacatgtggcactcctagaa

SEQ ID NO: 71191 - DNA, 651 bp, Homo sapiens
cttctgtagaagtcccctgccccttcccaccaccagaatgcattaaaagactgaaggggccgggcatggtggctcacgcctataatcccagcactttgggaggctgaggcaggtggaacacctgaggtcaggagtttgagaccagcctggccaacatagtgaaatcccatctctgctaaaaatacaaaaattagccagatgtgggggtgcacacctgtagtcctagctacttgggaggctgaggcaggagaatcacttgagcccaggaggcagaggttgcagtgagctgagatcacaccactgcactctagcctggcgacagagcgagattscatctcaaaaaaaaaaaaaaaaatactgaagggcttgttggctgtcagcttcccccttgatgttggtgagaagcggttggtggtgggggtcttgcgtcctgaggtacagatctgatcttccagccaagcccccagactagaactgcagggcctgcctgccagtctggctgagaggcagccagctgcaggggagagatggatgagagaaaaaagcatgcacgaaatatttcattcccatccatggttctttccgtctcactctgcccttgagtggggtgtgctggatgttagagacgggaggtggagaaggcccctgctt

SEQ ID NO: 71192 - DNA, 651 bp, Homo sapiens
cttctgtagaagtcccctgccccttcccaccaccagaatgcattaaaagactgaaggggccgggcatggtggctcacgcctataatcccagcactttgggaggctgaggcaggtggaacacctgaggtcaggagtttgagaccagcctggccaacatagtgaaatcccatctctgctaaaaatacaaaaattagccagatgtgggggtgcacacctgtagtcctagctacttgggaggctgaggcaggagaatcacttgagcccaggaggcagaggttgcagtgagctgagatcacaccactgcactctagcctggcgacagagcgagattgcatctcaaaaaaaaaaaaaaaaakactgaagggcttgttggctgtcagcttcccccttgatgttggtgagaagcggttggtggtgggggtcttgcgtcctgaggtacagatctgatcttccagccaagcccccagactagaactgcagggcctgcctgccagtctggctgagaggcagccagctgcaggggagagatggatgagagaaaaaagcatgcacgaaatatttcattcccatccatggttctttccgtctcactctgcccttgagtggggtgtgctggatgttagagacgggaggtggagaaggcccctgctt

SEQ ID NO: 71193 - DNA, 1295 bp, Homo sapiens
attatagcacagtgtccgcaatcaagaagacctcattgcatatctgaaaacttactgttacatctgacttttagaagaaagttggcaaacccgaatgtctcacgtctataatcccagcactttgggagagcgaggagggcagatcacgaggttgagagatcgagaccatcttggccaaaatggtgaaacctcatctctattcaaaatacaaaaattagctgggcatgatagtgcgcacctgtagtcccagctactcgggaggctgaggcaggagaattgcttgaacccaggggacagaggttgcagtgagccgagatcgtaccggtgcacttcagcagcctggcaacagagcaagrctctgtctcaagaaaacaaaaaaaaaataataaaatcagaataaatgatgacagagtatcttggaactgatgaaggactaatatttcacttatacaatgatttctacaattcaggcaggagaattgcttgaacccaggggacggaggttgcagtgagctgagatcataccaatgcactccagcagcctggcaacagagcaagactccgtctcaaaaaaataataataataataataaaatcagaataaatgaggacagaggatcttggaagtgatgaaggactaatatttcacttatacaatgattctacaattcacatatgacttctatgaagtcatatgaagtcttcatggagacttcacagtagtctctatgaagaattagatttatttggagacaaaacttttgagcttagatcagtaggaagaaaacggaaatgggcattttgaatgaatagcaaaaagcaatttcttacaatataatttcccccaaattcagttggctgttttcaagacggtaacttcttccttgctgaaagtttgaaagccgaggctgctggccaggcactgtgaccgtgtctataatcccagcactttgggaggccaaagcaagaggataacttgaagctggaagtttaagactagcctgggcaacatagtgagaccccatgtctacaaaaaaaattaaaataattagctaggcatggtggtatgtgcctgttatcctagctactttgggaggctgagaagggagactcacttcagctcaggagttcgaagctgcagtgagctatgattgcacaactgtactccagcctagatgacagagtaaggtcctgtttctaataaaaataaaaataagtaaataaacttatttttttaaaaggaagcaggggctgaaagaatgtgcttcaaggagaatttctaaggagtccatgca

SEQ ID NO: 71194 - DNA, 556 bp, Homo sapiens
tctgatatttctaattaccttttytttttacaactgagaaaagactgttctttgcaatctctgctcagacacaagagttcctattgtctctaccactgaatcaatataaattaatacatttatgcgttcttatctagatcacagacaagtagctgaagtccattttcaatatgcattcactgccaattaagcactatacttgccgctagaatacccagaggaacaaaatataaactctgtcctcaaggagcttgttggctaacagcatttcttcaagggggagctcttggcattcagggtaaagaaaccctttattgtgcaagactgccctgtgcctttgcagggcatttggcactgtagtttgaacccatcaaatatcagtaacagccttctgttattgtggcaaccaaaaatctctcttcatatttacaaacaagcattggggaagtagtactgtccctgtttgagcctctgatgagctgcttaatgtcagcctggatgtctggatacaacacatctatcctgcctctgaaaatagactcacggactgaaccct

SEQ ID NO: 71195 - DNA, 730 bp, Homo sapiens
aaaatgttttgactttgtgtctttacctctatgcttgaagcccagctagctgcctggtttctctttcatgggcaaggtgtcctttcttatacagccttactttgaatttttactaaacactttacttgtttgcaaactgtattttaaagctgtggctctaatctataagacttgagcttccagacaaatacagtatattggcaacttgaagatgaatggaatcctttctttcctgtattaaagtagaggaggtccattatttctcacagcaaggctgctacagcaccacagcccttgttcacacattgctttgtattatcacattgcagcatctagagaagccaaattagcaataagcagaatgggactgcatggctctgctttggggcacaacataccttcaaggggtgaaccccaaggtagaaagagagcaamgcctatcagccatcttaaaaatttctttccaagtttgcctgcctgctttttatgttgataaattatgcacaatcatataaacaaagaagtagtctcaaaagaattgatttgcccaagattatgcaaatgttagaagcataattggaacttaagcccaaatcttctaacatctattcctagttctttgtggtatagcaatgctaatgaaatgtaagaaatacttactgatcatctcttacactggcatatataaggcatggtccttgctcaaaaggaccttacactctatttttgg

SEQ ID NO: 71196 - DNA, 788 bp, Homo sapiens
  misc_feature (1)...(788): n = A,T,C or G
cnnnnnnnnnnnnnnnnnnnnnnnnnnnnnnnnnnnnnnnnnnnnnnnnnnnnnnnnnnnnnnnnnnnnnnnnnnnnnnnnnnnnnnnnnnnnnnnnnnnngcattcctccagatactcacccagatatacatgtgtcgccttcactgaaaactatgagggccagggccatgacccccctagctcacagctgcgtgtctgatccctggtacagaggtttgctaggcagagtaccgggaatagtctaggaaaagcctcaggggcaggagtatgagaggtgagtgtgaggagtggccaggtgtcccatgtggctggaaatgagacacagttcggggrgcaggggaggaagggaaaaacaggactgaggatgggcctggttggccatggctttgagtgtcatgctagggaatgggtattcagggcccagcagctccgtgaagttcatcttcctcctactctcctcttcctcctctccttccctccctgcactcctctgctcacccccatgtgtcatgatggcagatgggatgtcagatattgatgaagggggcaaacacagggcaggagggaggtgggtgccatggaaaacacgtggctttgtggccttgtagccaggtaggcaggtcttgtttgaaatcctggctctatctccacactggaagacctggctgagtcactgattttctgtgtgcctcagtgttcctagggccagggagaagaccagatggttttgtgttttttttgctgttgttattgtttttgagatggactttcgctcatcgcccaagc

SEQ ID NO: 71197 - DNA, 615 bp, Homo sapiens
ttcatgagaaaagccagccaggtagagcctgaagctgtgatcactccagtggtgaagggtgcagctctggttcttccagagagactgcccccttccctccagyggcactccaagtcccccccatgttggaaagaggaacagggcttggattgatgtttataccctctgaattggaggggcagtgccagggcatttgcagaagctgggaaggaccaagcctcagcaccccagggctgcggggctcttgttggccgcacgtggcagtgcagctggagaggaagcctggggcacgtcctgtgcggtgccaccaaggccccacccctgccccttttccttccaggttctgttactcacagaagtgtttctggtgggctctgcgggagaagacactaagggccccacaggcttgtttcatggtgttgcaagccaagctggcccctgcctgttcctgtagctctggggccaggtcagccgtggccccacctaccagaactgtgctctgctggcagctgtgcttttgccaaacccagggcctcagcgaccatgacttctgctaaaaagcaatcatgagtgcgtggctggggacagacctctctgaagtgtctcctgttgtga

SEQ ID NO: 71198 - DNA, 585 bp, Homo sapiens
tggcattgcaggagctcccagagagactgccttccctacactagaagtccccacaaaggcttctgagaccacaaaatacaaggccagacctagagtgtccacagcaggcctgtgctgcccgcctcaggaggtggccgactgctgctagcggcctgccgccacgtcagcagcccagggcacagcgctcgaggtgtgctgttaggctaagagggtgcagggctagacacgaagcttaaactattcatcttattaaaaataaaacccttataaaactcctcactttgaatgcagtaagttattggccattaaaattttytcaacaaaaaactgcacccaaatggatggtagcaggtattcaactgaaacaaaacctagaaggaagaaatctaccttttaggccgagcctgtccctcagtcctgggaagtacggggtgggggtgggcctgggcggggtggggaatcctcactggcccacttgctgcaggagtgcaaagccctggtcctgacaccttatggggaacgcgagtggcaggagacatacaggtgagcagggaagggcggtggaaccctcacctatcacccact

SEQ ID NO: 71199 - DNA, 585 bp, Homo sapiens
tggcattgcaggagctcccagagagactgccttccctacactagaagtccccacaaaggcttctgagaccacaaaatacaaggccagacctagagtgtccacagcaggcctgtgctgcccgcctcaggaggtggccgactgctgctagcggcctgccgccacgtcagcagcccagggcacagcgctcgaggtgtgctgttaggctaagagggtgcagggctagacacgaagcttaaactattcatcttattaaaaataaaacccttataaaactcctcactttgaatgcagtaagttattggccattaaaattttttcaacaaaaaactgcacccaaatggatggtagcaggtattcaactgaaacaaaacctagaaggaagaaatctaccttttaggccgagcctgtccctcagtcctgggaagtacggggtgggggtgggcctgggcggggtggggaatcctcactggcccacttgctgcaggagtgcaaagccctggtccygacaccttatggggaacgcgagtggcaggagacatacaggtgagcagggaagggcggtggaaccctcacctatcacccact

SEQ ID NO: 71200 - DNA, 705 bp, Homo sapiens
atcccagctacttgggaggctggggcatgagaattgcttaaacccgggaggtggaggttgcagtgagccgagatcatgtcactgcactccagcctgggcaacgaagcaagactctgtctcaaaaaaaaaaaaaaaaaaaaaaaagagaatctcacctgaaaaatgggaataacaggatctacctcatttaaccctcataacaacccmacacggctggctcctagttccattttacgtaggaggaaactgaggaacagagagttaaatgacatactgatgccacatgaccaggaaagaccagagctgggattggaactcagagagcagcacacagtccggggtcttagccacttccccacactgctgcctgagtcacctcggcatgggaagccagccccaagatcctcgtggtgctgggattctgggggtctccctggtggcttaacagtgtatggatcaacaaaaaggagggaggctgaaggcaacagaaacattcttggggctgcagcatgtggcttcaggcacacaggcagcagggcagcgaggattaaggatgtgtgcaggcccagccccaagccctgtgagggtgggccacagtcaggccgggcacagagagagctcaacaacatgtgaagacagaaaagaaggaaggggagaagggaggatagaggagaagaaacatggtccctggggcctcatggagaa

SEQ ID NO: 71201 - DNA, 1278 bp, Homo sapiens
gcactacctgcccaacagggcttcagcacagaatcccactgggagcccagtcccctgccccgaggtcctggtagcagccagctggtcctctgtctcactctaggagtccctcctgcccaaccgggtgctgcagtcggtcctgaagcaaggctgccctaaggggtaccatctcctcctggcctccgcaacactgcagccagataagaggtgaacactcgcgaacccaaggccaggggcacacatgggccaggcaatgaggagcgtccttccttgccccacaaataaaggcacatcccaggtggctgggacctgccagtaggtgtcacaccacaagcctttctgggtacctggttgctggtctctgggggttcctggaaggaaggggatggagacacagccaggatgaggctgaggggtggggacagggcatccctggggttcaggacttgtagtgaacccctcttctggaaggtgggagaccctgccacatacctgaaacctgggaacatgctgggcacaatggtccatgcctgtaatcccagaactttggaaggctgaggtgggaggatggcttgagcccaggagtttgagaccagcctgagcaacatagaccctgtctcttaaaaaaagaaaaaaaaatagctgggcgtggtgctccacgcctctagccccaggtacttgggaggctgaggcgggcagattgcttgagcccaggtggttgaggctgcagtgagctgtgatcccgccactgcactccagcctgggcgagagagtaagaccttgtctcaaaaaacaagcaaacaaacaacaacaacaacgaaacycaaaaaacttgggaccaagcctctgttgacctagatcagcccacacctgaagcaggcacctgctggaaactcagcctaggggtggagaacccccaccccaagcctctgtcctcccccaccaagcctccatctgacatccacaatggagtgagggcgtccagactccagccgagggaagagagccctgtgttggtctcatgcgtttccccggaagggttggcaccctctggtcccagaaggcaaagcacctgtgtgggacgggctggggcccacggtttctctcctagtctggggatgagggggtggatgttcaaatctgcatcaggaggtggcgaaagacaaggtggcagaccctgcccaccaggtttgcccctgccacacctgcgttccagccccctggagaaagtttgagccgccgcctctttccctgaagctgtcagtggcccccagaccc

SEQ ID NO: 71202 - DNA, 498 bp, Homo sapiens
tttttkgtttgtttgagaagacccattatggctttcttgtttatatcaatataggaaggaagctgtcaaaagtacacatgaatcacagctctccagatgcctggttcaaatttcaaagatgactttatcttctgcaaacttgttttgccttcctggtggcctttcttgctctattttatcttgttttgttttttaagcacgagagcattcctttaccttaagtcccacagggtgctgatatagcatcccctgaaggtgggcttcttctccattcaggtggggatgcacagctacagcctccaaagggggtggatgggggtggtcagtttgccagccacgccagatgacatctctcgccactaggggcctccctaagagaagtgatcagcgttctttctggacattaaaactcagcttgtttcctcgatgtatggcctccaggggcgtgtcaagcatttgatgacccacagcagccccagactgtgtgaggctgggcag

SEQ ID NO: 71203 - DNA, 1103 bp, Homo sapiens
tcctgacctcaggtgatccacccacctcagcctcccaaagtgctgggattacaggcgtgagccaccatgcttggccttgctgttttctaataaaattttatttacaaaaacagctagcatactggatttggaccacaggtctatgccaaccactgatctaaatcataggcatcctcataccccagtgttagaaagacctcgttgtgtttgcaggagccctgacctgaggaacagcccagggcagcaagaggagcgtgggtgcttagaaggaatgtgtaagtgtgcttggcataacccagggcatgtgaagtttttttccgacttcctccttcattctatctcttctccaacccaagcttttaatcaaaagattaaccaggcatggtggcgggcacctgtagtcccagctacttgggaggctgaggcatgagaatcacttgaacctgggaggcggaggttgcagtgagccgagatcatgccactgcactctagcctgggagacagagtgagacggggaaccaggacagtgcaccgcagagaggatgtaagaggcaggagggaaaaggagtgaacttggacataagcatgaagaaacctcagagtgtccatgccagaaggctttttggaattgtctggtccaaagagcaaataggtaggaggtactctttcttcccacttcccacacccacaggagacaccagatccatcatggtaccacttcctgctgcataggagctggtctcagtatcccctcaccacaggaatatgccctcaaggtgccaacacctgatctggtccaacccctcaactgtcaagtgagraaactgaagaccaaggaggaaacaagttctggagtaatttttagtgagtgcaaaagccaggtcttcacttctcccatctgtcattttttttaaagcatgtgtggatgatgccacgaatgcccacctgggaaaaggggctcaagggaggagagggagaggaatgagcatcaaaggggaggtaagagttgaagaagacgtcagccaatggggttactgaccagtgggtccctgctgaaggctggctccaggccaaccctctgaaagtcattctccaaatgcaaa

SEQ ID NO: 71204 - DNA, 1061 bp, Homo sapiens
ctgaggcaccagatgagccaggagagccttctgcagagtcacctcttggttctcctgtttcagcascagcgggaggcccttcctgctctatgtggctctggcccacatgcacgtgcccttacctgtgactcagctaccagcagcgccacggggcagaagcctgtatggtgcagggctctgggagatggacagtctggtgggccagatcaaggacaaagttgaccacacagtgaaggaaaacacattcctctggtttacaggtaaagtagtaaaagccagccagcctaactgccatttaatagacaaccttgcacattacctgtgaagagcagagtctggccccgtgatcccctttcataggtcaggaggcttgctttgaacttgtggcccagataaggcttgctggcctgaatgctgagcacctgtccattggggcctccaaggccaagtccctggaaaggtttgcacacacagagcagccaccttgctggcccgttgtgtgtcgattcaggctatctgggtattgctcttaattgccattgaatgacattgacattgtgagcctgtgttgtccctgtgcagttctaagatttccctcttctccatcttccctggtcccaaagattctacttgctgccactccccgtgtcacgtcttttggctgagtggccttagcgagctgaactagtggcctctttaaaggcctcacacatgcattgtgtattttaggtttctgtctggagcgactgcagaggttataagcactgcttttggccaggttgactcacacctataatctaataacagcactttgggaggctgaggcaggcggatcacctgaggtcaggagttcgagaccagcctggccaacatggcaaaaccctgtctccactaaaagtacaaaaattatctgggcatattggcacacgcctgtagtcccagctactctggaggctgaggcaggagaatcgcttaaacctgggaggcggaggttgcagtgagctgagatcgtgtcactgcactccagcctgggagacagagcaagactctgtctcaaaaaa

SEQ ID NO: 71205 - DNA, 1061 bp, Homo sapiens
ctgaggcaccagatgagccaggagagccttctgcagagtcacctcttggttctcctgtttcagcaccagcgggaggcccttcctgctctatgtggctctggcccacatgcacgtgcccttaccygtgactcagctaccagcagcgccacggggcagaagcctgtatggtgcagggctctgggagatggacagtctggtgggccagatcaaggacaaagttgaccacacagtgaaggaaaacacattcctctggtttacaggtaaagtagtaaaagccagccagcctaactgccatttaatagacaaccttgcacattacctgtgaagagcagagtctggccccgtgatcccctttcataggtcaggaggcttgctttgaacttgtggcccagataaggcttgctggcctgaatgctgagcacctgtccattggggcctccaaggccaagtccctggaaaggtttgcacacacagagcagccaccttgctggcccgttgtgtgtcgattcaggctatctgggtattgctcttaattgccattgaatgacattgacattgtgagcctgtgttgtccctgtgcagttctaagatttccctcttctccatcttccctggtcccaaagattctacttgctgccactccccgtgtcacgtcttttggctgagtggccttagcgagctgaactagtggcctctttaaaggcctcacacatgcattgtgtattttaggtttctgtctggagcgactgcagaggttataagcactgcttttggccaggttgactcacacctataatctaataacagcactttgggaggctgaggcaggcggatcacctgaggtcaggagttcgagaccagcctggccaacatggcaaaaccctgtctccactaaaagtacaaaaattatctgggcatattggcacacgcctgtagtcccagctactctggaggctgaggcaggagaatcgcttaaacctgggaggcggaggttgcagtgagctgagatcgtgtcactgcactccagcctgggagacagagcaagactctgtctcaaaaaa

SEQ ID NO: 71206 - DNA, 1061 bp, Homo sapiens
ctgaggcaccagatgagccaggagagccttctgcagagtcacctcttggttctcctgtttcagcaccagcgggaggcccttcctgctctatgtggctctggcccacatgcacgtgcccttacctgtgactcagctaccagcagcgccacggggcagaagcctgtatggtgcagggctcygggagatggacagtctggtgggccagatcaaggacaaagttgaccacacagtgaaggaaaacacattcctctggtttacaggtaaagtagtaaaagccagccagcctaactgccatttaatagacaaccttgcacattacctgtgaagagcagagtctggccccgtgatcccctttcataggtcaggaggcttgctttgaacttgtggcccagataaggcttgctggcctgaatgctgagcacctgtccattggggcctccaaggccaagtccctggaaaggtttgcacacacagagcagccaccttgctggcccgttgtgtgtcgattcaggctatctgggtattgctcttaattgccattgaatgacattgacattgtgagcctgtgttgtccctgtgcagttctaagatttccctcttctccatcttccctggtcccaaagattctacttgctgccactccccgtgtcacgtcttttggctgagtggccttagcgagctgaactagtggcctctttaaaggcctcacacatgcattgtgtattttaggtttctgtctggagcgactgcagaggttataagcactgcttttggccaggttgactcacacctataatctaataacagcactttgggaggctgaggcaggcggatcacctgaggtcaggagttcgagaccagcctggccaacatggcaaaaccctgtctccactaaaagtacaaaaattatctgggcatattggcacacgcctgtagtcccagctactctggaggctgaggcaggagaatcgcttaaacctgggaggcggaggttgcagtgagctgagatcgtgtcactgcactccagcctgggagacagagcaagactctgtctcaaaaaa

SEQ ID NO: 71207 - DNA, 499 bp, Homo sapiens
cgtcacccaggctggagtgcagtggcaggatctcgcgtcactgcaacctccgcctcctgggttcaagcgttttttgcacctcagcctacagagtagctgggattataggtgcccaccaccatgcccggctaatttttgtatttttagtagagaaggggtttcmccatgtcggccaggctggtctggaactcctgacctcaagtgatctgcttgcctccgcctcccaaagtgctggattacaagcgtgagccactgcactaggcccatgtttgtctttataagtcctttttctatctagttcctgctctgcgcaagggatatagggccagagtgggagggtcagcgaaagtgtccaaccagcctggtgaccattaatgctttttctggtttctaggagacaatggcccgtgggctcagaagtgtgagctagcgggcagtgtgggtcccttcactggattttggcaaactcgtcaaggtaaggggctcagctggggttggt

SEQ ID NO: 71208 - DNA, 849 bp, Homo sapiens
tccagacattgcatctatatcaaggcaggaagaagagggacagggctgagtttgttaattgcctttgctgtttttatcaggaaaaaraaaagtgttcccagaagactcccaacagatttcctgtaatatgtggccagaggtggtcacatgcaagggatgctgggaaaatgaatatctggctttctagcctttatagggggagggtagcaagagagttgggaatggcagttgtgtagctaggtgaccgtgtctgtcccatgtgttagtagccactggatttcttagtggaaagttaccaatcctctgtgaatagcatctcatggggccgttaatcacaatggctcacctttccccagccaagccagggtcacccaggccaggccaaccagaatgccccgctgtggcatctgaattaggattgcgtttggctgcaagtaacatgataccagcattcccttcatcagcagtgggtgacaaggaagttcccccagactacaccagggctgccaatcccagtggtccccaaattgttatataagaggctttcacaggtggtgactggaacaaggggtccgggtacagggaggggccttgaggatgtgctcataagcctctaggacagtgcagtttttggaattgtgtgttttcgtactctgtggctctcagaggctgctgtttaccctcaggtgcattcttggcctctgagatgccacggttttaatcctccctcctcaggattcactacccgctgcccctcccgtaccagggcaagccagaccccgtggttctgcagggcatcatccggtcactgaaggaggaactgggccgcctgcaagggctggatggcca

SEQ ID NO: 71209 - DNA, 1238 bp, Homo sapiens
gtggacacctcagtgggaaatcctgtccactgcgtaagcacccaagaaacagttgggtctcctcttttagtgtgaaagtgcagcatctgttcacactgtggggtgagcagtccacagagcagagcccacggttctgcaatccggggctctgccccgtgcccctctctggacacactttggcaaggacatggttccagtccactgctctgtgcccagaggatatctcaagccccacaatcacccaggaaaatggctttagttccagaaccagagagaaaagggaggcttcctggggaaagacaaggacagctagaggttcatttctgcccttggttctcctttctgcacgtcatgtgtaatcctgtctctaaatacctccctggctcagctgggcattctcatgccaactgggatgaagagcagctggttcaggctgtgattggttcctgggacctcttcttcccctactgccaaggctgcagttgccaccaaatgatggtttcccctcccyctgacactgcctggagcccagctgacttcacacttcactcctccctcctgctcaccagtgataagaatagcaaccacagcatcaccccaaacccctccagggtgaaggaaggggcagctgtcaccttaagtgtcaactccaggtccttgtgagctatagaatcaggtttgagaaacaccctttggttggggaagtaagcaccagacaccccctgctggctgaaagtggaattcaggttcgtggtcccgctgcagcctgggagagctccctaatcttcatggacatcattatccccattttccagatgaggaaacagacaaagaatttgcccaaggcaccactgctagtcaatgatgccctccaggctaatcccattccaaatctcctttttctttccgagggactgcctaaatatctagatgttccacacccaacctttcaactctcccttcctatgccttttgattcagtaaatgcaccgtttgtattcccttggaaattccactctggaaggagaatcttttgacagaggcgtgctgcatcctgagacgctgagccgatgcaatcactcattatctcattgatgcagggcagaaggtcccctcccttccagcaggccacagaggaattcctcggaggatgcagatgctgcatgtcttgacttccaagccagggaatttctgcctttgtgcctgcacctgtattaattaatcattcttctaacact

SEQ ID NO: 71210 - DNA, 1329 bp, Homo sapiens
tccacccctatgacacaaacacctcccaccaggccccacctccaacactgggatcaaatttcaacatgagatttggaaaggacaaatatccaaacacatcaagcaccctctaatctagtagctcaatctcagctctcctgcgagctggccctgtggtttttgcacatgcgcttcgtcagtcgagggatcctttctcctttgtgacaatgtgacctctcataggggacatgctgcctgtccagagccccatcagaggcttagctgctcttgctatccaatctctccagggacatcgcaaccctcctcttgcacacccgccgctcatgccctgagtgatagatggtgttgtgtgggctgtgctcctgttacgcacctgccatttgtgccctcaggaataggtggcgttgtgtaggcagtgctcctggtttctgctggagaataactggtccattttgaccttctccaaccccacagtttttacctctcttggactggtgcaggggagcatggctggaggccagccaagtagacattaattcttggtctgtccaacccttgggaaatgctcctttcagcagcgcctccaggagaatgtcccctaattcatagggtcccaccctttaggctttcttactacctactcctggacacaatggctgatccacacgtgagcactggagccatttgggacaatcatggaatcacccggggattttttgaatggagttgatggtgaaatatacagtctctgtgctatcaataaatatcctcctgttctggccggagtcatcctgggagaatggggctgtcatgcggggaggcagatagtgggctcctggtgatacctgaaccttgagcccttctccactgccatttgcttctgtcggcacatccacgtccctcttgaaccacagcaaccaggaggaggccaggcaaagaccctgagagggaggtgaagtggggcacagttgaaaaaacaacacgatttggtaacacacttcaacattgatcccaagggaaggtggattttaaaaaaacatataagaacaagacctttgccactgctcttgtagaagtggaagaacaggacagtggggccaagtgagaggccacctaatccatgggtagtgcctgcgaggcgtctgcaacattgacctggggctctccccactgtgggtgtgtttcctgtgagttcaagggttagtggaaaagaaaacagcaaagcaaggtcatgttaactggaaaatgtgattatcttcaaagaggyaagacaccgtgtgggcttctccagctcacctccaaagaagacacattcattcagatttgcct

SEQ ID NO: 71211 - DNA, 1252 bp, Homo sapiens
gcttgccaaattggaatgcttctcaatagaggttcagatacagagaaaagagaaatgcaattaggccttacaagacatggacttaagccccaggtaacagataaaagctattgtttactgagcacrcactgtgtgctgtaaactgctggactttctttttcatgtactttctcatttcaccctatgacaaccttgcaaggttgacagatgagaatatgtaggctcaagaagtgaagcaacttgcccaaggttacacaacatgcaagcggtagagggaggatttgtatctgggtctcctgactcacagtccaggatttcccaccacaccactcactgttgggcaggctgcaatgagatgcaaaggcagcttagcttaggaggtcggaacacaaccttggagcccacttgcctgagctcaacccagccccatcacgaattgcagtgtgacctcaggcaagttgctttacttatctcggctcaatttgctcatctattaaatggtgatctaatgatagcaccacctgaacagggttgttgagaagattgagtgatacagtctgcacagtcagcctcccggggcacaaaacagagtggagagagtgtcagtaaggcaaagggaagatgtccagcaccttgctgagtgaagtatgatatttagaccagaagcattggtaccacctgggagcttgttggaaatctagcatcttttcaacagaggtaaagcccttgggtttattgctatttttagggggcttatctgttcactaacagtaccatgttatgtcatcggctgctcaccaacaagtagatatctctagaagatgcttttaatttgtcatattagctctcttcataggagttattacattccttttagagtttaatatgatctatggtagatgtggtatttcaaatattagtggggaacatgtgcctaattcaagtaataattgggacaacttgataaccatttggaaaaaattcaaatcaagtcccaacatcacactttacatcaaaataaattccaaatgatctgaagatgccacagtaaataagcaaaaaaaggaaggaaggaaggaagggaagggaaggaatttaattataaaagtattgaatgagaaaaaccagagaccatatggaaaatatttctaaatgtgactatataaaaattttgaattctgtaaggcttccagtataatacaaagtccagaaacaaaaggcaagtcagaaagagatatttgcagatgacatt

SEQ ID NO: 71212 - DNA, 2632 bp, Homo sapiens
cagcaaaggcccctgtgcaggcctggtgaggtggccgagcttcctggtggggaggccttccccctctcctccctggtcaatctatttgagggtgaggatggctccccttcaccctcacctggcacccaggacatccccagtccatggagggattcaatctgggctctgcagccagctgcccgcatttcagtcctggctctgtcactaacctgctgtgtgacctcaggcaagtcacttagcctctctgagcctcagtttcctcatctgtagaatgggaacgatcgcagtacctacttccagggcagatgttctcagtctcgacgctattgacattgtgggctgggtcatttttttgtggtgtggggctgtcttttgctttggaggatgtttagtgccatccctggccttgatctaccagatgccagtagtgctccctctcctgtacagttgtgacaacaaaacatgtcatcagatattgccaaatgtccttagaggaggagcagaactgtccttggttgagaaccactggtctggagtcatgatgagggctggatgaggccctgtgctgggcacagcctgagctacgtcatcaggcgaggatggtgatttagttcataattattatttcatcctaattagaatgctaatcatgatcgcggcgtgacttgccgaaggccacacagcagccatacaggttgacagttgctgggagaggatttgaacctgggattggctggcaccagagcccccattttggagtccccaggaacctggggtgctgtccaggcttaggggagggctatcctcctgaggggaggagggtgcaggcatggtgggggatggaaggaccttcttggctgccttctctggccttgggagctccctgggatggggttccattagcccctgaggtgccatggtgaggggtgcagtggatagaagggtactggaaacacagagggtgcgcctgatgcctcgtctccccctgacctcagggcccccagtgaggtggacagggccatgcccaggagagtctaatccacctcccgccaatgcctgtgcccctgcagatgcccctcctgcctcagcaaccccctggcccccattcctgcagagcaaagcccaaatgcatgtggcagccatgagggactagggatccagatccccctctcctgtctggccagtcgaaaggacttcgtgtctccagaggtcctactaggtgctggaactgagtaggtgcctcacatgctggaggaccctaggaggaggcgtggtcactccagtcttacaggtgggaaaaccacggggcagacagaggaagtgatttgcccatggtcaaacggctaatgaccagggccaagagaggaactgggtctcatttcagaacctggcctcctaacttctctttcttcgtttggttataataactgaaagtcccactctatttacagatgaggaaactgaggctcagagaggctaagcaacttacctgaggtatttatttttagatagagtcttgctctgttgccctggctggagtgcagtggcgccatcttggctcactgcaacctctgcctcctgggttcaagtgattctcctgcctcagcctcctaagtagctgggactacagkcacgtgccaccacgcctggctaatttttgtattttttatagagacggggttttgccatgttagccaggctggtctcgaactcctgacttcaagtgatccacccgcctcggcctcccaaagtgctggggttacaggcgtgagctgctgcactgagccaaaaccccactttaatcccagaagtggcactggatatatctgacctcacttcccactgcctgcaaccctatgaagaagtgactacaattgtacccattttgcagaggaggaaactgaggcttggggagctcaagtaacttacctaagatcacactacatgtaaatagcagagctgggattagaacccaggcctgaatgactccaaaggccaggctgtctctcccttttggtgtccaaagggaagcccacccccagtgggagctctgaccctctgtgtcctgctgcgcccactaagggaggcctcttgctgtgtccccacctctctggtccaagtcttccctcctggaagccacagaacaaacaaggtgggaactagtttatttgtttttctacgtgcgtattgggtgggaagggtgagatgtacaagagagggcttttcagacatgcccctgcctcccgggtggggtggtaagagttccaggaaactcacccttggtgcccagccctgcctggctggcaccatgctacagagagcagggcactgacagccaaccagtggggccttgcccctcccttgccctggctcctggctaagcactggacccgggagccagagagacatggttcaagtccagctcttcttcctgcaagctgtttgctgcctttgaaagctgcttcctcatctgagaaatgggaacaaatgacatctttgtcataaagtttttcatttgtgtgaggactcagggatggacaagacagatacatttcctgcctcctggcacccacagcctgggaacgaaccatcccgtgaacagctgggataaagcttctgaggagaggagcat

SEQ ID NO: 71213 - DNA, 2128 bp, Homo sapiens
gttgtgcaatcctagctcattgcagcctccgattcctgggctcaagtgatcctcccacctcagcctcccaagtagcagctaagactacaggtgtgcacctccatgctcaactaattttttaatttttattttcgtagagaagggatctcactctgttacccaggctggtctcaaacacctggcctcaagtgatcctcccacctcagcctcccaaagtgctgggattacagatgtgagccaccacacctggccctcgaaaagatttatgtaaagtgcttcataaacaaataaatggttagaatgctgggttaaacaaagccaatcataattccttactacaggacttctcagagcctttcatacactaacagggactgtgaacctgtaaaagcaagacacactaggcagcattcacccacctgtcagagcatcgaatccttttcccatgaagcatttacactggtgcccctagaagggagtggaggggtgcagcgttccccaaagtgtgggactgtgtgccacagtggatgtgaactgaccttaggggatccaggagagaatcttgggggttctagggggtgcaacaataataaccctgaaggtttcatccactatcgaatctttctcatgaagtcaactctccgtttggtactagcgggtccttaacacctctcactaacgcttgctgatgtctctttgcaagtttctttctgttgtagctatttttatggttacctgagttgatttatatctcaaaagagtaagttgaaaactcccctgtgaatcaaggacagggcaaaatcagccaggggctcaggaatggccagagggtgggagacgcaggtgtgggttcaggtgcccgttctgaagccaggcacctcaggtttgaggcctggctttgctccccacagctgtatgaccatttctctgcttagggtcctttctggctaaattaaagctatgaagggaaatcaaagagctaatcagtgtttgttgattagcccagtaccaggcagatagcagtctttgataaatattactgttgctgttatcaatccatgagacgggatttaggaaccgtctccctaaatgccgggaatcagtggggcagactcaagagacctgaattctagtctcagcccttccaggagcagggttgtttgggacaagtcttgttcccagttgctttcccgctgtccacctggcgcccagctcagaggcgacaccaaacctctcatggaataatgtggcccagccaccatccctctcacatgcctaagacacctcctttatttccctcatttcccccagcctctctggccttcctttatccactttccacatagcagctggaatggtcatttcagactgcaatagaccacggtgaactacagggtctttgcacctgctgtctctgaacccccaccccaatctgaaacattcttccctcctcttttcacctggttaactgcaactcactcagactctgctcaagtgttacctcctccaggaagctctcctggattttccctgactaggtcaaatcctccagtacagccttttgttgacacctgttacagttcataactgtgtgcttatttatgtggttgcttggtcaatgatggtcctgtccaggagcctgtgggcaccttgagggcagggtgatgtctgctttgctcactatcattcggcctctgccaagcacagtgcctggtatgtggtaggtgcccaacaaccatttgctgagttaacacacattgaatgaaggsgagagctgggcaccccaggtaattccaaaccataggtgacccaaagtggaactagagaccctggattcgggctttcagacacaggttatagacccagggaggggacgcctgggtcctgggagaagatgtcaggagcagcatcttcccagagatgaggtggaacatgcagttccaggaaccagccaccaggtggcgaagtggctctgcccagggtggggtgctgtagccaggggctctaaattgacaattgccaaattggaggttgtgaaactctgcggaggggaggtgggggcacaggagggcgtcccagacttccctgataatcagatgagctcatgaccttttagccatgcagggac

SEQ ID NO: 71214 - DNA, 732 bp, Homo sapiens
gttgctccatccatcccatctgtggggcggccttgtgcggagctgtgcttcccaagcctacaggcgagggaagaataaatttgcctccttcaactttgagcacttgtgtcccgcctgcctcaggtggacccacctctcccacaaatcagagcaagagaatgttgttatgagaacaagccggttcagaaaaagagacagatgatttcccgaagcggctgcaaaaagcccacaggaactatggaccacaccctaaggaacagcactaacatcttcacctatggctgatgtcaatagcaatggggggcagtggctgccttcccacaatctacccattttcygggctgggaggggtgaagtcaccacccgtccctgtgtgcctgaggtggtggtcagccacaggagctgacattctgctgtgaatctggatgcggggtggcagggtacccaggccacaccctggtgggctgcagggctcaagaggcagctgcgttgcttgtatttaaagtcaaatgggagcaattagaaaagaggtaaacgcaagttctctcttgtaggtcgggctacaggtgactttttaaaagtctgaattatcctaaattttctataataaacattttaaataaaaaataagtattttgactggtttaaaagtttataacaaaacaaaacccaggctcttgtttcacagatgctgtgaggcgggaggaggcgtctgctgctggagtggcccca

SEQ ID NO: 71215 - DNA, 1076 bp, Homo sapiens
tcatctgtctctctattcatcccacaaacttcccccaaactcttgcttagaaaaaggtctatccttgatgctgcaagtcagaaatgtattaggagaaatcctgcatacaagaagatgtaataggtacttaaatatttttgaacaagtgaacaaaagcagtcaacattttctcaatggaagggaaaaatagatttagttaagtgagagggtgaagagrggggcatagatggtgtgagaatagagaagatataaagagttgttcatcaccgtcatacacatagcttaagtgaaagacaggaaagtaaaagggaaggggatgtgtgtgtgctctgtgtttaagtgtggcaagttacttcatttctcttagtctcaatttcctttcccagacaatggggataaaaatgcttcctacctcatggggttattatatggactacaaaaaatactgcacataaagttcctagaacaatgcctggtatgtagtaagcaggcgctgccattctgctgcctactcctggggacttgaaggttgagttagagtccaccctacctagacagtaagaaagaccatcctaggaattggcaacgtgtagatgattgtaacacaggggaggctttggggggagtgttaatttttgcatcttgtgactagagcccagggagtgaggggcagtgatggggggaaaaagcaggtcagaggccccatcagtccagaaagagctgaggattgggatttgcaatgggggagatggggagccatcaacacattttaagcaagcaatttgtttttcaaaattattactgtagggtgggaaattgattattgttcattaattattgctttaagaggagatgattgtgcaaggaaaacaaatgagtcctggtcattcaagggcagagtctagatgagaactgctctagcgctcattcctggttctagctgccctgaactctggcctctaggctccctgttcattgttttctggcctgtagctaagggggtatggaaagaatgttagagttatgagttcccctgccctgacaggatctgtgtagggtccgtacatctccatgtt

SEQ ID NO: 71216 - DNA, 1076 bp, Homo sapiens
tcatctgtctctctattcatcccacaaacttcccccaaactcttgcttagaaaaaggtctatccttgatgctgcaagtcagaaatgtattaggagaaatcctgcatacaagaagatgtaataggtacttaaatatttttgaacaagtgaacaaaagcagtcaacattttctcaatggaagggaaaaatagatttagttaagtgagagggtgaagaggggggcatagatggtgtgagaatagagaagatataaagagttgttcatcaccgtcatacacatagcttaagtgaaagacaggaaagtaaaagggaaggggatgtgtgtgtgctctgtgtttaagtgtggcaagttacttcatttctcttagtctcaatttcctttcccagacaatggggataaaaatgcttcctacctcatggggttattatatggactacaaaaaatactgcacataaagttcctagaacaatgcctggtatgtagtaagcaggcgctgccattctgctgcctactcctggggacttgaaggttgagttagagtccaccctacctagacagtaagaaagaccatcctaggaattggcaacgtgtagatgmttgtaacacaggggaggctttggggggagtgttaatttttgcatcttgtgactagagcccagggagtgaggggcagtgatggggggaaaaagcaggtcagaggccccatcagtccagaaagagctgaggattgggatttgcaatgggggagatggggagccatcaacacattttaagcaagcaatttgtttttcaaaattattactgtagggtgggaaattgattattgttcattaattattgctttaagaggagatgattgtgcaaggaaaacaaatgagtcctggtcattcaagggcagagtctagatgagaactgctctagcgctcattcctggttctagctgccctgaactctggcctctaggctccctgttcattgttttctggcctgtagctaagggggtatggaaagaatgttagagttatgagttcccctgccctgacaggatctgtgtagggtccgtacatctccatgtt

SEQ ID NO: 71217 - DNA, 1076 bp, Homo sapiens
tcatctgtctctctattcatcccacaaacttcccccaaactcttgcttagaaaaaggtctatccttgatgctgcaagtcagaaatgtattaggagaaatcctgcatacaagaagatgtaataggtacttaaatatttttgaacaagtgaacaaaagcagtcaacattttctcaatggaagggaaaaatagatttagttaagtgagagggtgaagaggggggcatagatggtgtgagaatagagaagatataaagagttgttcatcaccgtcatacacatagcttaagtgaaagacaggaaagtaaaagggaaggggatgtgtgtgtgctctgtgtttaagtgtggcaagttacttcatttctcttagtctcaatttcctttcccagacaatggggataaaaatgcttcctacctcatggggttattatatggactacaaaaaatactgcacataaagttcctagaacaatgcctggtatgtagtaagcaggcgctgccattctgctgcctactcctggggacttgaaggttgagttagagtccaccctacctagacagtaagaaagaccatcctaggaattggcaacgtgtagatgattgtaacacagggkaggctttggggggagtgttaatttttgcatcttgtgactagagcccagggagtgaggggcagtgatggggggaaaaagcaggtcagaggccccatcagtccagaaagagctgaggattgggatttgcaatgggggagatggggagccatcaacacattttaagcaagcaatttgtttttcaaaattattactgtagggtgggaaattgattattgttcattaattattgctttaagaggagatgattgtgcaaggaaaacaaatgagtcctggtcattcaagggcagagtctagatgagaactgctctagcgctcattcctggttctagctgccctgaactctggcctctaggctccctgttcattgttttctggcctgtagctaagggggtatggaaagaatgttagagttatgagttcccctgccctgacaggatctgtgtagggtccgtacatctccatgtt

SEQ ID NO: 71218 - DNA, 1076 bp, Homo sapiens
tcatctgtctctctattcatcccacaaacttcccccaaactcttgcttagaaaaaggtctatccttgatgctgcaagtcagaaatgtattaggagaaatcctgcatacaagaagatgtaataggtacttaaatatttttgaacaagtgaacaaaagcagtcaacattttctcaatggaagggaaaaatagatttagttaagtgagagggtgaagaggggggcatagatggtgtgagaatagagaagatataaagagttgttcatcaccgtcatacacatagcttaagtgaaagacaggaaagtaaaagggaaggggatgtgtgtgtgctctgtgtttaagtgtggcaagttacttcatttctcttagtctcaatttcctttcccagacaatggggataaaaatgcttcctacctcatggggttattatatggactacaaaaaatactgcacataaagttcctagaacaatgcctggtatgtagtaagcaggcgctgccattctgctgcctactcctggggacttgaaggttgagttagagtccaccctacctagacagtaagaaagaccatcctaggaattggcaacgtgtagatgattgtaacacaggggaggctttggggggagtgttaatttttgcatcttgtgactagagcccagggagtgaggggcagtgatggggggaaaaagcaggtcagaggccccatcagtccagaaagagctgaggattgggatttgcaatggggragatggggagccatcaacacattttaagcaagcaatttgtttttcaaaattattactgtagggtgggaaattgattattgttcattaattattgctttaagaggagatgattgtgcaaggaaaacaaatgagtcctggtcattcaagggcagagtctagatgagaactgctctagcgctcattcctggttctagctgccctgaactctggcctctaggctccctgttcattgttttctggcctgtagctaagggggtatggaaagaatgttagagttatgagttcccctgccctgacaggatctgtgtagggtccgtacatctccatgtt

SEQ ID NO: 71219 - DNA, 659 bp, Homo sapiens
atttgaccacaactaaaaaaccatttgctgcataaatttcatgaaaagccacagctgccaagtggcagggatgagcacagaaaccatgagaatggggaatcatctttggatggccagaggagcccagagcaatgggaaaacaccaggtgaggagtcgggtcctgggcaatggtccgggccctgccagctggcccacacaccaccctgggcctgtctttttcattcactggtttttctgggctctaaaaccaaatcaacaaatgccttcagattatctgaccctgagtgtgtctctttggtcacagaacaccattaaagatgccaagagcaggctcacacagggaagtgtaaactctctcattcctggcccagcatcagatggagagaatgagctactaattcagacggaggcaccaggtgccaagaggcgcccgcagtactccccgcctgcagagacaataatggtttatgactctgaactcgccggaaggttagctgggtcaaagyggcaacgtgagcgtttgtttaaatctctgtccaagaatctctcaacttgctgctggaagataatgagttctgagccatgcaagagtcacacactctgtggatttgacacaatctgctctttgatgaggattccatgcatattaatcactaaa

SEQ ID NO: 71220 - DNA, 659 bp, Homo sapiens
atttgaccacaactaaaaaaccatttgctgcataaatttcatgaaaagccacagctgccaagtggcagggatgagcacagaaaccatgagaatggggaatcatctttggatggccagaggagcccagagcaatgggaaaacaccaggtgaggagtcgggtcctgggcaatggtccgggccctgccagctggcccacacaccaccctgggcctgtctttttcattcactggtttttctgggctctaaaaccaaatcaacaaatgccttcagattatctgaccctgagtgtgtctctttggtcacagaacaccattaaagatgccaagagcaggctcacacagggaagtgtaaactctctcattcctggcccagcatcagatggagagaatgagctactaattcagacggaggcaccaggtgccaagaggcgcccgcagtactccccgcctgcagagacaataatggtttatgactctgaactcgccggaaggttagctgggtcaaagcggcaacgtgagcgtttgtttaaatctctgtccaagaatctctcaacttgctgctggaagataatgagttctgagccatgcaagagtcacacactctgtggrtttgacacaatctgctctttgatgaggattccatgcatattaatcactaaa

SEQ ID NO: 71221 - DNA, 934 bp, Homo sapiens
tggcagcttgcaaaattaaaaaaaaaaaaatcgcaagaaattggaataataattcccacaggatcacagtctaagaaaagtgtttttaaaattgcaaagcattatgcaaatgtataactaaatgggcctaaaggacaggaacctgagaactgctgttagaaaatgagtggactcggccaggtgcagtggctcacacctgtaatcctagcactctgggaggccatggtgggcggatcacctgaggtcaggggtttgagaccagcctggccaacatggcgaaaccccgtctcaactcaaaatacaaaaattagccgggcatggaggcatatgcctgtaatcccagatattcggaaggctgaggcaggagaatcgcttaagccagagaggcggaggttgcagtgagcccagatcacgccactgcactccagcctgggtgacagagtgagactccatctcaaaaagggcagggcagagcaggaaaagaaaaggagtgcacacatggaccaattagaaattgttcctatcataaaaaatttctttgactgtcaaaaggttcctcactggtccttcaggtagcaggttgcctacgtctttcaaagctccaggagccttctctgctcatctctgctccccagtggtggctagcaccccacaggagcaggtgccttccagcctgagttggcctgaggtcttggacctgtgcacctggctgatgctgcctgtgaacacatgaacactccttctcctgcccctggatgcggtctgagagaacataaatgtgttgcaaaagttaaaggtgtcaaagacttcagcatctttactttcacaatactggtctggtgcctaagcactggtaaatgtagttctcccaacagtttctcaaagmctgcattactttatggacaatttcattcttttatttttacatatagat

SEQ ID NO: 71222 - DNA, 549 bp, Homo sapiens
gtctcatgcttaggatagcacagtggcataataaaagaagccaaagtctttgatatcacagagctgccatatcagcctagactccttctatatgatatagaaataaactcctatttctttaagtcattattatttgaggttttctgtcacaagcagcccaaactaatcctaagcattcagtaatgaaaacatctctaaagaaaccttcaaaactcaaaataatcaaagatgagctctcattagaattatagagataaggggcatgaaatcaaccctgcaagagcatttctcacagcttggtcaattcctggacacttggagtattggagctttaaagaagtaaccagacaagatcagagtcctgaggtgacaggacactgacataaagtgctgactggagttgaagccactttcttcttccagaagtctgatccttggtggtcaggaagaggyggcacagcacagccatgttgggaaagccctcagctgtgctgtccttctctgcaaacacaccaagcctccttcagagctacatatccccactcttac

SEQ ID NO: 71223 - DNA, 578 bp, Homo sapiens
ctgcgtatttctatatgggcacctgcgatgaagcacataagtcaatgatcacctgagtctcgctggaggtagagctttgaaaaatacaggttcctgggctcccccgtgaactctggattcagtccrtggggcaaagcccagcaacctgcattttaaagagctcctgggtgcttctgatgcacagtgaactctaaaactcacagactggagtagtaattctcaaccatcgtcagtgggggaggggagctgttgaaagtccagatgccctcaccagactccacaccaattaagtcctaatctctgaggctgagcccaagtacaggcagtgtttaaagttcagagggattccccaaccagccaaggctgagaaccactgaggttaatgcaaagggatgctacttattaaaaaaacacacgtgacctggagaatttcctctatcaagagaatctgcctcgccccacacctccagtattttttaatcactcctactaagttagctggattctgtattcctctaaaattcctttctcagtataaagtctgctcatcacatcagaccaccacacatctgaggaca

SEQ ID NO: 71224 - DNA, 1990 bp, Homo sapiens
gatgcgtgtttctctggagaaccctgataatacagtggcactaagtacctaagaacagaaagtgcacccttactattatcttggaagtctgtcccattttttatgtatttacgttaccttgaagaggtgtgttataattttttttctttttgctatacttgttttggaggttatgttttataatttttaatagactattgaaaatattaaatctgtccaggagaaacagtcgtctttgcctttgagaaaattatcatcctaaattctaatgtctttaacagaagctttagtcatcagtgacagattccatttccacttttctttcttaagaatgctgaagtacaggggtggttagggagagaatcaaaatgaagaacttgtcagaatataaccccaggaggtaatagtggctgtgtgtytgaatcttctggttcagtagtttccgtgtggatatagtttttggatttactgctttgacatgaagtccacggcaagtcgaacttcctctgagggttagtgatgaagcgggtccccttgttgaaaacttgtgcctgtctctaccttatatatgtgagttctgtcctccagactccatgcccatccttcccactgaaataaacatcccaaactaccccttctcttggtatttcatgaaccactgccactgacccaaaaaggtatctttgctgtcctttgtacagaaactatttgggatctgcattaatggtgcagttgtcaaatcccagtccaggatctgccctttaccatttttgcaagcctgaaagtcgctttaaaggcatatgtttttcccctacttgcttcactggagaatcattcacagaggatctgtcattgcagctcagcatagcatatacctgaaggaggcaaatgtgatttcttaaaatcacgatttcggatttcatgtcctccacgtcccattgttctctaatgaagtcgtgccaataccaaaatttcttcttactgtgttgcagctcacccacacatcatcacacgggcaagccactacaaaactttcaccttcagtgcttgaatcgtttcataactcgccttgttatctggtgaagggcgaagccaaactcacagaacttaaagtcgatgctatttctaaagtgtgtggcattgttcctcagcagccctggcttctagctttccattcctaaacttgctgctcagaaacagctaggtattttggtctgtggatagttatgcatttttctgtctagctgttgtctgcccagccattgttcaaacccaagtgcccttaggggctaggcatacaatgtaaatgaggatggttggcctccatgaagcctcagtgtcagggatgcaccagccgtggagactgtggcccactggagccctgaggccccaccccgaaggacagccaccaatcagttgattgttcctgtgtgtaattttggattcagtgttgtcagctcttccagttttttcaggaaaagtctgtaatctagatttttaatattggcagtcagttcatagtattcacgaacagacaaaataaaacatctgaagattgtgtgtcttgtacacaatccaaattctagcctgttttatgtaagcacatactttatctagcacatactttatctagcacatactttgtaagtatgtgagcacatactttatctagcacagacttccaaattctagcctgttttatgtaagcaataagttgatcactactataggagaagtaacatgagaaagactgcctcaaagggttagtgattctatgggaagggcaagatgcacacttagcattataaaatgatttttttaaaaaatatacagtttaaaacagtggctcttaaactttagcatgcatcagaattgcctgaagggcttgtttgactatttgacaggcttccagagttttgtattcagtgggtttggggtgggacctaggcgtttgcatttttatttaattttatttttcctagagacgggg

SEQ ID NO: 71225 - DNA, 1672 bp, Homo sapiens
aactctcttcccgtttggtgcactttcccctcattgtccccatccttcacccattttatatatacctactcttccctaattggttttttacactgtcatgcccatctttgagtggtgccttttttttagtcttttttgcatactcacaacccaatcagcacacacccccccaattctgagcccataaaaaccccagactcagccacactttgggactattcacctttgggtgggggactactcacttttgggtaggggctgcccactttgggtcccctctctgctgagagctgtgtcattgctcaataaaattcatctccatcttactcaccctccagttgtcagcataacctcattcttcttggatgcaggacaagaacctgggacccaccaaatgcaagtacaraaagagttgtaacactgtagctctctgccttctgctggtgccggaaggccacctcacatgatgggaagcagaagcagtgctgggtcagcccaggagctgcagtccagtgtgggtcggtgggactgaacgagctgtaacacaaatgggctcagacatgctctgtccccaacctcatgcgctgtgctgcaggtggtaggaaggagagaagagccaggacccttctggggccccagaccttggggtttccccaagccagagctgtaacttgctgtaacagcctctttggggttccacagttgctggcatcaccaaagctttcgggtgccactgtgttcccctcatccaaatactgatgcccaaggcagaagcagggtcatgggacacccagtccagctgcaggctaagcacagatcccacagtgagtgcgggatccaggctggggtgcaagtcaagtgcagcccacaaagctgagtgggcggggtgcctcccacccgtgtagaagtgtcgctggctgcagaggtctctggctggcaaagcagcaccaaaaaaaatcctgcgtcaactgcttctgtcactagtcacaggcatcacacttctgttttccctacacctgactcacacctttgtagctagtccccttatcaggttttcttccattcattcaaattattattattattattattattattattattattattattatttgagacagagtctcgctctgtcgctaggctggagtgcagtggtgcaatctcggctcactgcaacctctgccttccggcttcaagtgattctcctgcctcagcctcgcgagtagctgggactataggcacacgccaccatgacaagctaatttttgtatttttagtagagacggggtttcaccatgttggccaggatggtctcgatctcttgacctcgtaatccacccacctcagcctcccaaagtgctgggattacaggtgtgaggcactgcacccagcccattcatccaaatttaaacatgctgtccacttcctacagggactttggctgatacatgtgaccaaggcatatggagtcaggggagtcttaacctgcagagcaggagaggggactccttggccatttgcttccttatcgtaggggcagacagactccacaagctgccaccagaagagcacggcactgctagctcaagatgttccatccccaggaaataacctaagttataaaaggcaggtgcaaaagcatgacgtacccttctgtctccttttttct

SEQ ID NO: 71226 - DNA, 1184 bp, Homo sapiens
tgggtgtctggactctcacttgtttgggctccagacgcctacatctgggatagaacttttttcttttggaggaagagaggggcaaaaagtgatatatttagtccctcctcggctttcagaatgaaatctaattagccaaaataggaattctataagcagcttaaacccaaatgggaaagccacgcagagtggaaagctagatcagatgagtacaaaagattaaagagacatagtgatgtcctgtgggataaaaatggcaaaaccagaagattttacacttaagctgaaagatgaaataagaataagaaaaggataaaggcaaatatcctttaagcagattcacatcaagcaaaacactcaatcaggaggttggcaatgaaagttacgaagaacagtagaatgttttcatctactggatacatttgaatatacagactctgatgtttcagggtagaaaagaacttcactgaaggaataccagcatcactatctttctgagcattctttgcttagagaattgatactgtaaaaattaatggaagaccaacataatagtaacatttaaaaagatattgttatgtaaatagcaatttgcataaaaatgtaacactaaatttaaacttttactaatactgccatatttcacatttcccctaaaggctttcaatggaggagaaatagcgctctctctctctctctctctctctmtctatatatatatacacatgtatataaaatagctatatattttataaaataataaaatagctatatatataatttaataatatactgatatatgagtagaagaatgagtaccaccatgttgagtatcttatttatagaaatctctcttctctgatttgtgtgtgtgtgtgcacacatgcaaatacatgtttatatctttcactgtttcatatattaaacatattacacacacacacataaatctttgggaagagaatgaatatagcaaggcaaatcattagtaagaaaaacattgatctggaatcttaaattcagctaagaaaaatcaaaaaacaaaaaccattagccataagattctgccactcagctcaaagatttatgatgtgcttcaagaagaagaaggaggccactaagcaccttcaaaaggtgatagaagtaaaattgaactgtagtgggttttgagctacagaccaagc

SEQ ID NO: 71227 - DNA, 1184 bp, Homo sapiens
tgggtgtctggactctcacttgtttgggctccagacgcctacatctgggatagaacttttttcttttggaggaagagaggggcaaaaagtgatatatttagtccctcctcggctttcagaatgaaatctaattagccaaaataggaattctataagcagcttaaacccaaatgggaaagccacgcagagtggaaagctagatcagatgagtacaaaagattaaagagacatagtgatgtcctgtgggataaaaatggcaaaaccagaagattttacacttaagctgaaagatgaaataagaataagaaaaggataaaggcaaatatcctttaagcagattcacatcaagcaaaacactcaatcaggaggttggcaatgaaagttacgaagaacagtagaatgttttcatctactggatacatttgaatatacagactctgatgtttcagggtagaaaagaacttcactgaaggaataccagcatcactatctttctgagcattctttgcttagagaattgatactgtaaaaattaatggaagaccaacataatagtaacatttaaaaagatattgttatgtaaatagcaatttgcataaaaatgtaacactaaatttaaacttttactaatactgccatatttcacatttcccctaaaggctttcaatggaggagaaatagcgctctctctctctctctctctctctctmtatatatatatacacatgtatataaaatagctatatattttataaaataataaaatagctatatatataatttaataatatactgatatatgagtagaagaatgagtaccaccatgttgagtatcttatttatagaaatctctcttctctgatttgtgtgtgtgtgtgcacacatgcaaatacatgtttatatctttcactgtttcatatattaaacatattacacacacacacataaatctttgggaagagaatgaatatagcaaggcaaatcattagtaagaaaaacattgatctggaatcttaaattcagctaagaaaaatcaaaaaacaaaaaccattagccataagattctgccactcagctcaaagatttatgatgtgcttcaagaagaagaaggaggccactaagcaccttcaaaaggtgatagaagtaaaattgaactgtagtgggttttgagctacagaccaagc

SEQ ID NO: 71228 - DNA, 1184 bp, Homo sapiens
tgggtgtctggactctcacttgtttgggctccagacgcctacatctgggatagaacttttttcttttggaggaagagaggggcaaaaagtgatatatttagtccctcctcggctttcagaatgaaatctaattagccaaaataggaattctataagcagcttaaacccaaatgggaaagccacgcagagtggaaagctagatcagatgagtacaaaagattaaagagacatagtgatgtcctgtgggataaaaatggcaaaaccagaagattttacacttaagctgaaagatgaaataagaataagaaaaggataaaggcaaatatcctttaagcagattcacatcaagcaaaacactcaatcaggaggttggcaatgaaagttacgaagaacagtagaatgttttcatctactggatacatttgaatatacagactctgatgtttcagggtagaaaagaacttcactgaaggaataccagcatcactatctttctgagcattctttgcttagagaattgatactgtaaaaattaatggaagaccaacataatagtaacatttaaaaagatattgttatgtaaatagcaatttgcataaaaatgtaacactaaatttaaacttttactaatactgccatatttcacatttcccctaaaggctttcaatggaggagaaatagcgctctctctctctctctctctctctctctatatatatatacacatgtatataaaatagctatatattttataaaataataaaatagctatatatataatttaataatatactgatatatgagtagaagaatgagtaccaccatgttgagtatcttatttatagaaatctctcttctctgatttstgtgtgtgtgtgcacacatgcaaatacatgtttatatctttcactgtttcatatattaaacatattacacacacacacataaatctttgggaagagaatgaatatagcaaggcaaatcattagtaagaaaaacattgatctggaatcttaaattcagctaagaaaaatcaaaaaacaaaaaccattagccataagattctgccactcagctcaaagatttatgatgtgcttcaagaagaagaaggaggccactaagcaccttcaaaaggtgatagaagtaaaattgaactgtagtgggttttgagctacagaccaagc

SEQ ID NO: 71229 - DNA, 2837 bp, Homo sapiens
tttgtttaaaatagttaagaacaagaatgtctcaagtgattatggcttattgttaagttcatgaatgctagcaatgtctaagaaatgggaggaaggaatgaggaatgctctgttacagggtatctgcacttgctgttgttttaagagatgttcgctttccttctaccaagcagaaggcagaggaattcatggtggcaatgatggggctggcaaagagagctccagggctggattttcccaacaattttattacccaggagtcaggagagtgtctgtgagataaacccagctctgaccccttccctcacccctccatttatccaaaggtcctgctagacctcgggccagaggctgggggccaggaccttcccactccagggacacaaattcttcttttaggtagccccagcttgttggtctcagcaatcaacagttgacttaataagcccatttcattaacagatgcacattgcatctattaatgaatcacttcacccatggaatggcaggctccagaggggctatgaaatggtggtgcctcaggcaatcacctgccgtcatgtcacccttgaaaggttgaacattttgtccatctggtggaggtaagaattgaacttaaagcctagtgaagctatgtatttaccttgcccctctttgcagggacagagtcaatctctggttccccctatatttctcaggatgggaggaaatggggatccttcttcctatatcatggaagggagaatgaggacctcacaaaggaaagaaactcactacatctgtcagaagtaaggcctgcctgaaatcagtgaggctcatcgcagcccaaaattcaggcagtgagaaattcaccaaagtggcctttctgaggagaattagagaaatgtttgaggctcatagataggcacctagaaacgccatgaagaaagtcacaaataatgcctcaaatgatgtgctcaaatcacgctagagtgaaaaaattggaaacaccacctttaccatgaatttctctttttttttttttttcgagacggagtcttgctctgtcacccaggctggagtgcagcagcacaatcatggctcacagcaagctccacctcccgggttcatgccattctcctgcatcagcctcccgagcagctgggactacaggtgaccaccaccacgcctggttaatttttttgtattttcagtagagacggggtttcaccatgttagccaggatggtcttgatctcctgacctcgtgatctgcctgccttggcctcccaaagtgctgggattataggcgtgagccaccacggccagcctttaccacgaatttctaatagctccctaggccaaggtgttttttctctcctctgtctcctctctcgtagcaaattcctaccgcacacaaacagggaagaagagcccttgtcacttgtccagaacagtgtgggagctgttgggtgctggctgtgggaaggtacacaccttgacaggtttctggcctggagaacgaggggagaaagttccctccagggtgcccctcagtttgggcccttaaggtaatcagagccagcggatgttgagagtttgagaggttcagtaaggttcctagagccacaggacaggagggagctgttggtggttggggagacagttggagaaagttccaggggagttccagggaggagccgatatgtagggcaggagagaataggaaaaaaaagaatgggtgggtttgccagcattcctccttccaaggattctaaggaaaagagtggaaactgcggagacaattctcttaccgtttctcctttcaagatgcacagagagtcaggcagaagggacactagagtgcaggaaaagaaggccgcagagacaggtgcagaaggttggagggaggaaccactgagaccagcgtccgtggaaagatgtccaacgtttgaccacggagagcaacaggccctcagccacagacaggagagatcgggattgacaactatcttcagagctcccagtctgcgggcattgattgactgattaaggcggagtttcactcctgttgtccaggctggagtgcaatggctcgatctgggctcactgcaagctgtgcctcccgggttcaagcgattctcatgcctcagcctcctgagaagctggtattacaggcacccaccaccatgcccagctaattttttttgtagttttagtagaggcggggtttcaccacattggccagtctggtctcaaacccctgacctcaggtgatccactggccctggcctcccaaagtgctgtgattataggtgtgagccacccacygcacctggccatcacggggatttagaatcatccccttccccaacaagtgtggcctggagcctgcagaataatggagaccaccaccacctggctcagacccaggtcttccaggctggctcacacttgggtaaggttctgccaatcaggtaactaagcccagggcaagtacgtggttttcaggtcctgggtttcctgctgtgttttaaatgaccacacctggaaccatctccttactttctttctagagaattcctcccaggaaaatcaacaaatcaatgagaagtcaaacacttacccagtagttttgcacagtagagcacctgaggaattcgtgaaaaacaccaatgcctggccccaccccaggtgaattagaccagaatttcggagggtgaagcctagacatggagggtttcaaatgcttcccaggtgactcgcatatgcagccaggctggggagtccttgtattcaatctagataaatagcaggcatgcggcaggtgctgaaggtgcaaagatgaacaaggtgagg

SEQ ID NO: 71230 - DNA, 639 bp, Homo sapiens
tcccaacccagatctgcctgaatccaaagcctgtatgcttcctccctgcacgagggtgtcttgggccacttggattttccagcctcagtccaaaggcctgtggacaacgaacctttgttgtgcgggctgtatctctttgattcagttcacccaaactgtgacactttggatcttccctctttgatacctctcctgtgtctcatcttattaattcatgcatgcatctaatcaacagatttccactggggtcctttccaggccaggtgtcgagtacctcggaggctgtgtgctcccttcccactataccmgtgtgcaactagaaaaaaaaaaaaagtggtttaagctgggtctagaacggagtttagctgatcccttctgggaaaggtgagtagagtagctgcccaggcaatttaaatatccatgggccacctgggcacggtggcgcacatctataatcccagcagattgcctgagctcaggagttcgagaccagcctgggcatcatggtgaaacccccgtctctactgaaacacaaaaaattagccaggcatggcagcatgcgcctgtagtcctggcaacccgggaggcggaggttgcagtgagctgagatcatgcctctgcactccagcctgggcaaca

SEQ ID NO: 71231 - DNA, 639 bp, Homo sapiens
tcccaacccagatctgcctgaatccaaagcctgtatgcttcctccctgcacgagggtgtcttgggccacttggattttccagcctcagtccaaaggcctgtggacaacgaacctttgttgtgcgggctgtatctctttgattcagttcacccaaactgtgacactttggatcttccctctttgatacctctcctgtgtctcatcttattaattcatgcatgcatctaatcaacagatttccactggggtcctttccaggccaggtgtcgagtacctcggaggctgtgtgctcccttcccactataccagtgtgcaactagaaaaaaaaaaaaagtggtttaagctgggtctagaacggagtttagctgatcccttctgggaaaggtgagtagagtagctgcccaggcaatttaaatatccatgggccacctgggcacggtggcgcacatctataatcccagcagattgcctgagctcaggagttcgagaccagcctgggcawcatggtgaaacccccgtctctactgaaacacaaaaaattagccaggcatggcagcatgcgcctgtagtcctggcaacccgggaggcggaggttgcagtgagctgagatcatgcctctgcactccagcctgggcaaca

SEQ ID NO: 71232 - DNA, 1376 bp, Homo sapiens
gatccacagatttgcagcttgaagaagagtcacaccaattggttccagaccaataaaagtaaatgattgcctctaagttttggggtagctggttgcccaatatcattgcaaaaatagctaactgacatacatataaaaagataatgaactttattattaaagagggaaatacagatgaaggcgcggcgattaaccatttcctatccattcgatcggcattatataacattgctgtacaacactttggagagtaatttgacaataatgtgtaatgttaaagtattataacttctaagtacataaccaggaaattcttgcacttgtgcacagrtaaagacatacaaagaatgtttattacacccttatttgtaataacaattttttaaagaaatctatccatcaataggaaaataaatacattgtaatatgtttacgatatggaaagcagtaaaaatgaataaactatagctatgcattctaacattttaaaaaatcttggaaaaaacattgagcaacaaaagcaagtttcagaagaatacatacagtatgactctacatatatactgccctaagtcattcggacatgactgtatttacagatagatactggttttgcatcttcacataacagtagcaaacttggaggcagtgtgaagagtgttatcagtaaaaattattcaaagaactttattaaatcttttatttctgaaaaaaaataagagaggcatgcataataaaatggtaagatttgacaaagctgagtggtggataccacagctgttagtcatgttattctttggacatctcccatatgccttaatgttttattattttattttatttattttatttatttatttattttgagacggagtctcactctgtcacccaggctggagtgcagtggcaccatcttggctcactgcaagctctgcctcccgggttcacgccattctcctgcctcagcctcctgagtagctgggactacaggtgcccgccaccacgcccggctaattttttgtatttttactggagacagggtttcactgtgttagccaggatggtcttgatctcctgacctcgtgatccacccgcctcggcctcccaaagtgctaggattacaggcgttagccaccgtgcctggcctgctttatcattttaaaaagaaagctttgaattatgaggcaaaaaccctgtttggatatcacctctgccatttactgactatgcaaccctcaccaaactctaagagctctctgcacctttgttttctcatttgtaaaataaatatgtggaactgagacctttaaattcccttgcaccattaaaatttcagattatattaattttttaaaacttaaattaattgcttatat

SEQ ID NO: 71233 - DNA, 1388 bp, Homo sapiens
atacctctttgatacactgattttcttgcttttgggtatatacctaagaatgggattgctgggtcatatggtagctatatttttattttccaaggagtctccaaatttttctccatagtatttgtactaattcacattcccactaacagtggatgaaggttccaagagagtatgttcttttaaaaatatattttaggtagtggtcaatgctttaggagttgtagcatttaagaatcctccttcttaactccacatgtgttagaaaaaataattcttctgaatgtaaatccccctcttttttggtcttaagatgactctgtttatatttaatttcttttctccaagtggctgactaatcaagtcctcaaggaaataacaaatttaatagaaaaaaaagctataaacaaaattttacaagggcaaataaaaactgataattatgaccagaaagatccctgagctgtgcagatttttttaaattccacatagaaaaataaagcaagtcaatctrtactgcacaccgcatgcccatatgggcaactactaagcaagcatcaaatacatacttagaatgtttagtgtcctcttgttgatttttaaattttcatccctctatatatcatttcactttcatattttaaatgaaactcaactctgctgaacggcttcatggattaactaagtccaaccaatcacatatatagtcattctgaaaactgtacatttactattatttttacattaatttttaaaataaatgcattttattgttattatatggcagttcataacttttgaaattgtgattaaaagtgtaaaaatttcaagaaaaatatctattattctaccaatcaaagatagccattacaaatatttttccttacttccatctaatatttctatatttcatagatgtggaatttttatcagttttacattgttgtcatcacagtgaatacatatctttcttttattatgatggtttatgtgccctgcatattaaaatgtattctaacatagttcagcagctccgttatattctgtcatgtttatatagcatgcttattttataattttactagctgaacagtttagcttttacatttttatgattataaataagtatattatgaaaatctttttttaatctataagaatgagtcttcctctgtctgtatgctgacttttaagggtctcagaaacttttaaaatctctctcaggacaaaaaacctgtttgagttttgtggtttatgcctgtagttccagctactagggaggctgaggcaggaggatagcttgaacccaggagttccaggctgccatgagctatgattgcaccacggcactccagcctgtgggacagagtgagaccatgtctcaaaaaaaa

SEQ ID NO: 71234 - DNA, 916 bp, Homo sapiens
tgcattgctctcaacagtatttaaatacatgaaagactttcagtaagtgctgttccctgccccaaagaacttacatttagaaggataaacttctgataatcaaccagtaattaacagaattttgaagagcattgggaagaaatttttgagtatagggaaaattttgaagaggctgagttagtctcataatatgaagttcttttcattttgtttcaagacttctaggtggtggcagtggaacttttttttttttaagttttcttatttagtaaaaaataagagaaatgggggtctcgctttctcacccaggctggagtgtagtggcacagtcatagctcactgcagcctcaagttcctgagctcaagtatcctcctgcctcaggctcccaggtagaagactacaggtatgcgccaacacacccagctgggtgttttaattttttttttttttttttttgaatcagagtctcgctctgtcacccaggctggagtgcagtggcgtgatcttggctcacacaacctccgcctcccaggttcaagtgattctcctgcctcctgccttagcctcctgagcagctgggattataggcgtgtgccaccacgcctggctaattttttttatttttagcagagacggggtttcaccgtgttggtcaggctggtctcgaacacctgaccttgtgatctatccaccttggtctcccaaagtgctgggattacaggcgtgagccaccaggcctggcctttttttttttttwaaaatatagagtcttagtatgttgcccatcctggtcttaaactcctggcctcaagcgatctttctgccttggcctcccaaagcagtgggatacaggcatgagccaccatgcctggctgtaatttttaacgtaagcggtaaagttgatactacagtgta

SEQ ID NO: 71235 - DNA, 2844 bp, Homo sapiens
tgcatatggatatccagttttcccagctggtacctccctaggttacatgccatcccagcccactagctctaatcccagccccagccctaagagttgcctaggagttgttgtccttgtgtcctagactacctttcaggtttacctagcaccctggagcactttagcccatggtagtgagacttgccaagaaattcagattcttattgccgggatggatgagtcctctttggctaggtctggtccaaaggctccttcagtgcatgggtgctggctgagtacagcatggctttgctgtccactgtgacagagcagcactgagttcaatgtaaagtcccctagttactgcgctgtcccttcctaaagtgcacagactctgtccatgttgtggggccagattagggaggtgtgctgtcagggatttaaggctgtctctgctaccctcgtcaatgcctctttcagtgatacaaagtcaaaaccaggtagtatgaatgctcacttgatatttggttcttgtgatgatgcttttctgtgtgcagatagtcgttaaaatttggtgttcctgctggggatgggatgaacagtgtagggttctattctaccattttgctccacccagctatgtgttctagtaatttaatttttctactagctgtggaatggctactttatagaggttctataacacacatttctcaataatttgatttggtagtctaaccatgttagtgcattcctcattctttgtaacttctctatagtgtttctctgtatgaatataccacagatgtattaccaattccttactgattgatatttaggttgtttctagaaacagaactttagttaacaccttgtgtaccttcacaggccatcttttgacatttatgatagtggttttttaggtgatacctacccaatggaatggttggtttataggatgcacagtaatggataatataagattgctcactaaataactgttataatttactccctggtaatttatgagagtattaccaacaacatcttaatttcttcagctttaaaaattcgttatatagaaaatgatatctagttttaatttgcatctttttgattattcattaacttcatctttttatataattgttagctatatctattaactgtttaagtgagttgtctgtatcttttcctattttattattgttgtctttttaaaaatattcatttgaaggtgcatgaatattgtgcattctagacactaattttgcattgtatgtaagaagtcttttcttacagtctgttgcttgtgttatgcatacatatatcaagtttgaatttttttttttttttttttttttttttggcggagcctctctctgtcgcccaggctggagtgcagtggcaccatctcgcctcactgcaagctccacctcccgggttcacgtcattctcctgcctcagcctcctgagtacctgggactacaggtgctcgccactaacagagatggggtttcaccatgttagccaggatggtcttgatctcctgacctcgtgatccgtccgcctcggcctctgaaagtgctgggattacaggcgtgagccacctcgcccggccaagtttgatgtttttatgtactcaaatttattggtattctatggcttctgcatttttttctttattatttttatgcctgtgacacagcctcaggaggttctgaggacatgttcccctctttttgagacaaggtctcactctatcacccaggctggaatgcggtggcacaatttcggctcattgccacctccgcctcccaggctcaagtaatcctcccacctcagcctcctgagtacctgggactacaggtgcaagccaccgcgcatagctaagttttaatttattttttgtagatatgaggtttcactttgttgcccaaggtgatctcacactcctgggctcaggtgattctcctgcctcggcctcccgaagtgttgggattacaggcatgagccactgtttctggcctgcttttttttcttttgtctttttaagaacttgcctgtgctagtgcctaaaaggttttattccttaatctattatttgcagcataatataggattggaatcagtattatttccaaaatgggagccagttagcctcaacactatttatgcctaatttatccttgttgatttgaaaagcttcttttatgtgtataaattctgtatacatagatgtgtttcatactcttctgttgtggcaatactatgtggtttctgttacaacaattactatagcttcctaatatttccctgtctttcttgtagagttatttttctttgtttattcattttggttaatgtttttcctctttatttaaattcattttgtttaatcttgaacatttactcctgcacattagttttagaatcagtttaagttctcttaaaaaaaacttactggaatttaattaatactgtgttgaattcgtgatagtatttttacaacactaagtctttctatcaaaaaacatagttcgttggctggtggctcttgcctgttatcctagcattttgagaggctgaggtgggcagataacttgagctcaggagtttgagaccagcgtggggcaatacgatgaaaccctgtctctactaaaaatacaaaaattagctgggtgcggtggtgcatgcatgtagtcccagctactcaggaggaggctgaggcaggaggattgcttgagcccacacgatggagaggtagcactgagctgagatagcaccatggcaccccagcctgggcaacagagccrggctttgtcttaaacaaacaaagaacatggtttgtccatttagatttcc

SEQ ID NO: 71236 - DNA, 586 bp, Homo sapiens
tgagagcgctccagggtaggcatttgcctcggtggaacgcctcgtcagagcagtgcackgcaggcccccgcggaggatcaatgcagcagccgaacaccgggaaggaactggcgcttggagtctggacatctggaatacggtaggcccggtcctgggaacttgcccactcgatttgagtggaagcgtggcctgatcacccacagcccacctttgtcggcactttggttttggttttgattcttgacttggtttgaattgcttaacaggctggttctgggaatttgcccactccatttgaatggaagcgaggcctgatcaaccacggtgtgcccttatcagcactttggtctcagtattgattttgatttggcttgactcgtttgcaaaaaggaaagtgaaagtgagtgagtgcttgagtttaagatgggcgagacaagtgagtgacccctttaccctttccttcttgtggtgggagtgttgttttgtctcgggaggaagatgggtgcaacgcaaagtaagcgcccactccgctaggaactatgttggaaaatttcaaggaaggatttagtggagactatggagttac

SEQ ID NO: 71237 - DNA, 586 bp, Homo sapiens
tgagagcgctccagggtaggcatttgcctcggtggaacgcctcgtcagagcagtgcactgcaggcccccgcggaggatcaatgcagcagccgaacaccgggaaggaactggcgcttggagtctggacatctggaatacggtaggcccggtcctgggaacttgcccactcsatttgagtggaagcgtggcctgatcacccacagcccacctttgtcggcactttggttttggttttgattcttgacttggtttgaattgcttaacaggctggttctgggaatttgcccactccatttgaatggaagcgaggcctgatcaaccacggtgtgcccttatcagcactttggtctcagtattgattttgatttggcttgactcgtttgcaaaaaggaaagtgaaagtgagtgagtgcttgagtttaagatgggcgagacaagtgagtgacccctttaccctttccttcttgtggtgggagtgttgttttgtctcgggaggaagatgggtgcaacgcaaagtaagcgcccactccgctaggaactatgttggaaaatttcaaggaaggatttagtggagactatggagttac

SEQ ID NO: 71238 - DNA, 586 bp, Homo sapiens
tgagagcgctccagggtaggcatttgcctcggtggaacgcctcgtcagagcagtgcactgcaggcccccgcggaggatcaatgcagcagccgaacaccgggaaggaactggcgcttggagtctggacatctggaatacggtaggcccggtcctgggaacttgcccactcgatttgagkggaagcgtggcctgatcacccacagcccacctttgtcggcactttggttttggttttgattcttgacttggtttgaattgcttaacaggctggttctgggaatttgcccactccatttgaatggaagcgaggcctgatcaaccacggtgtgcccttatcagcactttggtctcagtattgattttgatttggcttgactcgtttgcaaaaaggaaagtgaaagtgagtgagtgcttgagtttaagatgggcgagacaagtgagtgacccctttaccctttccttcttgtggtgggagtgttgttttgtctcgggaggaagatgggtgcaacgcaaagtaagcgcccactccgctaggaactatgttggaaaatttcaaggaaggatttagtggagactatggagttac

SEQ ID NO: 71239 - DNA, 586 bp, Homo sapiens
tgagagcgctccagggtaggcatttgcctcggtggaacgcctcgtcagagcagtgcactgcaggcccccgcggaggatcaatgcagcagccgaacaccgggaaggaactggcgcttggagtctggacatctggaatacggtaggcccggtcctgggaacttgcccactcgatttgagtggaagcgtggcctgatcacccacagcccacctttgtyggcactttggttttggttttgattcttgacttggtttgaattgcttaacaggctggttctgggaatttgcccactccatttgaatggaagcgaggcctgatcaaccacggtgtgcccttatcagcactttggtctcagtattgattttgatttggcttgactcgtttgcaaaaaggaaagtgaaagtgagtgagtgcttgagtttaagatgggcgagacaagtgagtgacccctttaccctttccttcttgtggtgggagtgttgttttgtctcgggaggaagatgggtgcaacgcaaagtaagcgcccactccgctaggaactatgttggaaaatttcaaggaaggatttagtggagactatggagttac

SEQ ID NO: 71240 - DNA, 586 bp, Homo sapiens
tgagagcgctccagggtaggcatttgcctcggtggaacgcctcgtcagagcagtgcactgcaggcccccgcggaggatcaatgcagcagccgaacaccgggaaggaactggcgcttggagtctggacatctggaatacggtaggcccggtcctgggaacttgcccactcgatttgagtggaagcgtggcctgatcacccacagcccacctttgtcggcactttggttttggttttgattcttgacttggtttgaaytgcttaacaggctggttctgggaatttgcccactccatttgaatggaagcgaggcctgatcaaccacggtgtgcccttatcagcactttggtctcagtattgattttgatttggcttgactcgtttgcaaaaaggaaagtgaaagtgagtgagtgcttgagtttaagatgggcgagacaagtgagtgacccctttaccctttccttcttgtggtgggagtgttgttttgtctcgggaggaagatgggtgcaacgcaaagtaagcgcccactccgctaggaactatgttggaaaatttcaaggaaggatttagtggagactatggagttac

SEQ ID NO: 71241 - DNA, 778 bp, Homo sapiens
actccagcctgggcaataagagtgaaactctgcccccccccaaaaaaaaaagaaaagaaaaaagaaaatgctaaatggtaagaaaaaacagcataataaaaatttgtgtggtgttgaaggacaacacatttgaagataatatttgaagaaatcattattacaattaacttcttttcttacttattggagcttgatgcctctaaaaacttcatcattggaatcacctctggtgctttaaaaaaaaaaaaaaaaaaaaaatccacttacctacacaggtgcaagtaaatcagactttcatgtaatgagacgcaggcctcatcatttgtaagctccccaggtgatttgattcaaagacaagcttgaggaccggtgacatggatctctacacataacctgcctaaatagattctctagaagcagtttatagagaaattccacatgaactctggaagaggatatgaatttgatgtacagtatgtcctcacttatcrtctttgaaagtctcttggaaacttcacttttaagcaaaattatgtatactgaaaccacttattcctcatcaacatcataacaactttgaacacaacaacagtgttggaggacctgctgtacattgtttccataaagtcaatgttcagggaattccaaaatgaagtgaggacttcacgtatataaaaagatggttatgattccacctggatgacagggttactggtcagaaactaaaggaggccacctaggtatagaggattcagttatgaggtttctgctaaacaaa

SEQ ID NO: 71242 - DNA, 778 bp, Homo sapiens
actccagcctgggcaataagagtgaaactctgcccccccccaaaaaaaaaagaaaagaaaaaagaaaatgctaaatggtaagaaaaaacagcataataaaaatttgtgtggtgttgaaggacaacacatttgaagataatatttgaagaaatcattattacaattaacttcttttcttacttattggagcttgatgcctctaaaaacttcatcattggaatcacctctggtgctttaaaaaaaaaaaaaaaaaaaaaatccacttacctacacaggtgcaagtaaatcagactttcatgtaatgagacgcaggcctcatcatttgtaagctccccaggtgatttgattcaaagacaagcttgaggaccggtgacatggatctctacacataacctgcctaaatagattctctagaagcagtttatagagaaattccacatgaactctggaagaggatatgaatttgatgtacagtatgtcctcacttatcgtctttgaaagtctcttggaaacttcacttttaagcaaaattatgtatactgaaaccacttattcctcatcaacatcataacaactttgaacacaacaacagtgttggaggacctgctgtacatygtttccataaagtcaatgttcagggaattccaaaatgaagtgaggacttcacgtatataaaaagatggttatgattccacctggatgacagggttactggtcagaaactaaaggaggccacctaggtatagaggattcagttatgaggtttctgctaaacaaa

SEQ ID NO: 71243 - DNA, 687 bp, Homo sapiens
tgaaactttttgtgtcaggatgggtcataatcttagttgcggttttctttccaaatagggttacaaagtagtaaaacatgggctggaagtgacagacctgagtgaattccaccttcactactttgtgccattggcctgcattttatttacaaataacctctttatttgtaaaggtgcagcacctctcccctggaactataatgacagaattttaaaatgctgcctggcacataataggcacttaatacatggtagccaatagtggcaatgatatgtacagctctgaacaaagaggcagtggcatctttgagctagaagggaaactaggcatttgttttcctgtttctgggcaaaactggggctcttactacctagaaaacaagtattccatatctgcctttcaactattgaacaagtttcacatcctgctatatgtcaagcattgtcttaggcacaagggttacgggggttaccaagcagccacagtccctgctgttgtgattatggtttggcaatgcctatttaaactgaaacctcactcagatctcccagtgatttgttgaggggctttatcatatgataaaagacgatatgggaccagcccaggacccatgggttttrctctgagccctatcatttctttgcctccttcctaaaaatggaagggggcggggcggggggcttggt

SEQ ID NO: 71244 - DNA, 644 bp, Homo sapiens
cagccttggctgaggaaaagccacctcaccttccccagaggactgagatcccggacatgagcatgatggctggtaagctggggctgccacttccaccccaaaagccatccaccgaaaagccccggaagcggtgtcaagggacatgacagcatcaagctcagagacctgacagtggatacctgcaaggatcgattgtgtattccagggagccggccttcctctccccacccttcaggaccctgccccagttaaggctgtgcactttaagagaagccccgagggagagcaaggattgacctggaggggtgttcttctgatggcagtctctttctgttgcccaggttggagcatamaggcacaatcccggctgactgcaacctccgcctcctgagttcaagcgcttcttgggcctcagccttccgagtggctgagactacaggcacgcatcaccacgcctggctaattttttgtgtttttagtagagacggggtttcaccatgttggccaggcgggtctcgaactcctggcctgaagtgatctgtgtgagtcggcctcccaaagtgctgggattacaggcctgagccaccacacctggccaagattttcttttttcttcctacacataagtaaggacatgtaatatt

SEQ ID NO: 71245 - DNA, 2544 bp, Homo sapiens
tttttctgttaattaattaagtttgaaacttctgtttcaaacttaatgaaacagagaagttccaaaagtttgaatgccttgcagaggaagtgcatcatgtcctgaagatttggctggtgtaattcttttcctaaaccttttcttcatacataaaaagcttccagcatcaggaatttttacagcccaaatccttagggatagcaaaaagtagaacattcaggctgagtctaagaggcaaaaatctagttagaaattgcccaggagaattaagacaaatacacaatgcttaagtcctgcgacagaaatttaaaaataaataaaatcaacccaaaatggccaaccctaaaatgattcagaggctttctctgcccagggattgcttttataatgtatgactttatgcctaattaaaatgaggtcataagttgatagatggctgcaccacaacttaagagacatgggttcaagtctctgctttgacccaacctgtgtgactttcgaaaacatacctcttccttcaacctttgcttgctaatctaagaaacaggaatcataaaatgtcctacctattaactggaaaatgagaaaacacatataaaaggtctccaagatcttaaagtgtcactttattataagactatggactgccaagcaaatcacttgtataagccaataaggcaatgcagcagggtcacagttgtgcctagaaatgttggttatctacagtggaccttgtcattgttcttatcatccacttcatccaaacgactaaactgaagctaagtcaatcgtgctagcccatttccttgtcagtgattgcttcagaggcaagttggaaaagtttacggcaaagatacgtaaggagaggcagacttgggaatgggaaaaaacgagtctctctcccccactcaacatgcataaggaagtgcattgccttacctctgcaggcagccattttgttttcatgacataagctagagcagagacagtcaatgaagtatagaaataatctggatatctgcaattgggaaagaacctgtgtacctgatgttactgagttactaaaagactggctctgcctctgtatgatctgatatggggttccataatggaatagctaagagaactggctaaggaactatgttttcagttcagattttggctctaccaccaattacttaggtgaccacaggcaagttacttaatcctactggaccataattttccatctctaatatgagaataatgatagtatttcccctacagggttgtgatgaggattaagtaaatatttttaaggctgttggtatctggcacagggtaagcactatataaaagtttgtaaataaataatttagaaatatagtgtttatttattattttaaacagtctgagttgggctttgttatttggtcccaaaggaaaacaaaatagactgtttttcttagtcttctgagccagccatcattaattgtgatgtcaaaaatcacggatgtaacaaaagtacattttactaataattaaaatatttaagttatcaaattatttactttaatatacatgtatacatatatatgcttttgtatgtatatacatgtgtgcataaaaagcttccagcattaggaatttttaaaaacccattccaaggtgatctgaaaacagcaaaagaccaaaagtagcaaaaagaatttaatatacatgatacatatatatgtatgtatatacatgtgtgaacatatatgtatacatatgtgtgtatatatacgtgtgtgtgtgtgtgtgtgtgtgtgtgtagagagagaggcaaattcaacattatcttgatatctacactattcttacaaactttgtcacagttagctgtgtggtctggaatcgacatttttcttttctaggtctcagtttcctgagaaatgactggcattatacccaggaagcacagggagttgagaataactctgggtttacccatgagagtgtgttgcacatgggggacccaagggctgcacactacttctcaacctctacaataagccccccagaaaacctaactagagtcaagtctgctgttcctgttatgccatcttgcttgtgggaaaggccaaggtctccaaacattgccctttgtggcagagattagctagatgggcccctcacccattacctctccttcttggacacccagctagaatacatattttagcctccctggcagttagatgggcacgtgattgagttttaaccaagggaatgtgggtgaaagtgaggtgagccatttacaagcctaactcatrtaagtctcctacgtttggtcctcatcctctttctctaaccagcttctgactgaagaggaggtgaggccaccaggtggaaggaggttttggaatgactggtggaaggccaagtattcagagtcaactgcattggacaggaatgtaaaatagagatgagcttgcgttgtgctaactccctgagaattggggatttatctgttaaaagaggtcatgtttctcatgttttcttaactgataaacttagcaaaaa

SEQ ID NO: 71246 - DNA, 2544 bp, Homo sapiens
tttttctgttaattaattaagtttgaaacttctgtttcaaacttaatgaaacagagaagttccaaaagtttgaatgccttgcagaggaagtgcatcatgtcctgaagatttggctggtgtaattcttttcctaaaccttttcttcatacataaaaagcttccagcatcaggaatttttacagcccaaatccttagggatagcaaaaagtagaacattcaggctgagtctaagaggcaaaaatctagttagaaattgcccaggagaattaagacaaatacacaatgcttaagtcctgcgacagaaatttaaaaataaataaaatcaacccaaaatggccaaccctaaaatgattcagaggctttctctgcccagggattgcttttataatgtatgactttatgcctaattaaaatgaggtcataagttgatagatggctgcaccacaacttaagagacatgggttcaagtctctgctttgacccaacctgtgtgactttcgaaaacatacctcttccttcaacctttgcttgctaatctaagaaacaggaatcataaaatgtcctacctattaactggaaaatgagaaaacacatataaaaggtctccaagatcttaaagtgtcactttattataagactatggactgccaagcaaatcacttgtataagccaataaggcaatgcagcagggtcacagttgtgcctagaaatgttggttatctacagtggaccttgtcattgttcttatcatccacttcatccaaacgactaaactgaagctaagtcaatcgtgctagcccatttccttgtcagtgattgcttcagaggcaagttggaaaagtttacggcaaagatacgtaaggagaggcagacttgggaatgggaaaaaacgagtctctctcccccactcaacatgcataaggaagtgcattgccttacctctgcaggcagccattttgttttcatgacataagctagagcagagacagtcaatgaagtatagaaataatctggatatctgcaattgggaaagaacctgtgtacctgatgttactgagttactaaaagactggctctgcctctgtatgatctgatatggggttccataatggaatagctaagagaactggctaaggaactatgttttcagttcagattttggctctaccaccaattacttaggtgaccacaggcaagttacttaatcctactggaccataattttccatctctaatatgagaataatgatagtatttcccctacagggttgtgatgaggattaagtaaatatttttaaggctgttggtatctggcacagggtaagcactatataaaagtttgtaaataaataatttagaaatatagtgtttatttattattttaaacagtctgagttgggctttgttatttggtcccaaaggaaaacaaaatagactgtttttcttagtcttctgagccagccatcattaattgtgatgtcaaaaatcacggatgtaacaaaagtacattttactaataattaaaatatttaagttatcaaattatttactttaatatacatgtatacatatatatgcttttgtatgtatatacatgtgtgcataaaaagcttccagcattaggaatttttaaaaacccattccaaggtgatctgaaaacagcaaaagaccaaaagtagcaaaaagaatttaatatacatgatacatatatatgtatgtatatacatgtgtgaacatatatgtatacatatgtgtgtatatatacgtgtgtgtgtgtgtgtgtgtgtgtgtgtagagagagaggcaaattcaacattatcttgatatctacactattcttacaaactttgtcacagttagctgtgtggtctggaatcgacatttttcttttctaggtctcagtttcctgagaaatgactggcattatacccaggaagcacagggagttgagaataactctgggtttacccatgagagtgtgttgcacatgggggacccaagggctgcacactacttctcaacctctacaataagccccccagaaaacctaactagagtcaagtctgctgttcctgttatgccatcttgcttgtgggaaaggccaaggtctccaaacattgccctttgtggcagagattagctagatgggcccctcacccattacctctccttcttggacacccagctagaatacatattttagcctccctggcagttagatgggcacgtgattgagttttaaccaagggaatgtgggtgaaagtgaggtgagccatttacaagcctaactcatataagtctcctacgtttggtcctcatcctctttctctaaccagcttctgactgaagaggaggtgaggccaccaggtggaaggaggttttggaatgactggtggaaggccaagtattcagagtcaactgcattggacaggaatgtaaaatagagatgagcttgygttgtgctaactccctgagaattggggatttatctgttaaaagaggtcatgtttctcatgttttcttaactgataaacttagcaaaaa

SEQ ID NO: 71247 - DNA, 2544 bp, Homo sapiens
tttttctgttaattaattaagtttgaaacttctgtttcaaacttaatgaaacagagaagttccaaaagtttgaatgccttgcagaggaagtgcatcatgtcctgaagatttggctggtgtaattcttttcctaaaccttttcttcatacataaaaagcttccagcatcaggaatttttacagcccaaatccttagggatagcaaaaagtagaacattcaggctgagtctaagaggcaaaaatctagttagaaattgcccaggagaattaagacaaatacacaatgcttaagtcctgcgacagaaatttaaaaataaataaaatcaacccaaaatggccaaccctaaaatgattcagaggctttctctgcccagggattgcttttataatgtatgactttatgcctaattaaaatgaggtcataagttgatagatggctgcaccacaacttaagagacatgggttcaagtctctgctttgacccaacctgtgtgactttcgaaaacatacctcttccttcaacctttgcttgctaatctaagaaacaggaatcataaaatgtcctacctattaactggaaaatgagaaaacacatataaaaggtctccaagatcttaaagtgtcactttattataagactatggactgccaagcaaatcacttgtataagccaataaggcaatgcagcagggtcacagttgtgcctagaaatgttggttatctacagtggaccttgtcattgttcttatcatccacttcatccaaacgactaaactgaagctaagtcaatcgtgctagcccatttccttgtcagtgattgcttcagaggcaagttggaaaagtttacggcaaagatacgtaaggagaggcagacttgggaatgggaaaaaacgagtctctctcccccactcaacatgcataaggaagtgcattgccttacctctgcaggcagccattttgttttcatgacataagctagagcagagacagtcaatgaagtatagaaataatctggatatctgcaattgggaaagaacctgtgtacctgatgttactgagttactaaaagactggctctgcctctgtatgatctgatatggggttccataatggaatagctaagagaactggctaaggaactatgttttcagttcagattttggctctaccaccaattacttaggtgaccacaggcaagttacttaatcctactggaccataattttccatctctaatatgagaataatgatagtatttcccctacagggttgtgatgaggattaagtaaatatttttaaggctgttggtatctggcacagggtaagcactatataaaagtttgtaaataaataatttagaaatatagtgtttatttattattttaaacagtctgagttgggctttgttatttggtcccaaaggaaaacaaaatagactgtttttcttagtcttctgagccagccatcattaattgtgatgtcaaaaatcacggatgtaacaaaagtacattttactaataattaaaatatttaagttatcaaattatttactttaatatacatgtatacatatatatgcttttgtatgtatatacatgtgtgcataaaaagcttccagcattaggaatttttaaaaacccattccaaggtgatctgaaaacagcaaaagaccaaaagtagcaaaaagaatttaatatacatgatacatatatatgtatgtatatacatgtgtgaacatatatgtatacatatgtgtgtatatatacgtgtgtgtgtgtgtgtgtgtgtgtgtgtagagagagaggcaaattcaacattatcttgatatctacactattcttacaaactttgtcacagttagctgtgtggtctggaatcgacatttttcttttctaggtctcagtttcctgagaaatgactggcattatacccaggaagcacagggagttgagaataactctgggtttacccatgagagtgtgttgcacatgggggacccaagggctgcacactacttctcaacctctacaataagccccccagaaaacctaactagagtcaagtctgctgttcctgttatgccatcttgcttgtgggaaaggccaaggtctccaaacattgccctttgtggcagagattagctagatgggcccctcacccattacctctccttcttggacacccagctagaatacatattttagcctccctggcagttagatgggcacgtgattgagttttaaccaagggaatgtgggtgaaagtgaggtgagccatttacaagcctaactcatataagtctcctacgtttggtcctcatcctctttctctaaccagcttctgactgaagaggaggtgaggccaccaggtggaaggaggttttggaatgactggtggaaggccaagtattcagagtcaactgcattggacaggaatgtaaaatagagatgagcttgcgttgtgctaactccctgagaattkgggatttatctgttaaaagaggtcatgtttctcatgttttcttaactgataaacttagcaaaaa

SEQ ID NO: 71248 - DNA, 527 bp, Homo sapiens
tcaggcatcatctgaataaaattctttcatatggagtagaaaaaacttaatgttaacagtgttcctagaatgcaaaagtgtgagcaaaactaggttagatgattcttcaggtgcctaccagttctaacagcccatgtttcagtgaaactgtgcagttctattatttccatgcacctcacataaatgtaatcgacaatatgacattgttattcaggaggcatttataagccctattgagttcacactatgaacacaaatttcggatatagattctttccctgkcttaaaatcaattgaaaccagctccactgtaggaaagtgtggtacaatgtacacaatcaatctttccctcttaaaggagttacaatgtccaatgacaagccagcaggttactatgatgggggagtagatgtgacacaggctctcaagagtggctggagttaagcaatttcattcagccaatgcacagctgctgctctagaactggaagtaaattataggagacatgtgttacctttgcctgatga

SEQ ID NO: 71249 - DNA, 628 bp, Homo sapiens
agaaaaaaagagttgccattctgcagtgaaatacaagtgtttttatagatgagctagtgggagggggtatgttatccacatagggcatgaaaaactggttaggaccaggtgtgtcatctgcttagagcatgaatctctggcagctcacaccccaaccttttattatgcaggcagattctcagcctgagctactccaagttgcttatctcttttctactgtgcatatgctacaaagaggggtggggccccccatgttggatatgtctggcccaaggtggtcatttctacccatgcagctgcaggcatccctgcccacacaagcttccagcttccttttgtatgattgcagcccaattttccaggctgctctttgttaaagagaagtgaattcctgggttgctttctgttagaagggaygttctgttgagaactctttgctctatctgcctagctagtttctttctacatctgctctcaatgacaattattcagttttaatggggtcctgggggtgggaacagataaatttgagaccacaaagtaccttagaataagaattcaccctttagtcagctttagtgtgagttgcacatctattataatattggcttcatgcactactgaatat

SEQ ID NO: 71250 - DNA, 1040 bp, Homo sapiens
gtggcctgcttggtgaggctgctgcttttttatgatctcaagtgtcttgtccatgtcaaaacttgccttgtttttttgtttactttgaatcagaaaaaaaggttcacaaccacccttgggaattcctcctcaagtgtgcgtttggtcacatcacccatggctaccaccagtacatgactgtttattttggatgtccttttctgatgttcagctaatttaacccacaatgaagttaatccttgcttctttggaaaagtacagatttacttattagctgccttccagagacatttgcattttcatgaaagcgagtatataattacattgacttttggactcatctacccacatatgtggtgggcgccttttgaaagtcaggattcagagtaaatcagaactgtcttgagttagctgaagttctctttaaggttaacaataaatgtatctatgacaaacatggggatgtggtattgcatattcgattatgtccatttatctttccttcttctgggtgagaggggagatgaaaatggagctaccttggagttcatgttttcaccttgwttctccgcatttatagcatactgattgaaagcatggctgccagaaccatattacttgggcttgagtactagctctgtcacttactcattgtttaactttgggcggggtacttaatttctctgtacctcagtttcataatctgtcaagtggggataattatggtaaccaccactgagcattgttatgaagatcaaataagttaattcatgtaaaatatttagagcagaacttagtatatagcaactgcgatacaagtgttagatatcatttttattagggtttagtaattgcataaataaaagagatgaaagtctaaattattaatcagggccatttatctatgagacactacaggcattgtgtctagccctgtgggtttacattagttagggtaggttattgctgcaacgtaccctaacttgatatgatttttgctgcaaaaatcatatcaaaatagtctataatggcttaaacat

SEQ ID NO: 71251 - DNA, 1040 bp, Homo sapiens
gtggcctgcttggtgaggctgctgcttttttatgatctcaagtgtcttgtccatgtcaaaacttgccttgtttttttgtttactttgaatcagaaaaaaaggttcacaaccacccttgggaattcctcctcaagtgtgcgtttggtcacatcacccatggctaccaccagtacatgactgtttattttggatgtccttttctgatgttcagctaatttaacccacaatgaagttaatccttgcttctttggaaaagtacagatttacttattagctgccttccagagacatttgcattttcatgaaagcgagtatataattacattgacttttggactcatctacccacatatgtggtgggcgccttttgaaagtcaggattcagagtaaatcagaactgtcttgagttagctgaagttctctttaaggttaacaataaatgtatctatgacaaacatggggatgtggtattgcatattcgattatgtccatttatctttccttcttctgggtgagaggggagatgaaaatggagctaccttggagttcatgttttcaccttgattctccgcatttatagcatactgattgaaagcatggctgccagaaccatattacttgggcttgagtactagctctgtcacttactcattgtttaactttgggcggggtacttaatttctctgtacctcagtttcataatctgtcaagtggggataattatggtaaccaccactgagcattgttatgaagatcaaataagttaattcatgtaaaatatttagagcagaacttagtatatagcaactgcgatacaagtgttagatatcatttttattagggtttagtaattgcataaataaaagagatgaaagtctaaattattaatcagggccatttatctatgagacactacaggcattgtgtctagccctgtgggtttacattagwtagggtaggttattgctgcaacgtaccctaacttgatatgatttttgctgcaaaaatcatatcaaaatagtctataatggcttaaacat

SEQ ID NO: 71252 - DNA, 2108 bp, Homo sapiens
tggtaaaaacattcagacattcggatgaactctgacagtcatggaccaaatcacacatgctgcattacacatggtgaaatgatctgcaaacagatatcaagcatactaattaagtgctttgtaaaaataaatttctcaaaattttcatcaaggattttgaaaaagtcaggaatgattaagttggaaaatgcagtttcttttctctttcctttttttttttaaaaaaaccatgattttaaattatgatcaaatcttataaaactatgagaagagttgctggcccatctctagattaagaacaaactgaaataaattagatttcatgtccaaaaaaaagtaatccagctcaacaacctgtgtgccaagtttctctcatataatttgaaacagtcaagcaataaactctgaaaaaggaatttctaatggaagccttgaaaacacttgactccagctttgctactgggtgccataataaatccagaaacctaaaacctcagatacactggagaagtaaaaactttcagcggagctatgtaatgtatagtctaatatgaaagcttaagaagcaaaaactttgctccagtgaaagtttcatatactttattccccaggcattcaattcccctcccccaccctttgccaacatttcattccttgctaccatattatgaaagctaaaaaaaagcttcctgaatttttgagataaaaatgtcatagtatttaacgtcatttagaagagaaggctttaaaacacaaaagctaggctatgagattcggggaagtagttmggtcaaatatttacgacacagaatggagagactgttttgagtaatagttacaggctgaccaaatttggggcataaggttgaaaacaaccttagggttaaaaaaagcactctagattttcttttcaaacagtggcagacattctgtagctgtattgttgaaggaaatgtaggtcattcatagtttttattagggatacacagataacaatcagcagcaaggctatcccctatgactagggctacagaaggctgctagtaaactgaatagaataagcttcactaaaatagctgaggaaagtctatttgaaagataatgattttgctcaaaattgctacttgacttcataggtgaaaacagtgctctctgatttaagattgctcaaaggaaaaaaactgtctgtgtatatttatttgcctctgaatcattactttcctgtggtgttgggtcaaactataaatcagaactcagtattttcttactcttaccacccacaggaatggaggggacagttttgtcagctctctacatgcataaaatcacactcagtggaagggtactcccaaaggctggttgggaacaggaagaactcaaatcctggctcatcttcttatagggaccatttttacggtcaagtttaatggattccaacttgagatttacagtaaaagaaatgggaatctgatttttttttccttttttttttagatggagtctcactctgtcaccgacgatggagtgcagtgtcgtgatctcggctcactgcaccctctgcctcctggttcaagtgattctcctgcctcagcctccggagtagctgggactacaggcatgtgccaccacacctggcaggaatctgaaccttacagtcaatatttcagaaagcccaataagaaacatacatttactggcaatgaagttgcaaaactgaactaatggttttgtgttgttttcatttcttgatagaattgtgccaatccagtgtcataacgcaggttatttaacaattagcagaaggagggattggcatgatacaggtctctttgaggaatacaaacagctaatttagtaggccaaatctttctgaacacaaggtccctagagagaaaaacagctgttgtttaaaggcagggaatcatttacccatttcaatctaatcattttacagttcaggtggttaactgaggctcacagaagtaaagaatttggccagagaccttaagtaatggaaacaacactcaaatctcgctctaagagttaaattcttcccactcttcaaagttaaattcttcccactcttctaagttttttcctctaagatc

SEQ ID NO: 71253 - DNA, 482 bp, Homo sapiens
tttttcaagagagtcagacacccagatctttatgtgaaatccctcaacttttaaatattagaaaataattctgaaacaacttttagtttgtttgggccaaataaaacttacctacagccaggaggcatatgtggattataaatatgtgacctctagaggccccatctttcctcaaaaatatacatgcaaaaatgcaaaatctgggctgcgcacggtggctcacgcctgtaatcccaacgctttgggaggccgaggcaggtgaatcacgaggtcaggagttcgagatcaggctggccaacatggtgaaacccatctctactaaaaatacaaaaattagctgggtgtggtggcacgtgtctgtwgtctgagctactcaggaggctgaggcagaagaatcgcttgaactcgggaggtggaggttgcagtgagctgagatcgcgccactgcactccagcctgggcaacagagcgagacttggtctc

SEQ ID NO: 71254 - DNA, 509 bp, Homo sapiens
gcctcacaaaaataatattagccccagcacaatgatcattactgataccaagattgggcttttagatgactgcaactggaaagggatagtggtgaggtgagaaaaggaggaggtaatgagacttgaatcatctggtgtcaaggttcctaaatgatggagaactgagtgatcatgggaaacccattcacaggcaggtctctgggctccacccaaactctgccaaatcrgtgtctctgggaatggggaaatgatatcttgagaattctacagttgaaactaaaaattctaggaatacagggagcttctccctcagtctagaaataccaggttgtttatttcttcagcaaatgtttattgagcacctgctatgtgccaggcactgtgataggcatttgggatacatcagggaatccgtagatgggaatccgtagacaggaatccctagctttctggacatggtaaccatttagttgattgcagagaatataaaaaataatgattaaccctca

SEQ ID NO: 71255 - DNA, 1957 bp, Homo sapiens
tgaaatccaacctccaccagcttcttagtcccttgcagacaagcagtatttatccagtgccaccatgtccagggtgctggggctgcagatgaggtccctgtcctcaaggtacatgtgatctttagggggattcataatgatcaggcatagagttaaaggaaggtataatttcagacaaggrtaagtgctacaaagaaaacggaacaaggttctgtagtagggcgtgtctagggccagtgagggtggctagattctgggtgatgggtgagtaataactaatcaataacacttgtgctgcctctcctatagtctcggttgtaagcacttcatgtataccaactcacttaattctcacatcagcccaaagaggttggtgcccttgttatccccatttgacagatgaagaaactgaggcacagagaagtgacatgatttgccctctgagcctcaattttcccatctttaaaagggaagctcattagacttctgtggaatgaaaacagtttgtaaactatgaagttgtttacacatctgtattttgcacatctgcacttttaccttccattacaatcagtgagcaattgggagcctcagtttcccccttaaataaatgatctccttttttggactgtgaactactcagagttgagagccacacctggtaggaatacatccctgtctctccatgcctggaccagtctctggcacatagctgcagttcagcccctactttttcctttctcagctctcaagcatgaagaatttccttccaaaggaagtatctttgggtacctgtcaatgtgtctttactgttggcccaactatcttcaccttcacgtcctgttcaactaggggggctaattgaaggccagactcattcaatactaagcctggtacactcctgcccccactccccattctgccagacccatccatgagctcagggccgggcagtgctggggatgcacctgggcatctccaacagtgatgtggctctttttcaggcaacactgtgaactaccaaaccaaaaacttctgcttaaaaactacctaaaaattttggatcacatgtaaaacccatccttttagatgagaatctccactttctgtgtgccatgacctttatggcagtctatggaagcctagggatcccttctcagaatgctgttcttaaatgttttaaataaatacaattatgaaagaaacaaataactgtatttcaccataatgtaaatttatttttatttttattttttaagatggggtcgccttatgttgcccaagctggactccaactcctgggctcaagaggttgtcctgcctcagtctcccaagtagctgagactacaagcactttaagtatttaaaacaattctgatagagtaatatataaacttttttcttacattaagcctttttaaatattgatatagctgttcatatattggggccacatgtgatattttgatacatgtacacaatttgtaataatcaaatcagggtaattgaggtatccaaaacctcaaacatttatcttttcttcgtgctgggaacactacaattcttctcttctagttattttgaattatataataaattattattaaccataatttctctactgtactattgaatatgaacttttacattaatatataaaacaagatttagcagcagacaataacaaccataactttgaactaaaagacaaatgtgaggaaatgttcagaatgccgcataaagacaccaagtgacagaaaatataaaaaaagaggttaagcagctttagtgatagaatgagaaggtctgacaggcaagtaatagaaattttagcaggagagagcagagaaaattgaacagaggcattatccaaaatatgttttcgtataattaatgaaagacatgaatccttaaatccaagatgtccaataatatcctagcaggataagtaaaaata

SEQ ID NO: 71256 - DNA, 2470 bp, Homo sapiens
gggccgaacagggcacttagattgctccagttgcctgcttggccctcttccacatgtactttgctgcctttcattcttgctctaaaactttttaagaaactttcactcctgctctaaaacttgccttggtctctcactctactttatgctcctcagctgaattctttcccccaaggaggcaagagttgagtttgctgaagatgggtcagacttgccactggtaatagattgagaaagaaaaactcaaattatgaacaatctagcrgtaaacttcctgagtttttcattttttgtttttctttccttatcttcaagcctagactgaaaagcaacctaaaccccagagctgtggactcaccacagatcaggtgctccaaaagaagccctctctttctgatctgaggagtgagaaatgggtccctttacaggacacagaaaatgagagaaatgccctgcattccttccttccttctttcctccctttcttctttccctcctccctccctctttttctccctctgtttctccttctttctttttctctttcctaaccaagactccaagcaagctatagtccacagaaaaacaaagtccacagaaagctggtagaatgcaaagcagctggatgatggcagttttgaccaataggcacatgcaactctaagaaggagaactcctctttggcaaaagatccacttcatacttttgtattcaagaaaattcgagatgggtgtatatatatatacacccccaaaggaccagaaagaggctctcctggatgcagagagtgttggggagattaaatagaagaagccactcaaacaaaggatcctatatatctgtcattaaattctgggctcacccttgaagtgtgcatgcatggaaatgatcctaaacaatacactagctcgagagctgaactatgggatagaacaccacttaggtcccagattgcctactgggtggcgcacacacacagtacggatttgaataattttccaaaagctttgaaaacacagtccacagaaagcaggtaggaacatgcaacttaaacataataagtttaaataccttatgaggtggccagcctccaagatggcccccaatgaccccacatcctggtattcacaccctctcctcacatactgtaccaagattggtctacatggccaatagagtagggcagaagtgactgcttgtctctttcgaggttacaagactgtggcttcagaattgggttcactctgtcttgatcactctatctaggggaagttatgtcatgaccagccctacagagaggcccacatgggtggtgcagaactgaagtctcctgtcaacctccacatgagtgagcttggaagtggatcctcaaaatccggtcaagctttgattgcagcatcatgagatatcctaagccagaagcactgagctaagtcactcttagctttctgaccctctgaagctgtgagataatgtttgctgtgttaagctcctggggtttggcataatttgttatgcagcagcagataactaatatgcctaccaaaacaagcaagcaaaaagcaacattctccataggattcaaacaagacatagagtcttataacaatcaaaacgtcaatgatgcaatccagattacttgacaaaagaactgagaaaaatctcaacaatttgcaaggaaaaagataatcaacaagaagaagcaaacaacctaatttcaaagagctggcaaggatgctaggtttacccctaagtatatcatttttaatgtaactattgaaaaattatatttttactttattttccaaatccctattgctagtacataaaaatataactgacatttttatgttgaccttgtatcctgtagtgttgttaaattcatgtatgcagacttttagcagattccttgagatttcctatgtagacacaatcatactgagtaaaagaatccagtttccaaatgttacataatgtatgattccattcatatgactgaaaagggccagaggttacaggtggggaaaggttcttaatacaaaagggtagcacaagggaatttttgaagtcatataaatgttctttattctgcatatgtgttggtgcacatatacaatatatgcatacacaaatccatatatgtgcttaaactcaaaactgtatatcaaaaaaatcaatgtgtgcaaatttaaagcaataaaaccataaaaatgagagaagcctgtaatatataatgcttcccataaaaagtctcaaaagttgttttatagtattacatattctcctaattataggtaaaatgtgtgaatgtttacgcacttgtatgcctatgtgtttgtaggtatgcattatgtgagtacagaaatatctttaagaatccaaagtaaattattaacagaagtggaattggggaggagtaaaaaattttacttgagtaaacttttttattttattttttataaccaacttg

SEQ ID NO: 71257 - DNA, 1133 bp, Homo sapiens
gaggtgtgattttctttggtaaggagagaaaagagcaaccatgaaaggagaggtgacactttctctagcagatggattttaggaaagactatagtaggaaactgataatctgaacattaagtccyttaaaatgatccatgccttcatactgctttgaaagtcttcatgtactcacaaaagtatctgttctccagtttgttgctgtgttgcagaacttctgaaacactttagacctgttgcttttcccactgactggtcagtgtagctaataaaccatgaggttgcacgtatgtatcccctcactgtctacaacaccattgataggaaaaaactgaggctcgccatgtgaattgtccttggattatagcaatgtaggctgcatgttgctttcttctcctcattatcttcccatagggatgagtcagcagcttggtccagcaagcagcaaaacccatgaaccagcctttgccagggcagttgtaacatagctcagacagtcacgcttcacctcactggagaaatgtggcccataaagggaaaaaaagacaatcacaagcccatatacgtggttttcccatacatccagtagcaatcctatccacatcctgcaacagaatgtttcaacatccccatgggtgttctacattgtatgtattcttagattttcaataatctgttccatcctctccttttcaacttgaaaccctagcatcaaaagtggctgttgatctgataggaccccacctttggctgtggctcattttccagctgcagtccaaatcttccagtgatgacacgaagctatcaccatggcaaccatcactgacacacagtgcaaagctgaggatgaggcatgagttgttctccaactcacttccataacgttaaaccacgctgtaggctttaacctactaccctctgggtttactgtcctgtcccagaaccagagaagcagccccccatttttaaactgaaattgttctttcactctcctcaggacctctccataagaaaacaatggcaaaggtgaccatatggccacctaggccctgaaagtatggtatttactcactcaaaacccaacaatgttgcagttaattgtagaagtgccattggggaaggataagatggta

SEQ ID NO: 71258 - DNA, 1133 bp, Homo sapiens
gaggtgtgattttctttggtaaggagagaaaagagcaaccatgaaaggagaggtgacactttctctagcagatggattttaggaaagactatagtaggaaactgataatctgaacattaagtcctttaaaatgatccatgccttcatactgctttgaaagtcttcatgtactcacaaaagtatctgttctccagtttgttgctgtgttgcagaacttctgaaacactttagacctgttgcttttcccactgactggtcagtgtagctaataaaccatgaggttkcacgtatgtatcccctcactgtctacaacaccattgataggaaaaaactgaggctcgccatgtgaattgtccttggattatagcaatgtaggctgcatgttgctttcttctcctcattatcttcccatagggatgagtcagcagcttggtccagcaagcagcaaaacccatgaaccagcctttgccagggcagttgtaacatagctcagacagtcacgcttcacctcactggagaaatgtggcccataaagggaaaaaaagacaatcacaagcccatatacgtggttttcccatacatccagtagcaatcctatccacatcctgcaacagaatgtttcaacatccccatgggtgttctacattgtatgtattcttagattttcaataatctgttccatcctctccttttcaacttgaaaccctagcatcaaaagtggctgttgatctgataggaccccacctttggctgtggctcattttccagctgcagtccaaatcttccagtgatgacacgaagctatcaccatggcaaccatcactgacacacagtgcaaagctgaggatgaggcatgagttgttctccaactcacttccataacgttaaaccacgctgtaggctttaacctactaccctctgggtttactgtcctgtcccagaaccagagaagcagccccccatttttaaactgaaattgttctttcactctcctcaggacctctccataagaaaacaatggcaaaggtgaccatatggccacctaggccctgaaagtatggtatttactcactcaaaacccaacaatgttgcagttaattgtagaagtgccattggggaaggataagatggta

SEQ ID NO: 71259 - DNA, 1133 bp, Homo sapiens
gaggtgtgattttctttggtaaggagagaaaagagcaaccatgaaaggagaggtgacactttctctagcagatggattttaggaaagactatagtaggaaactgataatctgaacattaagtcctttaaaatgatccatgccttcatactgctttgaaagtcttcatgtactcacaaaagtatctgttctccagtttgttgctgtgttgcagaacttctgaaacactttagacctgttgcttttcccactgactggtcagtgtagctaataaaccatgaggttgcacgtatgtatcccctcactgtctacaacaccattgataggaaaaaactgaggctcgccatgtgaattgtccttggattatagcaatgtaggctgcatgttgctttcttctcctcattatcttcccatagggatgagtcagcagcttggtccagcaagcagcaaaacccatgaaccagcctttgccagggcagttgtaacatagctcagacagtcacgcttcacctcactggagaaatgtggcycataaagggaaaaaaagacaatcacaagcccatatacgtggttttcccatacatccagtagcaatcctatccacatcctgcaacagaatgtttcaacatccccatgggtgttctacattgtatgtattcttagattttcaataatctgttccatcctctccttttcaacttgaaaccctagcatcaaaagtggctgttgatctgataggaccccacctttggctgtggctcattttccagctgcagtccaaatcttccagtgatgacacgaagctatcaccatggcaaccatcactgacacacagtgcaaagctgaggatgaggcatgagttgttctccaactcacttccataacgttaaaccacgctgtaggctttaacctactaccctctgggtttactgtcctgtcccagaaccagagaagcagccccccatttttaaactgaaattgttctttcactctcctcaggacctctccataagaaaacaatggcaaaggtgaccatatggccacctaggccctgaaagtatggtatttactcactcaaaacccaacaatgttgcagttaattgtagaagtgccattggggaaggataagatggta

SEQ ID NO: 71260 - DNA, 1912 bp, Homo sapiens
cttcagagaatatgaactccacaagttggatttctagggccactaatttggtcacatctatgtaaccaaagcttttgaagacacttctacaaaattcttgcctctaccatgaaaaggatggggtaacaaagaggggttaatatttactaaacagaaaatgtccttggatgttttccttttgttcatcgcagaatcaaatatggctgagaagcaagcaccagctgaagaccaagtggctgcgacccccctggaaccccccgtccctcggtcttcaagctcggaatccccagtggtatacctgaaggatgttgtgtgctacctgtccctgctggagacggggaggcctcaggataagctggagtgtaagtgctcaccctgtcaaggggcttcagctttttcctagagaaggatctggggttctatccattattcctaaacacactggagattgagttgatatcacggatatgcgtcccgcctctttggggaggtttctttgtcctgttaccaaaagtgatatgaacaactcctagaatccaccctgggacatattgccagttgtgtatcacatgggaagggcatctgaaacccaggtattgagaaccagaatctggaaagggaaggggtcccatcaagtggtcaagacttccttgctttgctggcaggacttcctgaaagcctttactcagaaaactrctacctcctcttaatagattttttaaagaaagatattcaacatctgtcctccttcccctattctgtgcccaggcaactctttaactatgaggaaatattcttttcttgagatctcatcaacctctgtcttgataagcctttgtccatttctctacctatgcccccccgccaccccaagattcttggcctctagagaacgagggggccagttaattaaaggagttgagctcagtttcgtggtgctactaaagtaggttttaaaaacatgtcttcaggaggagagtaagagctgggagcagaaagttcacagtggctgaaacagcctgcagtcttgtagatgattcagtccagtgatggtttccctggcttctgtgagcctacagacatacttctaaaaaaataggagatgacaggaccttgttaaaaaatctgtattgtctttgcttctcttgggaacttaagtagacagtaaggggaaaaaaatgtacatgttacagccaaagtcaaaattccagttaataataagactagtcaacaaaacttaaacataagcaagggaagtctgccaaaggctaattcttgccaaaaacaaaatgaaacagtttgctcattagctgagcttaaaatctctcccataggtttgaagtgttaacaattgcaagtcttaagtgctaatttggtggcaaatgtagcagatttctgttttcttctagctaatgttaaaagtgaaacatcaaattatttccagcatttagctggattttgagtttcaggcattgtatttgttagtgactaccaaagagaaggtgacagatttttttatattaatgactctccaactgagtcttataatgaccatgcaaagaaatgttaaaactttttattacagaaaatttcaaagataaaagtagagagtacagtgaacatctgtggccccatcatccagtttcaacaattatcaactcatggtcaatcttgttgtgtttatacttcccaccattccctctgcctcagagtatcttgaagcaaattccaggcatcatataatctgtaaatatttcagtatgtacctctaaaatcgcagactcttcttcttaaatataacctcaataccatcattacagctaaagaaaatgattccttttgctattatcaaatagtcagtattcacatttttccaattatcctagatatttttaattgtttgtttgaatca

SEQ ID NO: 71261 - DNA, 631 bp, Homo sapiens
acggatttgcacgtaaacctgcgtgctcgcctaacaaacgaagacagaagggctgaggtagcacctatttcacaaggtcaccgaacgcttcctatgaagaactttgcatacatactgcttctaccctgcctattcgcccatgtctaaaatacccaggagtgcccaatttgtccactgagaggcaggcaagcagccattttcttcaggcttccttatttagcattggagatggttttaaataggcaggtggttgttgccatggttaccccattacaccagcggctaaacttaggaaaggccgcaaggcataggaagaaagcttgatacccaggatttggaaatgtaaacggcattatcaaacaaggcytattttactcagctgaactgaggttctccaaagagtagttactgcttggccggaagcctttaccattactgcccaggtttggactctcagggataatcttgaggttaaatcttgggagttgtcattgctgtgttttgttctgttttgttttgttttcagcaagggagagtgactagtcaggtccggaacacttaccaggaaaccggaatcattcacgttgctgattcccttttcttggctattctaacaagaattcttaacctg

SEQ ID NO: 71262 - DNA, 614 bp, Homo sapiens
cttgagcccagaagttcaaggttgcagtgagctgtgatcacaccactgcatccctgcctgggtgacagagcaagaccttgtctgtaagaaaaaaataaaaagtaaaaaacgaaaataaattcaattacatttcttcattctatataaacataaaatgaaagagaagtggtagacagttcccacataatttcatttggcakcaaaagtaaatatatggtgctcacttcagcagcacatacactaaaaccataacagttcagagaggactagcatgcccctgcagaaggatgacacacatttgcagtgttacatattttctttagaaaagtaaatatggctgggtgcagtggctcacccctgtaatcccagcactttagaaggccaaggcgggtggataacctgaggtcaggagtttgagaccagcctggccaacatggtgaaaccccatccctacaaaaatacaaaaaaaaattagccgggcatcatggcgggggcctgtaatcccagctactcgggaggctgaggcgggagaactgcttgaacctgggaggcggaggttgcagtgagccgagatcgcaccattgcattcccgcctgagtgacagagcaagactc

SEQ ID NO: 71263 - DNA, 716 bp, Homo sapiens
caggcggatcacttgaggtcaggagtttgagaccagcctggccaacatggcaaaaccctgtctctactaaaaattcagaaaagtagttggacgtggtggttcacgcctgtaatctcagttactcaggaggctgagtcatgagaattgcttgaaccagggaggcaaaggttgcaatgaggtragattgtgtcactgcattccagcctggagcaagactctgtctcaaaaacaacaatcatggtctttcttgatcccaaacccagcagctggccattatcacattctccccctcactgctgaaccacatcaccatcagctctgttactcactggtcacaggaacttgtgtgagtcccttcacctctctgaacctccacatccacagttgtaaaataggcaaactactgtaccaggctgtttgttcattcgacagtcattgactgaacccagagccatacttacggtgaaactattaaagcttcctgttcagggcctctccttcacacagggaagggcctagtaagcatctcacttttcttaaaaaaagttcccagccccacaaaacctgggcctgcccctgctaactgtggtgtgtcagcatcatgccaagctctggatgtaggacaagataggaacaaaacggccaggggagttccccggcctggtgcggtggctcacacctgtaatcccagcatgctgggaggccaagatgagagg

SEQ ID NO: 71264 - DNA, 487 bp, Homo sapiens
gaattctcattatttcagtcactgaaaaatgctggggtgctgaaaatctcaagtgacccagttacagtagtagtgttgcaggcaaacccccaaatttaggttcagctcacgaggccaattgggttcttggcttcacacgagaaagaattcaagagcaagccaacaggctgggagcagtggctcaygcctgtaatcccaacactttgggaggctgaggcgggtgcatcatctgaaagtcaggagttcgagaccagcctggccagcatggcgaaaccccatctctactaaaaatacaaaaattagccaggcatggtggcgcgtgcctgtaaccccaacaactcgggaggctgaggcagaagaattgcttgaacccaggaggcagaggttgcagtaagccgagagggcgccactgcactccagcctaggcaaaagagggagatgccgtcttaaaaaaataataaaaaaagagcaagccgacagagtaaag

SEQ ID NO: 71265 - DNA, 741 bp, Homo sapiens
agttgttagctatacaaagacattggcagcctgaacttagacactatatcgtttgatacttgttaaattcaagagaccaattaagttaaagagcaggcttgaaattatatataaaaaactgcttagaaaagttgaacattatagaattgttagcgatttatcatttttaccttcattttttcatcgacatcctgttgtacttgccatgatccttttcttttttaaaaagtcaggcttattaattataacttacatacagtacaattcacacatttttatttgtacagttctgtgcattttaacaaacatatataattgtgtaactatcatatcatcaaagtgcagaatattcctatcatccaagaaatttctttcaactttatagtcagtcatgtattcccatctcacccccatccctggtaactgctaacctgtttttatgccctagagttttgtgtttttcagaatgttttatacatggaatcatatgatatgcaacctttttattatactttttataatattccaggatgttatataaatggaatcgtgtagcatgtagctttgtccacttaacataaggatctcgagattcatccmtgctgtcgagtatatcagtagttgattcttttcttttgcagtttagcattccattggatgtaccacaatttgtttaacattcatcagctggtggatatttggattgtttctattttgtctgttaagaataaggctgctata

SEQ ID NO: 71266 - DNA, 1495 bp, Homo sapiens
aaattcagtaccaaaacccttaaccactttgcagggggttgtgtccagaccaactcttgcaaagtcttaaccctgaaacctcctagccatagtttcccaagccgttccccctcaatcattgccttgccttggaactggccaattaatatgggtgcattttgcactaatagctccagacttccccctcttgcatctgccacctcagattattgtcagaggcgctaaggaggatgctctgtgaaataatatttactcttatttctctatcaatggctgtctgaaggagcatttcaatagtaccctcttgggtagaggcaaggaaamaggcaagtgtgtcccggtttctgctcctaacaaatttcccttctctcttctgttaaagtccttaagtgcctgatcacccattttaaccaccaaatattaactaaaatagcctcctcattcctgtcttcatttattagagcagttaaatctgtattcgtccttttaagtacgttgcttttatgtagtctcgtctgggttctaagatttcaaccatcctaagtcgtgcctttctttccctctttctccctgaagcccttgtaattttcctatttgccatttccaagctaagacctgtctccagggcaacggtcccctgctcactagtgagtcctcagcccctgccccctcagcaaagacccttcgactttttatgtgcaaattggattttcagaacctaatgctccgggtgtaggctgattgtatttttttttcctttttctttttcttctttgcctttggcattgtaattatttaattttttcaactgcttcagtcgaagaagctatattgccaatttaattctcccacttcactccacctgcctcattttctgtgctttaaaagcctctatgataatcaagacttattgattaaaatttccagagggccccaaacaggagagacagacacgggagtatctttggacctcttgtggtcaggctgcaggtttcgtgctgatggccagaagctgttcgttcagcccatctttgaatagagtcatcctggggtaattttcctgtcatcctagaatgcatgagaggagcaccccgcctgttcttcagtggttcctggtccctcggatgatgtagtctgtgaggaagtttttttctggccagtaatgaaaggaaaaaaaataaggccaggtgccagtgaatgaactttttctggggaagggtagtcatttctattttgtccttctcgcttttgtggtattaaaatgtctttttatttttatggccctttcttgagctcttgtgttttattatacctgtgaactcgaaacctgtgggttttatctctctcttccaccaattctgaaactaaaagctggttcactagagctggttttaagatgaacttcccctgaccccagaaatgaatctgcctctccaagaacactagattcctactcctaccaagagatgctagtccagacctcaagccagggcag

SEQ ID NO: 71267 - DNA, 1495 bp, Homo sapiens
aaattcagtaccaaaacccttaaccactttgcagggggttgtgtccagaccaactcttgcaaagtcttaaccctgaaacctcctagccatagtttcccaagccgttccccctcaatcattgccttgccttggaactggccaattaatatgggtgcattttgcactaatagctccagacttccccctcttgcatctgccacctcagattattgtcagaggcgctaaggaggatgctctgtgaaataatatttactcttatttctctatcaatggctgtctgaaggagcatttcaatagtaccctcttgggtagaggcaaggaaacaggcaagtgtgtcccggtttctgctcctaacaaatttcccttctctcttctgttaaagtccttaagtgcctgatcacccattttaaccaccaaatattaactaaaatagcctcctcattcctgtcttcatttattagagcagttaaatctgtattcgtccttttaagtacgttgcttttatgtagtctcgtctgggttctaagatttcaaccatcctaagtcgtgcctttctttccctctttctccctgaagcccttgtaattttcctatttgccatttccaagctaagacctgtctccagggcaacggtcccctgctcactagtgagtcctcagcccctgccccctcagcaaagacccttcgactttttatgtgcaaattggattttcagaacctaatgctccgggtgtaggctgattgtatttttttttcctttttctttttcttctttgcctttggcattgtaattatttaattttttcaactgcttcagtcgaagaagctatattgccaatttaattctcccacttcactccacctgcctcattttctgtgctttaaaagcctctatgataatcaagacttattgattaaaatttccagagggccccaaacaggagagacagacacgggagtatctttggacctcttgtggtcaggctgcaggtttcgtgctgatggccagaagctgttcgttcagcccatctttgaatagagtcatcctggggtaattttcctgtcatcctagaatgcatgagaggagcaccccgcctgttcttcagtggttcctggtccctcggatgatgtagtctgtgaggaagtttttttctggccagtaatgaaaggaaaaaaaataaggccaggtgccagtgaatgaactttttctggggaagggtagtcatttctattttgtccttctcgcttttgtggtattaaaatgtctttttatttttatggccctttcttgagctcttgtgttttattatacctgtgaactcgaaacctgtgggttttatctctctcttccaccaattctgaarctaaaagctggttcactagagctggttttaagatgaacttcccctgaccccagaaatgaatctgcctctccaagaacactagattcctactcctaccaagagatgctagtccagacctcaagccagggcag

SEQ ID NO: 71268 - DNA, 573 bp, Homo sapiens
atttgccctgatgtgatcattacacattgtatacctgtatcaaaatatcccatataccccagaaatatatacacctactacgtacccacaaaaattaaaaattacaaaaaaacctgtatcccaaatctgtwtgtataggaaagagcatagtctagggttcagtactatctgctgtttcaggcatccgctgaggggctttgggacatcacacccccgtccccatctcctgcgtagaaagagggtctctactggctgagagattctctggctctctgtggtcacctacaggattgtgtggaaggacatggagtaatgcagctctctctctttccttggtgaacaaggtggacttctggcgtggcccagccaggcccagcctccctgtggatatgagagttcctttctctgaactgaaagacatcaaagcttatctggagtctcatggacttgcttacagcatcatgataaaggacatccaggtgaagccctgccccagctgggaccctgccttccgccttcctttctggttggggcccaacatggaggagatgttctcggggctaaaagtggaca

SEQ ID NO: 71269 - DNA, 1037 bp, Homo sapiens
ctgtataaattaattatatattctgaagattttgcctttagggatagaaatcacccacttttcatttgccacatccttcccagcgtctttggtacatggttctgctccctygtgtttccatccaccccactccttcccattctcctgttgagaccacagctcctaggctttagcttcccttcttcagcttggtgatcctgatgcaagtgatattacaattagcagctagcatgactacataagatatcccaacttgtttcaaagcaagaatctcccttttggcctggccacagtggctcacgcctgtaatcccagcactttgggaggctgaggtgggcagatcatgaagtcaggagtccaagaccagcctggccaacatggtgaaaccccatctctactaaaaatacaaaaaattagccggtcatgggggcgcatgcctgtaatcccaactactcaggagactgaggcaggagaatcccttgaattcaggaggtggaggttgcagtgagctgagattgcaccactgtagtgtagcctgggtgacagagggagactccatctcaaaaaaaaattaaaatatatttaaaaataataaatgcttgtgaaatggagacatgaaatttgttgtccatctcaaaaaaaaaaaaaaaaaaaaaaaaaagaaagaaagaaagaaaaaagaatctccctttgtttcttccatatcacttcaggtgtgaatgtggagcagggggttttcccacagactctgctggggaagtgagtggattggggctggagtgaggatggcagcttctctctctagcagccaggccaggtttcaagaagcatccagctctgttgacttgagtcttttccatataaaatggcctgaaggccaaaaatgccttttttaaaaaaaaagaggaacattgatggaattttcatcttggacttttattttattattatttttgctatcaacattctaaaaataaaaataaaaagaatgagggctgggcacagtggctcacacctgtaatcccagcattttggga

SEQ ID NO: 71270 - DNA, 1037 bp, Homo sapiens
ctgtataaattaattatatattctgaagattttgcctttagggatagaaatcacccacttttcatttgccacatccttcccagcgtctttggtacatggttctgctccctcgtgtttccatccaccccactccttcccattctcctgttgagaccacagctcctaggctttagcttcccttcttcagcttggtgatcctgatgcaagtgatattacaattagcagctagcatgactacataagatatcccaacttgtttcaaagcaagaatctcccttttggcctggccacagtggctcacgcctgtaatcccagcactttgggaggctgaggtgggcagatcatgaagtcaggagtccaagaccagcctggccaacatggtgaaaccccatctctactaaaaatacaaaaaattagccggtcatgggggcgcatgcctgtaatcccaactactcaggagactgaggcaggagaatcccttgaattcaggaggtggaggttgcagtgagctgagattgcaccactgtagtgtagcctgggtgacagagggagactccatctcaaaaaaaaattaaaatatatttaaaaataataaatgcttgtgaaatggagacatgaaatttgttgtccatctcaaaaaaaaaaaaaaaaaaaaaaaaaagaaagaaagaaagaaaaaagaatctccctttgtttcttccatatcacttcaggtgtgaatgtggagcagggggttttcccacagactctgctggggaagtgagtggattggggctggagtgaggatggcagcttctctctctagcagccaggccaggtttcaagaagcatccagctctgttgacttgagtcttttccatataaaatggcctgaaggccaaaaatgccttttttwaaaaaaaagaggaacattgatggaattttcatcttggacttttattttattattatttttgctatcaacattctaaaaataaaaataaaaagaatgagggctgggcacagtggctcacacctgtaatcccagcattttggga

SEQ ID NO: 71271 - DNA, 1037 bp, Homo sapiens
ctgtataaattaattatatattctgaagattttgcctttagggatagaaatcacccacttttcatttgccacatccttcccagcgtctttggtacatggttctgctccctcgtgtttccatccaccccactccttcccattctcctgttgagaccacagctcctaggctttagcttcccttcttcagcttggtgatcctgatgcaagtgatattacaattagcagctagcatgactacataagatatcccaacttgtttcaaagcaagaatctcccttttggcctggccacagtggctcacgcctgtaatcccagcactttgggaggctgaggtgggcagatcatgaagtcaggagtccaagaccagcctggccaacatggtgaaaccccatctctactaaaaatacaaaaaattagccggtcatgggggcgcatgcctgtaatcccaactactcaggagactgaggcaggagaatcccttgaattcaggaggtggaggttgcagtgagctgagattgcaccactgtagtgtagcctgggtgacagagggagactccatctcaaaaaaaaattaaaatatatttaaaaataataaatgcttgtgaaatggagacatgaaatttgttgtccatctcaaaaaaaaaaaaaaaaaaaaaaaaaagaaagaaagaaagaaaaaagaatctccctttgtttcttccatatcacttcaggtgtgaatgtggagcagggggttttcccacagactctgctggggaagtgagtggattggggctggagtgaggatggcagcttctctctctagcagccaggccaggtttcaagaagcatccagctctgttgacttgagtcttttccatataaaatggcctgaaggccaaaaatgccttttttawaaaaaaagaggaacattgatggaattttcatcttggacttttattttattattatttttgctatcaacattctaaaaataaaaataaaaagaatgagggctgggcacagtggctcacacctgtaatcccagcattttggga

SEQ ID NO: 71272 - DNA, 688 bp, Homo sapiens
acttgacatcaggtttctcatcaacaaagtggagtcaatgctggtcccacctcaaggggttgtttcccagcttgaatgataagggagttaacatgcatccaatgcaatgtatagtgtttttattttattttttattttttctcctgatggagacaatatgcataatactgtgagtcttgggcagacatccaggaaaatctggttgggaaagacctagagaattctgattaaaagaaagaattaatgattttcagctctgtcagctatgtgaattgtaactagtgtcaaaaacttaaagagaagtggtcaccatggtggaatttaatgcaataacaagacccccaaagagaagtgtgtcgttaaaaaaaagaaacattcttgacctgtaaatgaagctattgggtatggtgccctggcctctgcatgaccagattgatccatgcactgccacggaacttgccagggaagctcatgtcacaatatgctggcaaggatgagacttctcatgtagtcttcaccaccatataragaagttgtgaacacacagatgtgtgtgttaggggtgcataggaaatcacccctaaatgacctcatccttctggatggtcaagaattatcttctctcagcaggcttcgtgataaagtgtgcactacagacaaatgctggtaactaccatttaagggatcc

SEQ ID NO: 71273 - DNA, 688 bp, Homo sapiens
acttgacatcaggtttctcatcaacaaagtggagtcaatgctggtcccacctcaaggggttgtttcccagcttgaatgataagggagttaacatgcatccaatgcaatgtatagtgtttttattttattttttattttttctcctgatggagacaatatgcataatactgtgagtcttgggcagacatccaggaaaatctggttgggaaagacctagagaattctgattaaaagaaagaattaatgattttcagctctgtcagctatgtgaattgtaactagtgtcaaaaacttaaagagaagtggtcaccatggtggaatttaatgcaataacaagacccccaaagagaagtgtgtcgttaaaaaaaagaaacattcttgacctgtaaatgaagctattgggtatggtgccctggcctctgcatgaccagattgatccatgcactgccacggaacttgccagggaagctcatgtcacaatatgctggcaaggatgagacttctcatgtagtcttcaccaccatatagagaagttgtgaacacacagatgtgtgtgttagrggtgcataggaaatcacccctaaatgacctcatccttctggatggtcaagaattatcttctctcagcaggcttcgtgataaagtgtgcactacagacaaatgctggtaactaccatttaagggatcc

SEQ ID NO: 71274 - DNA, 1109 bp, Homo sapiens
aatcctactaaatcagaaaatctctcagcaaacaggactaaataagtatttttattatcctcatgcctctaaaactttccttcaaaactgtttgctacttcaaaacttgctaaaatattgtctgaagaataatggtaattagagcaaaggagagtctcacttccatatatcatgataaatgaagagctctgagggaacagtgcaccataacaatattctgaagaagaggcaycactggtctttcaaaatgtaggcaaagtctccggggacatcatcccccattatcagaaataaacagaatgaaggtgaggctggaaccactattaaactcaatggaaagattaaagagcaggtgtgacatagctggagagaattagagaacagaaagatgcaaagaacgtaaccacaggaaacaaagaaagaaaagaaaactgaaaatatcaaagtggcgttaaaagacataaatgaccaaaggaaaatatctggcacaagattaaatgtagctctagaaagagaagggacagagaatggaaaatagctgtaaatattcttgaaccaataaaagacatggcttcacagatccaggaaaaccaaaagagcccaaacaagatacataaaaagaaatcaacatcactgtaaacaccaaaaaccaaacagaagaactagaaaatagactaagagataagacaggacaaaacagatgagcaggctttgacagcaacagtaaaagacagagaggaatattatctctatagtgcctgaaaaaaatctgttaacctaaaattgtcaactagagaaaaataaacaatttatagataaaaaccaaagtaatttaccaccagaagacttgttctaaagaaatgttcctacaagcacaatctaacatacaagaggtcaccataatacaacacatacaaaagtaatttttttaaggactacatatgagacatttactggtgtggtgaaaaactggtgtgtgcatattgttgaatttctaaaaagtcacactttaaataccttcaataacaaaagtgtcatttcaggaagggagtgaccaaagctaatgaagtccttaagttgggggaaggaaaatattttaaatcctgaaa

SEQ ID NO: 71275 - DNA, 1109 bp, Homo sapiens
aatcctactaaatcagaaaatctctcagcaaacaggactaaataagtatttttattatcctcatgcctctaaaactttccttcaaaactgtttgctacttcaaaacttgctaaaatattgtctgaagaataatggtaattagagcaaaggagagtctcacttccatatatcatgataaatgaagagctctgagggaacagtgcaccataacaatattctgaagaagaggcaccactggtctttcaaaatgtaggcaaagtctccggggacatcatcccccattatcagaaataaacagaatgaaggtgaggctggaaccactattaaactcaatggaaagattaaagagcaggtgtgacatagctggagagaattagagaacagaaagatgcaaagaacgtaaccacaggaaacaaagaaagaaaagaaaactgaaaatatcaaagtggcgttaaaagacataaatgaccaaaggaaaatatctggcacaagattaaatgyagctctagaaagagaagggacagagaatggaaaatagctgtaaatattcttgaaccaataaaagacatggcttcacagatccaggaaaaccaaaagagcccaaacaagatacataaaaagaaatcaacatcactgtaaacaccaaaaaccaaacagaagaactagaaaatagactaagagataagacaggacaaaacagatgagcaggctttgacagcaacagtaaaagacagagaggaatattatctctatagtgcctgaaaaaaatctgttaacctaaaattgtcaactagagaaaaataaacaatttatagataaaaaccaaagtaatttaccaccagaagacttgttctaaagaaatgttcctacaagcacaatctaacatacaagaggtcaccataatacaacacatacaaaagtaatttttttaaggactacatatgagacatttactggtgtggtgaaaaactggtgtgtgcatattgttgaatttctaaaaagtcacactttaaataccttcaataacaaaagtgtcatttcaggaagggagtgaccaaagctaatgaagtccttaagttgggggaaggaaaatattttaaatcctgaaa

SEQ ID NO: 71276 - DNA, 536 bp, Homo sapiens
aatgcatgtgcgattgctaagggatacaggcataactctaaaattactgcttcataaaatagttccagtatattcttgtaagattttattttacagcaataaatacagaaatgctaaaaaccactgctgagcttctgtggaaagaataacatactgctagcaactaatcagcctctggatttcatatcactagagattataattataattataawtctagccaatgtccctgcttgttgatagttgctcccattaccatcacatcatgcctatcacaaagggcattctgtcccttaagtacttttgagtgaggccacaaagtttctttttgatctagagatgggatttttttcaaaagatactgataacaaactataggggggagaaaagcaaaaataaatcaactactacatcccacacacaccagaaaaaaagattaaaatatggcaaatgtaagaacataaaatatttaacataataagtctagccaattcaatttcagtttaattcaaattctgcacacctatttggtacca

SEQ ID NO: 71277 - DNA, 1255 bp, Homo sapiens
taaaaggaaaacacgcagaagtcatttgtcacccccaaattaaaagaaacagcagaatttactggtatttattagatacttgccatacataaatactgtgctccttggtgtaagtaatttaaattgacaatccttgccttgtgggagttttattctaacataagtgacctaaattcaaccaacactcttcacaactgcagccaccccctacccacacaaactgtcatagtctgctcaaggctgccataataaaatatcaaagattgggtggcttaaataacagaaatttattttctcacagttctggaggctgaaaagtccaagatcaaagttctggtagggttttgtttctcatgggggcttctctcctttgscttgcagatgccaccttctcactgtgtcctcacttggtggggagggggagaggaaggggtagggacacagtcctatgggattagggccccatgcttatgcttatgacttcattagccttaatgatctcgtaaagaccctatttccagctggccacattagggtctagggcttcaacacatggattttggcaggacccaatcagtccacagcatgtgtggccatgcatgtgcgtgcacacacacacacacacacacacacacacacacacacacggagtacactaagccaagagctaatgctgtggtgggagccctggttatgaaatatttacattgaggataacctgagtcaggcgttgtggtgccaaccgtctgctaccaggaggagagatcagcaacacctcttttcagttagctagaaaaggctttctaaaggaattgggatttccagagatctttgcagggcaaaaaagaaagatctgagtgacagcagataggatgggaggagcagagcggagcagcagcatgatcacagtcagaagggggaaagagagagagagagagagaggcgaaggaggccagctgggagggttcttgttttccttttgcttttctcagatggtttctgaagtggttttcctttgtgttcctgacatagtaagctaatcagtgtcgtctgtgtgtaggtgttcattttccctacttctgctcacttctggaggctgctccccggggttctgaggcatctgcttcttgttcttattttgctccagtctctacccaatctgactgatttactcattcttctttactcctcctgtttccatctcttttacttaccacccctaatttattcactcagtagcaccctggcccctgcc

SEQ ID NO: 71278 - DNA, 665 bp, Homo sapiens
gttctaatacctcatatattctcactttttactactttatccactctttactgcttagacccttcaaatcaatatatccaagtgcctacyagatatacagacttagatacttcaaaggcatcaaactcattctattcaagatcaatttttctcttctgccagcattttctctctctttactagacacctctgtggaaataaacagagcatgcaaagaagaataggaaaaggccactgattcagagcatgctagagcaagggagtcagccaccatcacttgtgtctggcagagacttgtgggcaggcagaggaaggagaaagctttaccataaaaaacagaaaggctttagaggtagcctgattataggctgttggaatggggaagctgtagacaggatagctagaagtggacaccctgtgttattggttaggggcatatatttgactgttcaaagttgatcctatcttgaaaatgggggaaaaaatagagatgctgccagttattaatcaagtcctggctgtttagagcctattgttacaaagatattgtttggcttcctggactggttgccagagacagtagtttgacttcctggactggttactctacatagcaggttggcttcctggggtggttactgcagattgtgggtcagagttcattt

SEQ ID NO: 71279 - DNA, 665 bp, Homo sapiens
gttctaatacctcatatattctcactttttactactttatccactctttactgcttagacccttcaaatcaatatatccaagtgcctaccagatatacagacttagatacttcaaaggcatcaaactcattctattcaagatcaatttttctcttstgccagcattttctctctctttactagacacctctgtggaaataaacagagcatgcaaagaagaataggaaaaggccactgattcagagcatgctagagcaagggagtcagccaccatcacttgtgtctggcagagacttgtgggcaggcagaggaaggagaaagctttaccataaaaaacagaaaggctttagaggtagcctgattataggctgttggaatggggaagctgtagacaggatagctagaagtggacaccctgtgttattggttaggggcatatatttgactgttcaaagttgatcctatcttgaaaatgggggaaaaaatagagatgctgccagttattaatcaagtcctggctgtttagagcctattgttacaaagatattgtttggcttcctggactggttgccagagacagtagtttgacttcctggactggttactctacatagcaggttggcttcctggggtggttactgcagattgtgggtcagagttcattt

SEQ ID NO: 71280 - DNA, 665 bp, Homo sapiens
gttctaatacctcatatattctcactttttactactttatccactctttactgcttagacccttcaaatcaatatatccaagtgcctaccagatatacagacttagatacttcaaaggcatcaaactcattctattcaagatcaatttttctcttctgccagcattttctctctctttactagacacctctgtggaaataaacagagcatgcaaagaagaataggaaaaggccactgattcagagcrtgctagagcaagggagtcagccaccatcacttgtgtctggcagagacttgtgggcaggcagaggaaggagaaagctttaccataaaaaacagaaaggctttagaggtagcctgattataggctgttggaatggggaagctgtagacaggatagctagaagtggacaccctgtgttattggttaggggcatatatttgactgttcaaagttgatcctatcttgaaaatgggggaaaaaatagagatgctgccagttattaatcaagtcctggctgtttagagcctattgttacaaagatattgtttggcttcctggactggttgccagagacagtagtttgacttcctggactggttactctacatagcaggttggcttcctggggtggttactgcagattgtgggtcagagttcattt

SEQ ID NO: 71281 - DNA, 665 bp, Homo sapiens
gttctaatacctcatatattctcactttttactactttatccactctttactgcttagacccttcaaatcaatatatccaagtgcctaccagatatacagacttagatacttcaaaggcatcaaactcattctattcaagatcaatttttctcttctgccagcattttctctctctttactagacacctctgtggaaataaacagagcatgcaaagaagaataggaaaaggccactgattcagagcatgctagagcaagggagtcagccaccatcacttgtgtctggcagagacttgtgggcaggcagaggaaggagaaagctttaccataaaawacagaaaggctttagaggtagcctgattataggctgttggaatggggaagctgtagacaggatagctagaagtggacaccctgtgttattggttaggggcatatatttgactgttcaaagttgatcctatcttgaaaatgggggaaaaaatagagatgctgccagttattaatcaagtcctggctgtttagagcctattgttacaaagatattgtttggcttcctggactggttgccagagacagtagtttgacttcctggactggttactctacatagcaggttggcttcctggggtggttactgcagattgtgggtcagagttcattt

SEQ ID NO: 71282 - DNA, 1587 bp, Homo sapiens
tgagtttttcattttacttgattttaattaatttacatttacatttaaagtaaacatattcagcagtataggaatgcgtaatgtattatttatctcttccagaaagttctacagtggaactctatcatatgtgcattaaactgaattgaaatcatacgactcagcaaaatcaacataacaactgatgacaacaaaaacagccatataaacaaaaactgttgggcattttaaaaatacagaatggctcaaaacttaaatgcttgatctagtgcttaagtgaagagagtaatgtctattctatccctttattcaattttcaaaaacaattttgattttatgtaatttttgtatttcctgctgaattttgaacacaggctctgcgtaagatgcaacttctatgtggtctatttgatgtagatggtaattgaaacatatggagcatttagacaattctgcttcattcttccatttcttatgtctttttcctaaggtctctaaaatctattttattccccaatattccatgaatcaatatgccattacttttaatggcaaaaaccgcaattaattttgcaccaacctaatagaacttgtgaaaacaagttcaaagaggttctttctgtcatttttatcattctgagaatatagtcatatacatactataagatattgttaatctagtaatcgattgactaggartttccattaagtagtactgctgcacaccagtagaacaatgattaattctctgttggatcctggaatgtctttggaggtttcaaaacttgtaacactgtattaaagtattcatatatttaaaattatttaaaaattttattttatggataattaataaatcatgcatgtcatgtaaataattaaaaacattccaactatagtatacaacagtggttcccaaatgccagaccttggattagtgtactccttataatttattatcattgcacagaaaagtgagaaacataaagagataaaagatggtcttatattctgtaattatgttcctctaaattttttggtgttaaaatatctgttggtaaagtaagcaagcttatgtaagtcactgaaattctttggaatctcttggaaacactgctattgagcaagagttcttaaatttaagatttcttaaatttcttgagatttcaggctgtggtctagtgaatcagagcctagaaatgaacgcaaagcttgccactgattaaaatacatactaatgtttgagaaccacagatacagagctaagcatataggctttgaatccagatactcttaagtttgaaatcttgcctggttgttttctagctgtgtaacctaagaagccttcattgtctcacctgtaaaatggaagggctgttaagagcataaaaacactaatcattgtgaagtttctaacagcaattcgtctagaatagaaacctaagacagttagttccctaccactgcccttaccctgactatgctaggtgagcgtccactgtatactttcatatgtgtattttggtaggcagaattttaagatgggcctccaagattcccagccagtgattattcaatgatgtgaat

SEQ ID NO: 71283 - DNA, 1050 bp, Homo sapiens
ccaacatggtgaaaccctgtctctactaaaaatacaaaaattagccaggcgcggtggcgcatgcctgtaatcccagctactcaggaggctgaggcatgagaatgacttgaacccaggaggcagaggttgcagtgagcccagatcgtgccactgcactccagcctgggtgatgaagtgaaactctgtcaaaacagaaattattctctcgcagttctggaggctcaaagtcaggaatcaaactgttgaagcctcgaagggggatccttccttgrctctccggcgtctggaggctactggccatcctggtgttactcaaacaccaggggttccatctagggcctgccactcacctcacagaaagccaatcagtgagacaacgattcttgccaaggaagaaggctttaatcaggtgctgcagctgaggggatgggagggcttcatcccaggaatgcagggggtggttcaacataagaaaatccgttaacgtaatgtaccgcattagtagaacaaagggaaaaaaacagtcattccagctgacacagaaaaagcatctaagaaattctaacatttcatcattaaaacatagagaaaactatgaaacgaggggatctgcctcaacattataaaaggtatttgtgaaaaaaccacagttaccatcatacttagtggtgaaagactaaaagctttccccctaagttcaggaacaagacacagaggttcacctttaccactgctactcaatgttttttttttttgttttgttggttttgttgtgttttcgagaaggagtcttgctctgtcgcccaggctggaatgcagtggcgtgatctcggctcactgcagcctctgcccccggggttcaagcaattctcctgcctcagcctccccagtagctgggactacaggtgcgcactgccacgcctggctaatttttgtattcttagtagagacagggtttcaccatgttggccaggatgctcttgagctcctgaccttgttatctgcctgcctcggcctcccaaaatgctggaattacagatgtgagccacc

SEQ ID NO: 71284 - DNA, 610 bp, Homo sapiens
tcctccctcctgggcctgggcgtgggctcgcaaaacgctgggattcccggattacaggcgggcgcaccacaccaggagcaaacacttccggttttaaaaattcagtttgtgattggctgtcattcagtattatgctaattaagcatgcccggttttaaacctcttaaaacaacttttaaaattacctttccacctaaaacgttaaaatttgtcaagtgataatattcgacaagctgttattgccaaactattttcctatttgtttcctaatggcatcggaactagcgaaagtttctcgccatcagttaaaagtttgcggcagatgtagacctagcagaggtgtgcgaggaggccgttaaggctatactttcagggatcatttctatagtgtgttactagagaagtttctytgaacgtgtagagcaccgaaaaccccgaggaagagaggtagcgttttctcctgagcgtgaagccggctttctggcgttgcttggctgcaactgccgtcagccattgatgatcgttcttctctccgtattggggagtgagagggagagaacgcggtctgagtggtttttccttcttgatggctcaatgacagagactagct

SEQ ID NO: 71285 - DNA, 567 bp, Homo sapiens
tcactcaagtaggcatatcagaaagggaggagactttttttttttacagttgctgatcccagccagycagtgaagtgtccatcacctccaagaagttcccctttttctcactgcagatgtaacctacaagtcagcaaagattagggcccaatattctccacgtctgacctgctctgcatctcgcatatcaggttattgtttctgctagaaaattttagagtgtcttgccttatcagggaaatcctgagtcttcatataacttctgttaggagaggttggcaccaaccaatattttcctgtccgccacaggaggttctattgtatctcatgtgaggttgattggtggggagggatattgggcattcataaatctaaaacaaagtaattgaatgtttaccgcatattaaatcttgtggtaggtactgggaccaaaagatgaaaaaagcgaaataacatttgtgattcctttgatggtaatgaacagaaagcaaccctggcaaatataagccaaatgggcaattaataggaaggatcttggggtggtttccaggatcaacagaaagggag

SEQ ID NO: 71286 - DNA, 567 bp, Homo sapiens
tcactcaagtaggcatatcagaaagggaggagactttttttttttacagttgctgatcccagccagtcagtgaagtgtccatcacctccaagaagttcccctttttctcactgcagatgtaacctacaagtcagcaaagattagggcccaatattctccacgtctgacctgctytgcatctcgcatatcaggttattgtttctgctagaaaattttagagtgtcttgccttatcagggaaatcctgagtcttcatataacttctgttaggagaggttggcaccaaccaatattttcctgtccgccacaggaggttctattgtatctcatgtgaggttgattggtggggagggatattgggcattcataaatctaaaacaaagtaattgaatgtttaccgcatattaaatcttgtggtaggtactgggaccaaaagatgaaaaaagcgaaataacatttgtgattcctttgatggtaatgaacagaaagcaaccctggcaaatataagccaaatgggcaattaataggaaggatcttggggtggtttccaggatcaacagaaagggag

SEQ ID NO: 71287 - DNA, 567 bp, Homo sapiens
tcactcaagtaggcatatcagaaagggaggagactttttttttttacagttgctgatcccagccagtcagtgaagtgtccatcacctccaagaagttcccctttttctcactgcagatgtaacctacaagtcagcaaagattagggcccaatattctccacgtctgacctgctctgcatctcgcatatcaggttattgtttctgctagaaaattttagagtgtcttgccttatcagggaaatcctgagtcttcatataacttctgttaggagaggttggcaccaaccaatattttyctgtccgccacaggaggttctattgtatctcatgtgaggttgattggtggggagggatattgggcattcataaatctaaaacaaagtaattgaatgtttaccgcatattaaatcttgtggtaggtactgggaccaaaagatgaaaaaagcgaaataacatttgtgattcctttgatggtaatgaacagaaagcaaccctggcaaatataagccaaatgggcaattaataggaaggatcttggggtggtttccaggatcaacagaaagggag

SEQ ID NO: 71288 - DNA, 616 bp, Homo sapiens
tgtggagcttagctctaacgagctccttcgctcagaaaaaggaatctggccaggcacggtggctcacgcctgtaatcccaggactttgggaggccaaggcgggtggatcacctgaggtcagaagtttaagaccagcctggccaacatggcaaaaccccgtctctactaaaaatacaaaaaaattagctgggcatggtggcacgcacctgtaatcccagctactcaggaggctgaggcaggagaatcactagaatccgggaggcggaggttgcagtgagctgagatcacaccattgcrctccagcctggtaaaaacaagagcaaaactcagtctcaaaaaaaaaaaaaaaaaagaaaagaaaaggaaaaaagaatctttttcccacatccaagccaccagctggccccagagtgggcagacaactacctggaattctgaaactgatgtcttctggttaacagggaggtcacttgggtgaggaggaagcagcatgatcttattctcatcaaccctcactaaagccaccccaaaataaacatctaaacataaagtcgtacagatgccagacaggtatttgccatgcttaaaacaatgcccagtcctgcttcccagcact
